United States Patent Application Publication US 2026/0103690 A1 - sequence listing, part 11

SEQ ID NO: 36705 - DNA, 50 bp, unidentified
  source 1..50: mol_type = unassigned DNA; note = donor_a1d52d2
  misc_feature 1..22: note = RE
  misc_feature 23..25: note = Core
  misc_feature 26..50: note = LE
gccaacatggagccgtccacacatgatgctgtagacggcgcctccaccgg

SEQ ID NO: 36706 - DNA, 50 bp, unidentified
  source 1..50: mol_type = unassigned DNA; note = donor_a1dbf50
  misc_feature 1..24: note = RE
  misc_feature 25: note = Core
  misc_feature 26..50: note = LE
cccggcctgagcaagacagttgctcttgtgtctggcttttgccctagggt

SEQ ID NO: 36707 - DNA, 50 bp, unidentified
  source 1..50: mol_type = unassigned DNA; note = donor_a1dc6e5
  misc_feature 1..24: note = RE
  misc_feature 25: note = Core
  misc_feature 26..50: note = LE
ggggcttgactttttctttgcaggcctgttactatatatttgccccttga

SEQ ID NO: 36708 - DNA, 50 bp, unidentified
  source 1..50: mol_type = unassigned DNA; note = donor_a1e7554
  misc_feature 1..23: note = RE
  misc_feature 24..25: note = Core
  misc_feature 26..50: note = LE
gctgcttgacaaatagagaggcaccgacttatgttcgtgagagcggcacg

SEQ ID NO: 36709 - DNA, 50 bp, unidentified
  source 1..50: mol_type = unassigned DNA; note = donor_a1e7d6b
  misc_feature 1..19: note = RE
  misc_feature 20..25: note = Core
  misc_feature 26..50: note = LE
cttgacacgctcattgagattccttagggttgtaggggtctgggattgga

SEQ ID NO: 36710 - DNA, 50 bp, unidentified
  source 1..50: mol_type = unassigned DNA; note = donor_a1f1dd0
  misc_feature 1..22: note = RE
  misc_feature 23..25: note = Core
  misc_feature 26..50: note = LE
attattgacaaactattagctggttcgtattataaggtcagccagatatt

SEQ ID NO: 36711 - DNA, 50 bp, unidentified
  source 1..50: mol_type = unassigned DNA; note = donor_a1f741c
  misc_feature 1..24: note = RE
  misc_feature 25: note = Core
  misc_feature 26..50: note = LE
cttgcaaacggggcgggccatacgtatgggatggcccgcccctcttcccc

SEQ ID NO: 36712 - DNA, 50 bp, unidentified; identical to SEQ ID NO: 33315
  source 1..50: mol_type = unassigned DNA; note = donor_a1fa572
  misc_feature 1..23: note = RE
  misc_feature 24..25: note = Core
  misc_feature 26..50: note = LE

SEQ ID NO: 36713 - DNA, 50 bp, unidentified
  source 1..50: mol_type = unassigned DNA; note = donor_a1ff7ce
  misc_feature 1..24: note = RE
  misc_feature 25: note = Core
  misc_feature 26..50: note = LE
cttgcagacggggcgggccatacgtatggaatggcccgcccctttccccc

SEQ ID NO: 36714 - DNA, 50 bp, unidentified
  source 1..50: mol_type = unassigned DNA; note = donor_a1ff9c5
  misc_feature 1..23: note = RE
  misc_feature 24..25: note = Core
  misc_feature 26..50: note = LE
tgcaaacgggatgcgttcatataaaatgtaatgaacgcatcccaccactt

SEQ ID NO: 36715 - DNA, 50 bp, unidentified
  source 1..50: mol_type = unassigned DNA; note = donor_a207568
  misc_feature 1..23: note = RE
  misc_feature 24..25: note = Core
  misc_feature 26..50: note = LE
tcacttgacaccccataggaagtcttatatgatggaccggggttcatgga

SEQ ID NO: 36716 - DNA, 50 bp, unidentified; identical to SEQ ID NO: 34640
  source 1..50: mol_type = unassigned DNA; note = donor_a211d83
  misc_feature 1..24: note = RE
  misc_feature 25: note = Core
  misc_feature 26..50: note = LE

SEQ ID NO: 36717 - DNA, 50 bp, unidentified
  source 1..50: mol_type = unassigned DNA; note = donor_a2170ae
  misc_feature 1..24: note = RE
  misc_feature 25: note = Core
  misc_feature 26..50: note = LE
ttgcaaaaacgggagtgcccatagaatgagatggtcactccctcttcctg

SEQ ID NO: 36718 - DNA, 50 bp, unidentified
  source 1..50: mol_type = unassigned DNA; note = donor_a21c135
  misc_feature 1..23: note = RE
  misc_feature 24..25: note = Core
  misc_feature 26..50: note = LE
agcttgacgatccgcattgggaagctctaccttcgttctcgggcttgcct

SEQ ID NO: 36719 - DNA, 50 bp, unidentified
  source 1..50: mol_type = unassigned DNA; note = donor_a21d7f2
  misc_feature 1..23: note = RE
  misc_feature 24..25: note = Core
  misc_feature 26..50: note = LE
gacgagttagaggggtgggatgtctaatggggatcgaccacctcggccac

SEQ ID NO: 36720 - DNA, 50 bp, unidentified
  source 1..50: mol_type = unassigned DNA; note = donor_a21f31e
  misc_feature 1..23: note = RE
  misc_feature 24..25: note = Core
  misc_feature 26..50: note = LE
agatcggtggagggagatggtatcttgtatctctctcgatatcctgttta

SEQ ID NO: 36721 - DNA, 50 bp, unidentified
  source 1..50: mol_type = unassigned DNA; note = donor_a230c8a
  misc_feature 1..24: note = RE
  misc_feature 25: note = Core
  misc_feature 26..50: note = LE
cttgccgacggggcgggccatacgtatggatggcccgccccttgtatgaa

SEQ ID NO: 36722 - DNA, 50 bp, unidentified
  source 1..50: mol_type = unassigned DNA; note = donor_a232e52
  misc_feature 1..24: note = RE
  misc_feature 25: note = Core
  misc_feature 26..50: note = LE
tgacctcgaagggaagcccttgtagaatggaagggacttccccgtcccga

SEQ ID NO: 36723 - DNA, 50 bp, unidentified
  source 1..50: mol_type = unassigned DNA; note = donor_a23417b
  misc_feature 1..23: note = RE
  misc_feature 24..25: note = Core
  misc_feature 26..50: note = LE
aaatttgcagattaacatagaacatggtaagtttgcactagaataattaa

SEQ ID NO: 36724 - DNA, 50 bp, unidentified
  source 1..50: mol_type = unassigned DNA; note = donor_a235e54
  misc_feature 1..23: note = RE
  misc_feature 24..25: note = Core
  misc_feature 26..50: note = LE
tcgcttgacgggcaagacggtatcttgtatcttcgtcttcgtgatggtta

SEQ ID NO: 36725 - DNA, 50 bp, unidentified
  source 1..50: mol_type = unassigned DNA; note = donor_a239556
  misc_feature 1..23: note = RE
  misc_feature 24..25: note = Core
  misc_feature 26..50: note = LE
gcccgaacggagccgtccacacatgatgcggtggacggcccccaccgaac

SEQ ID NO: 36726 - DNA, 50 bp, unidentified
  source 1..50: mol_type = unassigned DNA; note = donor_a23c9ad
  misc_feature 1..23: note = RE
  misc_feature 24..25: note = Core
  misc_feature 26..50: note = LE
tactcggttctgagagatggtatcttgtatgttgaagctttggatgatta

SEQ ID NO: 36727 - DNA, 50 bp, unidentified
  source 1..50: mol_type = unassigned DNA; note = donor_a241a99
  misc_feature 1..24: note = RE
  misc_feature 25: note = Core
  misc_feature 26..50: note = LE
tgcaaaaggcgtcgggtccatacatactgagatggacccgacgcctccct

SEQ ID NO: 36728 - DNA, 50 bp, unidentified
  source 1..50: mol_type = unassigned DNA; note = donor_a24241c
  misc_feature 1..23: note = RE
  misc_feature 24..25: note = Core
  misc_feature 26..50: note = LE
atgcttgacttttcatagctggtcttgtatgatgtttttagaagctataa

SEQ ID NO: 36729 - DNA, 50 bp, unidentified
  source 1..50: mol_type = unassigned DNA; note = donor_a2430f6
  misc_feature 1..23: note = RE
  misc_feature 24..25: note = Core
  misc_feature 26..50: note = LE
acccggaggttgacagagggtgtctgatggctctaccttcccttcgcacg

SEQ ID NO: 36730 - DNA, 50 bp, unidentified
  source 1..50: mol_type = unassigned DNA; note = donor_a243355
  misc_feature 1..23: note = RE
  misc_feature 24..25: note = Core
  misc_feature 26..50: note = LE
tcccttgacttttatttgcaggtctgatacaatataattgaccgaagaaa

SEQ ID NO: 36731 - DNA, 50 bp, unidentified
  source 1..50: mol_type = unassigned DNA; note = donor_a24e990
  misc_feature 1..23: note = RE
  misc_feature 24..25: note = Core
  misc_feature 26..50: note = LE
agacttgacttttaatagttagtctcgtattatataaacatagccttctt

SEQ ID NO: 36732 - DNA, 50 bp, unidentified
  source 1..50: mol_type = unassigned DNA; note = donor_a26cc71
  misc_feature 1..23: note = RE
  misc_feature 24..25: note = Core
  misc_feature 26..50: note = LE
tgacatcgaaaaacctgggatgtctaatggcttctgccgggtgggtttgg

SEQ ID NO: 36733 - DNA, 50 bp, unidentified
  source 1..50: mol_type = unassigned DNA; note = donor_a275a22
  misc_feature 1..23: note = RE
  misc_feature 24..25: note = Core
  misc_feature 26..50: note = LE
gaacttgacttttaatagttagtcttgtattatagagtagtagtttttag

SEQ ID NO: 36734 - DNA, 50 bp, unidentified
  source 1..50: mol_type = unassigned DNA; note = donor_a277cf9
  misc_feature 1..23: note = RE
  misc_feature 24..25: note = Core
  misc_feature 26..50: note = LE
cctattgacttttcctttgcagactattacaataagaattacggtaagag

SEQ ID NO: 36735 - DNA, 50 bp, unidentified; identical to SEQ ID NO: 30847
  source 1..50: mol_type = unassigned DNA; note = donor_a27e43e
  misc_feature 1..24: note = RE
  misc_feature 25: note = Core
  misc_feature 26..50: note = LE

SEQ ID NO: 36736 - DNA, 50 bp, unidentified; identical to SEQ ID NO: 36700
  source 1..50: mol_type = unassigned DNA; note = donor_a280c91
  misc_feature 1..23: note = RE
  misc_feature 24..25: note = Core
  misc_feature 26..50: note = LE

SEQ ID NO: 36737 - DNA, 50 bp, unidentified
  source 1..50: mol_type = unassigned DNA; note = donor_a28bcbd
  misc_feature 1..23: note = RE
  misc_feature 24..25: note = Core
  misc_feature 26..50: note = LE
gcttgactcggaacatagggacaccgttaccttgtgagggccccgatggt

SEQ ID NO: 36738 - DNA, 50 bp, unidentified; identical to SEQ ID NO: 33305
  source 1..50: mol_type = unassigned DNA; note = donor_a29df3c
  misc_feature 1..24: note = RE
  misc_feature 25: note = Core
  misc_feature 26..50: note = LE

SEQ ID NO: 36739 - DNA, 50 bp, unidentified
  source 1..50: mol_type = unassigned DNA; note = donor_a2a09f9
  misc_feature 1..21: note = RE
  misc_feature 22..25: note = Core
  misc_feature 26..50: note = LE
cttgacaaccacatagggacaccccgttacctttttcgtggttcctgatc

SEQ ID NO: 36740 - DNA, 50 bp, unidentified; identical to SEQ ID NO: 33719
  source 1..50: mol_type = unassigned DNA; note = donor_a2a19f4
  misc_feature 1..23: note = RE
  misc_feature 24..25: note = Core
  misc_feature 26..50: note = LE

SEQ ID NO: 36741 - DNA, 50 bp, unidentified
  source 1..50: mol_type = unassigned DNA; note = donor_a2a2a6a
  misc_feature 1..24: note = RE
  misc_feature 25: note = Core
  misc_feature 26..50: note = LE
tgcagtcacgcggcggaccatacataatgagatggtccgccgctgtaaac

SEQ ID NO: 36742 - DNA, 50 bp, unidentified
  source 1..50: mol_type = unassigned DNA; note = donor_a2a3602
  misc_feature 1..23: note = RE
  misc_feature 24..25: note = Core
  misc_feature 26..50: note = LE
tgacattcaaactccagggatgtctaatggttgttaacggggtcggcccg

SEQ ID NO: 36743 - DNA, 50 bp, unidentified
  source 1..50: mol_type = unassigned DNA; note = donor_a2a69a7
  misc_feature 1..22: note = RE
  misc_feature 23..25: note = Core
  misc_feature 26..50: note = LE
agaaaatcaaaagatattatagggagcattcctgtagtagtcaaaaatga

SEQ ID NO: 36744 - DNA, 50 bp, unidentified
  source 1..50: mol_type = unassigned DNA; note = donor_a2a7393
  misc_feature 1..19: note = RE
  misc_feature 20..25: note = Core
  misc_feature 26..50: note = LE
atttgggctattgcttgttgtattaaccctccatgcttaacaaagcacaa

SEQ ID NO: 36745 - DNA, 50 bp, unidentified
  source 1..50: mol_type = unassigned DNA; note = donor_a2ab710
  misc_feature 1..23: note = RE
  misc_feature 24..25: note = Core
  misc_feature 26..50: note = LE
atcgtttgcatatgtcatagaaatcctttagatttgtataaagaaaaaag

SEQ ID NO: 36746 - DNA, 50 bp, unidentified
  source 1..50: mol_type = unassigned DNA; note = donor_a2abd3c
  misc_feature 1..23: note = RE
  misc_feature 24..25: note = Core
  misc_feature 26..50: note = LE
ctacttgacggccaagacggtatcttgtatcttgctccctgggatggtta

SEQ ID NO: 36747 - DNA, 50 bp, unidentified
  source 1..50: mol_type = unassigned DNA; note = donor_a2b9f76
  misc_feature 1..21: note = RE
  misc_feature 22..25: note = Core
  misc_feature 26..50: note = LE
cccaaagggggccgtccatacatgatggggtggacggcctccggcggcat

SEQ ID NO: 36748 - DNA, 50 bp, unidentified
  source 1..50: mol_type = unassigned DNA; note = donor_a2ba378
  misc_feature 1..24: note = RE
  misc_feature 25: note = Core
  misc_feature 26..50: note = LE
agtattgacttatattagctggtatcgtattataaggtcaaccggaaata

SEQ ID NO: 36749 - DNA, 50 bp, unidentified; identical to SEQ ID NO: 31244
  source 1..50: mol_type = unassigned DNA; note = donor_a2bbfc5
  misc_feature 1..24: note = RE
  misc_feature 25: note = Core
  misc_feature 26..50: note = LE

SEQ ID NO: 36750 - DNA, 50 bp, unidentified
  source 1..50: mol_type = unassigned DNA; note = donor_a2bd322
  misc_feature 1..23: note = RE
  misc_feature 24..25: note = Core
  misc_feature 26..50: note = LE
gaccccaaacggccgattagagaagatggggtaatcggccggcccaactt

SEQ ID NO: 36751 - DNA, 50 bp, unidentified
  source 1..50: mol_type = unassigned DNA; note = donor_a2c58a2
  misc_feature 1..23: note = RE
  misc_feature 24..25: note = Core
  misc_feature 26..50: note = LE
ggcgcaacaagagcgattagacaacatggggtaatcgcgggagcgcgtcg

SEQ ID NO: 36752 - DNA, 50 bp, unidentified
  source 1..50: mol_type = unassigned DNA; note = donor_a2d679e
  misc_feature 1..23: note = RE
  misc_feature 24..25: note = Core
  misc_feature 26..50: note = LE
cctgttgtgctgcaccatagaatcttgtatggtttctctgcaggtccaaa

SEQ ID NO: 36753 - DNA, 50 bp, unidentified
  source 1..50: mol_type = unassigned DNA; note = donor_a2d772a
  misc_feature 1..23: note = RE
  misc_feature 24..25: note = Core
  misc_feature 26..50: note = LE
gctattgactttgcttaattggtctggtatactgttatcgatgaaataaa

SEQ ID NO: 36754 - DNA, 50 bp, unidentified
  source 1..50: mol_type = unassigned DNA; note = donor_a2dd961
  misc_feature 1..24: note = RE
  misc_feature 25: note = Core
  misc_feature 26..50: note = LE
tgtaaaaatgtgggtggccatagataataagatggtcacccctcccttta

SEQ ID NO: 36755 - DNA, 50 bp, unidentified; identical to SEQ ID NO: 33748
  source 1..50: mol_type = unassigned DNA; note = donor_a2e584e
  misc_feature 1..22: note = RE
  misc_feature 23..25: note = Core
  misc_feature 26..50: note = LE

SEQ ID NO: 36756 - DNA, 50 bp, unidentified
  source 1..50: mol_type = unassigned DNA; note = donor_a2ebacc
  misc_feature 1..24: note = RE
  misc_feature 25: note = Core
  misc_feature 26..50: note = LE
tgcagtccggcggcggaccatacataatgagatggtccgccgccgggtta

SEQ ID NO: 36757 - DNA, 50 bp, unidentified
  source 1..50: mol_type = unassigned DNA; note = donor_a2edc06
  misc_feature 1..23: note = RE
  misc_feature 24..25: note = Core
  misc_feature 26..50: note = LE
acccggtggttgacagagggtgtctgatggctctaccttcccttcgcacg

SEQ ID NO: 36758 - DNA, 50 bp, unidentified; identical to SEQ ID NO: 33363
  source 1..50: mol_type = unassigned DNA; note = donor_a2f7ac4
  misc_feature 1..23: note = RE
  misc_feature 24..25: note = Core
  misc_feature 26..50: note = LE

SEQ ID NO: 36759 - DNA, 50 bp, unidentified
  source 1..50: mol_type = unassigned DNA; note = donor_a2fad1e
  misc_feature 1..23: note = RE
  misc_feature 24..25: note = Core
  misc_feature 26..50: note = LE
caatgcgggagccatccacagaggatgaggtggatggctcccgctcacgg

SEQ ID NO: 36760 - DNA, 50 bp, unidentified
  source 1..50: mol_type = unassigned DNA; note = donor_a31af5a
  misc_feature 1..24: note = RE
  misc_feature 25: note = Core
  misc_feature 26..50: note = LE
ggcaaaaaagtgggcgtccatgtataatggaatggacgcccacttcccaa

SEQ ID NO: 36761 - DNA, 50 bp, unidentified; identical to SEQ ID NO: 35064
  source 1..50: mol_type = unassigned DNA; note = donor_a31eeef
  misc_feature 1..23: note = RE
  misc_feature 24..25: note = Core
  misc_feature 26..50: note = LE

SEQ ID NO: 36762 - DNA, 50 bp, unidentified
  source 1..50: mol_type = unassigned DNA; note = donor_a3210b5
  misc_feature 1..24: note = RE
  misc_feature 25: note = Core
  misc_feature 26..50: note = LE
ttgcttgttttttaactcagttcttcttaagtttgtaatctattaaatta

SEQ ID NO: 36763 - DNA, 50 bp, unidentified
  source 1..50: mol_type = unassigned DNA; note = donor_a322813
  misc_feature 1..23: note = RE
  misc_feature 24..25: note = Core
  misc_feature 26..50: note = LE
aaaagtaaaattaatatagtatacttgtataatgattttatccataactc

SEQ ID NO: 36764 - DNA, 50 bp, unidentified; identical to SEQ ID NO: 32055
  source 1..50: mol_type = unassigned DNA; note = donor_a32cda1
  misc_feature 1..22: note = RE
  misc_feature 23..25: note = Core
  misc_feature 26..50: note = LE

SEQ ID NO: 36765 - DNA, 50 bp, unidentified
  source 1..50: mol_type = unassigned DNA; note = donor_a32fb7a
  misc_feature 1..23: note = RE
  misc_feature 24..25: note = Core
  misc_feature 26..50: note = LE
acgcttgacaggaaagacagtcgcttgtatctttcaattgccagccgatt

SEQ ID NO: 36766 - DNA, 50 bp, unidentified
  source 1..50: mol_type = unassigned DNA; note = donor_a33ebf2
  misc_feature 1..23: note = RE
  misc_feature 24..25: note = Core
  misc_feature 26..50: note = LE
gcgacaaagcggcggaccatacataatggcatggtccgccgcttttaccc

SEQ ID NO: 36767 - DNA, 50 bp, unidentified; identical to SEQ ID NO: 30383
  source 1..50: mol_type = unassigned DNA; note = donor_a343620
  misc_feature 1..23: note = RE
  misc_feature 24..25: note = Core
  misc_feature 26..50: note = LE

SEQ ID NO: 36768 - DNA, 50 bp, unidentified
  source 1..50: mol_type = unassigned DNA; note = donor_a345986
  misc_feature 1..23: note = RE
  misc_feature 24..25: note = Core
  misc_feature 26..50: note = LE
atgcttgcaggcgataacagtatcttgtattatccttcccgtgcagagag

SEQ ID NO: 36769 - DNA, 50 bp, unidentified
  source 1..50: mol_type = unassigned DNA; note = donor_a349804
  misc_feature 1..24: note = RE
  misc_feature 25: note = Core
  misc_feature 26..50: note = LE
tgcagtcaggcggcggaccatacataatgagatggtccgccgccgagtag

SEQ ID NO: 36770 - DNA, 50 bp, unidentified
  source 1..50: mol_type = unassigned DNA; note = donor_a34bc12
  misc_feature 1..24: note = RE
  misc_feature 25: note = Core
  misc_feature 26..50: note = LE
tggcaaaccgggagcgtccatgtacaatgggatggacgctcccaccttta

SEQ ID NO: 36771 - DNA, 50 bp, unidentified
  source 1..50: mol_type = unassigned DNA; note = donor_a3506ff
  misc_feature 1..23: note = RE
  misc_feature 24..25: note = Core
  misc_feature 26..50: note = LE
cttcgcaacctgaattacagttgcctgtgtaattgtgctgtgtcatattg

SEQ ID NO: 36772 - DNA, 50 bp, unidentified
  source 1..50: mol_type = unassigned DNA; note = donor_a353085
  misc_feature 1..22: note = RE
  misc_feature 23..25: note = Core
  misc_feature 26..50: note = LE
cctcttgactttacttagcaggtttggtacaatataaccatagcttgcag

SEQ ID NO: 36773 - DNA, 50 bp, unidentified
  source 1..50: mol_type = unassigned DNA; note = donor_a355da7
  misc_feature 1..22: note = RE
  misc_feature 23..25: note = Core
  misc_feature 26..50: note = LE
cccaacgggggccgtccacacatgatggggtggacggcccccgaccagac

SEQ ID NO: 36774 - DNA, 50 bp, unidentified
  source 1..50: mol_type = unassigned DNA; note = donor_a35e535
  misc_feature 1..23: note = RE
  misc_feature 24..25: note = Core
  misc_feature 26..50: note = LE
gcatgaaccggggcatccacacatgatggagtggatgcccctcccgcctc

SEQ ID NO: 36775 - DNA, 50 bp, unidentified
  source 1..50: mol_type = unassigned DNA; note = donor_a37e5fc
  misc_feature 1..22: note = RE
  misc_feature 23..25: note = Core
  misc_feature 26..50: note = LE
agtattgatttttattagtaagtttggtactataaaagtgtaatagttaa

SEQ ID NO: 36776 - DNA, 50 bp, unidentified
  source 1..50: mol_type = unassigned DNA; note = donor_a3857c6
  misc_feature 1..24: note = RE
  misc_feature 25: note = Core
  misc_feature 26..50: note = LE
tgcaaaaaatggggtgaccatagataatgaaatggtcacccctcaccctg

SEQ ID NO: 36777 - DNA, 50 bp, unidentified
  source 1..50: mol_type = unassigned DNA; note = donor_a38669d
  misc_feature 1..23: note = RE
  misc_feature 24..25: note = Core
  misc_feature 26..50: note = LE
gaccttgacttttaatagtcagtctcgtattattatgtgtagccaatctt

SEQ ID NO: 36778 - DNA, 50 bp, unidentified
  source 1..50: mol_type = unassigned DNA; note = donor_a38dc17
  misc_feature 1..23: note = RE
  misc_feature 24..25: note = Core
  misc_feature 26..50: note = LE
aacatcattgaccaacacggatacttgtcttatgacatttgtgtccgttc

SEQ ID NO: 36779 - DNA, 50 bp, unidentified
  source 1..50: mol_type = unassigned DNA; note = donor_a39ce54
  misc_feature 1..22: note = RE
  misc_feature 23..25: note = Core
  misc_feature 26..50: note = LE
gcatcgaggggccgtccacacatgatgcggtggacggcccctgagcggca

SEQ ID NO: 36780 - DNA, 50 bp, unidentified
  source 1..50: mol_type = unassigned DNA; note = donor_a3a5c14
  misc_feature 1..22: note = RE
  misc_feature 23..25: note = Core
  misc_feature 26..50: note = LE
gctgttgacaacctgattgagattccttaccttgttgctcgggcggtttc

SEQ ID NO: 36781 - DNA, 50 bp, unidentified
  source 1..50: mol_type = unassigned DNA; note = donor_a3c1768
  misc_feature 1..23: note = RE
  misc_feature 24..25: note = Core
  misc_feature 26..50: note = LE
gttgacacgggggagtccacataagataattggactccctcacccttaac

SEQ ID NO: 36782 - DNA, 50 bp, unidentified
  source 1..50: mol_type = unassigned DNA; note = donor_a3cd16d
  misc_feature 1..24: note = RE
  misc_feature 25: note = Core
  misc_feature 26..50: note = LE
ataattttgtcaaatcataagaataccttatatttgcatttggaaaagtt

SEQ ID NO: 36783 - DNA, 50 bp, unidentified; identical to SEQ ID NO: 35377
  source 1..50: mol_type = unassigned DNA; note = donor_a3cf414
  misc_feature 1..23: note = RE
  misc_feature 24..25: note = Core
  misc_feature 26..50: note = LE

SEQ ID NO: 36784 - DNA, 50 bp, unidentified
  source 1..50: mol_type = unassigned DNA; note = donor_a3e37fa
  misc_feature 1..23: note = RE
  misc_feature 24..25: note = Core
  misc_feature 26..50: note = LE
tgacacttaagctcctgggatgtctaataagagttgtcgggtccgccgta

SEQ ID NO: 36785 - DNA, 50 bp, unidentified
  source 1..50: mol_type = unassigned DNA; note = donor_a3ee30f
  misc_feature 1..24: note = RE
  misc_feature 25: note = Core
  misc_feature 26..50: note = LE
ttgaaaggtggggaagcccttgtagaatgaaagggacttccccgccccga

SEQ ID NO: 36786 - DNA, 50 bp, unidentified
  source 1..50: mol_type = unassigned DNA; note = donor_a3f02d6
  misc_feature 1..24: note = RE
  misc_feature 25: note = Core
  misc_feature 26..50: note = LE
gacaacccgaggggcgaccatctataatgggatggtcgcccctactctaa

SEQ ID NO: 36787 - DNA, 50 bp, unidentified
  source 1..50: mol_type = unassigned DNA; note = donor_a3f966d
  misc_feature 1..23: note = RE
  misc_feature 24..25: note = Core
  misc_feature 26..50: note = LE
ttgcttgacttggaagacggtatcttgtatcattatttccgtggtggtta

SEQ ID NO: 36788 - DNA, 50 bp, unidentified; identical to SEQ ID NO: 32384
  source 1..50: mol_type = unassigned DNA; note = donor_a3fac09
  misc_feature 1..21: note = RE
  misc_feature 22..25: note = Core
  misc_feature 26..50: note = LE

SEQ ID NO: 36789 - DNA, 50 bp, unidentified; identical to SEQ ID NO: 32862
  source 1..50: mol_type = unassigned DNA; note = donor_a401d9e
  misc_feature 1..24: note = RE
  misc_feature 25: note = Core
  misc_feature 26..50: note = LE

SEQ ID NO: 36790 - DNA, 50 bp, unidentified
  source 1..50: mol_type = unassigned DNA; note = donor_a409432
  misc_feature 1..23: note = RE
  misc_feature 24..25: note = Core
  misc_feature 26..50: note = LE
gtactacgggcggcaaccacagaagatggtgtggttgccgccctcccctg

SEQ ID NO: 36791 - DNA, 50 bp, unidentified
  source 1..50: mol_type = unassigned DNA; note = donor_a4197b2
  misc_feature 1..23: note = RE
  misc_feature 24..25: note = Core
  misc_feature 26..50: note = LE
tgacacctaagcccatgggatgtctaatggggtttaccgggccgacagcg

SEQ ID NO: 36792 - DNA, 50 bp, unidentified; identical to SEQ ID NO: 31401
  source 1..50: mol_type = unassigned DNA; note = donor_a4199d0
  misc_feature 1..23: note = RE
  misc_feature 24..25: note = Core
  misc_feature 26..50: note = LE

SEQ ID NO: 36793 - DNA, 50 bp, unidentified
  source 1..50: mol_type = unassigned DNA; note = donor_a42049c
  misc_feature 1..23: note = RE
  misc_feature 24..25: note = Core
  misc_feature 26..50: note = LE
agtcttgacttttcatagctggtcttgtatgataattccaacagggaatt

SEQ ID NO: 36794 - DNA, 50 bp, unidentified; identical to SEQ ID NO: 33018
  source 1..50: mol_type = unassigned DNA; note = donor_a426858
  misc_feature 1..24: note = RE
  misc_feature 25: note = Core
  misc_feature 26..50: note = LE

SEQ ID NO: 36795 - DNA, 50 bp, unidentified
  source 1..50: mol_type = unassigned DNA; note = donor_a42e42d
  misc_feature 1..23: note = RE
  misc_feature 24..25: note = Core
  misc_feature 26..50: note = LE
gacaagttacggccgtgggatgtctaatggggaccgaccacttcaccccg

SEQ ID NO: 36796 - DNA, 50 bp, unidentified
  source 1..50: mol_type = unassigned DNA; note = donor_a44a8f9
  misc_feature 1..24: note = RE
  misc_feature 25: note = Core
  misc_feature 26..50: note = LE
cgcttgacgaatcccatagggacacgttacctttttgatcgtccccgatg

SEQ ID NO: 36797 - DNA, 50 bp, unidentified
  source 1..50: mol_type = unassigned DNA; note = donor_a44b306
  misc_feature 1..23: note = RE
  misc_feature 24..25: note = Core
  misc_feature 26..50: note = LE
ccagcttgaaaacaagacagttacttgtatctttaatttctgtttctctt

SEQ ID NO: 36798 - DNA, 50 bp, unidentified
  source 1..50: mol_type = unassigned DNA; note = donor_a457d27
  misc_feature 1..23: note = RE
  misc_feature 24..25: note = Core
  misc_feature 26..50: note = LE
tgcccgaagggccgttccacatatgatgaggtggaacggctcactgccgc

SEQ ID NO: 36799 - DNA, 50 bp, unidentified
  source 1..50: mol_type = unassigned DNA; note = donor_a465681
  misc_feature 1..24: note = RE
  misc_feature 25: note = Core
  misc_feature 26..50: note = LE
ctcacttgacatcacaccgctggacctcgtataatatcttttagatacat

SEQ ID NO: 36800 - DNA, 50 bp, unidentified
  source 1..50: mol_type = unassigned DNA; note = donor_a46cd97
  misc_feature 1..23: note = RE
  misc_feature 24..25: note = Core
  misc_feature 26..50: note = LE
ttgcaaaaggggggcgtccatatagaatgaaatggacgcctcccacctca

SEQ ID NO: 36801 - DNA, 50 bp, unidentified
  source 1..50: mol_type = unassigned DNA; note = donor_a47145f
  misc_feature 1..23: note = RE
  misc_feature 24..25: note = Core
  misc_feature 26..50: note = LE
aggccacctgacagatacagttgcttctgtatctcggctttgctattctg

SEQ ID NO: 36802 - DNA, 50 bp, unidentified
  source 1..50: mol_type = unassigned DNA; note = donor_a475fe9
  misc_feature 1..24: note = RE
  misc_feature 25: note = Core
  misc_feature 26..50: note = LE
agccggttgacaacagaagggagcctactagaggattcctgcaggatcgg

SEQ ID NO: 36803 - DNA, 50 bp, unidentified
  source 1..50: mol_type = unassigned DNA; note = donor_a477f1d
  misc_feature 1..24: note = RE
  misc_feature 25: note = Core
  misc_feature 26..50: note = LE
tggcatcccgggggtgttcatgtacaatgggatgaacacccccaccctta

SEQ ID NO: 36804 - DNA, 50 bp, unidentified; identical to SEQ ID NO: 31537
  source 1..50: mol_type = unassigned DNA; note = donor_a483766
  misc_feature 1..23: note = RE
  misc_feature 24..25: note = Core
  misc_feature 26..50: note = LE

SEQ ID NO: 36805 - DNA, 50 bp, unidentified
  source 1..50: mol_type = unassigned DNA; note = donor_a48705d
  misc_feature 1..24: note = RE
  misc_feature 25: note = Core
  misc_feature 26..50: note = LE
ccattttcttccgcacttaggacgtagcacctacggaaggaagaactgga

SEQ ID NO: 36806 - DNA, 50 bp, unidentified; identical to SEQ ID NO: 30950
  source 1..50: mol_type = unassigned DNA; note = donor_a49b8b8
  misc_feature 1..24: note = RE
  misc_feature 25: note = Core
  misc_feature 26..50: note = LE

SEQ ID NO: 36807 - DNA, 50 bp, unidentified
  source 1..50: mol_type = unassigned DNA; note = donor_a49e92c
  misc_feature 1..24: note = RE
  misc_feature 25: note = Core
  misc_feature 26..50: note = LE
tgccaacggggagccgtccacacatgatgctgtggacggctctccaaccc

SEQ ID NO: 36808 - DNA, 50 bp, unidentified
  source 1..50: mol_type = unassigned DNA; note = donor_a4a1644
  misc_feature 1..23: note = RE
  misc_feature 24..25: note = Core
  misc_feature 26..50: note = LE
gcattcaggggagcgtccacacacgatggggtggacgccccccggcggca

SEQ ID NO: 36809 - DNA, 50 bp, unidentified
  source 1..50: mol_type = unassigned DNA; note = donor_a4a4f31
  misc_feature 1..20: note = RE
  misc_feature 21..25: note = Core
  misc_feature 26..50: note = LE
ctaaggttttgagacgggttcttagacaaaatggcgccccttctgggctt

SEQ ID NO: 36810 - DNA, 50 bp, unidentified; identical to SEQ ID NO: 36619
  source 1..50: mol_type = unassigned DNA; note = donor_a4b842e
  misc_feature 1..23: note = RE
  misc_feature 24..25: note = Core
  misc_feature 26..50: note = LE

SEQ ID NO: 36811 - DNA, 50 bp, unidentified
  source 1..50: mol_type = unassigned DNA; note = donor_a4b981c
  misc_feature 1..22: note = RE
  misc_feature 23..25: note = Core
  misc_feature 26..50: note = LE
gacctaaacacccaattagagaagcatgcgtaattgggctaccctctgtt

SEQ ID NO: 36812 - DNA, 50 bp, unidentified
  source 1..50: mol_type = unassigned DNA; note = donor_a4bb2b2
  misc_feature 1..23: note = RE
  misc_feature 24..25: note = Core
  misc_feature 26..50: note = LE
ttgacaaaacgctttttcataggtgatcatatgaaaaagctaccttcctt

SEQ ID NO: 36813 - DNA, 50 bp, unidentified
  source 1..50: mol_type = unassigned DNA; note = donor_a4c0ea4
  misc_feature 1..23: note = RE
  misc_feature 24..25: note = Core
  misc_feature 26..50: note = LE
acccgaggattgacagagggtgtctgatgggactaccttccgatcgcacg

SEQ ID NO: 36814 - DNA, 50 bp, unidentified
  source 1..50: mol_type = unassigned DNA; note = donor_a4c4b4f
  misc_feature 1..23: note = RE
  misc_feature 24..25: note = Core
  misc_feature 26..50: note = LE
gcaaggagggggccgtccacatatgttgggatggacggcccccgaacggc

SEQ ID NO: 36815 - DNA, 50 bp, unidentified
  source 1..50: mol_type = unassigned DNA; note = donor_a4dac63
  misc_feature 1..24: note = RE
  misc_feature 25: note = Core
  misc_feature 26..50: note = LE
ccctcttgactttttatttgcaggcctgttactatataagagccccaaga

SEQ ID NO: 36816 - DNA, 50 bp, unidentified; identical to SEQ ID NO: 32850
  source 1..50: mol_type = unassigned DNA; note = donor_a4db85f
  misc_feature 1..24: note = RE
  misc_feature 25: note = Core
  misc_feature 26..50: note = LE

SEQ ID NO: 36817 - DNA, 50 bp, unidentified
  source 1..50: mol_type = unassigned DNA; note = donor_a4db93b
  misc_feature 1..23: note = RE
  misc_feature 24..25: note = Core
  misc_feature 26..50: note = LE
atagttgacttttcatagttggtcttgtatgtttaagttaggtttttagg

SEQ ID NO: 36818 - DNA, 50 bp, unidentified
  source 1..50: mol_type = unassigned DNA; note = donor_a4dfa05
  misc_feature 1..23: note = RE
  misc_feature 24..25: note = Core
  misc_feature 26..50: note = LE
gcaaaacgggaggagaccatatacgatgagatggtctcctcccccttatt

SEQ ID NO: 36819 - DNA, 50 bp, unidentified
  source 1..50: mol_type = unassigned DNA; note = donor_a4e6523
  misc_feature 1..23: note = RE
  misc_feature 24..25: note = Core
  misc_feature 26..50: note = LE
tttttcttgacgaaacacggtagcttgtatgtaatagacatgtggtggtt

SEQ ID NO: 36820 - DNA, 50 bp, unidentified
  source 1..50: mol_type = unassigned DNA; note = donor_a4e8fb1
  misc_feature 1..24: note = RE
  misc_feature 25: note = Core
  misc_feature 26..50: note = LE
cgcgccttgacacgagaggggagcctacttaacactggtgcctggacttg

SEQ ID NO: 36821 - DNA, 50 bp, unidentified
  source 1..50: mol_type = unassigned DNA; note = donor_a4ef575
  misc_feature 1..21: note = RE
  misc_feature 22..25: note = Core
  misc_feature 26..50: note = LE
cttgacaacgacatagagacaccccgttaccttcttttgatcaggcccgg

SEQ ID NO: 36822 - DNA, 50 bp, unidentified
  source 1..50: mol_type = unassigned DNA; note = donor_a4efd20
  misc_feature 1..24: note = RE
  misc_feature 25: note = Core
  misc_feature 26..50: note = LE
aatattgacaactattggctggtttcgtattataaggtcagccagaaatt

SEQ ID NO: 36823 - DNA, 50 bp, unidentified
  source 1..50: mol_type = unassigned DNA; note = donor_a4fcf31
  misc_feature 1..23: note = RE
  misc_feature 24..25: note = Core
  misc_feature 26..50: note = LE
agatattcgtattaaaccgagggagcattcctgtagatagttaaatatca

SEQ ID NO: 36824 - DNA, 50 bp, unidentified
  source 1..50: mol_type = unassigned DNA; note = donor_a5075bd
  misc_feature 1..24: note = RE
  misc_feature 25: note = Core
  misc_feature 26..50: note = LE
cttggcatagggggcgttcatgtacaatgggatgaacgcccccacctttg

SEQ ID NO: 36825 - DNA, 50 bp, unidentified; identical to SEQ ID NO: 36228
  source 1..50: mol_type = unassigned DNA; note = donor_a515834
  misc_feature 1..23: note = RE
  misc_feature 24..25: note = Core
  misc_feature 26..50: note = LE

SEQ ID NO: 36826 - DNA, 50 bp, unidentified
  source 1..50: mol_type = unassigned DNA; note = donor_a521d38
  misc_feature 1..23: note = RE
  misc_feature 24..25: note = Core
  misc_feature 26..50: note = LE
caacgcgggagccatccacagaggatggggtggatggctcccgctcacgg

SEQ ID NO: 36827 - DNA, 50 bp, unidentified
  source 1..50: mol_type = unassigned DNA; note = donor_a537739
  misc_feature 1..24: note = RE
  misc_feature 25: note = Core
  misc_feature 26..50: note = LE
tttacttttaacacagttactgcgatgataataaagaggacacggcaggc

SEQ ID NO: 36828 - DNA, 50 bp, unidentified
  source 1..50: mol_type = unassigned DNA; note = donor_a53b19b
  misc_feature 1..24: note = RE
  misc_feature 25: note = Core
  misc_feature 26..50: note = LE
tggcataccgggagcgtccatgtacaatgggatggacgctcccacctaag

SEQ ID NO: 36829 - DNA, 50 bp, unidentified
  source 1..50: mol_type = unassigned DNA; note = donor_a53b56b
  misc_feature 1..21: note = RE
  misc_feature 22..25: note = Core
  misc_feature 26..50: note = LE
cttgacagccccatagagacaccccgttaccttcttgatcaagcccggtg

SEQ ID NO: 36830 - DNA, 50 bp, unidentified
  source 1..50: mol_type = unassigned DNA; note = donor_a540ecf
  misc_feature 1..24: note = RE
  misc_feature 25: note = Core
  misc_feature 26..50: note = LE
gggacttgacatccataggagcatcagtgagaatgtggagtgtgatcctg

SEQ ID NO: 36831 - DNA, 50 bp, unidentified
  source 1..50: mol_type = unassigned DNA; note = donor_a546a01
  misc_feature 1..23: note = RE
  misc_feature 24..25: note = Core
  misc_feature 26..50: note = LE
gcacttgctttttggtagcaggactagtaccatataagtgtagtcagata

SEQ ID NO: 36832 - DNA, 50 bp, unidentified
  source 1..50: mol_type = unassigned DNA; note = donor_a551142
  misc_feature 1..23: note = RE
  misc_feature 24..25: note = Core
  misc_feature 26..50: note = LE
aagacttgacttttgttagcaggttagtaccatataagtgtaagagataa

SEQ ID NO: 36833 - DNA, 50 bp, unidentified
  source 1..50: mol_type = unassigned DNA; note = donor_a553e4e
  misc_feature 1..22: note = RE
  misc_feature 23..25: note = Core
  misc_feature 26..50: note = LE
catcaaggacggcaaccacagaagatggggtggttgccgtcctccctcaa

SEQ ID NO: 36834 - DNA, 50 bp, unidentified
  source 1..50: mol_type = unassigned DNA; note = donor_a56776c
  misc_feature 1..23: note = RE
  misc_feature 24..25: note = Core
  misc_feature 26..50: note = LE
gcaagccgggggccgtccacatatgttggggtggacggccccctccggca

SEQ ID NO: 36835 - DNA, 50 bp, unidentified
  source 1..50: mol_type = unassigned DNA; note = donor_a569133
  misc_feature 1..24: note = RE
  misc_feature 25: note = Core
  misc_feature 26..50: note = LE
cactaaagtgttttcatacaaaaaaaacttctatggcggcgatcctcgcc

SEQ ID NO: 36836 - DNA, 50 bp, unidentified
  source 1..50: mol_type = unassigned DNA; note = donor_a57c4f2
  misc_feature 1..22: note = RE
  misc_feature 23..25: note = Core
  misc_feature 26..50: note = LE
atcttgacttttaatagttagtcttgtattatatagtcatagcttttctt

SEQ ID NO: 36837 - DNA, 50 bp, unidentified
  source 1..50: mol_type = unassigned DNA; note = donor_a5859f6
  misc_feature 1..23: note = RE
  misc_feature 24..25: note = Core
  misc_feature 26..50: note = LE
aagcttgacttgcaagagagaatcttgtatcttgcgatttgaggcgtaac

SEQ ID NO: 36838 - DNA, 50 bp, unidentified
  source 1..50: mol_type = unassigned DNA; note = donor_a585c4d
  misc_feature 1..23: note = RE
  misc_feature 24..25: note = Core
  misc_feature 26..50: note = LE
aaaaattgcgttcaagacagttgcttgtatcttgaaattcgactatcata

SEQ ID NO: 36839 - DNA, 50 bp, unidentified
  source 1..50: mol_type = unassigned DNA; note = donor_a58ae40
  misc_feature 1..23: note = RE
  misc_feature 24..25: note = Core
  misc_feature 26..50: note = LE
cttgcaaccaacgcgattagacgacatggggtaatcgcgggagcgaagcc

SEQ ID NO: 36840 - DNA, 50 bp, unidentified; identical to SEQ ID NO: 33732
  source 1..50: mol_type = unassigned DNA; note = donor_a58cdeb
  misc_feature 1..23: note = RE
  misc_feature 24..25: note = Core
  misc_feature 26..50: note = LE

SEQ ID NO: 36841 - DNA, 50 bp, unidentified; identical to SEQ ID NO: 30838
  source 1..50: mol_type = unassigned DNA; note = donor_a59c541
  misc_feature 1..23: note = RE
  misc_feature 24..25: note = Core
  misc_feature 26..50: note = LE

SEQ ID NO: 36842 - DNA, 50 bp, unidentified; identical to SEQ ID NO: 30451
  source 1..50: mol_type = unassigned DNA; note = donor_a5a5932
  misc_feature 1..23: note = RE
  misc_feature 24..25: note = Core
  misc_feature 26..50: note = LE

SEQ ID NO: 36843 - DNA, 50 bp, unidentified
  source 1..50: mol_type = unassigned DNA; note = donor_a5acb34
  misc_feature 1..23: note = RE
  misc_feature 24..25: note = Core
  misc_feature 26..50: note = LE
atccagcttgatcaatacggatacttgtcttatgattcttccgccttctc

SEQ ID NO: 36844 - DNA, 50 bp, unidentified; identical to SEQ ID NO: 30383
  source 1..50: mol_type = unassigned DNA; note = donor_a5acdb9
  misc_feature 1..23: note = RE
  misc_feature 24..25: note = Core
  misc_feature 26..50: note = LE

SEQ ID NO: 36845 - DNA, 50 bp, unidentified
  source 1..50: mol_type = unassigned DNA; note = donor_a5b9464
  misc_feature 1..24: note = RE
  misc_feature 25: note = Core
  misc_feature 26..50: note = LE
cggcttgacaaccaataggagcatcgttgatgcttatagggcctcgtttt

SEQ ID NO: 36846 - DNA, 50 bp, unidentified; identical to SEQ ID NO: 31773
  source 1..50: mol_type = unassigned DNA; note = donor_a5bf150
  misc_feature 1..24: note = RE
  misc_feature 25: note = Core
  misc_feature 26..50: note = LE

SEQ ID NO: 36847 - DNA, 50 bp, unidentified
  source 1..50: mol_type = unassigned DNA; note = donor_a5bf426
  misc_feature 1..23: note = RE
  misc_feature 24..25: note = Core
  misc_feature 26..50: note = LE
gcaaaaacggaagtgaccatagattaatgagatggtcactccctccttcc

SEQ ID NO: 36848 - DNA, 50 bp, unidentified
  source 1..50: mol_type = unassigned DNA; note = donor_a5c1b7e
  misc_feature 1..23: note = RE
  misc_feature 24..25: note = Core
  misc_feature 26..50: note = LE
tgcttgacagcccaagacagttgcttgtatcttgagttgagtttctcaat

SEQ ID NO: 36849 - DNA, 50 bp, unidentified
  source 1..50: mol_type = unassigned DNA; note = donor_a5c5386
  misc_feature 1..23: note = RE
  misc_feature 24..25: note = Core
  misc_feature 26..50: note = LE
gacttcttaggcccatgggatgtctaatgggactggaccagcttgccgga

SEQ ID NO: 36850 - DNA, 50 bp, unidentified
  source 1..50: mol_type = unassigned DNA; note = donor_a5c9391
  misc_feature 1..23: note = RE
  misc_feature 24..25: note = Core
  misc_feature 26..50: note = LE
gacaccttccaggcgtgggatgtctaatggggatcgatcgcctcgccccg

SEQ ID NO: 36851 - DNA, 50 bp, unidentified
  source 1..50: mol_type = unassigned DNA; note = donor_a5d0f4e
  misc_feature 1..24: note = RE
  misc_feature 25: note = Core
  misc_feature 26..50: note = LE
ttgcaatgaggaggagtccatatacaatggtatggactcctcctcccctt

SEQ ID NO: 36852 - DNA, 50 bp, unidentified
  source 1..50: mol_type = unassigned DNA; note = donor_a5d4899
  misc_feature 1..23: note = RE
  misc_feature 24..25: note = Core
  misc_feature 26..50: note = LE
cggcttgctgaaaaccatagaatcttgtatggttagacttgaaggggtgg

SEQ ID NO: 36853 - DNA, 50 bp, unidentified
  source 1..50: mol_type = unassigned DNA; note = donor_a5dda5d
  misc_feature 1..24: note = RE
  misc_feature 25: note = Core
  misc_feature 26..50: note = LE
ggcaggttgacaacagaagggtgcctactagacgattgccctaggaccgg

SEQ ID NO: 36854 - DNA, 50 bp, unidentified
  source 1..50: mol_type = unassigned DNA; note = donor_a5e343e
  misc_feature 1..23: note = RE
  misc_feature 24..25: note = Core
  misc_feature 26..50: note = LE
gacattaacggggagtccatataagatgtatggactcccatccccctcgg

SEQ ID NO: 36855 - DNA, 50 bp, unidentified; identical to SEQ ID NO: 36442
  source 1..50: mol_type = unassigned DNA; note = donor_a5e91a7
  misc_feature 1..23: note = RE
  misc_feature 24..25: note = Core
  misc_feature 26..50: note = LE

SEQ ID NO: 36856 - DNA, 50 bp, unidentified
  source 1..50: mol_type = unassigned DNA; note = donor_a5ed2a8
  misc_feature 1..23: note = RE
  misc_feature 24..25: note = Core
  misc_feature 26..50: note = LE
agcttgacatcaacttatgggatctgatatatctcctggatggtcagact

SEQ ID NO: 36857 - DNA, 50 bp, unidentified; identical to SEQ ID NO: 33601
  source 1..50: mol_type = unassigned DNA; note = donor_a5f31bc
  misc_feature 1..23: note = RE
  misc_feature 24..25: note = Core
  misc_feature 26..50: note = LE

SEQ ID NO: 36858 - DNA, 50 bp, unidentified
  source 1..50: mol_type = unassigned DNA; note = donor_a5f97f6
  misc_feature 1..22: note = RE
  misc_feature 23..25: note = Core
  misc_feature 26..50: note = LE
ccaacagggcgccgtccagacatgatgtggtggacggcgcccgccagcgg

SEQ ID NO: 36859 - DNA, 50 bp, unidentified
  source 1..50: mol_type = unassigned DNA; note = donor_a60c093
  misc_feature 1..23: note = RE
  misc_feature 24..25: note = Core
  misc_feature 26..50: note = LE
ggtacttgacaaagtcatagtgttccattagacttatacctatgaatttc

SEQ ID NO: 36860 - DNA, 50 bp, unidentified
  source 1..50: mol_type = unassigned DNA; note = donor_a60cc5a
  misc_feature 1..24: note = RE
  misc_feature 25: note = Core
  misc_feature 26..50: note = LE
ttgacagccgggggaatccatgtagaatgacatggattccccctttctag

SEQ ID NO: 36861 - DNA, 50 bp, unidentified
  source 1..50: mol_type = unassigned DNA; note = donor_a6117c9
  misc_feature 1..24: note = RE
  misc_feature 25: note = Core
  misc_feature 26..50: note = LE
ttgcaatgaggaagagtccatatacaatgggatggactcctcctcacctc

SEQ ID NO: 36862 - DNA, 50 bp, unidentified
  source 1..50: mol_type = unassigned DNA; note = donor_a614e31
  misc_feature 1..23: note = RE
  misc_feature 24..25: note = Core
  misc_feature 26..50: note = LE
gcctcttgacatatagagaggcaccgacttgtatgagtgtcgcgggacga

SEQ ID NO: 36863 - DNA, 50 bp, unidentified
  source 1..50: mol_type = unassigned DNA; note = donor_a6165b7
  misc_feature 1..24: note = RE
  misc_feature 25: note = Core
  misc_feature 26..50: note = LE
tgctccgcacggccgggccatacataatgggatggcccggccgtgctcct

SEQ ID NO: 36864 - DNA, 50 bp, unidentified
  source 1..50: mol_type = unassigned DNA; note = donor_a61be00
  misc_feature 1..21: note = RE
  misc_feature 22..25: note = Core
  misc_feature 26..50: note = LE
ctcttgacttctaatagttagtcacgtataattaaaactatctcgaaagg

SEQ ID NO: 36865 - DNA, 50 bp, unidentified
  source 1..50: mol_type = unassigned DNA; note = donor_a61ccb5
  misc_feature 1..23: note = RE
  misc_feature 24..25: note = Core
  misc_feature 26..50: note = LE
tgcagacggggcgggccatacgtttatgggatggcccgcccctcaccacc

SEQ ID NO: 36866 - DNA, 50 bp, unidentified
  source 1..50: mol_type = unassigned DNA; note = donor_a620c7f
  misc_feature 1..23: note = RE
  misc_feature 24..25: note = Core
  misc_feature 26..50: note = LE
tcccttgtggagagacatagaatcttgtatgtttacccgtggcaggccta

SEQ ID NO: 36867 - DNA, 50 bp, unidentified; identical to SEQ ID NO: 32122
  source 1..50: mol_type = unassigned DNA; note = donor_a62129b
  misc_feature 1..24: note = RE
  misc_feature 25: note = Core
  misc_feature 26..50: note = LE

SEQ ID NO: 36868 - DNA, 50 bp, unidentified
  source 1..50: mol_type = unassigned DNA; note = donor_a62c80a
  misc_feature 1..24: note = RE
  misc_feature 25: note = Core
  misc_feature 26..50: note = LE
tgctccgcacggccggaccatacataatggaatggtccggccgtgctcct

SEQ ID NO: 36869 - DNA, 50 bp, unidentified
  source 1..50: mol_type = unassigned DNA; note = donor_a6335a2
  misc_feature 1..22: note = RE
  misc_feature 23..25: note = Core
  misc_feature 26..50: note = LE
cggctgtctaaaaaagaaagttgcttgtgtctttgcgtcggcgtaggctt

SEQ ID NO: 36870 - DNA, 50 bp, unidentified
  source 1..50: mol_type = unassigned DNA; note = donor_a636142
  misc_feature 1..23: note = RE
  misc_feature 24..25: note = Core
  misc_feature 26..50: note = LE
ggcctatcggcgtttaatggttgcttgtaatagcgcaatcagatattgtc

SEQ ID NO: 36871 - DNA, 50 bp, unidentified
  source 1..50: mol_type = unassigned DNA; note = donor_a637503
  misc_feature 1..23: note = RE
  misc_feature 24..25: note = Core
  misc_feature 26..50: note = LE
acatttgcatatcaacacagaatctcctatgtttgtattgaataacttta

SEQ ID NO: 36872 - DNA, 50 bp, unidentified
  source 1..50: mol_type = unassigned DNA; note = donor_a63a368
  misc_feature 1..23: note = RE
  misc_feature 24..25: note = Core
  misc_feature 26..50: note = LE
ccggcttgaactcaacacagttacttgtatcttggcatttcagccattgt

SEQ ID NO: 36873 - DNA, 50 bp, unidentified
  source 1..50: mol_type = unassigned DNA; note = donor_a648ca5
  misc_feature 1..23: note = RE
  misc_feature 24..25: note = Core
  misc_feature 26..50: note = LE
aggattgacttttcatagctggtcttgtatgatatttatagaagttaaat

SEQ ID NO: 36874 - DNA, 50 bp, unidentified; identical to SEQ ID NO: 30463
  source 1..50: mol_type = unassigned DNA; note = donor_a65131c
  misc_feature 1..21: note = RE
  misc_feature 22..25: note = Core
  misc_feature 26..50: note = LE

SEQ ID NO: 36875 - DNA, 50 bp, unidentified
  source 1..50: mol_type = unassigned DNA; note = donor_a65740b
  misc_feature 1..24: note = RE
  misc_feature 25: note = Core
  misc_feature 26..50: note = LE
agcctcttgacaacaaagaggcttctgattgagaatcgatgtagacgttg

SEQ ID NO: 36876 - DNA, 50 bp, unidentified
  source 1..50: mol_type = unassigned DNA; note = donor_a65a5a9
  misc_feature 1..24: note = RE
  misc_feature 25: note = Core
  misc_feature 26..50: note = LE
acaaagctcttcatagaagggagcctacttatgtcttccttagaccgcct

SEQ ID NO: 36877 - DNA, 50 bp, unidentified
  source 1..50: mol_type = unassigned DNA; note = donor_a66086d
  misc_feature 1..23: note = RE
  misc_feature 24..25: note = Core
  misc_feature 26..50: note = LE
aaaatttaattttgcatagttgactcctacataaaaatatggtataaata

SEQ ID NO: 36878 - DNA, 50 bp, unidentified
  source 1..50: mol_type = unassigned DNA; note = donor_a66d9f5
  misc_feature 1..24: note = RE
  misc_feature 25: note = Core
  misc_feature 26..50: note = LE
ggcaaaaaagtgggcgtccatgtataatggaatggacgcccacttcctaa

SEQ ID NO: 36879 - DNA, 50 bp, unidentified
  source 1..50: mol_type = unassigned DNA; note = donor_a676ac1
  misc_feature 1..23: note = RE
  misc_feature 24..25: note = Core
  misc_feature 26..50: note = LE
ggttgacgaactatataggaacaccattacggtttaggcagttccctgct

SEQ ID NO: 36880 - DNA, 50 bp, unidentified
  source 1..50: mol_type = unassigned DNA; note = donor_a679fb2
  misc_feature 1..21: note = RE
  misc_feature 22..25: note = Core
  misc_feature 26..50: note = LE
caggaggttgacacaggatgtctcactggactaccttcttgtccatgaag

SEQ ID NO: 36881 - DNA, 50 bp, unidentified
  source 1..50: mol_type = unassigned DNA; note = donor_a67ada2
  misc_feature 1..21: note = RE
  misc_feature 22..25: note = Core
  misc_feature 26..50: note = LE
agcagggttgacacagggtgtctcactggtgcaccttaggtgtcgcagac

SEQ ID NO: 36882 - DNA, 50 bp, unidentified
  source 1..50: mol_type = unassigned DNA; note = donor_a67e9cf
  misc_feature 1..23: note = RE
  misc_feature 24..25: note = Core
  misc_feature 26..50: note = LE
acacttgtaaaaacttagaaagtcatgtatactttaagatgtaaattaat

SEQ ID NO: 36883 - DNA, 50 bp, unidentified
  source 1..50: mol_type = unassigned DNA; note = donor_a684a83
  misc_feature 1..24: note = RE
  misc_feature 25: note = Core
  misc_feature 26..50: note = LE
ttacttgtttttcaccacagtacttcttaagtttgtattatccttaaatt

SEQ ID NO: 36884 - DNA, 50 bp, unidentified
  source 1..50: mol_type = unassigned DNA; note = donor_a6a2c9e
  misc_feature 1..21: note = RE
  misc_feature 22..25: note = Core
  misc_feature 26..50: note = LE
ccaagcgggggccatccacacatgatggggtggatggcccccttgcggca

SEQ ID NO: 36885 - DNA, 50 bp, unidentified
  source 1..50: mol_type = unassigned DNA; note = donor_a6a4cf7
  misc_feature 1..23: note = RE
  misc_feature 24..25: note = Core
  misc_feature 26..50: note = LE
atacttgacttttaatagttagtctcgtattataaagtagtagtgtttat

SEQ ID NO: 36886 - DNA, 50 bp, unidentified
  source 1..50: mol_type = unassigned DNA; note = donor_a6aa1f3
  misc_feature 1..24: note = RE
  misc_feature 25: note = Core
  misc_feature 26..50: note = LE
tgctccagttgggggcgccatatcagacaaaatggcgccccttctgggct

SEQ ID NO: 36887 - DNA, 50 bp, unidentified
  source 1..50: mol_type = unassigned DNA; note = donor_a6ab947
  misc_feature 1..23: note = RE
  misc_feature 24..25: note = Core
  misc_feature 26..50: note = LE
cttgcgtttggggcgtctacacatgatgatgtagacgccccccggcggtc

SEQ ID NO: 36888 - DNA, 50 bp, unidentified
  source 1..50: mol_type = unassigned DNA; note = donor_a6b4899
  misc_feature 1..23: note = RE
  misc_feature 24..25: note = Core
  misc_feature 26..50: note = LE
ttacttgacttttgtatagctggcttgtatactaaatatatcagattgat

SEQ ID NO: 36889 - DNA, 50 bp, unidentified
  source 1..50: mol_type = unassigned DNA; note = donor_a6c7f8b
  misc_feature 1..24: note = RE
  misc_feature 25: note = Core
  misc_feature 26..50: note = LE
tttacttgctttaatcttagaatacctttagatttaaaaaatagtaattt

SEQ ID NO: 36890 - DNA, 50 bp, unidentified; identical to SEQ ID NO: 33876
  source 1..50: mol_type = unassigned DNA; note = donor_a6c8aac
  misc_feature 1..23: note = RE
  misc_feature 24..25: note = Core
  misc_feature 26..50: note = LE

SEQ ID NO: 36891 - DNA, 50 bp, unidentified; identical to SEQ ID NO: 32145
  source 1..50: mol_type = unassigned DNA; note = donor_a6ce69d
  misc_feature 1..22: note = RE
  misc_feature 23..25: note = Core
  misc_feature 26..50: note = LE

SEQ ID NO: 36892 - DNA, 50 bp, unidentified
  source 1..50: mol_type = unassigned DNA; note = donor_a6d1541
  misc_feature 1..23: note = RE
  misc_feature 24..25: note = Core
  misc_feature 26..50: note = LE
ataatttgcaaaaatcatagtagtaccttagatttgcatctgtggggtat

SEQ ID NO: 36893 - DNA, 50 bp, unidentified
  source 1..50: mol_type = unassigned DNA; note = donor_a6d8f8c
  misc_feature 1..23: note = RE
  misc_feature 24..25: note = Core
  misc_feature 26..50: note = LE
ggacttgacatttaatagttagtctcgtattatatagtagtagtgtttat

SEQ ID NO: 36894 - DNA, 50 bp, unidentified
  source 1..50: mol_type = unassigned DNA; note = donor_a6e8011
  misc_feature 1..24: note = RE
  misc_feature 25: note = Core
  misc_feature 26..50: note = LE
atgggtgttgacacaaagaggcttctgatggagagtgaagggcacgcgtt

SEQ ID NO: 36895 - DNA, 50 bp, unidentified
  source 1..50: mol_type = unassigned DNA; note = donor_a6e9a85
  misc_feature 1..24: note = RE
  misc_feature 25: note = Core
  misc_feature 26..50: note = LE
gaccgcttgacaacagaagggagcctactagacgattccgttagggccgc

SEQ ID NO: 36896 - DNA, 50 bp, unidentified; identical to SEQ ID NO: 34587
  source 1..50: mol_type = unassigned DNA; note = donor_a6ec347
  misc_feature 1..23: note = RE
  misc_feature 24..25: note = Core
  misc_feature 26..50: note = LE

SEQ ID NO: 36897 - DNA, 50 bp, unidentified
  source 1..50: mol_type = unassigned DNA; note = donor_a6eead6
  misc_feature 1..24: note = RE
  misc_feature 25: note = Core
  misc_feature 26..50: note = LE
tgcaaaaggcgtcgggtccatacatactgagatggacccgacgccacctt

SEQ ID NO: 36898 - DNA, 50 bp, unidentified; identical to SEQ ID NO: 31558
  source 1..50: mol_type = unassigned DNA; note = donor_a6f6994
  misc_feature 1..22: note = RE
  misc_feature 23..25: note = Core
  misc_feature 26..50: note = LE

SEQ ID NO: 36899 - DNA, 50 bp, unidentified
  source 1..50: mol_type = unassigned DNA; note = donor_a6fad0c
  misc_feature 1..23: note = RE
  misc_feature 24..25: note = Core
  misc_feature 26..50: note = LE
tgcagaaaagggggtaaccatagatgaaatggctacccccgccgccccct

SEQ ID NO: 36900 - DNA, 50 bp, unidentified
  source 1..50: mol_type = unassigned DNA; note = donor_a708c35
  misc_feature 1..23: note = RE
  misc_feature 24..25: note = Core
  misc_feature 26..50: note = LE
ctcaaacgggacgcgttcatatagaatgaaatgaacgcgtcctacccaga

SEQ ID NO: 36901 - DNA, 50 bp, unidentified
  source 1..50: mol_type = unassigned DNA; note = donor_a70ddb3
  misc_feature 1..23: note = RE
  misc_feature 24..25: note = Core
  misc_feature 26..50: note = LE
gcattagcggcggcaaccacacaagatggggtggttgccgcccatctccg

SEQ ID NO: 36902 - DNA, 50 bp, unidentified
  source 1..50: mol_type = unassigned DNA; note = donor_a70dee1
  misc_feature 1..24: note = RE
  misc_feature 25: note = Core
  misc_feature 26..50: note = LE
accacttgacgaacataggggcatctgtgaggatcatggcgtgctgtccc

SEQ ID NO: 36903 - DNA, 50 bp, unidentified
  source 1..50: mol_type = unassigned DNA; note = donor_a7128a6
  misc_feature 1..23: note = RE
  misc_feature 24..25: note = Core
  misc_feature 26..50: note = LE
tgcaagagggagccgtccacatatgttgggttggacggctcccagcggca

SEQ ID NO: 36904 - DNA, 50 bp, unidentified; identical to SEQ ID NO: 35854
  source 1..50: mol_type = unassigned DNA; note = donor_a7143ca
  misc_feature 1..23: note = RE
  misc_feature 24..25: note = Core
  misc_feature 26..50: note = LE

SEQ ID NO: 36905 - DNA, 50 bp, unidentified
  source 1..50: mol_type = unassigned DNA; note = donor_a71b931
  misc_feature 1..24: note = RE
  misc_feature 25: note = Core
  misc_feature 26..50: note = LE
agagaaaaacaaagattattatgggcattcctgttaagtaacaaataacc

SEQ ID NO: 36906 - DNA, 50 bp, unidentified
  source 1..50: mol_type = unassigned DNA; note = donor_a7229a4
  misc_feature 1..23: note = RE
  misc_feature 24..25: note = Core
  misc_feature 26..50: note = LE
gcgagtcgggggccatccacacatgatggggtggatggccccctcactgc

SEQ ID NO: 36907 - DNA, 50 bp, unidentified; identical to SEQ ID NO: 30761
  source 1..50: mol_type = unassigned DNA; note = donor_a72b364
  misc_feature 1..24: note = RE
  misc_feature 25: note = Core
  misc_feature 26..50: note = LE

SEQ ID NO: 36908 - DNA, 50 bp, unidentified
  source 1..50: mol_type = unassigned DNA; note = donor_a72d708
  misc_feature 1..24: note = RE
  misc_feature 25: note = Core
  misc_feature 26..50: note = LE
tatccttgctcaaatcctagatttcttttatctttgcactatcaatagga

SEQ ID NO: 36909 - DNA, 50 bp, unidentified; identical to SEQ ID NO: 30604
  source 1..50: mol_type = unassigned DNA; note = donor_a730270
  misc_feature 1..23: note = RE
  misc_feature 24..25: note = Core
  misc_feature 26..50: note = LE

SEQ ID NO: 36910 - DNA, 50 bp, unidentified
  source 1..50: mol_type = unassigned DNA; note = donor_a73cbd5
  misc_feature 1..23: note = RE
  misc_feature 24..25: note = Core
  misc_feature 26..50: note = LE
aaactgcccgcttgacacggttgcttgtatgtcggaaaatatgtcctgga

SEQ ID NO: 36911 - DNA, 50 bp, unidentified
  source 1..50: mol_type = unassigned DNA; note = donor_a73dcf3
  misc_feature 1..23: note = RE
  misc_feature 24..25: note = Core
  misc_feature 26..50: note = LE
gcattcaccggggcgtccacagatgatggggtggacgcccctcgacggca

SEQ ID NO: 36912 - DNA, 50 bp, unidentified
  source 1..50: mol_type = unassigned DNA; note = donor_a73de33
  misc_feature 1..23: note = RE
  misc_feature 24..25: note = Core
  misc_feature 26..50: note = LE
atagcttgcttttgtcatagaaatcctttagatttaaaaaatattaaatt

SEQ ID NO: 36913 - DNA, 50 bp, unidentified
  source 1..50: mol_type = unassigned DNA; note = donor_a7418c6
  misc_feature 1..23: note = RE
  misc_feature 24..25: note = Core
  misc_feature 26..50: note = LE
gaccgcttgcggacgtgggatgtctaatgggactgcaatagctgcctctc

SEQ ID NO: 36914 - DNA, 50 bp, unidentified
  source 1..50: mol_type = unassigned DNA; note = donor_a745919
  misc_feature 1..23: note = RE
  misc_feature 24..25: note = Core
  misc_feature 26..50: note = LE
cttgcgcaggaggcgtccatagattatgggatggacgcctcctgttttcc

SEQ ID NO: 36915 - DNA, 50 bp, unidentified
  source 1..50: mol_type = unassigned DNA; note = donor_a745e6c
  misc_feature 1..24: note = RE
  misc_feature 25: note = Core
  misc_feature 26..50: note = LE
ttgacaggtggggaagcccttgtagaatgaaagggacttccccgtcccga

SEQ ID NO: 36916 - DNA, 50 bp, unidentified
  source 1..50: mol_type = unassigned DNA; note = donor_a75e90f
  misc_feature 1..20: note = RE
  misc_feature 21..25: note = Core
  misc_feature 26..50: note = LE
cttgacaaacccatagccgactgctataaataagatgcgatgaatcttta

SEQ ID NO: 36917 - DNA, 50 bp, unidentified; identical to SEQ ID NO: 30919
  source 1..50: mol_type = unassigned DNA; note = donor_a76257b
  misc_feature 1..23: note = RE
  misc_feature 24..25: note = Core
  misc_feature 26..50: note = LE

SEQ ID NO: 36918 - DNA, 50 bp, unidentified
  source 1..50: mol_type = unassigned DNA; note = donor_a76265b
  misc_feature 1..23: note = RE
  misc_feature 24..25: note = Core
  misc_feature 26..50: note = LE
gcgccccaggggccgtccaaacatgttggggtggacggccccacggcatc

SEQ ID NO: 36919 - DNA, 50 bp, unidentified
  source 1..50: mol_type = unassigned DNA; note = donor_a762c67
  misc_feature 1..24: note = RE
  misc_feature 25: note = Core
  misc_feature 26..50: note = LE
ttgaataaacgggaaatccctgtagaatacgaagggacttcccgcaatcc

SEQ ID NO: 36920 - DNA, 50 bp, unidentified
  source 1..50: mol_type = unassigned DNA; note = donor_a76dcd0
  misc_feature 1..22: note = RE
  misc_feature 23..25: note = Core
  misc_feature 26..50: note = LE
ccgcttgacgttcaagacggtagcttgtatcttgaatgtgttgctggtta

SEQ ID NO: 36921 - DNA, 50 bp, unidentified
  source 1..50: mol_type = unassigned DNA; note = donor_a77576e
  misc_feature 1..21: note = RE
  misc_feature 22..25: note = Core
  misc_feature 26..50: note = LE
ggcttgacaacaccattgagattccgtaagactgtgggtggctcaggagg

SEQ ID NO: 36922 - DNA, 50 bp, unidentified
  source 1..50: mol_type = unassigned DNA; note = donor_a776579
  misc_feature 1..22: note = RE
  misc_feature 23..25: note = Core
  misc_feature 26..50: note = LE
cttgacaaggaaagccccatacaagatgctatggggcggcggcgaggata

SEQ ID NO: 36923 - DNA, 50 bp, unidentified
  source 1..50: mol_type = unassigned DNA; note = donor_a7771fc
  misc_feature 1..23: note = RE
  misc_feature 24..25: note = Core
  misc_feature 26..50: note = LE
gcattcgagggagcgtccacacacgatggggtggacgctcccacttaacg

SEQ ID NO: 36924 - DNA, 50 bp, unidentified
  source 1..50: mol_type = unassigned DNA; note = donor_a7774d5
  misc_feature 1..24: note = RE
  misc_feature 25: note = Core
  misc_feature 26..50: note = LE
ttgcaatcgggcggggtccatatacaatggtatggaccccgccctcacgc

SEQ ID NO: 36925 - DNA, 50 bp, unidentified
  source 1..50: mol_type = unassigned DNA; note = donor_a77913b
  misc_feature 1..24: note = RE
  misc_feature 25: note = Core
  misc_feature 26..50: note = LE
acatttgtttttcaactcagatcttcttaagtttgattttaattaaaaca

SEQ ID NO: 36926 - DNA, 50 bp, unidentified
  source 1..50: mol_type = unassigned DNA; note = donor_a786609
  misc_feature 1..23: note = RE
  misc_feature 24..25: note = Core
  misc_feature 26..50: note = LE
cctcttgactttttatagctggtctcgtataatagatttacggtttggat

SEQ ID NO: 36927 - DNA, 50 bp, unidentified
  source 1..50: mol_type = unassigned DNA; note = donor_a78a7e6
  misc_feature 1..23: note = RE
  misc_feature 24..25: note = Core
  misc_feature 26..50: note = LE
ttgacacgtggggagtccacataagataattggactccccataccttaat

SEQ ID NO: 36928 - DNA, 50 bp, unidentified
  source 1..50: mol_type = unassigned DNA; note = donor_a78edde
  misc_feature 1..23: note = RE
  misc_feature 24..25: note = Core
  misc_feature 26..50: note = LE
ggccttgacttttaatagttagtctcgtattataaagtagtagttattag

SEQ ID NO: 36929 - DNA, 50 bp, unidentified
  source 1..50: mol_type = unassigned DNA; note = donor_a790f8c
  misc_feature 1..23: note = RE
  misc_feature 24..25: note = Core
  misc_feature 26..50: note = LE
gacaacctaagcccctgggatgtctaataggggttgccggggttgccgat

SEQ ID NO: 36930 - DNA, 50 bp, unidentified
  source 1..50: mol_type = unassigned DNA; note = donor_a793e36
  misc_feature 1..23: note = RE
  misc_feature 24..25: note = Core
  misc_feature 26..50: note = LE
gacgcccgacggcccgttacggaagatgccgtaacgggcctgcgccgggg

SEQ ID NO: 36931 - DNA, 50 bp, unidentified
  source 1..50: mol_type = unassigned DNA; note = donor_a798514
  misc_feature 1..20: note = RE
  misc_feature 21..25: note = Core
  misc_feature 26..50: note = LE
gttgacaaattattagcaagtttgtacaatataagcatagatgaaaatta

SEQ ID NO: 36932 - DNA, 50 bp, unidentified
  source 1..50: mol_type = unassigned DNA; note = donor_a7a811b
  misc_feature 1..23: note = RE
  misc_feature 24..25: note = Core
  misc_feature 26..50: note = LE
ttgcaaaagggaggcgtccatatagaatgaaatggacgcctcccaccttt

SEQ ID NO: 36933 - DNA, 50 bp, unidentified
  source 1..50: mol_type = unassigned DNA; note = donor_a7af989
  misc_feature 1..23: note = RE
  misc_feature 24..25: note = Core
  misc_feature 26..50: note = LE
tccggtgaggttcaagacggtatcttgtatctcgactatcgctccgtcag

SEQ ID NO: 36934 - DNA, 50 bp, unidentified
  source 1..50: mol_type = unassigned DNA; note = donor_a7b841e
  misc_feature 1..21: note = RE
  misc_feature 22..25: note = Core
  misc_feature 26..50: note = LE
agcttgacaacctcattaagactccgtaagttgttgggcggcccaggagg

SEQ ID NO: 36935 - DNA, 50 bp, unidentified
  source 1..50: mol_type = unassigned DNA; note = donor_a7b9159
  misc_feature 1..22: note = RE
  misc_feature 23..25: note = Core
  misc_feature 26..50: note = LE
tcacttgacttattaatagttatcttgtatactctatttatgattatagt

SEQ ID NO: 36936 - DNA, 50 bp, unidentified
  source 1..50: mol_type = unassigned DNA; note = donor_a7ce96a
  misc_feature 1..24: note = RE
  misc_feature 25: note = Core
  misc_feature 26..50: note = LE
ttgcaaaacggggcggatcatatataatggaatgatccgcccctctcttc

SEQ ID NO: 36937 - DNA, 50 bp, unidentified; identical to SEQ ID NO: 34065
  source 1..50: mol_type = unassigned DNA; note = donor_a7d20d4
  misc_feature 1..23: note = RE
  misc_feature 24..25: note = Core
  misc_feature 26..50: note = LE

SEQ ID NO: 36938 - DNA, 50 bp, unidentified
  source 1..50: mol_type = unassigned DNA; note = donor_a7d5799
  misc_feature 1..23: note = RE
  misc_feature 24..25: note = Core
  misc_feature 26..50: note = LE
caaaccgggaggcgtccatataaggaatggacgcctccctcccgccgaag

SEQ ID NO: 36939 - DNA, 50 bp, unidentified
  source 1..50: mol_type = unassigned DNA; note = donor_a7dd2b5
  misc_feature 1..24: note = RE
  misc_feature 25: note = Core
  misc_feature 26..50: note = LE
gcaaaatgggacgcgttcatagagattgaaatgaacgcgtcccatccgtg

SEQ ID NO: 36940 - DNA, 50 bp, unidentified
  source 1..50: mol_type = unassigned DNA; note = donor_a7df084
  misc_feature 1..24: note = RE
  misc_feature 25: note = Core
  misc_feature 26..50: note = LE
tcagcttgacggagaccataggggcgttacctttttcgtggccccgcaat

SEQ ID NO: 36941 - DNA, 50 bp, unidentified
  source 1..50: mol_type = unassigned DNA; note = donor_a7ef6d0
  misc_feature 1..23: note = RE
  misc_feature 24..25: note = Core
  misc_feature 26..50: note = LE
aagaggcttgatcaagacggatacttgtcttatgaaggtcccagcttttg

SEQ ID NO: 36942 - DNA, 50 bp, unidentified
  source 1..50: mol_type = unassigned DNA; note = donor_a7f4de9
  misc_feature 1..22: note = RE
  misc_feature 23..25: note = Core
  misc_feature 26..50: note = LE
cgcagcgggggccgtccacacatgatgtcgtggacggctctcgcaccagc

SEQ ID NO: 36943 - DNA, 50 bp, unidentified; identical to SEQ ID NO: 32787
  source 1..50: mol_type = unassigned DNA; note = donor_a7f5b39
  misc_feature 1..24: note = RE
  misc_feature 25: note = Core
  misc_feature 26..50: note = LE

SEQ ID NO: 36944 - DNA, 50 bp, unidentified
  source 1..50: mol_type = unassigned DNA; note = donor_a7f9314
  misc_feature 1..24: note = RE
  misc_feature 25: note = Core
  misc_feature 26..50: note = LE
tgcgacgcacggccggaccatacataatgggatgatccggccgtgctcct

SEQ ID NO: 36945 - DNA, 50 bp, unidentified
  source 1..50: mol_type = unassigned DNA; note = donor_a8043ca
  misc_feature 1..23: note = RE
  misc_feature 24..25: note = Core
  misc_feature 26..50: note = LE
gcaggaagggggccgtccacatatgttggggtggacggcccccgaacggc

SEQ ID NO: 36946 - DNA, 50 bp, unidentified
  source 1..50: mol_type = unassigned DNA; note = donor_a819fa5
  misc_feature 1..23: note = RE
  misc_feature 24..25: note = Core
  misc_feature 26..50: note = LE
gcgagccgggggccatccacacatgatggggtggatggccccctcccacc

SEQ ID NO: 36947 - DNA, 50 bp, unidentified; identical to SEQ ID NO: 32150
  source 1..50: mol_type = unassigned DNA; note = donor_a82365c
  misc_feature 1..23: note = RE
  misc_feature 24..25: note = Core
  misc_feature 26..50: note = LE

SEQ ID NO: 36948 - DNA, 50 bp, unidentified
  source 1..50: mol_type = unassigned DNA; note = donor_a823b4f
  misc_feature 1..24: note = RE
  misc_feature 25: note = Core
  misc_feature 26..50: note = LE
gcggcttgacgaaaaccatagaggcgttacctttttcgtagcccgggtcc

SEQ ID NO: 36949 - DNA, 50 bp, unidentified
  source 1..50: mol_type = unassigned DNA; note = donor_a827b62
  misc_feature 1..24: note = RE
  misc_feature 25: note = Core
  misc_feature 26..50: note = LE
tgcaaaaacgggggcgaccatagataatgagatggtcacccccaccttaa

SEQ ID NO: 36950 - DNA, 50 bp, unidentified
  source 1..50: mol_type = unassigned DNA; note = donor_a827bd7
  misc_feature 1..23: note = RE
  misc_feature 24..25: note = Core
  misc_feature 26..50: note = LE
gcaatttgacccgcaattagacgacatggcgtaatcgcgggagcgagtcg

SEQ ID NO: 36951 - DNA, 50 bp, unidentified
  source 1..50: mol_type = unassigned DNA; note = donor_a8355c5
  misc_feature 1..21: note = RE
  misc_feature 22..25: note = Core
  misc_feature 26..50: note = LE
gcgagggttgacacaggatgtctcactgggctaccctccccgagaggtga

SEQ ID NO: 36952 - DNA, 50 bp, unidentified
  source 1..50: mol_type = unassigned DNA; note = donor_a83bc7b
  misc_feature 1..23: note = RE
  misc_feature 24..25: note = Core
  misc_feature 26..50: note = LE
cggcttgacatcttcattgagaatccttacctttcttggagggtgttcgt

SEQ ID NO: 36953 - DNA, 50 bp, unidentified
  source 1..50: mol_type = unassigned DNA; note = donor_a845e93
  misc_feature 1..24: note = RE
  misc_feature 25: note = Core
  misc_feature 26..50: note = LE
tgcaatagaggaggagtccatacacaatgggatggactcctcctcacccc

SEQ ID NO: 36954 - DNA, 50 bp, unidentified
  source 1..50: mol_type = unassigned DNA; note = donor_a8469db
  misc_feature 1..22: note = RE
  misc_feature 23..25: note = Core
  misc_feature 26..50: note = LE
atccctatactttctttcacactaatctccattccgccgccttcggctgg

SEQ ID NO: 36955 - DNA, 50 bp, unidentified
  source 1..50: mol_type = unassigned DNA; note = donor_a847da0
  misc_feature 1..23: note = RE
  misc_feature 24..25: note = Core
  misc_feature 26..50: note = LE
tggcttgacatttaatagttagtctcgtattatataaatatacccattct

SEQ ID NO: 36956 - DNA, 50 bp, unidentified
  source 1..50: mol_type = unassigned DNA; note = donor_a84a691
  misc_feature 1..23: note = RE
  misc_feature 24..25: note = Core
  misc_feature 26..50: note = LE
attgtttgatttagtcttagaattcctttagattcgaaaaatgaatagaa

SEQ ID NO: 36957 - DNA, 50 bp, unidentified
  source 1..50: mol_type = unassigned DNA; note = donor_a84eb8b
  misc_feature 1..23: note = RE
  misc_feature 24..25: note = Core
  misc_feature 26..50: note = LE
agatttgacttttaatagttagtctcgtattataaagtagtagtgtttat

SEQ ID NO: 36958 - DNA, 50 bp, unidentified
  source 1..50: mol_type = unassigned DNA; note = donor_a85e42d
  misc_feature 1..23: note = RE
  misc_feature 24..25: note = Core
  misc_feature 26..50: note = LE
ataacttgattttgtcatagaaatcctttagatttgaaaaagattaaatt

SEQ ID NO: 36959 - DNA, 50 bp, unidentified
  source 1..50: mol_type = unassigned DNA; note = donor_a860649
  misc_feature 1..23: note = RE
  misc_feature 24..25: note = Core
  misc_feature 26..50: note = LE
gggcctgttgacacacagaggcgctgacttgttgaatcgcggccaggacg

SEQ ID NO: 36960 - DNA, 50 bp, unidentified
  source 1..50: mol_type = unassigned DNA; note = donor_a8628e0
  misc_feature 1..24: note = RE
  misc_feature 25: note = Core
  misc_feature 26..50: note = LE
ttgcaatcgggcggggtccatatacaatggtatggaccccgccctcccgc

SEQ ID NO: 36961 - DNA, 50 bp, unidentified
  source 1..50: mol_type = unassigned DNA; note = donor_a86e31e
  misc_feature 1..23: note = RE
  misc_feature 24..25: note = Core
  misc_feature 26..50: note = LE
gccacgcgggagccatccatacatgatgaagtggatggctcccgcttccg

SEQ ID NO: 36962 - DNA, 50 bp, unidentified
  source 1..50: mol_type = unassigned DNA; note = donor_a8721ab
  misc_feature 1..24: note = RE
  misc_feature 25: note = Core
  misc_feature 26..50: note = LE
ttgacaaccgaggggatccatgtagaatgacatggatcccctctataccc

SEQ ID NO: 36963 - DNA, 50 bp, unidentified
  source 1..50: mol_type = unassigned DNA; note = donor_a8776db
  misc_feature 1..24: note = RE
  misc_feature 25: note = Core
  misc_feature 26..50: note = LE
tggcaaaccgggggcgaccatgtataatggaatggtcgccccctactcga

SEQ ID NO: 36964 - DNA, 50 bp, unidentified
  source 1..50: mol_type = unassigned DNA; note = donor_a888c79
  misc_feature 1..6: note = RE
  misc_feature 7..25: note = Core
  misc_feature 26..50: note = LE
aaaatcaaaagaggagatcctttggccttcggccttcggcctcaggatga

SEQ ID NO: 36965 - DNA, 50 bp, unidentified
  source 1..50: mol_type = unassigned DNA; note = donor_a890797
  misc_feature 1..24: note = RE
  misc_feature 25: note = Core
  misc_feature 26..50: note = LE
tgcaacgcacggccggaccatacataatggaatggtccggccgtgctccg

SEQ ID NO: 36966 - DNA, 50 bp, unidentified
  source 1..50: mol_type = unassigned DNA; note = donor_a891a16
  misc_feature 1..24: note = RE
  misc_feature 25: note = Core
  misc_feature 26..50: note = LE
ttgcggcacgggggccgtccacatatgatggtgtggacggccccctacgg

SEQ ID NO: 36967 - DNA, 50 bp, unidentified
  source 1..50: mol_type = unassigned DNA; note = donor_a89c026
  misc_feature 1..21: note = RE
  misc_feature 22..25: note = Core
  misc_feature 26..50: note = LE
aaatttgacaaaacttagataatcatgtataattctaaatataaagattt

SEQ ID NO: 36968 - DNA, 50 bp, unidentified
  source 1..50: mol_type = unassigned DNA; note = donor_a8a5a98
  misc_feature 1..23: note = RE
  misc_feature 24..25: note = Core
  misc_feature 26..50: note = LE
cgaactgacgagtaagacggtatcttgtatctcgaccaaggcctttaagt

SEQ ID NO: 36969 - DNA, 50 bp, unidentified
  source 1..50: mol_type = unassigned DNA; note = donor_a8a8dab
  misc_feature 1..23: note = RE
  misc_feature 24..25: note = Core
  misc_feature 26..50: note = LE
gggcttgacatttaataattagtctcgtataatatagagcagtagttttt

SEQ ID NO: 36970 - DNA, 50 bp, unidentified
  source 1..50: mol_type = unassigned DNA; note = donor_a8adc35
  misc_feature 1..24: note = RE
  misc_feature 25: note = Core
  misc_feature 26..50: note = LE
atgttgacaagctattagctggtatcgtattatgagatcaaccatttctt

SEQ ID NO: 36971 - DNA, 50 bp, unidentified
  source 1..50: mol_type = unassigned DNA; note = donor_a8b8fad
  misc_feature 1..23: note = RE
  misc_feature 24..25: note = Core
  misc_feature 26..50: note = LE
aactattgacttccttagttggtctcatatactaatagtataagaacagc

SEQ ID NO: 36972 - DNA, 50 bp, unidentified
  source 1..50: mol_type = unassigned DNA; note = donor_a8c8330
  misc_feature 1..24: note = RE
  misc_feature 25: note = Core
  misc_feature 26..50: note = LE
cactggttgacaacagaggggagcctactagaggattcccgtaggaccgg

SEQ ID NO: 36973 - DNA, 50 bp, unidentified
  source 1..50: mol_type = unassigned DNA; note = donor_a8e0337
  misc_feature 1..24: note = RE
  misc_feature 25: note = Core
  misc_feature 26..50: note = LE
tgccaactcggagccgtccacacatgatgctgtggacggctcctccaccg

SEQ ID NO: 36974 - DNA, 50 bp, unidentified
  source 1..50: mol_type = unassigned DNA; note = donor_a8eae72
  misc_feature 1..23: note = RE
  misc_feature 24..25: note = Core
  misc_feature 26..50: note = LE
ctcggcttgacaggggacatcagagaccgtatgtcccttcccttgaagag

SEQ ID NO: 36975 - DNA, 50 bp, unidentified
  source 1..50: mol_type = unassigned DNA; note = donor_a8f3afa
  misc_feature 1..24: note = RE
  misc_feature 25: note = Core
  misc_feature 26..50: note = LE
ttgcgatcgggcggggtccatatacaatggtatggaccccgccctccagg

SEQ ID NO: 36976 - DNA, 50 bp, unidentified
  source 1..50: mol_type = unassigned DNA; note = donor_a8f7be6
  misc_feature 1..23: note = RE
  misc_feature 24..25: note = Core
  misc_feature 26..50: note = LE
cctcttgactttttatagctggtctcgtataatgaatttacggtttgaat

SEQ ID NO: 36977 - DNA, 50 bp, unidentified
  source 1..50: mol_type = unassigned DNA; note = donor_a8fa437
  misc_feature 1..24: note = RE
  misc_feature 25: note = Core
  misc_feature 26..50: note = LE
tgcaatccgggaggcgtccacataatggtatggacgcctccccccggcaa

SEQ ID NO: 36978 - DNA, 50 bp, unidentified
  source 1..50: mol_type = unassigned DNA; note = donor_a8ff684
  misc_feature 1..24: note = RE
  misc_feature 25: note = Core
  misc_feature 26..50: note = LE
gcaaaccgataaggggtccatatacaatgggatggaccccttctcaccca

SEQ ID NO: 36979 - DNA, 50 bp, unidentified
  source 1..50: mol_type = unassigned DNA; note = donor_a900b49
  misc_feature 1..23: note = RE
  misc_feature 24..25: note = Core
  misc_feature 26..50: note = LE
cggcttgacaatctcattgagaatccttaccattttgcttgggcctctaa

SEQ ID NO: 36980 - DNA, 50 bp, unidentified; identical to SEQ ID NO: 34069
  source 1..50: mol_type = unassigned DNA; note = donor_a90dd7d
  misc_feature 1..24: note = RE
  misc_feature 25: note = Core
  misc_feature 26..50: note = LE

SEQ ID NO: 36981 - DNA, 50 bp, unidentified; identical to SEQ ID NO: 32453
  source 1..50: mol_type = unassigned DNA; note = donor_a92267b
  misc_feature 1..24: note = RE
  misc_feature 25: note = Core
  misc_feature 26..50: note = LE

SEQ ID NO: 36982 - DNA, 50 bp, unidentified
  source 1..50: mol_type = unassigned DNA; note = donor_a924a4d
  misc_feature 1..21: note = RE
  misc_feature 22..25: note = Core
  misc_feature 26..50: note = LE
ggcttgacttcatcattgagactccgtaagttgttgggcggcctgggagg

SEQ ID NO: 36983 - DNA, 50 bp, unidentified
  source 1..50: mol_type = unassigned DNA; note = donor_a925934
  misc_feature 1..23: note = RE
  misc_feature 24..25: note = Core
  misc_feature 26..50: note = LE
gcatttttagcggcaaccacagaagatggggtggttgccgcctccctcga

SEQ ID NO: 36984 - DNA, 50 bp, unidentified
  source 1..50: mol_type = unassigned DNA; note = donor_a925a94
  misc_feature 1..22: note = RE
  misc_feature 23..25: note = Core
  misc_feature 26..50: note = LE
gacttgacagagaacataatcgcttgtatgtttggggaaggtggcagacc

SEQ ID NO: 36985 - DNA, 50 bp, unidentified
  source 1..50: mol_type = unassigned DNA; note = donor_a9269e8
  misc_feature 1..23: note = RE
  misc_feature 24..25: note = Core
  misc_feature 26..50: note = LE
gggcttgacttttaatagttagtcttgtattatagagtcgtagtttttag

SEQ ID NO: 36986 - DNA, 50 bp, unidentified; identical to SEQ ID NO: 30373
  source 1..50: mol_type = unassigned DNA; note = donor_a92a41e
  misc_feature 1..23: note = RE
  misc_feature 24..25: note = Core
  misc_feature 26..50: note = LE

SEQ ID NO: 36987 - DNA, 50 bp, unidentified
  source 1..50: mol_type = unassigned DNA; note = donor_a92dd7e
  misc_feature 1..23: note = RE
  misc_feature 24..25: note = Core
  misc_feature 26..50: note = LE
actattgactttccatagttggtcttgtatgatatacacatagcaaaagc

SEQ ID NO: 36988 - DNA, 50 bp, unidentified
  source 1..50: mol_type = unassigned DNA; note = donor_a93014d
  misc_feature 1..24: note = RE
  misc_feature 25: note = Core
  misc_feature 26..50: note = LE
gccgcttgacaaacagaagggcgtcagtcagaagatggtcgccagttccc

SEQ ID NO: 36989 - DNA, 50 bp, unidentified
  source 1..50: mol_type = unassigned DNA; note = donor_a931166
  misc_feature 1..22: note = RE
  misc_feature 23..25: note = Core
  misc_feature 26..50: note = LE
tgaatgactgggcaagacagttgcttgtgtctaaagaaaggaataaagtc

SEQ ID NO: 36990 - DNA, 50 bp, unidentified
  source 1..50: mol_type = unassigned DNA; note = donor_a932b15
  misc_feature 1..23: note = RE
  misc_feature 24..25: note = Core
  misc_feature 26..50: note = LE
atgatttggttgtgtcatagaaatcctttagatttgtttagcagtatttc

SEQ ID NO: 36991 - DNA, 50 bp, unidentified; identical to SEQ ID NO: 31352
  source 1..50: mol_type = unassigned DNA; note = donor_a93d83f
  misc_feature 1..20: note = RE
  misc_feature 21..25: note = Core
  misc_feature 26..50: note = LE

SEQ ID NO: 36992 - DNA, 50 bp, unidentified
  source 1..50: mol_type = unassigned DNA; note = donor_a93e88f
  misc_feature 1..24: note = RE
  misc_feature 25: note = Core
  misc_feature 26..50: note = LE
tgcagtcgggcggcggaccatacataatgagatggtccgccgtttgattc

SEQ ID NO: 36993 - DNA, 50 bp, unidentified
  source 1..50: mol_type = unassigned DNA; note = donor_a94f7ce
  misc_feature 1..23: note = RE
  misc_feature 24..25: note = Core
  misc_feature 26..50: note = LE
ctcttgacaagaccctatgggatctgatatacgtccttgtacggggtcgg

SEQ ID NO: 36994 - DNA, 50 bp, unidentified
  source 1..50: mol_type = unassigned DNA; note = donor_a94fb12
  misc_feature 1..23: note = RE
  misc_feature 24..25: note = Core
  misc_feature 26..50: note = LE
atatcttgactctttatagttagtcgtataataaagtagtagtatttata

SEQ ID NO: 36995 - DNA, 50 bp, unidentified
  source 1..50: mol_type = unassigned DNA; note = donor_a95012c
  misc_feature 1..23: note = RE
  misc_feature 24..25: note = Core
  misc_feature 26..50: note = LE
ctacttgacttcataccattagactcgtataataagatttgcagatgaat

SEQ ID NO: 36996 - DNA, 50 bp, unidentified
  source 1..50: mol_type = unassigned DNA; note = donor_a95573e
  misc_feature 1..22: note = RE
  misc_feature 23..25: note = Core
  misc_feature 26..50: note = LE
gctcttgatttttgttagcaggtttagtaccatagaaagtgtaattgtta

SEQ ID NO: 36997 - DNA, 50 bp, unidentified; identical to SEQ ID NO: 35018
  source 1..50: mol_type = unassigned DNA; note = donor_a9573ac
  misc_feature 1..23: note = RE
  misc_feature 24..25: note = Core
  misc_feature 26..50: note = LE

SEQ ID NO: 36998 - DNA, 50 bp, unidentified; identical to SEQ ID NO: 34338
  source 1..50: mol_type = unassigned DNA; note = donor_a95a110
  misc_feature 1..23: note = RE
  misc_feature 24..25: note = Core
  misc_feature 26..50: note = LE

SEQ ID NO: 36999 - DNA, 50 bp, unidentified; identical to SEQ ID NO: 31332
  source 1..50: mol_type = unassigned DNA; note = donor_a95b9b3
  misc_feature 1..23: note = RE
  misc_feature 24..25: note = Core
  misc_feature 26..50: note = LE

SEQ ID NO: 37000 - DNA, 50 bp, unidentified
  source 1..50: mol_type = unassigned DNA; note = donor_a965c18
  misc_feature 1..23: note = RE
  misc_feature 24..25: note = Core
  misc_feature 26..50: note = LE
aactattgactttcttagttggtctcatatactaatagtataagaacagc

SEQ ID NO: 37001 - DNA, 50 bp, unidentified
  source 1..50: mol_type = unassigned DNA; note = donor_a96c0c8
  misc_feature 1..23: note = RE
  misc_feature 24..25: note = Core
  misc_feature 26..50: note = LE
atgcttgactttcaacagagaatcttgtatgttgcggtcagaggcgtgag

SEQ ID NO: 37002 - DNA, 50 bp, unidentified
  source 1..50: mol_type = unassigned DNA; note = donor_a96fd79
  misc_feature 1..23: note = RE
  misc_feature 24..25: note = Core
  misc_feature 26..50: note = LE
gagcttgactttttatttgcaggctgttactatatatttgccccttgatt

SEQ ID NO: 37003 - DNA, 50 bp, unidentified
  source 1..50: mol_type = unassigned DNA; note = donor_a971e53
  misc_feature 1..23: note = RE
  misc_feature 24..25: note = Core
  misc_feature 26..50: note = LE
ttgccgacgggcgggccatacgtttatggaatggcccgccctcctttgag

SEQ ID NO: 37004 - DNA, 50 bp, unidentified
  source 1..50: mol_type = unassigned DNA; note = donor_a9749e8
  misc_feature 1..23: note = RE
  misc_feature 24..25: note = Core
  misc_feature 26..50: note = LE
gcaacgcaggggccgtccatacatgatgctgtggacggcccctgatgcgg

SEQ ID NO: 37005 - DNA, 50 bp, unidentified
  source 1..50: mol_type = unassigned DNA; note = donor_a978ff7
  misc_feature 1..23: note = RE
  misc_feature 24..25: note = Core
  misc_feature 26..50: note = LE
tgaccgcggggtcgttccacatatgatgttgtggaacgaccccgctcccg

SEQ ID NO: 37006 - DNA, 50 bp, unidentified
  source 1..50: mol_type = unassigned DNA; note = donor_a97a587
  misc_feature 1..22: note = RE
  misc_feature 23..25: note = Core
  misc_feature 26..50: note = LE
atgcttgacaagtattagctggtttcgtattattaggtcaaccagaatat

SEQ ID NO: 37007 - DNA, 50 bp, unidentified
  source 1..50: mol_type = unassigned DNA; note = donor_a97e117
  misc_feature 1..23: note = RE
  misc_feature 24..25: note = Core
  misc_feature 26..50: note = LE
aagcccctccatcaacacagttgcttatctgatcggaatctggcagcgta

SEQ ID NO: 37008 - DNA, 50 bp, unidentified; identical to SEQ ID NO: 30820
  source 1..50: mol_type = unassigned DNA; note = donor_a987e75
  misc_feature 1..23: note = RE
  misc_feature 24..25: note = Core
  misc_feature 26..50: note = LE

SEQ ID NO: 37009 - DNA, 50 bp, unidentified
  source 1..50: mol_type = unassigned DNA; note = donor_a98a6db
  misc_feature 1..24: note = RE
  misc_feature 25: note = Core
  misc_feature 26..50: note = LE
gcaaaatcgggaggcgtccatgtaatgtaatggacgcctcccttcttagg

SEQ ID NO: 37010 - DNA, 50 bp, unidentified
  source 1..50: mol_type = unassigned DNA; note = donor_a98f2e9
  misc_feature 1..23: note = RE
  misc_feature 24..25: note = Core
  misc_feature 26..50: note = LE
tattgattgactttttatagttggtataatatatttaggttattaaatag

SEQ ID NO: 37011 - DNA, 50 bp, unidentified
  source 1..50: mol_type = unassigned DNA; note = donor_a99ab58
  misc_feature 1..23: note = RE
  misc_feature 24..25: note = Core
  misc_feature 26..50: note = LE
catacgcaccataaacacagttgcctgtgtgtttgaggtgtcgtaggatg

SEQ ID NO: 37012 - DNA, 50 bp, unidentified
  source 1..50: mol_type = unassigned DNA; note = donor_a99ddb1
  misc_feature 1..23: note = RE
  misc_feature 24..25: note = Core
  misc_feature 26..50: note = LE
ctcgcttgaactcaacacagttacttgtatctttaatctttgctgctttg

SEQ ID NO: 37013 - DNA, 50 bp, unidentified
  source 1..50: mol_type = unassigned DNA; note = donor_a9a24d6
  misc_feature 1..21: note = RE
  misc_feature 22..25: note = Core
  misc_feature 26..50: note = LE
cggcggcttgacacagggcaactcactggtgcaccctccttgtgtccgag

SEQ ID NO: 37014 - DNA, 50 bp, unidentified
  source 1..50: mol_type = unassigned DNA; note = donor_a9af473
  misc_feature 1..23: note = RE
  misc_feature 24..25: note = Core
  misc_feature 26..50: note = LE
tttttgcgcatttttattcacacttcctccatttccccgcgcctaaggtc

SEQ ID NO: 37015 - DNA, 50 bp, unidentified
  source 1..50: mol_type = unassigned DNA; note = donor_a9d10e4
  misc_feature 1..23: note = RE
  misc_feature 24..25: note = Core
  misc_feature 26..50: note = LE
gcaataagggcgccgtccatacatgatgtagtggacggcgccccgcgcgg

SEQ ID NO: 37016 - DNA, 50 bp, unidentified; identical to SEQ ID NO: 32172
  source 1..50: mol_type = unassigned DNA; note = donor_a9deed0
  misc_feature 1..24: note = RE
  misc_feature 25: note = Core
  misc_feature 26..50: note = LE

SEQ ID NO: 37017 - DNA, 50 bp, unidentified
  source 1..50: mol_type = unassigned DNA; note = donor_a9dff88
  misc_feature 1..23: note = RE
  misc_feature 24..25: note = Core
  misc_feature 26..50: note = LE
ggcttgacaacgagacaggaacaccttaccttggtcgtaggccatgaggg

SEQ ID NO: 37018 - DNA, 50 bp, unidentified
  source 1..50: mol_type = unassigned DNA; note = donor_a9e83ff
  misc_feature 1..23: note = RE
  misc_feature 24..25: note = Core
  misc_feature 26..50: note = LE
cttgcgcatggggcgtctacacatgatgctgtagacgccccccgacggcg

SEQ ID NO: 37019 - DNA, 50 bp, unidentified
  source 1..50: mol_type = unassigned DNA; note = donor_a9e8b76
  misc_feature 1..20: note = RE
  misc_feature 21..25: note = Core
  misc_feature 26..50: note = LE
tgacaaagaacatggggacacccccttaccttcttgggtgtgcccgggcc

SEQ ID NO: 37020 - DNA, 50 bp, unidentified; identical to SEQ ID NO: 30609
  source 1..50: mol_type = unassigned DNA; note = donor_a9e9d5b
  misc_feature 1..22: note = RE
  misc_feature 23..25: note = Core
  misc_feature 26..50: note = LE

SEQ ID NO: 37021 - DNA, 50 bp, unidentified
  source 1..50: mol_type = unassigned DNA; note = donor_a9ef4e8
  misc_feature 1..24: note = RE
  misc_feature 25: note = Core
  misc_feature 26..50: note = LE
tgcagtccagcggcggatcatacataatgggatgatccgccgcttgcttc

SEQ ID NO: 37022 - DNA, 50 bp, unidentified
  source 1..50: mol_type = unassigned DNA; note = donor_a9ef7ff
  misc_feature 1..21: note = RE
  misc_feature 22..25: note = Core
  misc_feature 26..50: note = LE
tattgacacaagttagcaggtttgctacaatggtgttggttctgagaagc

SEQ ID NO: 37023 - DNA, 50 bp, unidentified
  source 1..50: mol_type = unassigned DNA; note = donor_a9f6a0b
  misc_feature 1..23: note = RE
  misc_feature 24..25: note = Core
  misc_feature 26..50: note = LE
cacggtaaggcgcaagacggtatcttgtatctcgaccatagcctcctgcg

SEQ ID NO: 37024 - DNA, 50 bp, unidentified
  source 1..50: mol_type = unassigned DNA; note = donor_a9fecfb
  misc_feature 1..24: note = RE
  misc_feature 25: note = Core
  misc_feature 26..50: note = LE
tgcaaaacgggaggagtccatatacaatgggatggactcctcctacctat

SEQ ID NO: 37025 - DNA, 50 bp, unidentified
  source 1..50: mol_type = unassigned DNA; note = donor_aa07dac
  misc_feature 1..24: note = RE
  misc_feature 25: note = Core
  misc_feature 26..50: note = LE
gcagcttgacaaaaaacataggggcgttacctttttcgtagccctttcct

SEQ ID NO: 37026 - DNA, 50 bp, unidentified
  source 1..50: mol_type = unassigned DNA; note = donor_aa0916d
  misc_feature 1..23: note = RE
  misc_feature 24..25: note = Core
  misc_feature 26..50: note = LE
ggcttgacaaacaccattaggaatccctacgttgttctgcgggacgcggt

SEQ ID NO: 37027 - DNA, 50 bp, unidentified
  source 1..50: mol_type = unassigned DNA; note = donor_aa0ede2
  misc_feature 1..23: note = RE
  misc_feature 24..25: note = Core
  misc_feature 26..50: note = LE
gacaggttaggggccaggggtgtctaatgggactggaaggtttgtctcgg

SEQ ID NO: 37028 - DNA, 50 bp, unidentified
  source 1..50: mol_type = unassigned DNA; note = donor_aa151be
  misc_feature 1..23: note = RE
  misc_feature 24..25: note = Core
  misc_feature 26..50: note = LE
aacccgctacctaaacatggttgcttgtatgttcgatggctgctagcttg

SEQ ID NO: 37029 - DNA, 50 bp, unidentified
  source 1..50: mol_type = unassigned DNA; note = donor_aa15bc8
  misc_feature 1..22: note = RE
  misc_feature 23..25: note = Core
  misc_feature 26..50: note = LE
atatttgcttttaaacacagttcatcctatgtttgtaggcgccggattta

SEQ ID NO: 37030 - DNA, 50 bp, unidentified; identical to SEQ ID NO: 31773
  source 1..50: mol_type = unassigned DNA; note = donor_aa27613
  misc_feature 1..24: note = RE
  misc_feature 25: note = Core
  misc_feature 26..50: note = LE

SEQ ID NO: 37031 - DNA, 50 bp, unidentified; identical to SEQ ID NO: 33894
  source 1..50: mol_type = unassigned DNA; note = donor_aa3032b
  misc_feature 1..22: note = RE
  misc_feature 23..25: note = Core
  misc_feature 26..50: note = LE

SEQ ID NO: 37032 - DNA, 50 bp, unidentified
  source 1..50: mol_type = unassigned DNA; note = donor_aa31065
  misc_feature 1..23: note = RE
  misc_feature 24..25: note = Core
  misc_feature 26..50: note = LE
tcccttgacttttatttgcaggtctgatacaatataattggccgagaaag

SEQ ID NO: 37033 - DNA, 50 bp, unidentified
  source 1..50: mol_type = unassigned DNA; note = donor_aa333bc
  misc_feature 1..22: note = RE
  misc_feature 23..25: note = Core
  misc_feature 26..50: note = LE
gacatctacagccgtgggatatctaatggggtcgaccacctcgcttcttg

SEQ ID NO: 37034 - DNA, 50 bp, unidentified
  source 1..50: mol_type = unassigned DNA; note = donor_aa33d62
  misc_feature 1..23: note = RE
  misc_feature 24..25: note = Core
  misc_feature 26..50: note = LE
accgcccttgaccaagacagatacttgtcttatggaattcttggctcctg

SEQ ID NO: 37035 - DNA, 50 bp, unidentified
  source 1..50: mol_type = unassigned DNA; note = donor_aa35b03
  misc_feature 1..24: note = RE
  misc_feature 25: note = Core
  misc_feature 26..50: note = LE
accgcttgacttctataggagcatcagtgatgatgtgggagcgggtcacc

SEQ ID NO: 37036 - DNA, 50 bp, unidentified
  source 1..50: mol_type = unassigned DNA; note = donor_aa4128b
  misc_feature 1..24: note = RE
  misc_feature 25: note = Core
  misc_feature 26..50: note = LE
tgacatgccggggaagcccttatagaatggaagggacttcccctcgttat

SEQ ID NO: 37037 - DNA, 50 bp, unidentified
  source 1..50: mol_type = unassigned DNA; note = donor_aa45f41
  misc_feature 1..23: note = RE
  misc_feature 24..25: note = Core
  misc_feature 26..50: note = LE
agacttgacttctaatagttagtcttgtattatagagtagtagttattag

SEQ ID NO: 37038 - DNA, 50 bp, unidentified
  source 1..50: mol_type = unassigned DNA; note = donor_aa4926b
  misc_feature 1..23: note = RE
  misc_feature 24..25: note = Core
  misc_feature 26..50: note = LE
aagattgactttaaacagagtatcttgtatgatcaaaattaatgaaatat

SEQ ID NO: 37039 - DNA, 50 bp, unidentified
  source 1..50: mol_type = unassigned DNA; note = donor_aa54961
  misc_feature 1..23: note = RE
  misc_feature 24..25: note = Core
  misc_feature 26..50: note = LE
gcgcagcgagagccgtccacacatgatgtcgtggacggctctcgcaccag

SEQ ID NO: 37040 - DNA, 50 bp, unidentified
  source 1..50: mol_type = unassigned DNA; note = donor_aa603f6
  misc_feature 1..24: note = RE
  misc_feature 25: note = Core
  misc_feature 26..50: note = LE
ccagcacttgacacaaaggggagcctacttagagactgggggtaggaccg

SEQ ID NO: 37041 - DNA, 50 bp, unidentified
  source 1..50: mol_type = unassigned DNA; note = donor_aa6ba89
  misc_feature 1..23: note = RE
  misc_feature 24..25: note = Core
  misc_feature 26..50: note = LE
gcataacgggcgggaaccacagaagatggggtggttgccgccctcccgga

SEQ ID NO: 37042 - DNA, 50 bp, unidentified; identical to SEQ ID NO: 34117
  source 1..50: mol_type = unassigned DNA; note = donor_aa6f80f
  misc_feature 1..23: note = RE
  misc_feature 24..25: note = Core
  misc_feature 26..50: note = LE

SEQ ID NO: 37043 - DNA, 50 bp, unidentified
  source 1..50: mol_type = unassigned DNA; note = donor_aa7851e
  misc_feature 1..23: note = RE
  misc_feature 24..25: note = Core
  misc_feature 26..50: note = LE
acgcttgcgttttaatagagtatcttgtatattaaacatatctcttaaac

SEQ ID NO: 37044 - DNA, 50 bp, unidentified
  source 1..50: mol_type = unassigned DNA; note = donor_aa786fd
  misc_feature 1..24: note = RE
  misc_feature 25: note = Core
  misc_feature 26..50: note = LE
tgccacacgggaggcgtccatataatggtatggacgcctcccacctgctg

SEQ ID NO: 37045 - DNA, 50 bp, unidentified
  source 1..50: mol_type = unassigned DNA; note = donor_aa7b2bf
  misc_feature 1..23: note = RE
  misc_feature 24..25: note = Core
  misc_feature 26..50: note = LE
cctattgactttttatttgcagactattacaatgtatttacggtctaagg

SEQ ID NO: 37046 - DNA, 50 bp, unidentified
  source 1..50: mol_type = unassigned DNA; note = donor_aa7c21c
  misc_feature 1..23: note = RE
  misc_feature 24..25: note = Core
  misc_feature 26..50: note = LE
gaacttgactttgaagacggttacttgtatgttcagaccagaccagtgcg

SEQ ID NO: 37047 - DNA, 50 bp, unidentified
  source 1..50: mol_type = unassigned DNA; note = donor_aa8bb99
  misc_feature 1..24: note = RE
  misc_feature 25: note = Core
  misc_feature 26..50: note = LE
ccacttattgcttttctacatagcagtaattatgtaagaaaagcatagtg

SEQ ID NO: 37048 - DNA, 50 bp, unidentified
  source 1..50: mol_type = unassigned DNA; note = donor_aa8c3f7
  misc_feature 1..23: note = RE
  misc_feature 24..25: note = Core
  misc_feature 26..50: note = LE
ctgcttgactccaaagacggttacttgtatgtttaagccagaccagtacg

SEQ ID NO: 37049 - DNA, 50 bp, unidentified
  source 1..50: mol_type = unassigned DNA; note = donor_aa9148d
  misc_feature 1..23: note = RE
  misc_feature 24..25: note = Core
  misc_feature 26..50: note = LE
tgccatggagggccgtccacatatgatgatgtggacggcctctcctcaac

SEQ ID NO: 37050 - DNA, 50 bp, unidentified
  source 1..50: mol_type = unassigned DNA; note = donor_aa9898b
  misc_feature 1..21: note = RE
  misc_feature 22..25: note = Core
  misc_feature 26..50: note = LE
caacgcgggcgtcgtccacacatgatgtggtggacgacgcccgctcccga

SEQ ID NO: 37051 - DNA, 50 bp, unidentified; identical to SEQ ID NO: 31193
  source 1..50: mol_type = unassigned DNA; note = donor_aaa19ec
  misc_feature 1..22: note = RE
  misc_feature 23..25: note = Core
  misc_feature 26..50: note = LE

SEQ ID NO: 37052 - DNA, 50 bp, unidentified
  source 1..50: mol_type = unassigned DNA; note = donor_aaa2461
  misc_feature 1..23: note = RE
  misc_feature 24..25: note = Core
  misc_feature 26..50: note = LE
tctattgacttttcctttgcagactattacaataagatttacggtaagag

SEQ ID NO: 37053 - DNA, 50 bp, unidentified
  source 1..50: mol_type = unassigned DNA; note = donor_aaa7a87
  misc_feature 1..21: note = RE
  misc_feature 22..25: note = Core
  misc_feature 26..50: note = LE
cttgaccggggacataagagactagacgttatgtccccagtttgaagtcg

SEQ ID NO: 37054 - DNA, 50 bp, unidentified
  source 1..50: mol_type = unassigned DNA; note = donor_aaac4a7
  misc_feature 1..24: note = RE
  misc_feature 25: note = Core
  misc_feature 26..50: note = LE
cgcctcttgacaacagaggggagcctactagacgattcctttaggaccgg

SEQ ID NO: 37055 - DNA, 50 bp, unidentified
  source 1..50: mol_type = unassigned DNA; note = donor_aab52a9
  misc_feature 1..23: note = RE
  misc_feature 24..25: note = Core
  misc_feature 26..50: note = LE
tgacaactacagccgtgggatgtctaataggggttggtcgtcgtggccgg

SEQ ID NO: 37056 - DNA, 50 bp, unidentified
  source 1..50: mol_type = unassigned DNA; note = donor_aabcef7
  misc_feature 1..22: note = RE
  misc_feature 23..25: note = Core
  misc_feature 26..50: note = LE
aatgttgacaaactattagatggttcgtattataaggtcaccagatattt

SEQ ID NO: 37057 - DNA, 50 bp, unidentified; identical to SEQ ID NO: 35044
  source 1..50: mol_type = unassigned DNA; note = donor_aabd51e
  misc_feature 1..23: note = RE
  misc_feature 24..25: note = Core
  misc_feature 26..50: note = LE

SEQ ID NO: 37058 - DNA, 50 bp, unidentified
  source 1..50: mol_type = unassigned DNA; note = donor_aac1340
  misc_feature 1..24: note = RE
  misc_feature 25: note = Core
  misc_feature 26..50: note = LE
tgcaaaccggggggagtccatatacaatggaatggactccccccacctga

SEQ ID NO: 37059 - DNA, 50 bp, unidentified
  source 1..50: mol_type = unassigned DNA; note = donor_aac8e77
  misc_feature 1..23: note = RE
  misc_feature 24..25: note = Core
  misc_feature 26..50: note = LE
gccacacgggaggcgtccatataagatggtatggacgcctcccacccgct

SEQ ID NO: 37060 - DNA, 50 bp, unidentified; identical to SEQ ID NO: 31537
  source 1..50: mol_type = unassigned DNA; note = donor_aad1ef0
  misc_feature 1..23: note = RE
  misc_feature 24..25: note = Core
  misc_feature 26..50: note = LE

SEQ ID NO: 37061 - DNA, 50 bp, unidentified
  source 1..50: mol_type = unassigned DNA; note = donor_aaf8d2b
  misc_feature 1..24: note = RE
  misc_feature 25: note = Core
  misc_feature 26..50: note = LE
ttgcaagacggggcggtccatatataatggtatggaccgtcccgcccctc

SEQ ID NO: 37062 - DNA, 50 bp, unidentified
  source 1..50: mol_type = unassigned DNA; note = donor_ab03241
  misc_feature 1..22: note = RE
  misc_feature 23..25: note = Core
  misc_feature 26..50: note = LE
tgacttgacaagtattagctggtttcgtattattaggtcaaccagagatt

SEQ ID NO: 37063 - DNA, 50 bp, unidentified
  source 1..50: mol_type = unassigned DNA; note = donor_ab04a24
  misc_feature 1..23: note = RE
  misc_feature 24..25: note = Core
  misc_feature 26..50: note = LE
gcaattaccgggctgaccatagattaatgagatggtcagcccggtccctc

SEQ ID NO: 37064 - DNA, 50 bp, unidentified
  source 1..50: mol_type = unassigned DNA; note = donor_ab082cb
  misc_feature 1..21: note = RE
  misc_feature 22..25: note = Core
  misc_feature 26..50: note = LE
cggcagcttgacacagggcttctcactggtgcaccatccctgtgtcagtg

SEQ ID NO: 37065 - DNA, 50 bp, unidentified
  source 1..50: mol_type = unassigned DNA; note = donor_ab089dc
  misc_feature 1..23: note = RE
  misc_feature 24..25: note = Core
  misc_feature 26..50: note = LE
cgcaaacggggggcgttcatgtagaatgaaatgaacgccccccacttcgg

SEQ ID NO: 37066 - DNA, 50 bp, unidentified
  source 1..50: mol_type = unassigned DNA; note = donor_ab08bb6
  misc_feature 1..23: note = RE
  misc_feature 24..25: note = Core
  misc_feature 26..50: note = LE
ttctattgactattcatagttggtcatttccctcttgtatgatgtattta

SEQ ID NO: 37067 - DNA, 50 bp, unidentified
  source 1..50: mol_type = unassigned DNA; note = donor_ab17b32
  misc_feature 1..23: note = RE
  misc_feature 24..25: note = Core
  misc_feature 26..50: note = LE
gcagggaggaggccgtccacatatgttggggtggacggcctccatacggc

SEQ ID NO: 37068 - DNA, 50 bp, unidentified
  source 1..50: mol_type = unassigned DNA; note = donor_ab19203
  misc_feature 1..24: note = RE
  misc_feature 25: note = Core
  misc_feature 26..50: note = LE
aacgcttgacgaaggacataggggccgttactatcttcacgtcccgataa

SEQ ID NO: 37069 - DNA, 50 bp, unidentified
  source 1..50: mol_type = unassigned DNA; note = donor_ab1c633
  misc_feature 1..23: note = RE
  misc_feature 24..25: note = Core
  misc_feature 26..50: note = LE
gcaaccgaaggggcgtccacagatgatggggtggacgccccccgacggca

SEQ ID NO: 37070 - DNA, 50 bp, unidentified
  source 1..50: mol_type = unassigned DNA; note = donor_ab1e5ed
  misc_feature 1..23: note = RE
  misc_feature 24..25: note = Core
  misc_feature 26..50: note = LE
gcaacaagggcgtcgtccacacatgatgaggtggacgacgcccgctcccg

SEQ ID NO: 37071 - DNA, 50 bp, unidentified; identical to SEQ ID NO: 32150
  source 1..50: mol_type = unassigned DNA; note = donor_ab20831
  misc_feature 1..23: note = RE
  misc_feature 24..25: note = Core
  misc_feature 26..50: note = LE

SEQ ID NO: 37072 - DNA, 50 bp, unidentified
  source 1..50: mol_type = unassigned DNA; note = donor_ab20978
  misc_feature 1..23: note = RE
  misc_feature 24..25: note = Core
  misc_feature 26..50: note = LE
gctctcaacccgccgaatagagaagatgggatattcggcttgagccccat

SEQ ID NO: 37073 - DNA, 50 bp, unidentified
  source 1..50: mol_type = unassigned DNA; note = donor_ab25628
  misc_feature 1..23: note = RE
  misc_feature 24..25: note = Core
  misc_feature 26..50: note = LE
caatgcaggagccgttcacaaaagatggagtgaacggctcctgctctccg

SEQ ID NO: 37074 - DNA, 50 bp, unidentified
  source 1..50: mol_type = unassigned DNA; note = donor_ab30f04
  misc_feature 1..22: note = RE
  misc_feature 23..25: note = Core
  misc_feature 26..50: note = LE
ccaaacgggaggcgtccatataagatggtatggacgccaccctcctgccg

SEQ ID NO: 37075 - DNA, 50 bp, unidentified
  source 1..50: mol_type = unassigned DNA; note = donor_ab35213
  misc_feature 1..23: note = RE
  misc_feature 24..25: note = Core
  misc_feature 26..50: note = LE
gacaagttacggccgtgggatgtctaatggggatcgaccacttcgtgcct

SEQ ID NO: 37076 - DNA, 50 bp, unidentified
  source 1..50: mol_type = unassigned DNA; note = donor_ab37669
  misc_feature 1..23: note = RE
  misc_feature 24..25: note = Core
  misc_feature 26..50: note = LE
acaggtgcggcctttttcatagaagatgggatgaaaaggaggcgtacctt

SEQ ID NO: 37077 - DNA, 50 bp, unidentified
  source 1..50: mol_type = unassigned DNA; note = donor_ab38190
  misc_feature 1..24: note = RE
  misc_feature 25: note = Core
  misc_feature 26..50: note = LE
tcttgctacgcgggccgttccacatgatgacgtggaacggcccgcactca

SEQ ID NO: 37078 - DNA, 50 bp, unidentified
  source 1..50: mol_type = unassigned DNA; note = donor_ab4a58b
  misc_feature 1..24: note = RE
  misc_feature 25: note = Core
  misc_feature 26..50: note = LE
gtcttgactatttatagtttgacacgtataatccaattatcttagatggt

SEQ ID NO: 37079 - DNA, 50 bp, unidentified
  source 1..50: mol_type = unassigned DNA; note = donor_ab4a71a
  misc_feature 1..22: note = RE
  misc_feature 23..25: note = Core
  misc_feature 26..50: note = LE
acgaaagagataggggcacccccccgttaccttctagacggccccgatct

SEQ ID NO: 37080 - DNA, 50 bp, unidentified
  source 1..50: mol_type = unassigned DNA; note = donor_ab4bc21
  misc_feature 1..24: note = RE
  misc_feature 25: note = Core
  misc_feature 26..50: note = LE
atgttgacaaactattagctggtttcgtaatataaggtcagccagttttt

SEQ ID NO: 37081 - DNA, 50 bp, unidentified
  source 1..50: mol_type = unassigned DNA; note = donor_ab579c7
  misc_feature 1..24: note = RE
  misc_feature 25: note = Core
  misc_feature 26..50: note = LE
tggcaaaccaggggcgaccatctataatgggatggtcgcccctcccagaa

SEQ ID NO: 37082 - DNA, 50 bp, unidentified
  source 1..50: mol_type = unassigned DNA; note = donor_ab58fc2
  misc_feature 1..23: note = RE
  misc_feature 24..25: note = Core
  misc_feature 26..50: note = LE
gaaagtgggggcgagtccatacataattcgatggactcgcccaagccgag

SEQ ID NO: 37083 - DNA, 50 bp, unidentified
  source 1..50: mol_type = unassigned DNA; note = donor_ab5a351
  misc_feature 1..23: note = RE
  misc_feature 24..25: note = Core
  misc_feature 26..50: note = LE
gacaccctgcacccctgggatgtctaatgggggtggatcggcttcctgtt

SEQ ID NO: 37084 - DNA, 50 bp, unidentified
  source 1..50: mol_type = unassigned DNA; note = donor_ab635a9
  misc_feature 1..24: note = RE
  misc_feature 25: note = Core
  misc_feature 26..50: note = LE
tggcaaaccgggggcgaccatctataatgggatggtcgcccctactctaa

SEQ ID NO: 37085 - DNA, 50 bp, unidentified
  source 1..50: mol_type = unassigned DNA; note = donor_ab6804b
  misc_feature 1..22: note = RE
  misc_feature 23..25: note = Core
  misc_feature 26..50: note = LE
tgccatagggggcgtccacatatgatgatgtggacgcccctgcatcgacg

SEQ ID NO: 37086 - DNA, 50 bp, unidentified
  source 1..50: mol_type = unassigned DNA; note = donor_ab69cfd
  misc_feature 1..23: note = RE
  misc_feature 24..25: note = Core
  misc_feature 26..50: note = LE
catcgctgctgcatgacagttgacttgtgtcttattaggctctatcgttg

SEQ ID NO: 37087 - DNA, 50 bp, unidentified
  source 1..50: mol_type = unassigned DNA; note = donor_ab6f453
  misc_feature 1..23: note = RE
  misc_feature 24..25: note = Core
  misc_feature 26..50: note = LE
aggcttgaccacgaacataggatcttgtatgttcctcccggctcctacga

SEQ ID NO: 37088 - DNA, 50 bp, unidentified; identical to SEQ ID NO: 33111
  source 1..50: mol_type = unassigned DNA; note = donor_ab77126
  misc_feature 1..24: note = RE
  misc_feature 25: note = Core
  misc_feature 26..50: note = LE

SEQ ID NO: 37089 - DNA, 50 bp, unidentified
  source 1..50: mol_type = unassigned DNA; note = donor_ab82e50
  misc_feature 1..24: note = RE
  misc_feature 25: note = Core
  misc_feature 26..50: note = LE
aaatttggtaaatatcataggaagctttaactttgcagctgaataccaag

SEQ ID NO: 37090 - DNA, 50 bp, unidentified
  source 1..50: mol_type = unassigned DNA; note = donor_ab8cf9e
  misc_feature 1..21: note = RE
  misc_feature 22..25: note = Core
  misc_feature 26..50: note = LE
cagcagcttgacacagggctactcactggtgcaccattgtcttgtcggca

SEQ ID NO: 37091 - DNA, 50 bp, unidentified
  source 1..50: mol_type = unassigned DNA; note = donor_ab8eb82
  misc_feature 1..24: note = RE
  misc_feature 25: note = Core
  misc_feature 26..50: note = LE
ggcgtcgcttgactataggagcgtctgtgaataccatgagaggatggttg

SEQ ID NO: 37092 - DNA, 50 bp, unidentified
  source 1..50: mol_type = unassigned DNA; note = donor_ab93afe
  misc_feature 1..23: note = RE
  misc_feature 24..25: note = Core
  misc_feature 26..50: note = LE
gccaaaagggagccgtccacacatgatgcagtggacggctcccacccgcc

SEQ ID NO: 37093 - DNA, 50 bp, unidentified; identical to SEQ ID NO: 30717
  source 1..50: mol_type = unassigned DNA; note = donor_ab948b9
  misc_feature 1..23: note = RE
  misc_feature 24..25: note = Core
  misc_feature 26..50: note = LE

SEQ ID NO: 37094 - DNA, 50 bp, unidentified
  source 1..50: mol_type = unassigned DNA; note = donor_ab9cc8b
  misc_feature 1..23: note = RE
  misc_feature 24..25: note = Core
  misc_feature 26..50: note = LE
ttgacgaagggggtgtccacatatgatgatgtggacacccccaccccaac

SEQ ID NO: 37095 - DNA, 50 bp, unidentified
  source 1..50: mol_type = unassigned DNA; note = donor_abae11a
  misc_feature 1..21: note = RE
  misc_feature 22..25: note = Core
  misc_feature 26..50: note = LE
catctggcggggcgtccacagatgatggggtggacgcgccgccgacggca

SEQ ID NO: 37096 - DNA, 50 bp, unidentified
  source 1..50: mol_type = unassigned DNA; note = donor_abae59b
  misc_feature 1..23: note = RE
  misc_feature 24..25: note = Core
  misc_feature 26..50: note = LE
gcgaggaggcggccgtccacatatgttggggtggacggcccccgacggca

SEQ ID NO: 37097 - DNA, 50 bp, unidentified; identical to SEQ ID NO: 30900
  source 1..50: mol_type = unassigned DNA; note = donor_abafa88
  misc_feature 1..23: note = RE
  misc_feature 24..25: note = Core
  misc_feature 26..50: note = LE

SEQ ID NO: 37098 - DNA, 50 bp, unidentified
  source 1..50: mol_type = unassigned DNA; note = donor_abd6fde
  misc_feature 1..22: note = RE
  misc_feature 23..25: note = Core
  misc_feature 26..50: note = LE
attcattttctttattacagttcattgtatattcaatattaattattata

SEQ ID NO: 37099 - DNA, 50 bp, unidentified
  source 1..50: mol_type = unassigned DNA; note = donor_abe0608
  misc_feature 1..24: note = RE
  misc_feature 25: note = Core
  misc_feature 26..50: note = LE
ggccttgacatgacataggagcatcagggagactgtggatagtgcttccg

SEQ ID NO: 37100 - DNA, 50 bp, unidentified
  source 1..50: mol_type = unassigned DNA; note = donor_abe0f0b
  misc_feature 1..24: note = RE
  misc_feature 25: note = Core
  misc_feature 26..50: note = LE
tgcagtccggcggcggaccatacataatgagatggtccgccgccgagtgg

SEQ ID NO: 37101 - DNA, 50 bp, unidentified
  source 1..50: mol_type = unassigned DNA; note = donor_abe8330
  misc_feature 1..23: note = RE
  misc_feature 24..25: note = Core
  misc_feature 26..50: note = LE
tgacacggggcgccgtccagacatgatggggtggacggcgccccaacggc

SEQ ID NO: 37102 - DNA, 50 bp, unidentified
  source 1..50: mol_type = unassigned DNA; note = donor_abec547
  misc_feature 1..23: note = RE
  misc_feature 24..25: note = Core
  misc_feature 26..50: note = LE
ccccttgactatatatagttagtctcgtataatataatcatagcttagat

SEQ ID NO: 37103 - DNA, 50 bp, unidentified
  source 1..50: mol_type = unassigned DNA; note = donor_abfbfcd
  misc_feature 1..24: note = RE
  misc_feature 25: note = Core
  misc_feature 26..50: note = LE
tcagttgacaaaactataggaacacattacagtaaaaaacagctagttcg

SEQ ID NO: 37104 - DNA, 50 bp, unidentified
  source 1..50: mol_type = unassigned DNA; note = donor_abff0de
  misc_feature 1..24: note = RE
  misc_feature 25: note = Core
  misc_feature 26..50: note = LE
cacgccttgacaagagaggggagcctacttaagactggtggtagggcctg

SEQ ID NO: 37105 - DNA, 50 bp, unidentified; identical to SEQ ID NO: 34245
  source 1..50: mol_type = unassigned DNA; note = donor_ac03b22
  misc_feature 1..24: note = RE
  misc_feature 25: note = Core
  misc_feature 26..50: note = LE

SEQ ID NO: 37106 - DNA, 50 bp, unidentified
  source 1..50: mol_type = unassigned DNA; note = donor_ac11e32
  misc_feature 1..23: note = RE
  misc_feature 24..25: note = Core
  misc_feature 26..50: note = LE
gcgttaccaggggcgtctacacatgatggggtagacgcccccccagcggc

SEQ ID NO: 37107 - DNA, 50 bp, unidentified
  source 1..50: mol_type = unassigned DNA; note = donor_ac1557f
  misc_feature 1..24: note = RE
  misc_feature 25: note = Core
  misc_feature 26..50: note = LE
tggcagaatatgggcgtccatgtataatggaatggacgcccactattcag

SEQ ID NO: 37108 - DNA, 50 bp, unidentified
  source 1..50: mol_type = unassigned DNA; note = donor_ac16591
  misc_feature 1..24: note = RE
  misc_feature 25: note = Core
  misc_feature 26..50: note = LE
ttgacaatcgggggagtccatgtagaataagatggactccccctacatat

SEQ ID NO: 37109 - DNA, 50 bp, unidentified
  source 1..50: mol_type = unassigned DNA; note = donor_ac27aa2
  misc_feature 1..23: note = RE
  misc_feature 24..25: note = Core
  misc_feature 26..50: note = LE
ttgcaaacggggcgggccatacgttatgaaatggcccgccccttttcccc

SEQ ID NO: 37110 - DNA, 50 bp, unidentified
  source 1..50: mol_type = unassigned DNA; note = donor_ac34357
  misc_feature 1..22: note = RE
  misc_feature 23..25: note = Core
  misc_feature 26..50: note = LE
ctacttgacttttattagcaggtctattacaataaatttgggcaggaagc

SEQ ID NO: 37111 - DNA, 50 bp, unidentified
  source 1..50: mol_type = unassigned DNA; note = donor_ac3ba3f
  misc_feature 1..23: note = RE
  misc_feature 24..25: note = Core
  misc_feature 26..50: note = LE
gcatcacgggcggcaaccacagaagatgggatggttgccgccctccccag

SEQ ID NO: 37112 - DNA, 50 bp, unidentified
  source 1..50: mol_type = unassigned DNA; note = donor_ac434de
  misc_feature 1..23: note = RE
  misc_feature 24..25: note = Core
  misc_feature 26..50: note = LE
tgacatcccaactcctgggatgtctaatgagagttagcgggttcgctgcg

SEQ ID NO: 37113 - DNA, 50 bp, unidentified
  source 1..50: mol_type = unassigned DNA; note = donor_ac4bf21
  misc_feature 1..23: note = RE
  misc_feature 24..25: note = Core
  misc_feature 26..50: note = LE
tgacgccgcagaccatgggatgtctaatggggcgtaccgggcttgcttct

SEQ ID NO: 37114 - DNA, 50 bp, unidentified
  source 1..50: mol_type = unassigned DNA; note = donor_ac674f2
  misc_feature 1..22: note = RE
  misc_feature 23..25: note = Core
  misc_feature 26..50: note = LE
actattgatttttgttagcaggtttggtactataaaagtgtaattgttgt

SEQ ID NO: 37115 - DNA, 50 bp, unidentified
  source 1..50: mol_type = unassigned DNA; note = donor_ac79cda
  misc_feature 1..21: note = RE
  misc_feature 22..25: note = Core
  misc_feature 26..50: note = LE
ggcttgacttcatcattgagactccgtaagttgttgggtggcccgggagg

SEQ ID NO: 37116 - DNA, 50 bp, unidentified
  source 1..50: mol_type = unassigned DNA; note = donor_ac7f657
  misc_feature 1..23: note = RE
  misc_feature 24..25: note = Core
  misc_feature 26..50: note = LE
gacttcaaaccgccgaatagagaagatggggtattcggcttgagcctcat

SEQ ID NO: 37117 - DNA, 50 bp, unidentified
  source 1..50: mol_type = unassigned DNA; note = donor_ac84b7d
  misc_feature 1..24: note = RE
  misc_feature 25: note = Core
  misc_feature 26..50: note = LE
acaacctgagcaacagaagggagcctacttatgtcttttcgaggctgctc

SEQ ID NO: 37118 - DNA, 50 bp, unidentified
  source 1..50: mol_type = unassigned DNA; note = donor_ac84f5c
  misc_feature 1..24: note = RE
  misc_feature 25: note = Core
  misc_feature 26..50: note = LE
tgccgttaagggggagtccttatagaatgaaagggacttcccctgcagct

SEQ ID NO: 37119 - DNA, 50 bp, unidentified
  source 1..50: mol_type = unassigned DNA; note = donor_ac87252
  misc_feature 1..23: note = RE
  misc_feature 24..25: note = Core
  misc_feature 26..50: note = LE
gcaatcgcgaggggaaccatacattaataagatggttcccctcgctttcc

SEQ ID NO: 37120 - DNA, 50 bp, unidentified
  source 1..50: mol_type = unassigned DNA; note = donor_ac87ee2
  misc_feature 1..24: note = RE
  misc_feature 25: note = Core
  misc_feature 26..50: note = LE
aatcatttatattactatagttcattatatattcaataggactttgtaaa

SEQ ID NO: 37121 - DNA, 50 bp, unidentified
  source 1..50: mol_type = unassigned DNA; note = donor_ac8a7d0
  misc_feature 1..24: note = RE
  misc_feature 25: note = Core
  misc_feature 26..50: note = LE
agccggttgacaacagaagggagcctactagacgattcctccagggccgg

SEQ ID NO: 37122 - DNA, 50 bp, unidentified
  source 1..50: mol_type = unassigned DNA; note = donor_ac958d2
  misc_feature 1..23: note = RE
  misc_feature 24..25: note = Core
  misc_feature 26..50: note = LE
ttgacacagggggagtccacataagataattggactcccccacctcccaa

SEQ ID NO: 37123 - DNA, 50 bp, unidentified
  source 1..50: mol_type = unassigned DNA; note = donor_ac9a76d
  misc_feature 1..22: note = RE
  misc_feature 23..25: note = Core
  misc_feature 26..50: note = LE
tttgcctcttgacatagagggtcttatatgttactatttttccagaccct

SEQ ID NO: 37124 - DNA, 50 bp, unidentified
  source 1..50: mol_type = unassigned DNA; note = donor_ac9b0f7
  misc_feature 1..23: note = RE
  misc_feature 24..25: note = Core
  misc_feature 26..50: note = LE
cttgacttcaaaagccccatacaagatgctatggggcggcggcgaggaaa

SEQ ID NO: 37125 - DNA, 50 bp, unidentified
  source 1..50: mol_type = unassigned DNA; note = donor_aca6af9
  misc_feature 1..23: note = RE
  misc_feature 24..25: note = Core
  misc_feature 26..50: note = LE
gccaacagggagccgtccacacatgatgctgtggacggctcccgccaccg

SEQ ID NO: 37126 - DNA, 50 bp, unidentified; identical to SEQ ID NO: 33043
  source 1..50: mol_type = unassigned DNA; note = donor_aca6be3
  misc_feature 1..23: note = RE
  misc_feature 24..25: note = Core
  misc_feature 26..50: note = LE

SEQ ID NO: 37127 - DNA, 50 bp, unidentified
  source 1..50: mol_type = unassigned DNA; note = donor_aca86e1
  misc_feature 1..24: note = RE
  misc_feature 25: note = Core
  misc_feature 26..50: note = LE
tcttgctaaacgggccgttccacatgatggtgtggaacggccctcctcag

SEQ ID NO: 37128 - DNA, 50 bp, unidentified
  source 1..50: mol_type = unassigned DNA; note = donor_aca997d
  misc_feature 1..23: note = RE
  misc_feature 24..25: note = Core
  misc_feature 26..50: note = LE
tgacttttccacccgtgggatgtctaataggggcagagccgccaagatag

SEQ ID NO: 37129 - DNA, 50 bp, unidentified; identical to SEQ ID NO: 34849
  source 1..50: mol_type = unassigned DNA; note = donor_acb963d
  misc_feature 1..24: note = RE
  misc_feature 25: note = Core
  misc_feature 26..50: note = LE

SEQ ID NO: 37130 - DNA, 50 bp, unidentified
  source 1..50: mol_type = unassigned DNA; note = donor_acc84e4
  misc_feature 1..23: note = RE
  misc_feature 24..25: note = Core
  misc_feature 26..50: note = LE
tgactcttacgcccgtgggatgtctaatgggagtcgagccggcccgttgt

SEQ ID NO: 37131 - DNA, 50 bp, unidentified
  source 1..50: mol_type = unassigned DNA; note = donor_acca8a3
  misc_feature 1..23: note = RE
  misc_feature 24..25: note = Core
  misc_feature 26..50: note = LE
aacccgcttgatcaagacggatacttgtcttatcctgaacacggctcctc

SEQ ID NO: 37132 - DNA, 50 bp, unidentified; identical to SEQ ID NO: 35338
  source 1..50: mol_type = unassigned DNA; note = donor_accbebe
  misc_feature 1..23: note = RE
  misc_feature 24..25: note = Core
  misc_feature 26..50: note = LE

SEQ ID NO: 37133 - DNA, 50 bp, unidentified
  source 1..50: mol_type = unassigned DNA; note = donor_acccfa7
  misc_feature 1..22: note = RE
  misc_feature 23..25: note = Core
  misc_feature 26..50: note = LE
gtcttgacttttaatagttagtcacgtataattaaaccatctcgaaaggg

SEQ ID NO: 37134 - DNA, 50 bp, unidentified; identical to SEQ ID NO: 37069
  source 1..50: mol_type = unassigned DNA; note = donor_accf91c
  misc_feature 1..23: note = RE
  misc_feature 24..25: note = Core
  misc_feature 26..50: note = LE

SEQ ID NO: 37135 - DNA, 50 bp, unidentified
  source 1..50: mol_type = unassigned DNA; note = donor_acd0658
  misc_feature 1..24: note = RE
  misc_feature 25: note = Core
  misc_feature 26..50: note = LE
ttgcaatcgggcggggtccatatacaatggtatggaccccgcccttgctg

SEQ ID NO: 37136 - DNA, 50 bp, unidentified
  source 1..50: mol_type = unassigned DNA; note = donor_acd512f
  misc_feature 1..24: note = RE
  misc_feature 25: note = Core
  misc_feature 26..50: note = LE
tgtactccgggaggcgtccatataatggtatggacgcctccccccggcaa

SEQ ID NO: 37137 - DNA, 50 bp, unidentified
  source 1..50: mol_type = unassigned DNA; note = donor_ace086a
  misc_feature 1..23: note = RE
  misc_feature 24..25: note = Core
  misc_feature 26..50: note = LE
cttattgacatttattagctggactagtataataatgatgtagtcaataa

SEQ ID NO: 37138 - DNA, 50 bp, unidentified
  source 1..50: mol_type = unassigned DNA; note = donor_ace0e5e
  misc_feature 1..23: note = RE
  misc_feature 24..25: note = Core
  misc_feature 26..50: note = LE
cggtggtggttgacgaagggtgtctgatggctctaccctcccctcttgag

SEQ ID NO: 37139 - DNA, 50 bp, unidentified
  source 1..50: mol_type = unassigned DNA; note = donor_acedaab
  misc_feature 1..22: note = RE
  misc_feature 23..25: note = Core
  misc_feature 26..50: note = LE
atgcttgacaaacattagctggtttcgtattattaggttaaccagggttt

SEQ ID NO: 37140 - DNA, 50 bp, unidentified
  source 1..50: mol_type = unassigned DNA; note = donor_acef0d3
  misc_feature 1..24: note = RE
  misc_feature 25: note = Core
  misc_feature 26..50: note = LE
ccgtctcttgacacagaggggtgcctacttatttactggtggtacgaccg

SEQ ID NO: 37141 - DNA, 50 bp, unidentified; identical to SEQ ID NO: 30492
  source 1..50: mol_type = unassigned DNA; note = donor_acefdc2
  misc_feature 1..24: note = RE
  misc_feature 25: note = Core
  misc_feature 26..50: note = LE

SEQ ID NO: 37142 - DNA, 50 bp, unidentified
  source 1..50: mol_type = unassigned DNA; note = donor_acf0d3f
  misc_feature 1..24: note = RE
  misc_feature 25: note = Core
  misc_feature 26..50: note = LE
aacacttgaattttatatagttagcctggtatattgtaattgacccatct

SEQ ID NO: 37143 - DNA, 50 bp, unidentified
  source 1..50: mol_type = unassigned DNA; note = donor_acf3b35
  misc_feature 1..23: note = RE
  misc_feature 24..25: note = Core
  misc_feature 26..50: note = LE
actggtctacttcaacacagttgcttgtgtccgcaaaatctgccagaatg

SEQ ID NO: 37144 - DNA, 50 bp, unidentified; identical to SEQ ID NO: 30492
  source 1..50: mol_type = unassigned DNA; note = donor_acfc724
  misc_feature 1..24: note = RE
  misc_feature 25: note = Core
  misc_feature 26..50: note = LE

SEQ ID NO: 37145 - DNA, 50 bp, unidentified; identical to SEQ ID NO: 30685
  source 1..50: mol_type = unassigned DNA; note = donor_acfcbff
  misc_feature 1..23: note = RE
  misc_feature 24..25: note = Core
  misc_feature 26..50: note = LE

SEQ ID NO: 37146 - DNA, 50 bp, unidentified
  source 1..50: mol_type = unassigned DNA; note = donor_ad01ac9
  misc_feature 1..23: note = RE
  misc_feature 24..25: note = Core
  misc_feature 26..50: note = LE
gcattcatgcggcggaccatacataatgagatggtccgccgcttgattca

SEQ ID NO: 37147 - DNA, 50 bp, unidentified; identical to SEQ ID NO: 31337
  source 1..50: mol_type = unassigned DNA; note = donor_ad13dca
  misc_feature 1..21: note = RE
  misc_feature 22..25: note = Core
  misc_feature 26..50: note = LE

SEQ ID NO: 37148 - DNA, 50 bp, unidentified
  source 1..50: mol_type = unassigned DNA; note = donor_ad1ac5e
  misc_feature 1..23: note = RE
  misc_feature 24..25: note = Core
  misc_feature 26..50: note = LE
aggcttgacttttcatagctggtcttgtatgatgtttatagaagcataaa

SEQ ID NO: 37149 - DNA, 50 bp, unidentified
  source 1..50: mol_type = unassigned DNA; note = donor_ad1d2cc
  misc_feature 1..22: note = RE
  misc_feature 23..25: note = Core
  misc_feature 26..50: note = LE
cctattgatttttcttagcaggtttggtacaatattagcatagtcttgaa

SEQ ID NO: 37150 - DNA, 50 bp, unidentified
  source 1..50: mol_type = unassigned DNA; note = donor_ad24379
  misc_feature 1..24: note = RE
  misc_feature 25: note = Core
  misc_feature 26..50: note = LE
ttgcaatgaggaggagtccatatacaatgggatggactcctcctcacttc

SEQ ID NO: 37151 - DNA, 50 bp, unidentified
  source 1..50: mol_type = unassigned DNA; note = donor_ad2765a
  misc_feature 1..23: note = RE
  misc_feature 24..25: note = Core
  misc_feature 26..50: note = LE
aattattgacttttcttagcaggttagtaccataaaagtgtagttgttag

SEQ ID NO: 37152 - DNA, 50 bp, unidentified; identical to SEQ ID NO: 32754
  source 1..50: mol_type = unassigned DNA; note = donor_ad2f6e1
  misc_feature 1..24: note = RE
  misc_feature 25: note = Core
  misc_feature 26..50: note = LE

SEQ ID NO: 37153 - DNA, 50 bp, unidentified
  source 1..50: mol_type = unassigned DNA; note = donor_ad31bb8
  misc_feature 1..22: note = RE
  misc_feature 23..25: note = Core
  misc_feature 26..50: note = LE
cgcgaacgggggcatccatacatgatggagtggatgccccctcctgacgg

SEQ ID NO: 37154 - DNA, 50 bp, unidentified
  source 1..50: mol_type = unassigned DNA; note = donor_ad3508f
  misc_feature 1..22: note = RE
  misc_feature 23..25: note = Core
  misc_feature 26..50: note = LE
ttagaagttgagcaagacagttgcttgtgtcttgagaggggattagaatt

SEQ ID NO: 37155 - DNA, 50 bp, unidentified
  source 1..50: mol_type = unassigned DNA; note = donor_ad357f7
  misc_feature 1..23: note = RE
  misc_feature 24..25: note = Core
  misc_feature 26..50: note = LE
cgcctgaggttgacagaggatgtctgataggactaccttccttcatggct

SEQ ID NO: 37156 - DNA, 50 bp, unidentified; identical to SEQ ID NO: 33878
  source 1..50: mol_type = unassigned DNA; note = donor_ad358dd
  misc_feature 1..23: note = RE
  misc_feature 24..25: note = Core
  misc_feature 26..50: note = LE

SEQ ID NO: 37157 - DNA, 50 bp, unidentified
  source 1..50: mol_type = unassigned DNA; note = donor_ad3a1b8
  misc_feature 1..23: note = RE
  misc_feature 24..25: note = Core
  misc_feature 26..50: note = LE
gcaataacgaggcggaccatacattaattagatggtccgcctcacgccta

SEQ ID NO: 37158 - DNA, 50 bp, unidentified; identical to SEQ ID NO: 30609
  source 1..50: mol_type = unassigned DNA; note = donor_ad3cb47
  misc_feature 1..22: note = RE
  misc_feature 23..25: note = Core
  misc_feature 26..50: note = LE

SEQ ID NO: 37159 - DNA, 50 bp, unidentified
  source 1..50: mol_type = unassigned DNA; note = donor_ad3e9cf
  misc_feature 1..23: note = RE
  misc_feature 24..25: note = Core
  misc_feature 26..50: note = LE
aagcttgactttcaagacggttgcttgtatctttaagcctcggaccggct

SEQ ID NO: 37160 - DNA, 50 bp, unidentified
  source 1..50: mol_type = unassigned DNA; note = donor_ad422a6
  misc_feature 1..22: note = RE
  misc_feature 23..25: note = Core
  misc_feature 26..50: note = LE
aaaagacttgactatagagagtcttatacattaaactaagaacaagccct

SEQ ID NO: 37161 - DNA, 50 bp, unidentified
  source 1..50: mol_type = unassigned DNA; note = donor_ad46335
  misc_feature 1..24: note = RE
  misc_feature 25: note = Core
  misc_feature 26..50: note = LE
cttgcagtcggggcgagccatacgtatggaatggctcgccccttaccgtc

SEQ ID NO: 37162 - DNA, 50 bp, unidentified; identical to SEQ ID NO: 32642
  source 1..50: mol_type = unassigned DNA; note = donor_ad484e9
  misc_feature 1..23: note = RE
  misc_feature 24..25: note = Core
  misc_feature 26..50: note = LE

SEQ ID NO: 37163 - DNA, 50 bp, unidentified
  source 1..50: mol_type = unassigned DNA; note = donor_ad5ef33
  misc_feature 1..23: note = RE
  misc_feature 24..25: note = Core
  misc_feature 26..50: note = LE
gcaaaacgggcggcaaccacagaagatgggatggttgccgccctccccca

SEQ ID NO: 37164 - DNA, 50 bp, unidentified
  source 1..50: mol_type = unassigned DNA; note = donor_ad63805
  misc_feature 1..23: note = RE
  misc_feature 24..25: note = Core
  misc_feature 26..50: note = LE
tgacatctaagcccctgggatgtctaataactgttgtcgggtcggccatc

SEQ ID NO: 37165 - DNA, 50 bp, unidentified; identical to SEQ ID NO: 30501
  source 1..50: mol_type = unassigned DNA; note = donor_ad6a5ef
  misc_feature 1..23: note = RE
  misc_feature 24..25: note = Core
  misc_feature 26..50: note = LE

SEQ ID NO: 37166 - DNA, 50 bp, unidentified
  source 1..50: mol_type = unassigned DNA; note = donor_ad72ff3
  misc_feature 1..23: note = RE
  misc_feature 24..25: note = Core
  misc_feature 26..50: note = LE
gcaggccaggggccgtccacatatgttggtgtggacggccccacccgacg

SEQ ID NO: 37167 - DNA, 50 bp, unidentified
  source 1..50: mol_type = unassigned DNA; note = donor_ad780c0
  misc_feature 1..24: note = RE
  misc_feature 25: note = Core
  misc_feature 26..50: note = LE
tggcaaacgaggggcgaccatctataatgggatggtcgcccctccctaaa

SEQ ID NO: 37168 - DNA, 50 bp, unidentified
  source 1..50: mol_type = unassigned DNA; note = donor_ad7e607
  misc_feature 1..23: note = RE
  misc_feature 24..25: note = Core
  misc_feature 26..50: note = LE
aacacgcttgatcaaaacggatacttgtcttatgattttcgcgcttcttc

SEQ ID NO: 37169 - DNA, 50 bp, unidentified
  source 1..50: mol_type = unassigned DNA; note = donor_ad843fb
  misc_feature 1..23: note = RE
  misc_feature 24..25: note = Core
  misc_feature 26..50: note = LE
gaccccgaccggccgattagagaagatggggtaatcggccggcgtttttg

SEQ ID NO: 37170 - DNA, 50 bp, unidentified
  source 1..50: mol_type = unassigned DNA; note = donor_ad85eeb
  misc_feature 1..22: note = RE
  misc_feature 23..25: note = Core
  misc_feature 26..50: note = LE
aaaaaagacttgactatatagggagcttcttgtataattcaaatataggg

SEQ ID NO: 37171 - DNA, 50 bp, unidentified
  source 1..50: mol_type = unassigned DNA; note = donor_ad8896b
  misc_feature 1..23: note = RE
  misc_feature 24..25: note = Core
  misc_feature 26..50: note = LE
aacccgcttgatcaacacggatacttgtcttatgattttcctgtcctgat

SEQ ID NO: 37172 - DNA, 50 bp, unidentified
  source 1..50: mol_type = unassigned DNA; note = donor_ad893d4
  misc_feature 1..24: note = RE
  misc_feature 25: note = Core
  misc_feature 26..50: note = LE
ttggcaaacgggggcgtccatgtacaatgggatggacgcccccacccgta

SEQ ID NO: 37173 - DNA, 50 bp, unidentified
  source 1..50: mol_type = unassigned DNA; note = donor_ad91d2a
  misc_feature 1..23: note = RE
  misc_feature 24..25: note = Core
  misc_feature 26..50: note = LE
ccgcttgacagaagcattagacagccctaccttcctgagtgcaccggaag

SEQ ID NO: 37174 - DNA, 50 bp, unidentified; identical to SEQ ID NO: 31864
  source 1..50: mol_type = unassigned DNA; note = donor_ad91ed8
  misc_feature 1..24: note = RE
  misc_feature 25: note = Core
  misc_feature 26..50: note = LE

SEQ ID NO: 37175 - DNA, 50 bp, unidentified
  source 1..50: mol_type = unassigned DNA; note = donor_ad92078
  misc_feature 1..24: note = RE
  misc_feature 25: note = Core
  misc_feature 26..50: note = LE
cttgcaaacggggcgagccatacgtatgggatggctcgccctaatcaacc

SEQ ID NO: 37176 - DNA, 50 bp, unidentified
  source 1..50: mol_type = unassigned DNA; note = donor_ad97b25
  misc_feature 1..22: note = RE
  misc_feature 23..25: note = Core
  misc_feature 26..50: note = LE
attcagttttcttattatagttcattgtatattatttaatcgttatattt

SEQ ID NO: 37177 - DNA, 50 bp, unidentified
  source 1..50: mol_type = unassigned DNA; note = donor_ada86db
  misc_feature 1..24: note = RE
  misc_feature 25: note = Core
  misc_feature 26..50: note = LE
tggcaaaccgggggcgtccatgtacaatgggatggacgcccccactcata

SEQ ID NO: 37178 - DNA, 50 bp, unidentified
  source 1..50: mol_type = unassigned DNA; note = donor_ada9890
  misc_feature 1..23: note = RE
  misc_feature 24..25: note = Core
  misc_feature 26..50: note = LE
gttgacaggggggagtccacataagataattggactccccccacttcctg

SEQ ID NO: 37179 - DNA, 50 bp, unidentified
  source 1..50: mol_type = unassigned DNA; note = donor_adac4c4
  misc_feature 1..23: note = RE
  misc_feature 24..25: note = Core
  misc_feature 26..50: note = LE
gacaggggtggacaacatagaatcttgtatgtttgaatgtccctcctgca

SEQ ID NO: 37180 - DNA, 50 bp, unidentified
  source 1..50: mol_type = unassigned DNA; note = donor_adb1dad
  misc_feature 1..24: note = RE
  misc_feature 25: note = Core
  misc_feature 26..50: note = LE
atttgaggtttttgacatagaaagctctaagtttgcagcaagaaacttaa

SEQ ID NO: 37181 - DNA, 50 bp, unidentified
  source 1..50: mol_type = unassigned DNA; note = donor_adb92c7
  misc_feature 1..23: note = RE
  misc_feature 24..25: note = Core
  misc_feature 26..50: note = LE
acgcttgaccgaaaagacagtcgcttgtatctctcaattgccaaccggca

SEQ ID NO: 37182 - DNA, 50 bp, unidentified; identical to SEQ ID NO: 35435
  source 1..50: mol_type = unassigned DNA; note = donor_adba730
  misc_feature 1..23: note = RE
  misc_feature 24..25: note = Core
  misc_feature 26..50: note = LE

SEQ ID NO: 37183 - DNA, 50 bp, unidentified
  source 1..50: mol_type = unassigned DNA; note = donor_adbbbd6
  misc_feature 1..23: note = RE
  misc_feature 24..25: note = Core
  misc_feature 26..50: note = LE
attatttgctcaggtcttagaattcctttagatttgcattactaaaactt

SEQ ID NO: 37184 - DNA, 50 bp, unidentified
  source 1..50: mol_type = unassigned DNA; note = donor_adbd5e9
  misc_feature 1..24: note = RE
  misc_feature 25: note = Core
  misc_feature 26..50: note = LE
tgaacaagtgggggcgtccatgtacaatgggatggacgcccccaccctct

SEQ ID NO: 37185 - DNA, 50 bp, unidentified
  source 1..50: mol_type = unassigned DNA; note = donor_adc9df6
  misc_feature 1..23: note = RE
  misc_feature 24..25: note = Core
  misc_feature 26..50: note = LE
gcgcaaaggggggcgttcatgtagaatgatatgaacgcctcccaccctac

SEQ ID NO: 37186 - DNA, 50 bp, unidentified
  source 1..50: mol_type = unassigned DNA; note = donor_add416c
  misc_feature 1..24: note = RE
  misc_feature 25: note = Core
  misc_feature 26..50: note = LE
gccccccttgacacagaggggagcctacttgttgacttgccctaggaccg

SEQ ID NO: 37187 - DNA, 50 bp, unidentified
  source 1..50: mol_type = unassigned DNA; note = donor_ade5d7d
  misc_feature 1..20: note = RE
  misc_feature 21..25: note = Core
  misc_feature 26..50: note = LE
gacggcttgacacagggctactcactggtggacccttctggtgtgggctg

SEQ ID NO: 37188 - DNA, 50 bp, unidentified
  source 1..50: mol_type = unassigned DNA; note = donor_ade6841
  misc_feature 1..22: note = RE
  misc_feature 23..25: note = Core
  misc_feature 26..50: note = LE
cctattgacttttatttgcaggtctgttacaatataattgtcggtaaatc

SEQ ID NO: 37189 - DNA, 50 bp, unidentified
  source 1..50: mol_type = unassigned DNA; note = donor_ade7867
  misc_feature 1..23: note = RE
  misc_feature 24..25: note = Core
  misc_feature 26..50: note = LE
gaaaatcacttgacaatatagggagcttcctgtataattcaaatataagg

SEQ ID NO: 37190 - DNA, 50 bp, unidentified
  source 1..50: mol_type = unassigned DNA; note = donor_adebe3f
  misc_feature 1..24: note = RE
  misc_feature 25: note = Core
  misc_feature 26..50: note = LE
tgcagaacggcggcggaccatacataatgggatggtccgccgccagttga

SEQ ID NO: 37191 - DNA, 50 bp, unidentified
  source 1..50: mol_type = unassigned DNA; note = donor_adf4187
  misc_feature 1..24: note = RE
  misc_feature 25: note = Core
  misc_feature 26..50: note = LE
tgcaaaacgggaggagtccatatacaatgggatggactcctcccaccttg

SEQ ID NO: 37192 - DNA, 50 bp, unidentified; identical to SEQ ID NO: 32586
  source 1..50: mol_type = unassigned DNA; note = donor_ae01667
  misc_feature 1..23: note = RE
  misc_feature 24..25: note = Core
  misc_feature 26..50: note = LE

SEQ ID NO: 37193 - DNA, 50 bp, unidentified
  source 1..50: mol_type = unassigned DNA; note = donor_ae03a6f
  misc_feature 1..23: note = RE
  misc_feature 24..25: note = Core
  misc_feature 26..50: note = LE
acgcttgacctcagacacagtcgcttgtaagtcattgcggcggtcacgga

SEQ ID NO: 37194 - DNA, 50 bp, unidentified
  source 1..50: mol_type = unassigned DNA; note = donor_ae079aa
  misc_feature 1..24: note = RE
  misc_feature 25: note = Core
  misc_feature 26..50: note = LE
gccgcttgacgaaaaccataggggcgttaccttcttcgtggccccgcaac

SEQ ID NO: 37195 - DNA, 50 bp, unidentified
  source 1..50: mol_type = unassigned DNA; note = donor_ae0c75b
  misc_feature 1..23: note = RE
  misc_feature 24..25: note = Core
  misc_feature 26..50: note = LE
gacctcaccacgccgattagagaagatggggtaatcggctttgagagccc

SEQ ID NO: 37196 - DNA, 50 bp, unidentified
  source 1..50: mol_type = unassigned DNA; note = donor_ae1c314
  misc_feature 1..23: note = RE
  misc_feature 24..25: note = Core
  misc_feature 26..50: note = LE
gcgccgatgggggcgtccacacatgatggggtggacgccccccgacggca

SEQ ID NO: 37197 - DNA, 50 bp, unidentified
  source 1..50: mol_type = unassigned DNA; note = donor_ae1e0d7
  misc_feature 1..23: note = RE
  misc_feature 24..25: note = Core
  misc_feature 26..50: note = LE
cggtgtaaagtgaaagacagttgcttgtatctttaatctggtttattatg

SEQ ID NO: 37198 - DNA, 50 bp, unidentified; identical to SEQ ID NO: 30492
  source 1..50: mol_type = unassigned DNA; note = donor_ae21836
  misc_feature 1..24: note = RE
  misc_feature 25: note = Core
  misc_feature 26..50: note = LE

SEQ ID NO: 37199 - DNA, 50 bp, unidentified
  source 1..50: mol_type = unassigned DNA; note = donor_ae222b4
  misc_feature 1..24: note = RE
  misc_feature 25: note = Core
  misc_feature 26..50: note = LE
tgcgacgcacggccgggccatacataatgggatggcccggccgtgctcct

SEQ ID NO: 37200 - DNA, 50 bp, unidentified
  source 1..50: mol_type = unassigned DNA; note = donor_ae2a0d1
  misc_feature 1..23: note = RE
  misc_feature 24..25: note = Core
  misc_feature 26..50: note = LE
atcgaccttgaccaagacggatacttgtcttatgagaatcatcggctcct

SEQ ID NO: 37201 - DNA, 50 bp, unidentified
  source 1..50: mol_type = unassigned DNA; note = donor_ae30d1b
  misc_feature 1..23: note = RE
  misc_feature 24..25: note = Core
  misc_feature 26..50: note = LE
gtgcttgactggcaacacggttacttgtatctttctcacgtagtgattag

SEQ ID NO: 37202 - DNA, 50 bp, unidentified
  source 1..50: mol_type = unassigned DNA; note = donor_ae31dba
  misc_feature 1..21: note = RE
  misc_feature 22..25: note = Core
  misc_feature 26..50: note = LE
cctgaggttgacacggggagtgtcactagggcaccctctttctcatgagc

SEQ ID NO: 37203 - DNA, 50 bp, unidentified
  source 1..50: mol_type = unassigned DNA; note = donor_ae48313
  misc_feature 1..23: note = RE
  misc_feature 24..25: note = Core
  misc_feature 26..50: note = LE
tttataggtttccaacacagaatctcctatgtttacaaagttaattcaag

SEQ ID NO: 37204 - DNA, 50 bp, unidentified
  source 1..50: mol_type = unassigned DNA; note = donor_ae497d6
  misc_feature 1..23: note = RE
  misc_feature 24..25: note = Core
  misc_feature 26..50: note = LE
cctgttgactttttatttgcagactattacaatatatttacggtttaagg

SEQ ID NO: 37205 - DNA, 50 bp, unidentified
  source 1..50: mol_type = unassigned DNA; note = donor_ae49e6d
  misc_feature 1..24: note = RE
  misc_feature 25: note = Core
  misc_feature 26..50: note = LE
gctgcttgacacttagaagggcgtcagtaagaatagaagtgcctgatctt

SEQ ID NO: 37206 - DNA, 50 bp, unidentified
  source 1..50: mol_type = unassigned DNA; note = donor_ae52bcf
  misc_feature 1..23: note = RE
  misc_feature 24..25: note = Core
  misc_feature 26..50: note = LE
gcgggctgggggccgtccacatatgttggggtggacggcccccgacggca

SEQ ID NO: 37207 - DNA, 50 bp, unidentified
  source 1..50: mol_type = unassigned DNA; note = donor_ae5c52d
  misc_feature 1..24: note = RE
  misc_feature 25: note = Core
  misc_feature 26..50: note = LE
tgcaatcgagcggcggaccatacataatgagatggtccgccgccgtagat

SEQ ID NO: 37208 - DNA, 50 bp, unidentified
  source 1..50: mol_type = unassigned DNA; note = donor_ae6a4ff
  misc_feature 1..23: note = RE
  misc_feature 24..25: note = Core
  misc_feature 26..50: note = LE
gcatcaaacggggcatccacacatgatggggtggatgcccctcccgctgg

SEQ ID NO: 37209 - DNA, 50 bp, unidentified
  source 1..50: mol_type = unassigned DNA; note = donor_ae77a96
  misc_feature 1..24: note = RE
  misc_feature 25: note = Core
  misc_feature 26..50: note = LE
ggcaaacgaggaggactccatatacaatgggatggagtcctcctcaccta

SEQ ID NO: 37210 - DNA, 50 bp, unidentified
  source 1..50: mol_type = unassigned DNA; note = donor_ae7c82e
  misc_feature 1..23: note = RE
  misc_feature 24..25: note = Core
  misc_feature 26..50: note = LE
gacaactgggagtcgtccatacatgatgtgatggacgactccctcccttc

SEQ ID NO: 37211 - DNA, 50 bp, unidentified
  source 1..50: mol_type = unassigned DNA; note = donor_ae860ee
  misc_feature 1..23: note = RE
  misc_feature 24..25: note = Core
  misc_feature 26..50: note = LE
ggtcaggtactcactttcacactaatcaaccattcggccgcgttgcgtcc

SEQ ID NO: 37212 - DNA, 50 bp, unidentified
  source 1..50: mol_type = unassigned DNA; note = donor_ae8ec79
  misc_feature 1..23: note = RE
  misc_feature 24..25: note = Core
  misc_feature 26..50: note = LE
gccccttgagttctttcattggagaggtggcatgaaagatgccgcgccca

SEQ ID NO: 37213 - DNA, 50 bp, unidentified; identical to SEQ ID NO: 31150
  source 1..50: mol_type = unassigned DNA; note = donor_ae92ed4
  misc_feature 1..23: note = RE
  misc_feature 24..25: note = Core
  misc_feature 26..50: note = LE

SEQ ID NO: 37214 - DNA, 50 bp, unidentified
  source 1..50: mol_type = unassigned DNA; note = donor_ae97137
  misc_feature 1..22: note = RE
  misc_feature 23..25: note = Core
  misc_feature 26..50: note = LE
ctgactcaccttactttcgtattagcggttcagcgtcgctgacgcgccgt

SEQ ID NO: 37215 - DNA, 50 bp, unidentified; identical to SEQ ID NO: 30627
  source 1..50: mol_type = unassigned DNA; note = donor_ae9842c
  misc_feature 1..20: note = RE
  misc_feature 21..25: note = Core
  misc_feature 26..50: note = LE

SEQ ID NO: 37216 - DNA, 50 bp, unidentified
  source 1..50: mol_type = unassigned DNA; note = donor_ae9871e
  misc_feature 1..21: note = RE
  misc_feature 22..25: note = Core
  misc_feature 26..50: note = LE
tcttgacacactttagcaggtttgctacaattgtgttggttctgaaaggt

SEQ ID NO: 37217 - DNA, 50 bp, unidentified
  source 1..50: mol_type = unassigned DNA; note = donor_ae99bad
  misc_feature 1..23: note = RE
  misc_feature 24..25: note = Core
  misc_feature 26..50: note = LE
ccgcttgacttccagattgggaagctctacctttctgtctgggttggtcc

SEQ ID NO: 37218 - DNA, 50 bp, unidentified
  source 1..50: mol_type = unassigned DNA; note = donor_ae9f8c4
  misc_feature 1..24: note = RE
  misc_feature 25: note = Core
  misc_feature 26..50: note = LE
ccgcttcttgacacagaggggagcctacttgttccattgacccaggaccg

SEQ ID NO: 37219 - DNA, 50 bp, unidentified; identical to SEQ ID NO: 32586
  source 1..50: mol_type = unassigned DNA; note = donor_aea074e
  misc_feature 1..23: note = RE
  misc_feature 24..25: note = Core
  misc_feature 26..50: note = LE

SEQ ID NO: 37220 - DNA, 50 bp, unidentified
  source 1..50: mol_type = unassigned DNA; note = donor_aea95f2
  misc_feature 1..24: note = RE
  misc_feature 25: note = Core
  misc_feature 26..50: note = LE
tgcgacgaggcggcggaccatacataatgggatggtccgccgcccccgct

SEQ ID NO: 37221 - DNA, 50 bp, unidentified
  source 1..50: mol_type = unassigned DNA; note = donor_aebf3df
  misc_feature 1..24: note = RE
  misc_feature 25: note = Core
  misc_feature 26..50: note = LE
cttgcatcggagaggtgtccatatatggacacctccccacaaagacttca

SEQ ID NO: 37222 - DNA, 50 bp, unidentified
  source 1..50: mol_type = unassigned DNA; note = donor_aec3ccf
  misc_feature 1..23: note = RE
  misc_feature 24..25: note = Core
  misc_feature 26..50: note = LE
aaaattgacgaggaacagagtatcttgtatgttgaatcttattgagttaa

SEQ ID NO: 37223 - DNA, 50 bp, unidentified
  source 1..50: mol_type = unassigned DNA; note = donor_aec505d
  misc_feature 1..20: note = RE
  misc_feature 21..25: note = Core
  misc_feature 26..50: note = LE
cttgacttttgtttgcaggactcctacaatataaaataaggttataggca

SEQ ID NO: 37224 - DNA, 50 bp, unidentified
  source 1..50: mol_type = unassigned DNA; note = donor_aec6085
  misc_feature 1..23: note = RE
  misc_feature 24..25: note = Core
  misc_feature 26..50: note = LE
gcacccgagggggcgtccacacatgatggggtggacgccccccgacggca

SEQ ID NO: 37225 - DNA, 50 bp, unidentified
  source 1..50: mol_type = unassigned DNA; note = donor_aecbaa8
  misc_feature 1..23: note = RE
  misc_feature 24..25: note = Core
  misc_feature 26..50: note = LE
aggcttgatttttaatagttagtctcgtattatagtgtcatagccatttc

SEQ ID NO: 37226 - DNA, 50 bp, unidentified
  source 1..50: mol_type = unassigned DNA; note = donor_aecd6c8
  misc_feature 1..23: note = RE
  misc_feature 24..25: note = Core
  misc_feature 26..50: note = LE
caaaaatcgggctgaccatagatttaatgagatggtcagcccgatcccca

SEQ ID NO: 37227 - DNA, 50 bp, unidentified
  source 1..50: mol_type = unassigned DNA; note = donor_aed56ea
  misc_feature 1..24: note = RE
  misc_feature 25: note = Core
  misc_feature 26..50: note = LE
ttgcttggttttaaactcagttcttcttaagtttgatttcagttaatttt

SEQ ID NO: 37228 - DNA, 50 bp, unidentified
  source 1..50: mol_type = unassigned DNA; note = donor_aed960d
  misc_feature 1..23: note = RE
  misc_feature 24..25: note = Core
  misc_feature 26..50: note = LE
acgcttgactttcgagacggttacttgtatgtttagccacgatcagcgcg

SEQ ID NO: 37229 - DNA, 50 bp, unidentified
  source 1..50: mol_type = unassigned DNA; note = donor_aeda0c5
  misc_feature 1..23: note = RE
  misc_feature 24..25: note = Core
  misc_feature 26..50: note = LE
tcaaaccagcctgaacacagttgcctgtgtgttcgggatgtgcgatggtg

SEQ ID NO: 37230 - DNA, 50 bp, unidentified; identical to SEQ ID NO: 37069
  source 1..50: mol_type = unassigned DNA; note = donor_aedb6d6
  misc_feature 1..23: note = RE
  misc_feature 24..25: note = Core
  misc_feature 26..50: note = LE

SEQ ID NO: 37231 - DNA, 50 bp, unidentified
  source 1..50: mol_type = unassigned DNA; note = donor_aeddc59
  misc_feature 1..23: note = RE
  misc_feature 24..25: note = Core
  misc_feature 26..50: note = LE
ccccagcaaccacataatggttgcttgtattagcgcgaatcggtattgtg

SEQ ID NO: 37232 - DNA, 50 bp, unidentified
  source 1..50: mol_type = unassigned DNA; note = donor_aedfdb7
  misc_feature 1..23: note = RE
  misc_feature 24..25: note = Core
  misc_feature 26..50: note = LE
tctctattgactttttatagttggtataatatatttaggttaataaaggc

SEQ ID NO: 37233 - DNA, 50 bp, unidentified
  source 1..50: mol_type = unassigned DNA; note = donor_aee3633
  misc_feature 1..24: note = RE
  misc_feature 25: note = Core
  misc_feature 26..50: note = LE
tgccaacggagagccgtccacacatgatgctgtggacggctctccagccc

SEQ ID NO: 37234 - DNA, 50 bp, unidentified
  source 1..50: mol_type = unassigned DNA; note = donor_aee46d4
  misc_feature 1..23: note = RE
  misc_feature 24..25: note = Core
  misc_feature 26..50: note = LE
caagataactggcaagacggtatcttatatctcgatcattgtactcaggg

SEQ ID NO: 37235 - DNA, 50 bp, unidentified
  source 1..50: mol_type = unassigned DNA; note = donor_aee5134
  misc_feature 1..23: note = RE
  misc_feature 24..25: note = Core
  misc_feature 26..50: note = LE
atagcttgtcattgtcatagaaatcctttagacttgcatgtattattttc

SEQ ID NO: 37236 - DNA, 50 bp, unidentified
  source 1..50: mol_type = unassigned DNA; note = donor_aeebf04
  misc_feature 1..23: note = RE
  misc_feature 24..25: note = Core
  misc_feature 26..50: note = LE
ctgcttgacagtcgagacggtatcttgtatcttggcgcttgtggtggtta

SEQ ID NO: 37237 - DNA, 50 bp, unidentified
  source 1..50: mol_type = unassigned DNA; note = donor_aeecc8f
  misc_feature 1..24: note = RE
  misc_feature 25: note = Core
  misc_feature 26..50: note = LE
gccgcttgacaaacagaagggcgtcagtcaatggattaaggccagttccc

SEQ ID NO: 37238 - DNA, 50 bp, unidentified
  source 1..50: mol_type = unassigned DNA; note = donor_aeee139
  misc_feature 1..24: note = RE
  misc_feature 25: note = Core
  misc_feature 26..50: note = LE
aatgttgacttatattagctggtatcgtattataaggtcaatcagatatt

SEQ ID NO: 37239 - DNA, 50 bp, unidentified
  source 1..50: mol_type = unassigned DNA; note = donor_aef1e2e
  misc_feature 1..23: note = RE
  misc_feature 24..25: note = Core
  misc_feature 26..50: note = LE
tgacattcaagatcctgggatgtctaatgagttctgggagtgagccgtcc

SEQ ID NO: 37240 - DNA, 50 bp, unidentified
  source 1..50: mol_type = unassigned DNA; note = donor_aef4c7f
  misc_feature 1..22: note = RE
  misc_feature 23..25: note = Core
  misc_feature 26..50: note = LE
cataaacggggccatccacacatgatggtgtggatggctccaccccgacg

SEQ ID NO: 37241 - DNA, 50 bp, unidentified
  source 1..50: mol_type = unassigned DNA; note = donor_aefc601
  misc_feature 1..22: note = RE
  misc_feature 23..25: note = Core
  misc_feature 26..50: note = LE
ttgccagggcgccgtccacacgtgatgctgtggacggcgccactctgcgg

SEQ ID NO: 37242 - DNA, 50 bp, unidentified
  source 1..50: mol_type = unassigned DNA; note = donor_af03049
  misc_feature 1..23: note = RE
  misc_feature 24..25: note = Core
  misc_feature 26..50: note = LE
tggctgcttgacacacagaggcgctgacttgttccattggtggtgggatg

SEQ ID NO: 37243 - DNA, 50 bp, unidentified
  source 1..50: mol_type = unassigned DNA; note = donor_af1863f
  misc_feature 1..24: note = RE
  misc_feature 25: note = Core
  misc_feature 26..50: note = LE
gcaaaaatgggggtgacaatagattaatgagatggtcacccccacaccct

SEQ ID NO: 37244 - DNA, 50 bp, unidentified
  source 1..50: mol_type = unassigned DNA; note = donor_af1bb3c
  misc_feature 1..24: note = RE
  misc_feature 25: note = Core
  misc_feature 26..50: note = LE
cgagcttgttgacataggagcgtcactcagttcattatgctcaagaacat

SEQ ID NO: 37245 - DNA, 50 bp, unidentified
  source 1..50: mol_type = unassigned DNA; note = donor_af22068
  misc_feature 1..23: note = RE
  misc_feature 24..25: note = Core
  misc_feature 26..50: note = LE
gcgagcagggggccgtccacgtatgttggggtggacggcccccgaacggc

SEQ ID NO: 37246 - DNA, 50 bp, unidentified
  source 1..50: mol_type = unassigned DNA; note = donor_af26ff3
  misc_feature 1..23: note = RE
  misc_feature 24..25: note = Core
  misc_feature 26..50: note = LE
aagcttgaccgcgaacagagtatcttgtatgttgtgtctggccgggcgag

SEQ ID NO: 37247 - DNA, 50 bp, unidentified
  source 1..50: mol_type = unassigned DNA; note = donor_af2a178
  misc_feature 1..23: note = RE
  misc_feature 24..25: note = Core
  misc_feature 26..50: note = LE
cagcgtcgtatctttaatggttgcttgttatagcaatcgcggctattatc

SEQ ID NO: 37248 - DNA, 50 bp, unidentified
  source 1..50: mol_type = unassigned DNA; note = donor_af515c8
  misc_feature 1..24: note = RE
  misc_feature 25: note = Core
  misc_feature 26..50: note = LE
ttgcaaaagggaggcgtccatataaaatgaaatggacgcctcccgccgat

SEQ ID NO: 37249 - DNA, 50 bp, unidentified
  source 1..50: mol_type = unassigned DNA; note = donor_af57143
  misc_feature 1..22: note = RE
  misc_feature 23..25: note = Core
  misc_feature 26..50: note = LE
agataaacttaatttaaagagggagcattcctgtaatgaataaaaatcaa

SEQ ID NO: 37250 - DNA, 50 bp, unidentified; identical to SEQ ID NO: 36680
  source 1..50: mol_type = unassigned DNA; note = donor_af5a1c2
  misc_feature 1..23: note = RE
  misc_feature 24..25: note = Core
  misc_feature 26..50: note = LE

SEQ ID NO: 37251 - DNA, 50 bp, unidentified
  source 1..50: mol_type = unassigned DNA; note = donor_af5befe
  misc_feature 1..23: note = RE
  misc_feature 24..25: note = Core
  misc_feature 26..50: note = LE
ttttctttgacggaacacggtagcttgtatgtaataagcatgtggtggtt

SEQ ID NO: 37252 - DNA, 50 bp, unidentified
  source 1..50: mol_type = unassigned DNA; note = donor_af74b25
  misc_feature 1..23: note = RE
  misc_feature 24..25: note = Core
  misc_feature 26..50: note = LE
gcgtctttcggggcgtccacagatgatggggtggacgccccccgacggca

SEQ ID NO: 37253 - DNA, 50 bp, unidentified
  source 1..50: mol_type = unassigned DNA; note = donor_af81ef5
  misc_feature 1..24: note = RE
  misc_feature 25: note = Core
  misc_feature 26..50: note = LE
tgcaaaacgggaggagtccatatacaatgggatggactcctcccacctat

SEQ ID NO: 37254 - DNA, 50 bp, unidentified
  source 1..50: mol_type = unassigned DNA; note = donor_af834e0
  misc_feature 1..23: note = RE
  misc_feature 24..25: note = Core
  misc_feature 26..50: note = LE
gggattgacttttatttgcaggtctgttacaatataattgacgggtaaaa

SEQ ID NO: 37255 - DNA, 50 bp, unidentified; identical to SEQ ID NO: 30609
  source 1..50: mol_type = unassigned DNA; note = donor_af8cf08
  misc_feature 1..22: note = RE
  misc_feature 23..25: note = Core
  misc_feature 26..50: note = LE

SEQ ID NO: 37256 - DNA, 50 bp, unidentified; identical to SEQ ID NO: 34110
  source 1..50: mol_type = unassigned DNA; note = donor_af9573d
  misc_feature 1..21: note = RE
  misc_feature 22..25: note = Core
  misc_feature 26..50: note = LE

SEQ ID NO: 37257 - DNA, 50 bp, unidentified
  source 1..50: mol_type = unassigned DNA; note = donor_afb53c2
  misc_feature 1..23: note = RE
  misc_feature 24..25: note = Core
  misc_feature 26..50: note = LE
accgcttgaatttgtcatagaaatcctttagatttgcatttaaatttttt

SEQ ID NO: 37258 - DNA, 50 bp, unidentified
  source 1..50: mol_type = unassigned DNA; note = donor_afb84d9
  misc_feature 1..23: note = RE
  misc_feature 24..25: note = Core
  misc_feature 26..50: note = LE
tgcaacagggagccgtccacatatgttggggtggacggctcccaacggca

SEQ ID NO: 37259 - DNA, 50 bp, unidentified
  source 1..50: mol_type = unassigned DNA; note = donor_afba894
  misc_feature 1..24: note = RE
  misc_feature 25: note = Core
  misc_feature 26..50: note = LE
tgcaaaacggcggcggaccatacataatgacatggtccgccgccgaaacc

SEQ ID NO: 37260 - DNA, 50 bp, unidentified
  source 1..50: mol_type = unassigned DNA; note = donor_afbfcd3
  misc_feature 1..23: note = RE
  misc_feature 24..25: note = Core
  misc_feature 26..50: note = LE
aagcttgacttttaagacggtatcttgtatcttaacagcggttatgatta

SEQ ID NO: 37261 - DNA, 50 bp, unidentified
  source 1..50: mol_type = unassigned DNA; note = donor_afbffa3
  misc_feature 1..22: note = RE
  misc_feature 23..25: note = Core
  misc_feature 26..50: note = LE
acaagttacggacccgggatgtctaatgggacttgatcggcgagtctccg

SEQ ID NO: 37262 - DNA, 50 bp, unidentified
  source 1..50: mol_type = unassigned DNA; note = donor_afc69d5
  misc_feature 1..23: note = RE
  misc_feature 24..25: note = Core
  misc_feature 26..50: note = LE
caatgcgggagccatccacacaggatggggtggatggctcctgctcacgg

SEQ ID NO: 37263 - DNA, 50 bp, unidentified
  source 1..50: mol_type = unassigned DNA; note = donor_afc9256
  misc_feature 1..23: note = RE
  misc_feature 24..25: note = Core
  misc_feature 26..50: note = LE
accggtctacttcagcacagttgcttgtgtcggcaaaaactggcagaatg

SEQ ID NO: 37264 - DNA, 50 bp, unidentified
  source 1..50: mol_type = unassigned DNA; note = donor_afcae56
  misc_feature 1..23: note = RE
  misc_feature 24..25: note = Core
  misc_feature 26..50: note = LE
ctgccctctactttctttcacactaatctccattccgccgctttgcggcg

SEQ ID NO: 37265 - DNA, 50 bp, unidentified
  source 1..50: mol_type = unassigned DNA; note = donor_afcb3f3
  misc_feature 1..23: note = RE
  misc_feature 24..25: note = Core
  misc_feature 26..50: note = LE
gcacttgactttccagacagttgcttgtatcttggcagtcggtagagttt

SEQ ID NO: 37266 - DNA, 50 bp, unidentified
  source 1..50: mol_type = unassigned DNA; note = donor_afd64aa
  misc_feature 1..23: note = RE
  misc_feature 24..25: note = Core
  misc_feature 26..50: note = LE
catttgacggggacataactggtcctgtatcctttcttaagaagcgttac

SEQ ID NO: 37267 - DNA, 50 bp, unidentified
  source 1..50: mol_type = unassigned DNA; note = donor_afd95bc
  misc_feature 1..24: note = RE
  misc_feature 25: note = Core
  misc_feature 26..50: note = LE
ggggcttgattttttatttgcaggcctgttacaataaatttgtctctgag

SEQ ID NO: 37268 - DNA, 50 bp, unidentified
  source 1..50: mol_type = unassigned DNA; note = donor_afdcbc7
  misc_feature 1..23: note = RE
  misc_feature 24..25: note = Core
  misc_feature 26..50: note = LE
gcatcacggacggcaaccacagaagatgggatggttgccgtcctccccga

SEQ ID NO: 37269 - DNA, 50 bp, unidentified
  source 1..50: mol_type = unassigned DNA; note = donor_afe937c
  misc_feature 1..23: note = RE
  misc_feature 24..25: note = Core
  misc_feature 26..50: note = LE
gacacgttagacccgtgggatgtctaatgggggtgcaccgaaggccctgt

SEQ ID NO: 37270 - DNA, 50 bp, unidentified
  source 1..50: mol_type = unassigned DNA; note = donor_afe9818
  misc_feature 1..24: note = RE
  misc_feature 25: note = Core
  misc_feature 26..50: note = LE
aaaacttgcaaaaatcatagtagtaccttagatttgcatccgaggattac

SEQ ID NO: 37271 - DNA, 50 bp, unidentified
  source 1..50: mol_type = unassigned DNA; note = donor_aff5f07
  misc_feature 1..23: note = RE
  misc_feature 24..25: note = Core
  misc_feature 26..50: note = LE
gcgtcacctggggcgtccacacatgatggagtggacgccccaacggccct

SEQ ID NO: 37272 - DNA, 50 bp, unidentified
  source 1..50: mol_type = unassigned DNA; note = donor_aff69fe
  misc_feature 1..24: note = RE
  misc_feature 25: note = Core
  misc_feature 26..50: note = LE
cttgcagacggggcgggccattcgtatgggttggcccgcccctctccgga

SEQ ID NO: 37273 - DNA, 50 bp, unidentified
  source 1..50: mol_type = unassigned DNA; note = donor_affbffd
  misc_feature 1..24: note = RE
  misc_feature 25: note = Core
  misc_feature 26..50: note = LE
gcttgcagacggggcggccatacgtatgggatggccgcccctccttccgg

SEQ ID NO: 37274 - DNA, 50 bp, unidentified
  source 1..50: mol_type = unassigned DNA; note = donor_affc1c7
  misc_feature 1..23: note = RE
  misc_feature 24..25: note = Core
  misc_feature 26..50: note = LE
cttgcgcgggaggcgtccatagattatgggatggacgcctcccgcaatcg

SEQ ID NO: 37275 - DNA, 50 bp, unidentified; identical to SEQ ID NO: 30472
  source 1..50: mol_type = unassigned DNA; note = donor_b003356
  misc_feature 1..24: note = RE
  misc_feature 25: note = Core
  misc_feature 26..50: note = LE

SEQ ID NO: 37276 - DNA, 50 bp, unidentified
  source 1..50: mol_type = unassigned DNA; note = donor_b003f5b
  misc_feature 1..23: note = RE
  misc_feature 24..25: note = Core
  misc_feature 26..50: note = LE
ctgcttgacgttagagacggtatcttgtatcttcccctgcgtggtgatta

SEQ ID NO: 37277 - DNA, 50 bp, unidentified
  source 1..50: mol_type = unassigned DNA; note = donor_b004105
  misc_feature 1..21: note = RE
  misc_feature 22..25: note = Core
  misc_feature 26..50: note = LE
tattgacactcgttagcaggtttgctacaatggtgttggttctgagaagt

SEQ ID NO: 37278 - DNA, 50 bp, unidentified; identical to SEQ ID NO: 36710
  source 1..50: mol_type = unassigned DNA; note = donor_b00c08a
  misc_feature 1..22: note = RE
  misc_feature 23..25: note = Core
  misc_feature 26..50: note = LE

SEQ ID NO: 37279 - DNA, 50 bp, unidentified
  source 1..50: mol_type = unassigned DNA; note = donor_b00da19
  misc_feature 1..22: note = RE
  misc_feature 23..25: note = Core
  misc_feature 26..50: note = LE
cgatccgggaggcgcccatataagatggtatgggcgcctccctcctggct

SEQ ID NO: 37280 - DNA, 50 bp, unidentified; identical to SEQ ID NO: 33062
  source 1..50: mol_type = unassigned DNA; note = donor_b025712
  misc_feature 1..23: note = RE
  misc_feature 24..25: note = Core
  misc_feature 26..50: note = LE

SEQ ID NO: 37281 - DNA, 50 bp, unidentified
  source 1..50: mol_type = unassigned DNA; note = donor_b028ba6
  misc_feature 1..22: note = RE
  misc_feature 23..25: note = Core
  misc_feature 26..50: note = LE
caaccaaggggccgtccatacatgatgttgtggacggccccctagtcccg

SEQ ID NO: 37282 - DNA, 50 bp, unidentified
  source 1..50: mol_type = unassigned DNA; note = donor_b030d4a
  misc_feature 1..23: note = RE
  misc_feature 24..25: note = Core
  misc_feature 26..50: note = LE
tgacatcccagatcatgggatgtctaatgggagctgccgggtcggcgatg

SEQ ID NO: 37283 - DNA, 50 bp, unidentified
  source 1..50: mol_type = unassigned DNA; note = donor_b032f22
  misc_feature 1..23: note = RE
  misc_feature 24..25: note = Core
  misc_feature 26..50: note = LE
ctgcttgaattttatatagttagctggtatattctaattgactcatctga

SEQ ID NO: 37284 - DNA, 50 bp, unidentified
  source 1..50: mol_type = unassigned DNA; note = donor_b038221
  misc_feature 1..23: note = RE
  misc_feature 24..25: note = Core
  misc_feature 26..50: note = LE
gccgggctacttcgccacagttgcttgtgtccccgaaatctgccagaatg

SEQ ID NO: 37285 - DNA, 50 bp, unidentified
  source 1..50: mol_type = unassigned DNA; note = donor_b038735
  misc_feature 1..23: note = RE
  misc_feature 24..25: note = Core
  misc_feature 26..50: note = LE
atcgtttgcaattgtcatagaaatcctttagacttgtatttgtaaattca

SEQ ID NO: 37286 - DNA, 50 bp, unidentified
  source 1..50: mol_type = unassigned DNA; note = donor_b03ca5d
  misc_feature 1..24: note = RE
  misc_feature 25: note = Core
  misc_feature 26..50: note = LE
tggcaaaatgggggcgaccatctataatggaatggccgcccctacccgaa

SEQ ID NO: 37287 - DNA, 50 bp, unidentified
  source 1..50: mol_type = unassigned DNA; note = donor_b03d965
  misc_feature 1..22: note = RE
  misc_feature 23..25: note = Core
  misc_feature 26..50: note = LE
ttgcttgactttttatttgcagactactactatgtttttagtggtcgata

SEQ ID NO: 37288 - DNA, 50 bp, unidentified
  source 1..50: mol_type = unassigned DNA; note = donor_b04be00
  misc_feature 1..24: note = RE
  misc_feature 25: note = Core
  misc_feature 26..50: note = LE
aatcttgacaactattagctggtttcgtaatataaggttagccagatatt

SEQ ID NO: 37289 - DNA, 50 bp, unidentified
  source 1..50: mol_type = unassigned DNA; note = donor_b050f93
  misc_feature 1..23: note = RE
  misc_feature 24..25: note = Core
  misc_feature 26..50: note = LE
actcgtgacttctaacagagaatcttgtatgttgctttcagagccgtgag

SEQ ID NO: 37290 - DNA, 50 bp, unidentified
  source 1..50: mol_type = unassigned DNA; note = donor_b0517ed
  misc_feature 1..22: note = RE
  misc_feature 23..25: note = Core
  misc_feature 26..50: note = LE
aatgttgacaaactattagctggttcgtattataaggtcagccagatttt

SEQ ID NO: 37291 - DNA, 50 bp, unidentified
  source 1..50: mol_type = unassigned DNA; note = donor_b051e99
  misc_feature 1..24: note = RE
  misc_feature 25: note = Core
  misc_feature 26..50: note = LE
cttgcagacggggcgggccatacgtatgggatggcccgccctccacttcc

SEQ ID NO: 37292 - DNA, 50 bp, unidentified
  source 1..50: mol_type = unassigned DNA; note = donor_b06ac17
  misc_feature 1..23: note = RE
  misc_feature 24..25: note = Core
  misc_feature 26..50: note = LE
gcgcaaaggggggcgttcatgtagaatgatatgaacgccctccaccccgc

SEQ ID NO: 37293 - DNA, 50 bp, unidentified
  source 1..50: mol_type = unassigned DNA; note = donor_b0728f8
  misc_feature 1..23: note = RE
  misc_feature 24..25: note = Core
  misc_feature 26..50: note = LE
gaccacgtaccggcgattagacaacatggggtaatcgcgggagcgaggtg

SEQ ID NO: 37294 - DNA, 50 bp, unidentified
  source 1..50: mol_type = unassigned DNA; note = donor_b0819a8
  misc_feature 1..24: note = RE
  misc_feature 25: note = Core
  misc_feature 26..50: note = LE
tggcgaacgggaggcgtccatataaaatgtaatggacgcctcccaccccg

SEQ ID NO: 37295 - DNA, 50 bp, unidentified
  source 1..50: mol_type = unassigned DNA; note = donor_b08cb8b
  misc_feature 1..22: note = RE
  misc_feature 23..25: note = Core
  misc_feature 26..50: note = LE
cagatcaggggccgtccacagatgatggtgtggacggcccctgcgtccgg

SEQ ID NO: 37296 - DNA, 50 bp, unidentified
  source 1..50: mol_type = unassigned DNA; note = donor_b095d63
  misc_feature 1..23: note = RE
  misc_feature 24..25: note = Core
  misc_feature 26..50: note = LE
aagacttgctcaattagagtaaaactattatatttgcatccgcaaagaag

SEQ ID NO: 37297 - DNA, 50 bp, unidentified
  source 1..50: mol_type = unassigned DNA; note = donor_b09aad7
  misc_feature 1..23: note = RE
  misc_feature 24..25: note = Core
  misc_feature 26..50: note = LE
tatattgacttcatatagttagtcttgtataatgaactcatagtaaaaat

SEQ ID NO: 37298 - DNA, 50 bp, unidentified
  source 1..50: mol_type = unassigned DNA; note = donor_b09c146
  misc_feature 1..24: note = RE
  misc_feature 25: note = Core
  misc_feature 26..50: note = LE
acggcttgacgaaaaccatagaggcgttaccgtcttcgtggcctcgcaat

SEQ ID NO: 37299 - DNA, 50 bp, unidentified; identical to SEQ ID NO: 30804
  source 1..50: mol_type = unassigned DNA; note = donor_b0a5f5b
  misc_feature 1..24: note = RE
  misc_feature 25: note = Core
  misc_feature 26..50: note = LE

SEQ ID NO: 37300 - DNA, 50 bp, unidentified
  source 1..50: mol_type = unassigned DNA; note = donor_b0bd5c7
  misc_feature 1..21: note = RE
  misc_feature 22..25: note = Core
  misc_feature 26..50: note = LE
cggctggtccttccatatcagctagacaatatggaaggaccggcctgacc

SEQ ID NO: 37301 - DNA, 50 bp, unidentified
  source 1..50: mol_type = unassigned DNA; note = donor_b0c6a31
  misc_feature 1..23: note = RE
  misc_feature 24..25: note = Core
  misc_feature 26..50: note = LE
aagcggcttgaccaagacggatacttgttttatccataacgtggcttttg

SEQ ID NO: 37302 - DNA, 50 bp, unidentified
  source 1..50: mol_type = unassigned DNA; note = donor_b0ccd01
  misc_feature 1..23: note = RE
  misc_feature 24..25: note = Core
  misc_feature 26..50: note = LE
atacttgtattttatatagttagctggtatattgtaattgactcatttaa

SEQ ID NO: 37303 - DNA, 50 bp, unidentified; identical to SEQ ID NO: 30357
  source 1..50: mol_type = unassigned DNA; note = donor_b0d5a60
  misc_feature 1..23: note = RE
  misc_feature 24..25: note = Core
  misc_feature 26..50: note = LE

SEQ ID NO: 37304 - DNA, 50 bp, unidentified
  source 1..50: mol_type = unassigned DNA; note = donor_b0d6db3
  misc_feature 1..23: note = RE
  misc_feature 24..25: note = Core
  misc_feature 26..50: note = LE
tgacaccaaagcgcatggggtgtctaatggggctcatcgggtcgggtctg

SEQ ID NO: 37305 - DNA, 50 bp, unidentified
  source 1..50: mol_type = unassigned DNA; note = donor_b0d83f3
  misc_feature 1..23: note = RE
  misc_feature 24..25: note = Core
  misc_feature 26..50: note = LE
catcttgacttttcatagtaggtcttgtatgattatttagaagctaaatc

SEQ ID NO: 37306 - DNA, 50 bp, unidentified
  source 1..50: mol_type = unassigned DNA; note = donor_b0dece3
  misc_feature 1..21: note = RE
  misc_feature 22..25: note = Core
  misc_feature 26..50: note = LE
cttgacaaaaacatagggacaccccgttactttgatggtgtccccataat

SEQ ID NO: 37307 - DNA, 50 bp, unidentified
  source 1..50: mol_type = unassigned DNA; note = donor_b0e8563
  misc_feature 1..23: note = RE
  misc_feature 24..25: note = Core
  misc_feature 26..50: note = LE
gcgccgcaggggttgtccacacatgatggcgtggacggcccctgcaccag

SEQ ID NO: 37308 - DNA, 50 bp, unidentified
  source 1..50: mol_type = unassigned DNA; note = donor_b0e9998
  misc_feature 1..23: note = RE
  misc_feature 24..25: note = Core
  misc_feature 26..50: note = LE
gcaccacgggcggcaaccacagaagatggggtggttgccgccctccccag

SEQ ID NO: 37309 - DNA, 50 bp, unidentified
  source 1..50: mol_type = unassigned DNA; note = donor_b0f5be4
  misc_feature 1..23: note = RE
  misc_feature 24..25: note = Core
  misc_feature 26..50: note = LE
gctattgacttttgtttgcaggactcctacaataataattacggcataag

SEQ ID NO: 37310 - DNA, 50 bp, unidentified
  source 1..50: mol_type = unassigned DNA; note = donor_b0fdb0b
  misc_feature 1..24: note = RE
  misc_feature 25: note = Core
  misc_feature 26..50: note = LE
gcaataacgggacgtaccatatattaatgagatggtacgtccctcttcac

SEQ ID NO: 37311 - DNA, 50 bp, unidentified
  source 1..50: mol_type = unassigned DNA; note = donor_b0ff892
  misc_feature 1..23: note = RE
  misc_feature 24..25: note = Core
  misc_feature 26..50: note = LE
gctattgacttttatttgcaggactcctacaataataattacggtttaag

SEQ ID NO: 37312 - DNA, 50 bp, unidentified
  source 1..50: mol_type = unassigned DNA; note = donor_b104391
  misc_feature 1..23: note = RE
  misc_feature 24..25: note = Core
  misc_feature 26..50: note = LE
tgaccgaggggggtgtccacatatgatgatgtggacacccccaccttaac

SEQ ID NO: 37313 - DNA, 50 bp, unidentified
  source 1..50: mol_type = unassigned DNA; note = donor_b10bb74
  misc_feature 1..24: note = RE
  misc_feature 25: note = Core
  misc_feature 26..50: note = LE
ttggcaaaccggggcgaccatctataatgggatggtcgcccctccccaat

SEQ ID NO: 37314 - DNA, 50 bp, unidentified
  source 1..50: mol_type = unassigned DNA; note = donor_b118804
  misc_feature 1..24: note = RE
  misc_feature 25: note = Core
  misc_feature 26..50: note = LE
ccgcctcttgacacagaggggtgcctacttgttccattgcctcatgaccg

SEQ ID NO: 37315 - DNA, 50 bp, unidentified
  source 1..50: mol_type = unassigned DNA; note = donor_b1211ec
  misc_feature 1..23: note = RE
  misc_feature 24..25: note = Core
  misc_feature 26..50: note = LE
gagcctttcttgacatagaggcgctgacttgttcttatgctcctagcatc

SEQ ID NO: 37316 - DNA, 50 bp, unidentified
  source 1..50: mol_type = unassigned DNA; note = donor_b13379d
  misc_feature 1..23: note = RE
  misc_feature 24..25: note = Core
  misc_feature 26..50: note = LE
cctcgcctcttgacatagaggcgctgacttgtttagatgcacccagcacc

SEQ ID NO: 37317 - DNA, 50 bp, unidentified
  source 1..50: mol_type = unassigned DNA; note = donor_b135dcb
  misc_feature 1..24: note = RE
  misc_feature 25: note = Core
  misc_feature 26..50: note = LE
ttgcaaaccgggggcgtccatgtacaatgggatggacgcccccactcgca

SEQ ID NO: 37318 - DNA, 50 bp, unidentified
  source 1..50: mol_type = unassigned DNA; note = donor_b13cfbc
  misc_feature 1..24: note = RE
  misc_feature 25: note = Core
  misc_feature 26..50: note = LE
tgcaaaacgggaggagtccatatacaatgtaatggactcctcccacccaa

SEQ ID NO: 37319 - DNA, 50 bp, unidentified
  source 1..50: mol_type = unassigned DNA; note = donor_b142534
  misc_feature 1..20: note = RE
  misc_feature 21..25: note = Core
  misc_feature 26..50: note = LE
tattgacttttgttagcaggtttttagtaccataaaagtgtaagtgttac

SEQ ID NO: 37320 - DNA, 50 bp, unidentified
  source 1..50: mol_type = unassigned DNA; note = donor_b149a6a
  misc_feature 1..24: note = RE
  misc_feature 25: note = Core
  misc_feature 26..50: note = LE
tggcaaaccgggggcgtccatgtacaatgggatggacgcccccacccgat

SEQ ID NO: 37321 - DNA, 50 bp, unidentified
  source 1..50: mol_type = unassigned DNA; note = donor_b153c7e
  misc_feature 1..21: note = RE
  misc_feature 22..25: note = Core
  misc_feature 26..50: note = LE
gatttgacttcgtcattgagactccgtgaggtgtcaggcgacccgggagg

SEQ ID NO: 37322 - DNA, 50 bp, unidentified
  source 1..50: mol_type = unassigned DNA; note = donor_b157edc
  misc_feature 1..23: note = RE
  misc_feature 24..25: note = Core
  misc_feature 26..50: note = LE
cgcaggtgggggccgtgcacctatgatggggtggacggcccccacttccg

SEQ ID NO: 37323 - DNA, 50 bp, unidentified
  source 1..50: mol_type = unassigned DNA; note = donor_b15ac78
  misc_feature 1..24: note = RE
  misc_feature 25: note = Core
  misc_feature 26..50: note = LE
tgcaaacgggacgcgttcatatagattgaaatgaacgcgtcccacccgtg

SEQ ID NO: 37324 - DNA, 50 bp, unidentified
  source 1..50: mol_type = unassigned DNA; note = donor_b15c6ba
  misc_feature 1..24: note = RE
  misc_feature 25: note = Core
  misc_feature 26..50: note = LE
gcaaaattcgggctggccatagattaatgaaatggccagcccgatccctg

SEQ ID NO: 37325 - DNA, 50 bp, unidentified
  source 1..50: mol_type = unassigned DNA; note = donor_b15d78e
  misc_feature 1..23: note = RE
  misc_feature 24..25: note = Core
  misc_feature 26..50: note = LE
gcaaaacgggaagggaccatatacgatgtgatggtctcttccctcttagc

SEQ ID NO: 37326 - DNA, 50 bp, unidentified
  source 1..50: mol_type = unassigned DNA; note = donor_b164570
  misc_feature 1..23: note = RE
  misc_feature 24..25: note = Core
  misc_feature 26..50: note = LE
agagttgacatctgatagttaatcttgtattatagagtagtagtgattag

SEQ ID NO: 37327 - DNA, 50 bp, unidentified
  source 1..50: mol_type = unassigned DNA; note = donor_b170a8b
  misc_feature 1..24: note = RE
  misc_feature 25: note = Core
  misc_feature 26..50: note = LE
tgcttgacaaacaccatagggacaccgttacgttcttcgtggccccagaa

SEQ ID NO: 37328 - DNA, 50 bp, unidentified
  source 1..50: mol_type = unassigned DNA; note = donor_b176dc2
  misc_feature 1..22: note = RE
  misc_feature 23..25: note = Core
  misc_feature 26..50: note = LE
actccgaagggccgaatagagaagatggggtattcggccggcgccgtttc

SEQ ID NO: 37329 - DNA, 50 bp, unidentified
  source 1..50: mol_type = unassigned DNA; note = donor_b181731
  misc_feature 1..24: note = RE
  misc_feature 25: note = Core
  misc_feature 26..50: note = LE
gtacttggattttaccttagttcttcttaagtttaatttctctaaatttt

SEQ ID NO: 37330 - DNA, 50 bp, unidentified
  source 1..50: mol_type = unassigned DNA; note = donor_b183aef
  misc_feature 1..22: note = RE
  misc_feature 23..25: note = Core
  misc_feature 26..50: note = LE
ttagaaattgagcaagacagttgcttgtgtcttgagaggtgattagaatc

SEQ ID NO: 37331 - DNA, 50 bp, unidentified
  source 1..50: mol_type = unassigned DNA; note = donor_b185e7d
  misc_feature 1..23: note = RE
  misc_feature 24..25: note = Core
  misc_feature 26..50: note = LE
tcatggttgacttttcatagctggtatgataattaggaagttaattacca

SEQ ID NO: 37332 - DNA, 50 bp, unidentified
  source 1..50: mol_type = unassigned DNA; note = donor_b18636f
  misc_feature 1..23: note = RE
  misc_feature 24..25: note = Core
  misc_feature 26..50: note = LE
tcacttgacactcgacacggttacttgtatgttcagacccgaccagcgcg

SEQ ID NO: 37333 - DNA, 50 bp, unidentified
  source 1..50: mol_type = unassigned DNA; note = donor_b194fb0
  misc_feature 1..23: note = RE
  misc_feature 24..25: note = Core
  misc_feature 26..50: note = LE
tgacattcaacctccagggatgtctaatgggagctaccgggtcggccgcc

SEQ ID NO: 37334 - DNA, 50 bp, unidentified
  source 1..50: mol_type = unassigned DNA; note = donor_b1984d6
  misc_feature 1..23: note = RE
  misc_feature 24..25: note = Core
  misc_feature 26..50: note = LE
gcaaaacgggaggagaccatatacgatgagatggtctcctccctctttct

SEQ ID NO: 37335 - DNA, 50 bp, unidentified
  source 1..50: mol_type = unassigned DNA; note = donor_b1988eb
  misc_feature 1..24: note = RE
  misc_feature 25: note = Core
  misc_feature 26..50: note = LE
gcagtttgacaagccagatagtcgccttgtatctggacagatgtcttttg

SEQ ID NO: 37336 - DNA, 50 bp, unidentified
  source 1..50: mol_type = unassigned DNA; note = donor_b199272
  misc_feature 1..24: note = RE
  misc_feature 25: note = Core
  misc_feature 26..50: note = LE
aaagttttgttgaaccatagaaaacctttagatttgcatttcataattat

SEQ ID NO: 37337 - DNA, 50 bp, unidentified
  source 1..50: mol_type = unassigned DNA; note = donor_b1a1b3c
  misc_feature 1..22: note = RE
  misc_feature 23..25: note = Core
  misc_feature 26..50: note = LE
cccttgactttcaagacggttgcttgtatcttggtttcggtcgttcacaa

SEQ ID NO: 37338 - DNA, 50 bp, unidentified; identical to SEQ ID NO: 31004
  source 1..50: mol_type = unassigned DNA; note = donor_b1a4c58
  misc_feature 1..23: note = RE
  misc_feature 24..25: note = Core
  misc_feature 26..50: note = LE

SEQ ID NO: 37339 - DNA, 50 bp, unidentified; identical to SEQ ID NO: 33653
  source 1..50: mol_type = unassigned DNA; note = donor_b1aa2ce
  misc_feature 1..22: note = RE
  misc_feature 23..25: note = Core
  misc_feature 26..50: note = LE

SEQ ID NO: 37340 - DNA, 50 bp, unidentified
  source 1..50: mol_type = unassigned DNA; note = donor_b1afccb
  misc_feature 1..24: note = RE
  misc_feature 25: note = Core
  misc_feature 26..50: note = LE
tactattgactttttatttgcaggcctactacaatgtatttatggttaag

SEQ ID NO: 37341 - DNA, 50 bp, unidentified; identical to SEQ ID NO: 33835
  source 1..50: mol_type = unassigned DNA; note = donor_b1b1017
  misc_feature 1..23: note = RE
  misc_feature 24..25: note = Core
  misc_feature 26..50: note = LE

SEQ ID NO: 37342 - DNA, 50 bp, unidentified
  source 1..50: mol_type = unassigned DNA; note = donor_b1b4813
  misc_feature 1..23: note = RE
  misc_feature 24..25: note = Core
  misc_feature 26..50: note = LE
gacttgacaagacggtatgggatctgatataccgcgttgtggaggccgat

SEQ ID NO: 37343 - DNA, 50 bp, unidentified; identical to SEQ ID NO: 32108
  source 1..50: mol_type = unassigned DNA; note = donor_b1c56ad
  misc_feature 1..23: note = RE
  misc_feature 24..25: note = Core
  misc_feature 26..50: note = LE

SEQ ID NO: 37344 - DNA, 50 bp, unidentified
  source 1..50: mol_type = unassigned DNA; note = donor_b1c73a4
  misc_feature 1..22: note = RE
  misc_feature 23..25: note = Core
  misc_feature 26..50: note = LE
atcttgacttttaatagttagtcttatataatgtatttaggttgttaaag

SEQ ID NO: 37345 - DNA, 50 bp, unidentified
  source 1..50: mol_type = unassigned DNA; note = donor_b1c899a
  misc_feature 1..23: note = RE
  misc_feature 24..25: note = Core
  misc_feature 26..50: note = LE
tgccaatcggggccgtccacatatgatggtgtggacggccccacccgaac

SEQ ID NO: 37346 - DNA, 50 bp, unidentified
  source 1..50: mol_type = unassigned DNA; note = donor_b1d86df
  misc_feature 1..23: note = RE
  misc_feature 24..25: note = Core
  misc_feature 26..50: note = LE
gatcagcgggcgtcgtccagacatgatggtgtggacgacgcccgcacggc

SEQ ID NO: 37347 - DNA, 50 bp, unidentified
  source 1..50: mol_type = unassigned DNA; note = donor_b1ef221
  misc_feature 1..23: note = RE
  misc_feature 24..25: note = Core
  misc_feature 26..50: note = LE
aggggggaattaaatatagttgactcctaccattaattcctatataacta

SEQ ID NO: 37348 - DNA, 50 bp, unidentified
  source 1..50: mol_type = unassigned DNA; note = donor_b1efa28
  misc_feature 1..23: note = RE
  misc_feature 24..25: note = Core
  misc_feature 26..50: note = LE
gaccatcaacggcccgtgacagaagatggggtcacgggccggcaaccgac

SEQ ID NO: 37349 - DNA, 50 bp, unidentified
  source 1..50: mol_type = unassigned DNA; note = donor_b1f4d22
  misc_feature 1..23: note = RE
  misc_feature 24..25: note = Core
  misc_feature 26..50: note = LE
gacctcaacacgccgaatagagaagataggatattcggcttgagtccctg

SEQ ID NO: 37350 - DNA, 50 bp, unidentified
  source 1..50: mol_type = unassigned DNA; note = donor_b1ff777
  misc_feature 1..24: note = RE
  misc_feature 25: note = Core
  misc_feature 26..50: note = LE
tttaagctattctttataggatggtcgtataataaattaaccaaccaaat

SEQ ID NO: 37351 - DNA, 50 bp, unidentified
  source 1..50: mol_type = unassigned DNA; note = donor_b202428
  misc_feature 1..24: note = RE
  misc_feature 25: note = Core
  misc_feature 26..50: note = LE
tggcataacgtgagcgtccatgtataatggaatggacgctcacttcccta

SEQ ID NO: 37352 - DNA, 50 bp, unidentified
  source 1..50: mol_type = unassigned DNA; note = donor_b20544b
  misc_feature 1..24: note = RE
  misc_feature 25: note = Core
  misc_feature 26..50: note = LE
ttggcaaaagtgggcgtccatgtataatgggatggacgcccacttcctat

SEQ ID NO: 37353 - DNA, 50 bp, unidentified
  source 1..50: mol_type = unassigned DNA; note = donor_b20b15d
  misc_feature 1..24: note = RE
  misc_feature 25: note = Core
  misc_feature 26..50: note = LE
gcttgacaaaggggagtccatgtagaatgatatggactccccgctcggca

SEQ ID NO: 37354 - DNA, 50 bp, unidentified; identical to SEQ ID NO: 30604
  source 1..50: mol_type = unassigned DNA; note = donor_b20dbe5
  misc_feature 1..23: note = RE
  misc_feature 24..25: note = Core
  misc_feature 26..50: note = LE

SEQ ID NO: 37355 - DNA, 50 bp, unidentified
  source 1..50: mol_type = unassigned DNA; note = donor_b2128c5
  misc_feature 1..21: note = RE
  misc_feature 22..25: note = Core
  misc_feature 26..50: note = LE
cttgaggttgacacagggtgtctcactggactaccctccattggactgaa

SEQ ID NO: 37356 - DNA, 50 bp, unidentified
  source 1..50: mol_type = unassigned DNA; note = donor_b219eef
  misc_feature 1..24: note = RE
  misc_feature 25: note = Core
  misc_feature 26..50: note = LE
ttcttgacttcctattagctggtatcgtattataaggtcaatcagttaat

SEQ ID NO: 37357 - DNA, 50 bp, unidentified
  source 1..50: mol_type = unassigned DNA; note = donor_b21f7cc
  misc_feature 1..23: note = RE
  misc_feature 24..25: note = Core
  misc_feature 26..50: note = LE
gcatttattggggcatctacacatgatgggttagatgccccacccgacgg

SEQ ID NO: 37358 - DNA, 50 bp, unidentified
  source 1..50: mol_type = unassigned DNA; note = donor_b2224a2
  misc_feature 1..23: note = RE
  misc_feature 24..25: note = Core
  misc_feature 26..50: note = LE
gcatccaaaggggcgtccacacacgatggggtggacgccccctgacggca

SEQ ID NO: 37359 - DNA, 50 bp, unidentified
  source 1..50: mol_type = unassigned DNA; note = donor_b22b665
  misc_feature 1..23: note = RE
  misc_feature 24..25: note = Core
  misc_feature 26..50: note = LE
gctttgactacaatgtttcaaccttatgaccattcctttccgctgcgctc

SEQ ID NO: 37360 - DNA, 50 bp, unidentified
  source 1..50: mol_type = unassigned DNA; note = donor_b22dd64
  misc_feature 1..22: note = RE
  misc_feature 23..25: note = Core
  misc_feature 26..50: note = LE
ttatttgcttttaaacacagttcatcctatgtttgtgaagtctgtgaaaa

SEQ ID NO: 37361 - DNA, 50 bp, unidentified
  source 1..50: mol_type = unassigned DNA; note = donor_b231f9c
  misc_feature 1..24: note = RE
  misc_feature 25: note = Core
  misc_feature 26..50: note = LE
tgcgacaaagcggcggaccatacataatgggatggtccgccgcctttacc

SEQ ID NO: 37362 - DNA, 50 bp, unidentified; identical to SEQ ID NO: 30445
  source 1..50: mol_type = unassigned DNA; note = donor_b23ba3d
  misc_feature 1..24: note = RE
  misc_feature 25: note = Core
  misc_feature 26..50: note = LE

SEQ ID NO: 37363 - DNA, 50 bp, unidentified
  source 1..50: mol_type = unassigned DNA; note = donor_b23c231
  misc_feature 1..23: note = RE
  misc_feature 24..25: note = Core
  misc_feature 26..50: note = LE
ccgcttgacaaacaacacagttactagtatgatccaacgggacacggtat

SEQ ID NO: 37364 - DNA, 50 bp, unidentified
  source 1..50: mol_type = unassigned DNA; note = donor_b2444e1
  misc_feature 1..23: note = RE
  misc_feature 24..25: note = Core
  misc_feature 26..50: note = LE
ctgcttgactttttatttgcaggctactacaatatatttatggttaatat

SEQ ID NO: 37365 - DNA, 50 bp, unidentified
  source 1..50: mol_type = unassigned DNA; note = donor_b245048
  misc_feature 1..21: note = RE
  misc_feature 22..25: note = Core
  misc_feature 26..50: note = LE
cctgaggttgactcaggaagtgtcactagggcaccatgctttctgcggat

SEQ ID NO: 37366 - DNA, 50 bp, unidentified
  source 1..50: mol_type = unassigned DNA; note = donor_b2487f8
  misc_feature 1..23: note = RE
  misc_feature 24..25: note = Core
  misc_feature 26..50: note = LE
gactcatcgaggcccgttacagaagatggggtaacgggccggccaggctc

SEQ ID NO: 37367 - DNA, 50 bp, unidentified
  source 1..50: mol_type = unassigned DNA; note = donor_b25705c
  misc_feature 1..21: note = RE
  misc_feature 22..25: note = Core
  misc_feature 26..50: note = LE
cctgaggttgacacagggggtgtcactagggcaccatctttctcgtaggt

SEQ ID NO: 37368 - DNA, 50 bp, unidentified
  source 1..50: mol_type = unassigned DNA; note = donor_b2601fb
  misc_feature 1..23: note = RE
  misc_feature 24..25: note = Core
  misc_feature 26..50: note = LE
gacgagttacggacctggggtgtctaatgggtcccgaccggcctgagtga

SEQ ID NO: 37369 - DNA, 50 bp, unidentified
  source 1..50: mol_type = unassigned DNA; note = donor_b267f9a
  misc_feature 1..22: note = RE
  misc_feature 23..25: note = Core
  misc_feature 26..50: note = LE
cttcaaggacggcaaccacagaagatggggtggttgccgtccgcccccta

SEQ ID NO: 37370 - DNA, 50 bp, unidentified
  source 1..50: mol_type = unassigned DNA; note = donor_b269f61
  misc_feature 1..22: note = RE
  misc_feature 23..25: note = Core
  misc_feature 26..50: note = LE
cgtcttgacttttaatagttagactcgtattataaagtagtagtgtttat

SEQ ID NO: 37371 - DNA, 50 bp, unidentified; identical to SEQ ID NO: 35605
  source 1..50: mol_type = unassigned DNA; note = donor_b26ad0b
  misc_feature 1..23: note = RE
  misc_feature 24..25: note = Core
  misc_feature 26..50: note = LE

SEQ ID NO: 37372 - DNA, 50 bp, unidentified; identical to SEQ ID NO: 30604
  source 1..50: mol_type = unassigned DNA; note = donor_b27a196
  misc_feature 1..23: note = RE
  misc_feature 24..25: note = Core
  misc_feature 26..50: note = LE

SEQ ID NO: 37373 - DNA, 50 bp, unidentified; identical to SEQ ID NO: 36538
  source 1..50: mol_type = unassigned DNA; note = donor_b27c434
  misc_feature 1..23: note = RE
  misc_feature 24..25: note = Core
  misc_feature 26..50: note = LE

SEQ ID NO: 37374 - DNA, 50 bp, unidentified
  source 1..50: mol_type = unassigned DNA; note = donor_b27decf
  misc_feature 1..23: note = RE
  misc_feature 24..25: note = Core
  misc_feature 26..50: note = LE
acccttgaccaacaacacagccgcttgtatctttgatttgccagtcggtt

SEQ ID NO: 37375 - DNA, 50 bp, unidentified
  source 1..50: mol_type = unassigned DNA; note = donor_b285be5
  misc_feature 1..21: note = RE
  misc_feature 22..25: note = Core
  misc_feature 26..50: note = LE
agcttgacaacaccattgagattccgtaagactgtcgacggcccaggagg

SEQ ID NO: 37376 - DNA, 50 bp, unidentified; identical to SEQ ID NO: 30394
  source 1..50: mol_type = unassigned DNA; note = donor_b289899
  misc_feature 1..22: note = RE
  misc_feature 23..25: note = Core
  misc_feature 26..50: note = LE

SEQ ID NO: 37377 - DNA, 50 bp, unidentified
  source 1..50: mol_type = unassigned DNA; note = donor_b28a58e
  misc_feature 1..24: note = RE
  misc_feature 25: note = Core
  misc_feature 26..50: note = LE
cttgcggacggggcgggccatacgtatgggatggcccgcccctttctgcg

SEQ ID NO: 37378 - DNA, 50 bp, unidentified
  source 1..50: mol_type = unassigned DNA; note = donor_b28ee7b
  misc_feature 1..23: note = RE
  misc_feature 24..25: note = Core
  misc_feature 26..50: note = LE
tccacttgaaatcaacacagttacttgtatcttggaatcgctgtctttgt

SEQ ID NO: 37379 - DNA, 50 bp, unidentified
  source 1..50: mol_type = unassigned DNA; note = donor_b2920f8
  misc_feature 1..24: note = RE
  misc_feature 25: note = Core
  misc_feature 26..50: note = LE
tgcaaaagaggaggagtccatacacaatgggatggactcctcctcaactt

SEQ ID NO: 37380 - DNA, 50 bp, unidentified
  source 1..50: mol_type = unassigned DNA; note = donor_b295ab9
  misc_feature 1..23: note = RE
  misc_feature 24..25: note = Core
  misc_feature 26..50: note = LE
aatcagcttgatcaacacggatacttgtcttatgactttccgtgccgaca

SEQ ID NO: 37381 - DNA, 50 bp, unidentified
  source 1..50: mol_type = unassigned DNA; note = donor_b2960aa
  misc_feature 1..23: note = RE
  misc_feature 24..25: note = Core
  misc_feature 26..50: note = LE
gcgtcacacggggcgtctacacatgatggggtagacgccccccaacgtcc

SEQ ID NO: 37382 - DNA, 50 bp, unidentified
  source 1..50: mol_type = unassigned DNA; note = donor_b2989f7
  misc_feature 1..24: note = RE
  misc_feature 25: note = Core
  misc_feature 26..50: note = LE
tggaaatatattaatcctagaatacctttggttaaaattagcacatatct

SEQ ID NO: 37383 - DNA, 50 bp, unidentified
  source 1..50: mol_type = unassigned DNA; note = donor_b29b0f4
  misc_feature 1..23: note = RE
  misc_feature 24..25: note = Core
  misc_feature 26..50: note = LE
ttatttggattttaatatagttcgtcgtacatttgtacggttaaatgttt

SEQ ID NO: 37384 - DNA, 50 bp, unidentified
  source 1..50: mol_type = unassigned DNA; note = donor_b29b535
  misc_feature 1..23: note = RE
  misc_feature 24..25: note = Core
  misc_feature 26..50: note = LE
atgcctaaatctcaagacagttgcttgtatctctcagcctgtggcacgat

SEQ ID NO: 37385 - DNA, 50 bp, unidentified
  source 1..50: mol_type = unassigned DNA; note = donor_b29df0f
  misc_feature 1..24: note = RE
  misc_feature 25: note = Core
  misc_feature 26..50: note = LE
tgcagccgcgaggaagtccttatagaatgaaagggacttccccgggccgg

SEQ ID NO: 37386 - DNA, 50 bp, unidentified; identical to SEQ ID NO: 37282
  source 1..50: mol_type = unassigned DNA; note = donor_b2a29a7
  misc_feature 1..23: note = RE
  misc_feature 24..25: note = Core
  misc_feature 26..50: note = LE

SEQ ID NO: 37387 - DNA, 50 bp, unidentified; identical to SEQ ID NO: 32049
  source 1..50: mol_type = unassigned DNA; note = donor_b2aa09e
  misc_feature 1..23: note = RE
  misc_feature 24..25: note = Core
  misc_feature 26..50: note = LE

SEQ ID NO: 37388 - DNA, 50 bp, unidentified
  source 1..50: mol_type = unassigned DNA; note = donor_b2aede4
  misc_feature 1..23: note = RE
  misc_feature 24..25: note = Core
  misc_feature 26..50: note = LE
ccacttgacaccaaacacggttgcttgtatgtttcatttaccagacatta

SEQ ID NO: 37389 - DNA, 50 bp, unidentified
  source 1..50: mol_type = unassigned DNA; note = donor_b2b764d
  misc_feature 1..23: note = RE
  misc_feature 24..25: note = Core
  misc_feature 26..50: note = LE
tggcaaacagggggcgaccatgtataatgggatggtcgcccccttcctag

SEQ ID NO: 37390 - DNA, 50 bp, unidentified; identical to SEQ ID NO: 31332
  source 1..50: mol_type = unassigned DNA; note = donor_b2b8608
  misc_feature 1..23: note = RE
  misc_feature 24..25: note = Core
  misc_feature 26..50: note = LE

SEQ ID NO: 37391 - DNA, 50 bp, unidentified
  source 1..50: mol_type = unassigned DNA; note = donor_b2c066c
  misc_feature 1..21: note = RE
  misc_feature 22..25: note = Core
  misc_feature 26..50: note = LE
catgaggttgacacagggggtgtcactagggcaccatccttagcaggggc

SEQ ID NO: 37392 - DNA, 50 bp, unidentified
  source 1..50: mol_type = unassigned DNA; note = donor_b2c0861
  misc_feature 1..24: note = RE
  misc_feature 25: note = Core
  misc_feature 26..50: note = LE
ttgcaaaaggcgtcggtccatacatactgagatggacccgacgccaccct

SEQ ID NO: 37393 - DNA, 50 bp, unidentified
  source 1..50: mol_type = unassigned DNA; note = donor_b2c6095
  misc_feature 1..22: note = RE
  misc_feature 23..25: note = Core
  misc_feature 26..50: note = LE
aacttgacaagaccctatgggtgctgatatagatccttgtaggggcagga

SEQ ID NO: 37394 - DNA, 50 bp, unidentified
  source 1..50: mol_type = unassigned DNA; note = donor_b2c7315
  misc_feature 1..24: note = RE
  misc_feature 25: note = Core
  misc_feature 26..50: note = LE
ttgcaaaacggggcgtaccatacataataagatggtacgcccctccattc

SEQ ID NO: 37395 - DNA, 50 bp, unidentified
  source 1..50: mol_type = unassigned DNA; note = donor_b2ca6e4
  misc_feature 1..23: note = RE
  misc_feature 24..25: note = Core
  misc_feature 26..50: note = LE
gcaaaaaacaggctgaccatacattaatgagatggtcagcctgaccgaaa

SEQ ID NO: 37396 - DNA, 50 bp, unidentified
  source 1..50: mol_type = unassigned DNA; note = donor_b2d8183
  misc_feature 1..23: note = RE
  misc_feature 24..25: note = Core
  misc_feature 26..50: note = LE
gtgcaatcggaggagtccatataagatgtatggactcctccccattaacg

SEQ ID NO: 37397 - DNA, 50 bp, unidentified
  source 1..50: mol_type = unassigned DNA; note = donor_b2db41d
  misc_feature 1..24: note = RE
  misc_feature 25: note = Core
  misc_feature 26..50: note = LE
gctcaaacgggagacattcatataatgaaatgaacgtctcccacccatcg

SEQ ID NO: 37398 - DNA, 50 bp, unidentified
  source 1..50: mol_type = unassigned DNA; note = donor_b2e23ad
  misc_feature 1..23: note = RE
  misc_feature 24..25: note = Core
  misc_feature 26..50: note = LE
gcaaaaggggaggagaccatatacgatgagatggtctcctccccgctcgt

SEQ ID NO: 37399 - DNA, 50 bp, unidentified
  source 1..50: mol_type = unassigned DNA; note = donor_b2e3a27
  misc_feature 1..22: note = RE
  misc_feature 23..25: note = Core
  misc_feature 26..50: note = LE
cagctcaggagccgtccacagatgatgggatggacggcccctgtgtccgg

SEQ ID NO: 37400 - DNA, 50 bp, unidentified
  source 1..50: mol_type = unassigned DNA; note = donor_b2ebe4a
  misc_feature 1..23: note = RE
  misc_feature 24..25: note = Core
  misc_feature 26..50: note = LE
actcttgactttttatttgcagactattacaatagatttacggtagaagg

SEQ ID NO: 37401 - DNA, 50 bp, unidentified
  source 1..50: mol_type = unassigned DNA; note = donor_b2ef0d4
  misc_feature 1..23: note = RE
  misc_feature 24..25: note = Core
  misc_feature 26..50: note = LE
gttgacactggggagtccacataagataattggactcccccatcctcata

SEQ ID NO: 37402 - DNA, 50 bp, unidentified
  source 1..50: mol_type = unassigned DNA; note = donor_b2ef954
  misc_feature 1..24: note = RE
  misc_feature 25: note = Core
  misc_feature 26..50: note = LE
caaccgcttgacacaaagaggattctgatagaggatgtgatgcaaggacg

SEQ ID NO: 37403 - DNA, 50 bp, unidentified
  source 1..50: mol_type = unassigned DNA; note = donor_b2f5051
  misc_feature 1..24: note = RE
  misc_feature 25: note = Core
  misc_feature 26..50: note = LE
cttgactcgaaacatagggacacccgttaccttgtgagtacccccgatag

SEQ ID NO: 37404 - DNA, 50 bp, unidentified
  source 1..50: mol_type = unassigned DNA; note = donor_b2f77db
  misc_feature 1..21: note = RE
  misc_feature 22..25: note = Core
  misc_feature 26..50: note = LE
ttcgttgacattaagcacagttcatcctatgcttatagtcgctaggttat

SEQ ID NO: 37405 - DNA, 50 bp, unidentified
  source 1..50: mol_type = unassigned DNA; note = donor_b2f7edf
  misc_feature 1..22: note = RE
  misc_feature 23..25: note = Core
  misc_feature 26..50: note = LE
caatatgggaggagaccatatatgatgtgatggtcttctccttattcggc

SEQ ID NO: 37406 - DNA, 50 bp, unidentified
  source 1..50: mol_type = unassigned DNA; note = donor_b3015a8
  misc_feature 1..23: note = RE
  misc_feature 24..25: note = Core
  misc_feature 26..50: note = LE
gctattgactttttatagctggtctcgtataatcaacttgcggtggaaaa

SEQ ID NO: 37407 - DNA, 50 bp, unidentified
  source 1..50: mol_type = unassigned DNA; note = donor_b30277f
  misc_feature 1..24: note = RE
  misc_feature 25: note = Core
  misc_feature 26..50: note = LE
tgcgcttgactttttatttgcaggcctattacaatatatttacggatcaa

SEQ ID NO: 37408 - DNA, 50 bp, unidentified
  source 1..50: mol_type = unassigned DNA; note = donor_b3129e5
  misc_feature 1..23: note = RE
  misc_feature 24..25: note = Core
  misc_feature 26..50: note = LE
attttcttgacagagcacggtagcttgtatgtaatagcagtgtggtggtt

SEQ ID NO: 37409 - DNA, 50 bp, unidentified
  source 1..50: mol_type = unassigned DNA; note = donor_b3141fc
  misc_feature 1..24: note = RE
  misc_feature 25: note = Core
  misc_feature 26..50: note = LE
tgcaaaaaggaggggggccatagataatgagatggtccccctccgctctg

SEQ ID NO: 37410 - DNA, 50 bp, unidentified; identical to SEQ ID NO: 32421
  source 1..50: mol_type = unassigned DNA; note = donor_b315314
  misc_feature 1..23: note = RE
  misc_feature 24..25: note = Core
  misc_feature 26..50: note = LE

SEQ ID NO: 37411 - DNA, 50 bp, unidentified
  source 1..50: mol_type = unassigned DNA; note = donor_b316be8
  misc_feature 1..22: note = RE
  misc_feature 23..25: note = Core
  misc_feature 26..50: note = LE
atgcttgacaaacattagctggtttcgtattattaggtcagccagagatt

SEQ ID NO: 37412 - DNA, 50 bp, unidentified
  source 1..50: mol_type = unassigned DNA; note = donor_b327d40
  misc_feature 1..24: note = RE
  misc_feature 25: note = Core
  misc_feature 26..50: note = LE
ccgcctcttgacataaaggggagcctacttaagactggtgtcagggcttg

SEQ ID NO: 37413 - DNA, 50 bp, unidentified
  source 1..50: mol_type = unassigned DNA; note = donor_b3295ca
  misc_feature 1..23: note = RE
  misc_feature 24..25: note = Core
  misc_feature 26..50: note = LE
gccaaccaggagccgtccacacatgatgctgtggacggctcctccaccgg

SEQ ID NO: 37414 - DNA, 50 bp, unidentified
  source 1..50: mol_type = unassigned DNA; note = donor_b32b216
  misc_feature 1..24: note = RE
  misc_feature 25: note = Core
  misc_feature 26..50: note = LE
aacacataggggtacccccccgcccgttaccttcttcgtggccccgcaac

SEQ ID NO: 37415 - DNA, 50 bp, unidentified
  source 1..50: mol_type = unassigned DNA; note = donor_b32e11a
  misc_feature 1..23: note = RE
  misc_feature 24..25: note = Core
  misc_feature 26..50: note = LE
ggtcttgacttttatttgcaagactcctacaataataaataaggtgacag

SEQ ID NO: 37416 - DNA, 50 bp, unidentified
  source 1..50: mol_type = unassigned DNA; note = donor_b335cdd
  misc_feature 1..22: note = RE
  misc_feature 23..25: note = Core
  misc_feature 26..50: note = LE
tccttgactttcaagacggttgcttgtatcttggttttggtcgttcacaa

SEQ ID NO: 37417 - DNA, 50 bp, unidentified
  source 1..50: mol_type = unassigned DNA; note = donor_b34712b
  misc_feature 1..23: note = RE
  misc_feature 24..25: note = Core
  misc_feature 26..50: note = LE
agacttgacttttaatagttagtctcgtattatatagtagtgtttatagt

SEQ ID NO: 37418 - DNA, 50 bp, unidentified
  source 1..50: mol_type = unassigned DNA; note = donor_b34c096
  misc_feature 1..24: note = RE
  misc_feature 25: note = Core
  misc_feature 26..50: note = LE
tgcgcaaactggggcgtccatgtacaatggaatggacgccccacccgtaa

SEQ ID NO: 37419 - DNA, 50 bp, unidentified
  source 1..50: mol_type = unassigned DNA; note = donor_b35dfc7
  misc_feature 1..23: note = RE
  misc_feature 24..25: note = Core
  misc_feature 26..50: note = LE
gcatctaacggggcgtccacacacgatggggtggacgccccccgacggca

SEQ ID NO: 37420 - DNA, 50 bp, unidentified
  source 1..50: mol_type = unassigned DNA; note = donor_b35f187
  misc_feature 1..21: note = RE
  misc_feature 22..25: note = Core
  misc_feature 26..50: note = LE
cctgaggttgacacagggggtgtcactagggcaccatccttagcaggggc

SEQ ID NO: 37421 - DNA, 50 bp, unidentified
  source 1..50: mol_type = unassigned DNA; note = donor_b3658db
  misc_feature 1..22: note = RE
  misc_feature 23..25: note = Core
  misc_feature 26..50: note = LE
ccaaaacggagccgtccacacatgatgctgtggacggctccaccgccggc

SEQ ID NO: 37422 - DNA, 50 bp, unidentified
  source 1..50: mol_type = unassigned DNA; note = donor_b36f033
  misc_feature 1..22: note = RE
  misc_feature 23..25: note = Core
  misc_feature 26..50: note = LE
gacccaaacgcccaattagagaagcatgcgtaattgggctgcccctattc

SEQ ID NO: 37423 - DNA, 50 bp, unidentified; identical to SEQ ID NO: 30451
  source 1..50: mol_type = unassigned DNA; note = donor_b373cea
  misc_feature 1..23: note = RE
  misc_feature 24..25: note = Core
  misc_feature 26..50: note = LE

SEQ ID NO: 37424 - DNA, 50 bp, unidentified
  source 1..50: mol_type = unassigned DNA; note = donor_b375eb1
  misc_feature 1..23: note = RE
  misc_feature 24..25: note = Core
  misc_feature 26..50: note = LE
gacatgtcggggccgtccacacatgatgaggtggacggctccttcacaac

SEQ ID NO: 37425 - DNA, 50 bp, unidentified
  source 1..50: mol_type = unassigned DNA; note = donor_b37cf40
  misc_feature 1..23: note = RE
  misc_feature 24..25: note = Core
  misc_feature 26..50: note = LE
gcaaaccgggggccgtccacacatgttgggtggacggcccccgacggcat

SEQ ID NO: 37426 - DNA, 50 bp, unidentified
  source 1..50: mol_type = unassigned DNA; note = donor_b37f23c
  misc_feature 1..23: note = RE
  misc_feature 24..25: note = Core
  misc_feature 26..50: note = LE
aaggaggaattaaatatagttgactcctaccattaattcctgtgtaacaa

SEQ ID NO: 37427 - DNA, 50 bp, unidentified; identical to SEQ ID NO: 30451
  source 1..50: mol_type = unassigned DNA; note = donor_b383c3a
  misc_feature 1..23: note = RE
  misc_feature 24..25: note = Core
  misc_feature 26..50: note = LE

SEQ ID NO: 37428 - DNA, 50 bp, unidentified
  source 1..50: mol_type = unassigned DNA; note = donor_b38c41b
  misc_feature 1..21: note = RE
  misc_feature 22..25: note = Core
  misc_feature 26..50: note = LE
tttcttgattatgccatagaaatccattaggtttgttttagatttgaaag

SEQ ID NO: 37429 - DNA, 50 bp, unidentified
  source 1..50: mol_type = unassigned DNA; note = donor_b3909d7
  misc_feature 1..24: note = RE
  misc_feature 25: note = Core
  misc_feature 26..50: note = LE
ttgacaaccgggggagtccatgtagaatgacatggactccccctcatccg

SEQ ID NO: 37430 - DNA, 50 bp, unidentified
  source 1..50: mol_type = unassigned DNA; note = donor_b393082
  misc_feature 1..23: note = RE
  misc_feature 24..25: note = Core
  misc_feature 26..50: note = LE
gacacagctaactcctgggatgtctaatcagtcatagcgggtcgctttag

SEQ ID NO: 37431 - DNA, 50 bp, unidentified
  source 1..50: mol_type = unassigned DNA; note = donor_b39c6c4
  misc_feature 1..24: note = RE
  misc_feature 25: note = Core
  misc_feature 26..50: note = LE
aagcttgttttttaactcagttcttcttaagtttacaattcattaaattt

SEQ ID NO: 37432 - DNA, 50 bp, unidentified
  source 1..50: mol_type = unassigned DNA; note = donor_b3aee1c
  misc_feature 1..23: note = RE
  misc_feature 24..25: note = Core
  misc_feature 26..50: note = LE
cttgcaattcgggcgtctacacatgatgatgtagacgcccaccgctggct

SEQ ID NO: 37433 - DNA, 50 bp, unidentified
  source 1..50: mol_type = unassigned DNA; note = donor_b3b3781
  misc_feature 1..22: note = RE
  misc_feature 23..25: note = Core
  misc_feature 26..50: note = LE
tttattgacaaactattagctggttcgtattataaggtcagccagagaat

SEQ ID NO: 37434 - DNA, 50 bp, unidentified
  source 1..50: mol_type = unassigned DNA; note = donor_b3b7ce2
  misc_feature 1..24: note = RE
  misc_feature 25: note = Core
  misc_feature 26..50: note = LE
tggcaaaccgggggcgtccatgtacaatgggatggacgcccccatccaat

SEQ ID NO: 37435 - DNA, 50 bp, unidentified
  source 1..50: mol_type = unassigned DNA; note = donor_b3b80b6
  misc_feature 1..24: note = RE
  misc_feature 25: note = Core
  misc_feature 26..50: note = LE
tggcaaataggaggcgtccatataatggaatggacgcctcccccgcaagg

SEQ ID NO: 37436 - DNA, 50 bp, unidentified
  source 1..50: mol_type = unassigned DNA; note = donor_b3bc951
  misc_feature 1..23: note = RE
  misc_feature 24..25: note = Core
  misc_feature 26..50: note = LE
gacgcctccgaaccatgggatgtctaatggggcttaccgagcccgctggt

SEQ ID NO: 37437 - DNA, 50 bp, unidentified
  source 1..50: mol_type = unassigned DNA; note = donor_b3e7ff6
  misc_feature 1..24: note = RE
  misc_feature 25: note = Core
  misc_feature 26..50: note = LE
tgcgacaaggcggcggaccatacataatgggatggtccgccgccgctacc

SEQ ID NO: 37438 - DNA, 50 bp, unidentified
  source 1..50: mol_type = unassigned DNA; note = donor_b3e826f
  misc_feature 1..21: note = RE
  misc_feature 22..25: note = Core
  misc_feature 26..50: note = LE
cggcggcttgacatagggcttctcactggactaccttcctgaagtcttcg

SEQ ID NO: 37439 - DNA, 50 bp, unidentified
  source 1..50: mol_type = unassigned DNA; note = donor_b3f434f
  misc_feature 1..22: note = RE
  misc_feature 23..25: note = Core
  misc_feature 26..50: note = LE
acaacttacgcacctgggatgtctaatgggaattgatcagcgagccttcg

SEQ ID NO: 37440 - DNA, 50 bp, unidentified
  source 1..50: mol_type = unassigned DNA; note = donor_b3fb068
  misc_feature 1..23: note = RE
  misc_feature 24..25: note = Core
  misc_feature 26..50: note = LE
tgccaataggggccgtccacatatgatggtgtggacggccccacctcgac

SEQ ID NO: 37441 - DNA, 50 bp, unidentified
  source 1..50: mol_type = unassigned DNA; note = donor_b3fee31
  misc_feature 1..23: note = RE
  misc_feature 24..25: note = Core
  misc_feature 26..50: note = LE
ctcggtaatggggaagacggtatcttgtatctcgactaccacgctatgtt

SEQ ID NO: 37442 - DNA, 50 bp, unidentified
  source 1..50: mol_type = unassigned DNA; note = donor_b405d33
  misc_feature 1..23: note = RE
  misc_feature 24..25: note = Core
  misc_feature 26..50: note = LE
gccaacggagagccgtccacacatgatgccgtggacggctctccacccac

SEQ ID NO: 37443 - DNA, 50 bp, unidentified
  source 1..50: mol_type = unassigned DNA; note = donor_b40a76d
  misc_feature 1..24: note = RE
  misc_feature 25: note = Core
  misc_feature 26..50: note = LE
tggcaaaatgggggcgaccatctataatggaatggtcgccccttcccgaa

SEQ ID NO: 37444 - DNA, 50 bp, unidentified
  source 1..50: mol_type = unassigned DNA; note = donor_b40cec8
  misc_feature 1..22: note = RE
  misc_feature 23..25: note = Core
  misc_feature 26..50: note = LE
tgccataggcggcgtccacatatgatgatgtggacgccgccgaccccgca

SEQ ID NO: 37445 - DNA, 50 bp, unidentified
  source 1..50: mol_type = unassigned DNA; note = donor_b4320af
  misc_feature 1..24: note = RE
  misc_feature 25: note = Core
  misc_feature 26..50: note = LE
tgacaaacagggggcgaccatctataatggaatggtcgcctcccttctct

SEQ ID NO: 37446 - DNA, 50 bp, unidentified
  source 1..50: mol_type = unassigned DNA; note = donor_b43390e
  misc_feature 1..23: note = RE
  misc_feature 24..25: note = Core
  misc_feature 26..50: note = LE
gacacccatagctcctgggatgtctaatcactgtcaacgggtccgccgtc

SEQ ID NO: 37447 - DNA, 50 bp, unidentified; identical to SEQ ID NO: 36075
  source 1..50: mol_type = unassigned DNA; note = donor_b4504e4
  misc_feature 1..24: note = RE
  misc_feature 25: note = Core
  misc_feature 26..50: note = LE

SEQ ID NO: 37448 - DNA, 50 bp, unidentified
  source 1..50: mol_type = unassigned DNA; note = donor_b45b316
  misc_feature 1..23: note = RE
  misc_feature 24..25: note = Core
  misc_feature 26..50: note = LE
cttttcttgacgaaacacggtagcttgtatgtaatagacatgtgatggtt

SEQ ID NO: 37449 - DNA, 50 bp, unidentified
  source 1..50: mol_type = unassigned DNA; note = donor_b4612e1
  misc_feature 1..21: note = RE
  misc_feature 22..25: note = Core
  misc_feature 26..50: note = LE
cctgaggttgactcagagggtgtcactggtgcaccctctttctgacgggc

SEQ ID NO: 37450 - DNA, 50 bp, unidentified
  source 1..50: mol_type = unassigned DNA; note = donor_b46f866
  misc_feature 1..22: note = RE
  misc_feature 23..25: note = Core
  misc_feature 26..50: note = LE
aatattgacaaactattagctggttcgtattataaggtcaatcagaaaag

SEQ ID NO: 37451 - DNA, 50 bp, unidentified
  source 1..50: mol_type = unassigned DNA; note = donor_b474fd8
  misc_feature 1..24: note = RE
  misc_feature 25: note = Core
  misc_feature 26..50: note = LE
gccgcttgacggaaaccatagaggcgttaccttcttcccagctcgtccgt

SEQ ID NO: 37452 - DNA, 50 bp, unidentified
  source 1..50: mol_type = unassigned DNA; note = donor_b4786de
  misc_feature 1..24: note = RE
  misc_feature 25: note = Core
  misc_feature 26..50: note = LE
ggggcttgactttttatttgcaggcctgttacaatatatttgcctcggaa

SEQ ID NO: 37453 - DNA, 50 bp, unidentified
  source 1..50: mol_type = unassigned DNA; note = donor_b484606
  misc_feature 1..23: note = RE
  misc_feature 24..25: note = Core
  misc_feature 26..50: note = LE
tggttgacaaaaccatagagacaccattacagtttgagccgtccataagg

SEQ ID NO: 37454 - DNA, 50 bp, unidentified
  source 1..50: mol_type = unassigned DNA; note = donor_b48a397
  misc_feature 1..23: note = RE
  misc_feature 24..25: note = Core
  misc_feature 26..50: note = LE
gacaccggacgccgcttcacagaagttggtatgaagcggctggacctcca

SEQ ID NO: 37455 - DNA, 50 bp, unidentified
  source 1..50: mol_type = unassigned DNA; note = donor_b48ca7a
  misc_feature 1..23: note = RE
  misc_feature 24..25: note = Core
  misc_feature 26..50: note = LE
aggtctacttcaaaatacagttgcttgtgtccgcaaattctgccagaatg

SEQ ID NO: 37456 - DNA, 50 bp, unidentified
  source 1..50: mol_type = unassigned DNA; note = donor_b48f764
  misc_feature 1..24: note = RE
  misc_feature 25: note = Core
  misc_feature 26..50: note = LE
cttgcaaacggggcgggccatacgtatgggatggcccgcccctttccccg

SEQ ID NO: 37457 - DNA, 50 bp, unidentified
  source 1..50: mol_type = unassigned DNA; note = donor_b493529
  misc_feature 1..23: note = RE
  misc_feature 24..25: note = Core
  misc_feature 26..50: note = LE
accgaaagatttattactgaacgcctatataggttttattagccggggag

SEQ ID NO: 37458 - DNA, 50 bp, unidentified
  source 1..50: mol_type = unassigned DNA; note = donor_b49f581
  misc_feature 1..20: note = RE
  misc_feature 21..25: note = Core
  misc_feature 26..50: note = LE
tattgacttttgttagcaggtttttagtaccatataagtgtaagagataa

SEQ ID NO: 37459 - DNA, 50 bp, unidentified
  source 1..50: mol_type = unassigned DNA; note = donor_b4a1af9
  misc_feature 1..23: note = RE
  misc_feature 24..25: note = Core
  misc_feature 26..50: note = LE
gcatcaaggacggcaaccacagaagatggggtggttgccgtcctccccaa

SEQ ID NO: 37460 - DNA, 50 bp, unidentified
  source 1..50: mol_type = unassigned DNA; note = donor_b4a79fb
  misc_feature 1..24: note = RE
  misc_feature 25: note = Core
  misc_feature 26..50: note = LE
tgacacaagggaggcgtccatataatggtatggacgcctcccaccttcgc

SEQ ID NO: 37461 - DNA, 50 bp, unidentified
  source 1..50: mol_type = unassigned DNA; note = donor_b4a9eba
  misc_feature 1..23: note = RE
  misc_feature 24..25: note = Core
  misc_feature 26..50: note = LE
cttgacttccaaggccccatacaagatcctatggggcgagcggcgaggag

SEQ ID NO: 37462 - DNA, 50 bp, unidentified; identical to SEQ ID NO: 34137
  source 1..50: mol_type = unassigned DNA; note = donor_b4b544c
  misc_feature 1..23: note = RE
  misc_feature 24..25: note = Core
  misc_feature 26..50: note = LE

SEQ ID NO: 37463 - DNA, 50 bp, unidentified
  source 1..50: mol_type = unassigned DNA; note = donor_b4bb2e0
  misc_feature 1..23: note = RE
  misc_feature 24..25: note = Core
  misc_feature 26..50: note = LE
ctgtccacgactttctttcacactaatctccattccgcgcgccttcgggc

SEQ ID NO: 37464 - DNA, 50 bp, unidentified
  source 1..50: mol_type = unassigned DNA; note = donor_b4bfad0
  misc_feature 1..24: note = RE
  misc_feature 25: note = Core
  misc_feature 26..50: note = LE
cggcttgacgcgtcataggagcgtctgtgagactggccgggtcggcgcat

SEQ ID NO: 37465 - DNA, 50 bp, unidentified; identical to SEQ ID NO: 30412
  source 1..50: mol_type = unassigned DNA; note = donor_b4ce6b2
  misc_feature 1..23: note = RE
  misc_feature 24..25: note = Core
  misc_feature 26..50: note = LE

SEQ ID NO: 37466 - DNA, 50 bp, unidentified
  source 1..50: mol_type = unassigned DNA; note = donor_b4cf279
  misc_feature 1..22: note = RE
  misc_feature 23..25: note = Core
  misc_feature 26..50: note = LE
acaataaacgggagtccatataagatgtatggactccctcccagcaatgg

SEQ ID NO: 37467 - DNA, 50 bp, unidentified; identical to SEQ ID NO: 32245
  source 1..50: mol_type = unassigned DNA; note = donor_b4d00ee
  misc_feature 1..24: note = RE
  misc_feature 25: note = Core
  misc_feature 26..50: note = LE

SEQ ID NO: 37468 - DNA, 50 bp, unidentified
  source 1..50: mol_type = unassigned DNA; note = donor_b4dc62d
  misc_feature 1..22: note = RE
  misc_feature 23..25: note = Core
  misc_feature 26..50: note = LE
gcaaatgggaggcgaccatataagatggaatggtcgcctcccgccttagc

SEQ ID NO: 37469 - DNA, 50 bp, unidentified
  source 1..50: mol_type = unassigned DNA; note = donor_b4e018c
  misc_feature 1..24: note = RE
  misc_feature 25: note = Core
  misc_feature 26..50: note = LE
cttgcggacggggcgggccatacgtatgggatggcccgcccctctacccg

SEQ ID NO: 37470 - DNA, 50 bp, unidentified
  source 1..50: mol_type = unassigned DNA; note = donor_b4e5199
  misc_feature 1..22: note = RE
  misc_feature 23..25: note = Core
  misc_feature 26..50: note = LE
tagcttgacaaacattagctggtttcgtattattaggtcaaccggaattt

SEQ ID NO: 37471 - DNA, 50 bp, unidentified
  source 1..50: mol_type = unassigned DNA; note = donor_b4ec7fb
  misc_feature 1..22: note = RE
  misc_feature 23..25: note = Core
  misc_feature 26..50: note = LE
aagcttgttttttaccttggaatacctttactttgaccttattaatttta

SEQ ID NO: 37472 - DNA, 50 bp, unidentified
  source 1..50: mol_type = unassigned DNA; note = donor_b4ec90e
  misc_feature 1..24: note = RE
  misc_feature 25: note = Core
  misc_feature 26..50: note = LE
gcacccgttgacacagaggggtgcctactaggagactttccgcaggatcg

SEQ ID NO: 37473 - DNA, 50 bp, unidentified; identical to SEQ ID NO: 33531
  source 1..50: mol_type = unassigned DNA; note = donor_b4fdd7f
  misc_feature 1..24: note = RE
  misc_feature 25: note = Core
  misc_feature 26..50: note = LE

SEQ ID NO: 37474 - DNA, 50 bp, unidentified
  source 1..50: mol_type = unassigned DNA; note = donor_b51574b
  misc_feature 1..23: note = RE
  misc_feature 24..25: note = Core
  misc_feature 26..50: note = LE
tgacacccaagcccctgggatgtctaatgagatgtagcgggccagtccga

SEQ ID NO: 37475 - DNA, 50 bp, unidentified
  source 1..50: mol_type = unassigned DNA; note = donor_b51eb84
  misc_feature 1..23: note = RE
  misc_feature 24..25: note = Core
  misc_feature 26..50: note = LE
ccttgcaaaggaggcgttcatatagaataatatgaacgcctccactaaag

SEQ ID NO: 37476 - DNA, 50 bp, unidentified
  source 1..50: mol_type = unassigned DNA; note = donor_b5201d8
  misc_feature 1..23: note = RE
  misc_feature 24..25: note = Core
  misc_feature 26..50: note = LE
acacttgaaatttatatagttagctggtatattgtaattgactcatttaa

SEQ ID NO: 37477 - DNA, 50 bp, unidentified; identical to SEQ ID NO: 37069
  source 1..50: mol_type = unassigned DNA; note = donor_b526b70
  misc_feature 1..23: note = RE
  misc_feature 24..25: note = Core
  misc_feature 26..50: note = LE

SEQ ID NO: 37478 - DNA, 50 bp, unidentified
  source 1..50: mol_type = unassigned DNA; note = donor_b52b3a0
  misc_feature 1..23: note = RE
  misc_feature 24..25: note = Core
  misc_feature 26..50: note = LE
gcgttccagggggcgtccacagatgatggggtggacgccccccggcggca

SEQ ID NO: 37479 - DNA, 50 bp, unidentified
  source 1..50: mol_type = unassigned DNA; note = donor_b52d2ef
  misc_feature 1..23: note = RE
  misc_feature 24..25: note = Core
  misc_feature 26..50: note = LE
gacatctcaacgccatgggatgtctaatggggctcagcgggccgtaggag

SEQ ID NO: 37480 - DNA, 50 bp, unidentified
  source 1..50: mol_type = unassigned DNA; note = donor_b534731
  misc_feature 1..23: note = RE
  misc_feature 24..25: note = Core
  misc_feature 26..50: note = LE
tttgttgacttggaacagagtatcttgtatgatgaattttaacaaccgat

SEQ ID NO: 37481 - DNA, 50 bp, unidentified
  source 1..50: mol_type = unassigned DNA; note = donor_b538910
  misc_feature 1..22: note = RE
  misc_feature 23..25: note = Core
  misc_feature 26..50: note = LE
gacttgacttttatttgcagaactcctacaataaagttaaggtttaaggc

SEQ ID NO: 37482 - DNA, 50 bp, unidentified
  source 1..50: mol_type = unassigned DNA; note = donor_b53e6b5
  misc_feature 1..23: note = RE
  misc_feature 24..25: note = Core
  misc_feature 26..50: note = LE
tgattggtcgtgagagatggtatcttgtatctttcaccgatgaatggtta

SEQ ID NO: 37483 - DNA, 50 bp, unidentified
  source 1..50: mol_type = unassigned DNA; note = donor_b54815e
  misc_feature 1..23: note = RE
  misc_feature 24..25: note = Core
  misc_feature 26..50: note = LE
acagtggggggcgagtccatacataattacatggactcgcccaagccgag

SEQ ID NO: 37484 - DNA, 50 bp, unidentified
  source 1..50: mol_type = unassigned DNA; note = donor_b54ee21
  misc_feature 1..23: note = RE
  misc_feature 24..25: note = Core
  misc_feature 26..50: note = LE
gactaatcgaggcccgttacagaagatggggtaacgggccccggtctgcc

SEQ ID NO: 37485 - DNA, 50 bp, unidentified
  source 1..50: mol_type = unassigned DNA; note = donor_b554190
  misc_feature 1..23: note = RE
  misc_feature 24..25: note = Core
  misc_feature 26..50: note = LE
caggtctacttccctcccagttgcttgtgtcctcgaaatctgtcagaatg

SEQ ID NO: 37486 - DNA, 50 bp, unidentified
  source 1..50: mol_type = unassigned DNA; note = donor_b556a80
  misc_feature 1..24: note = RE
  misc_feature 25: note = Core
  misc_feature 26..50: note = LE
acccctcttgacacagaggggagcctacttgttgacttgccgtaggaccg

SEQ ID NO: 37487 - DNA, 50 bp, unidentified
  source 1..50: mol_type = unassigned DNA; note = donor_b55b17b
  misc_feature 1..23: note = RE
  misc_feature 24..25: note = Core
  misc_feature 26..50: note = LE
gcatcgaaggctgggtccatatataatgaaatggacccagccttcttccc

SEQ ID NO: 37488 - DNA, 50 bp, unidentified
  source 1..50: mol_type = unassigned DNA; note = donor_b562b94
  misc_feature 1..23: note = RE
  misc_feature 24..25: note = Core
  misc_feature 26..50: note = LE
acaggtgaattcatgatagttgactcctaccatgaattcgtatagaatga

SEQ ID NO: 37489 - DNA, 50 bp, unidentified
  source 1..50: mol_type = unassigned DNA; note = donor_b571f61
  misc_feature 1..24: note = RE
  misc_feature 25: note = Core
  misc_feature 26..50: note = LE
aaaggaaaaatcacttgacaatataaggagcttcctgtataattcaaata

SEQ ID NO: 37490 - DNA, 50 bp, unidentified
  source 1..50: mol_type = unassigned DNA; note = donor_b57380e
  misc_feature 1..23: note = RE
  misc_feature 24..25: note = Core
  misc_feature 26..50: note = LE
ctgcttgacaacgtcattgagattccttacctttcttgcagggtggtcgt

SEQ ID NO: 37491 - DNA, 50 bp, unidentified
  source 1..50: mol_type = unassigned DNA; note = donor_b5788e1
  misc_feature 1..24: note = RE
  misc_feature 25: note = Core
  misc_feature 26..50: note = LE
ttgcaatcgggcggggtccatatacaatggtatggaccccgcccttggcc

SEQ ID NO: 37492 - DNA, 50 bp, unidentified
  source 1..50: mol_type = unassigned DNA; note = donor_b583aee
  misc_feature 1..22: note = RE
  misc_feature 23..25: note = Core
  misc_feature 26..50: note = LE
tttatttggatttcaactggaaagttcctatgtttgaaacccaaataaaa

SEQ ID NO: 37493 - DNA, 50 bp, unidentified
  source 1..50: mol_type = unassigned DNA; note = donor_b58c661
  misc_feature 1..23: note = RE
  misc_feature 24..25: note = Core
  misc_feature 26..50: note = LE
tgcaaaaaaagggggaccatagattaatgagatggtcaccccaccctgtg

SEQ ID NO: 37494 - DNA, 50 bp, unidentified
  source 1..50: mol_type = unassigned DNA; note = donor_b58d0a5
  misc_feature 1..23: note = RE
  misc_feature 24..25: note = Core
  misc_feature 26..50: note = LE
aactattaatttaaaatagttgacttctaccaaaaatttttgtaaaatta

SEQ ID NO: 37495 - DNA, 50 bp, unidentified
  source 1..50: mol_type = unassigned DNA; note = donor_b598958
  misc_feature 1..23: note = RE
  misc_feature 24..25: note = Core
  misc_feature 26..50: note = LE
ccaggcttgacgagggacataagagactgtatgtcccttcccttgctgag

SEQ ID NO: 37496 - DNA, 50 bp, unidentified; identical to SEQ ID NO: 35963
  source 1..50: mol_type = unassigned DNA; note = donor_b5a1577
  misc_feature 1..24: note = RE
  misc_feature 25: note = Core
  misc_feature 26..50: note = LE

SEQ ID NO: 37497 - DNA, 50 bp, unidentified
  source 1..50: mol_type = unassigned DNA; note = donor_b5a1f57
  misc_feature 1..23: note = RE
  misc_feature 24..25: note = Core
  misc_feature 26..50: note = LE
acatttggatattaacacagaatctcctatgtttgttatgacctaataaa

SEQ ID NO: 37498 - DNA, 50 bp, unidentified
  source 1..50: mol_type = unassigned DNA; note = donor_b5a2607
  misc_feature 1..23: note = RE
  misc_feature 24..25: note = Core
  misc_feature 26..50: note = LE
attttataaatcaaacacggtatcttatatgttgacgtgttctctgaaat

SEQ ID NO: 37499 - DNA, 50 bp, unidentified
  source 1..50: mol_type = unassigned DNA; note = donor_b5ac3fe
  misc_feature 1..24: note = RE
  misc_feature 25: note = Core
  misc_feature 26..50: note = LE
cttgcagacggggcgggccatacgtatgggatggcccgcccctttttcgt

SEQ ID NO: 37500 - DNA, 50 bp, unidentified
  source 1..50: mol_type = unassigned DNA; note = donor_b5ae6cc
  misc_feature 1..22: note = RE
  misc_feature 23..25: note = Core
  misc_feature 26..50: note = LE
atcattgacaaaccttagcgagtttagtacgctataaagtgtagtcggta

SEQ ID NO: 37501 - DNA, 50 bp, unidentified
  source 1..50: mol_type = unassigned DNA; note = donor_b5c3e15
  misc_feature 1..23: note = RE
  misc_feature 24..25: note = Core
  misc_feature 26..50: note = LE
atctacttgacttttaatagttggtataatgtatttaggttgttcgaggg

SEQ ID NO: 37502 - DNA, 50 bp, unidentified
  source 1..50: mol_type = unassigned DNA; note = donor_b5c4b29
  misc_feature 1..23: note = RE
  misc_feature 24..25: note = Core
  misc_feature 26..50: note = LE
tccaagagggagccgtccacatatgttgggttggacggctcccaacggca

SEQ ID NO: 37503 - DNA, 50 bp, unidentified; identical to SEQ ID NO: 32009
  source 1..50: mol_type = unassigned DNA; note = donor_b5cc31b
  misc_feature 1..24: note = RE
  misc_feature 25: note = Core
  misc_feature 26..50: note = LE

SEQ ID NO: 37504 - DNA, 50 bp, unidentified
  source 1..50: mol_type = unassigned DNA; note = donor_b5ce635
  misc_feature 1..23: note = RE
  misc_feature 24..25: note = Core
  misc_feature 26..50: note = LE
cggcttgacttttaagatggtatcttgtatcttattccatgtcatggtta

SEQ ID NO: 37505 - DNA, 50 bp, unidentified
  source 1..50: mol_type = unassigned DNA; note = donor_b5d5232
  misc_feature 1..23: note = RE
  misc_feature 24..25: note = Core
  misc_feature 26..50: note = LE
tacttgactgaatcatagttagtcttgtatgatacagtcatagccctttg

SEQ ID NO: 37506 - DNA, 50 bp, unidentified
  source 1..50: mol_type = unassigned DNA; note = donor_b5dba49
  misc_feature 1..24: note = RE
  misc_feature 25: note = Core
  misc_feature 26..50: note = LE
ttgcatcgaggaggagtccatatacaatggaatggactcctcctcccctc

SEQ ID NO: 37507 - DNA, 50 bp, unidentified
  source 1..50: mol_type = unassigned DNA; note = donor_b5f051a
  misc_feature 1..23: note = RE
  misc_feature 24..25: note = Core
  misc_feature 26..50: note = LE
aaggttgactttcaagacggtatcttgtatcttaatccatgtcatagtta

SEQ ID NO: 37508 - DNA, 50 bp, unidentified
  source 1..50: mol_type = unassigned DNA; note = donor_b5f1653
  misc_feature 1..23: note = RE
  misc_feature 24..25: note = Core
  misc_feature 26..50: note = LE
ggcttgacaagaccctatgggatctgatataacgcgcagagaggtcagaa

SEQ ID NO: 37509 - DNA, 50 bp, unidentified
  source 1..50: mol_type = unassigned DNA; note = donor_b5f9c51
  misc_feature 1..22: note = RE
  misc_feature 23..25: note = Core
  misc_feature 26..50: note = LE
ttgccaaggcgccgtccacgcgtgatgctgtggacggcgcccactctgcg

SEQ ID NO: 37510 - DNA, 50 bp, unidentified; identical to SEQ ID NO: 33423
  source 1..50: mol_type = unassigned DNA; note = donor_b5fb022
  misc_feature 1..23: note = RE
  misc_feature 24..25: note = Core
  misc_feature 26..50: note = LE

SEQ ID NO: 37511 - DNA, 50 bp, unidentified
  source 1..50: mol_type = unassigned DNA; note = donor_b5ff37b
  misc_feature 1..23: note = RE
  misc_feature 24..25: note = Core
  misc_feature 26..50: note = LE
gcaagacaggagccgtccacacatgatggggtggacggctccctccttta

SEQ ID NO: 37512 - DNA, 50 bp, unidentified
  source 1..50: mol_type = unassigned DNA; note = donor_b6037fa
  misc_feature 1..24: note = RE
  misc_feature 25: note = Core
  misc_feature 26..50: note = LE
ccggcttgacagacatagaaggatctgtgagtcttggtagtggctggtct

SEQ ID NO: 37513 - DNA, 50 bp, unidentified
  source 1..50: mol_type = unassigned DNA; note = donor_b606d21
  misc_feature 1..24: note = RE
  misc_feature 25: note = Core
  misc_feature 26..50: note = LE
tttaattggttttgtcatagtaatcctttagatttgcttaataaaaaaat

SEQ ID NO: 37514 - DNA, 50 bp, unidentified
  source 1..50: mol_type = unassigned DNA; note = donor_b6094f1
  misc_feature 1..24: note = RE
  misc_feature 25: note = Core
  misc_feature 26..50: note = LE
tgcaatcaggcggcggaccatacataatgaaatggtccgccgccttcatc

SEQ ID NO: 37515 - DNA, 50 bp, unidentified
  source 1..50: mol_type = unassigned DNA; note = donor_b614316
  misc_feature 1..22: note = RE
  misc_feature 23..25: note = Core
  misc_feature 26..50: note = LE
ttgccagggcgccgtccacacgtgatgctgtggacggcgcccactctgcg

SEQ ID NO: 37516 - DNA, 50 bp, unidentified
  source 1..50: mol_type = unassigned DNA; note = donor_b6143cb
  misc_feature 1..20: note = RE
  misc_feature 21..25: note = Core
  misc_feature 26..50: note = LE
cttgacatcacgattgggaagtcctacctttcaagggtggttgctctggt

SEQ ID NO: 37517 - DNA, 50 bp, unidentified
  source 1..50: mol_type = unassigned DNA; note = donor_b6155cd
  misc_feature 1..23: note = RE
  misc_feature 24..25: note = Core
  misc_feature 26..50: note = LE
gacgcccaacggaccgttacggaagatgccgtaacggtcctccgctggag

SEQ ID NO: 37518 - DNA, 50 bp, unidentified; identical to SEQ ID NO: 30413
  source 1..50: mol_type = unassigned DNA; note = donor_b61587d
  misc_feature 1..21: note = RE
  misc_feature 22..25: note = Core
  misc_feature 26..50: note = LE

SEQ ID NO: 37519 - DNA, 50 bp, unidentified
  source 1..50: mol_type = unassigned DNA; note = donor_b615c59
  misc_feature 1..21: note = RE
  misc_feature 22..25: note = Core
  misc_feature 26..50: note = LE
tgcttgatttttaatagttaatctcgtattattcatttaggaacaaccta

SEQ ID NO: 37520 - DNA, 50 bp, unidentified
  source 1..50: mol_type = unassigned DNA; note = donor_b6163a8
  misc_feature 1..24: note = RE
  misc_feature 25: note = Core
  misc_feature 26..50: note = LE
tgcatctggggaggagtccatatacaatgggatggactcctcctcttctc

SEQ ID NO: 37521 - DNA, 50 bp, unidentified
  source 1..50: mol_type = unassigned DNA; note = donor_b61bd4e
  misc_feature 1..23: note = RE
  misc_feature 24..25: note = Core
  misc_feature 26..50: note = LE
gcaccgcaggggccgtccacacatgatggtgtggacggcccctgctccgg

SEQ ID NO: 37522 - DNA, 50 bp, unidentified
  source 1..50: mol_type = unassigned DNA; note = donor_b61f59b
  misc_feature 1..24: note = RE
  misc_feature 25: note = Core
  misc_feature 26..50: note = LE
gcgcttaatggggaagcccttgtagaatgaaagggcctccccgccccgag

SEQ ID NO: 37523 - DNA, 50 bp, unidentified
  source 1..50: mol_type = unassigned DNA; note = donor_b62ad69
  misc_feature 1..20: note = RE
  misc_feature 21..25: note = Core
  misc_feature 26..50: note = LE
tgtcttgcaaacgggatgggtccatggataatggaatggaccatcccctt

SEQ ID NO: 37524 - DNA, 50 bp, unidentified
  source 1..50: mol_type = unassigned DNA; note = donor_b62c1c1
  misc_feature 1..23: note = RE
  misc_feature 24..25: note = Core
  misc_feature 26..50: note = LE
tgacgtcaaagatccagggatgtctaatgggaggtatcaagcctggccgg

SEQ ID NO: 37525 - DNA, 50 bp, unidentified
  source 1..50: mol_type = unassigned DNA; note = donor_b630de7
  misc_feature 1..24: note = RE
  misc_feature 25: note = Core
  misc_feature 26..50: note = LE
tccacttgctttaatcttagaatacctttagatttgataaatgttaatat

SEQ ID NO: 37526 - DNA, 50 bp, unidentified
  source 1..50: mol_type = unassigned DNA; note = donor_b6372a2
  misc_feature 1..24: note = RE
  misc_feature 25: note = Core
  misc_feature 26..50: note = LE
gacaaaccacataggggcaccccccgttaccttgttggtggtcccgggtg

SEQ ID NO: 37527 - DNA, 50 bp, unidentified
  source 1..50: mol_type = unassigned DNA; note = donor_b63a7be
  misc_feature 1..23: note = RE
  misc_feature 24..25: note = Core
  misc_feature 26..50: note = LE
gaccgcttccagtcgtgggatgtctaatgggactgcaatagcggcccttc

SEQ ID NO: 37528 - DNA, 50 bp, unidentified
  source 1..50: mol_type = unassigned DNA; note = donor_b63caae
  misc_feature 1..23: note = RE
  misc_feature 24..25: note = Core
  misc_feature 26..50: note = LE
gttgacaagagggagtccacataagataattggactccctcactccctaa

SEQ ID NO: 37529 - DNA, 50 bp, unidentified
  source 1..50: mol_type = unassigned DNA; note = donor_b63e24e
  misc_feature 1..24: note = RE
  misc_feature 25: note = Core
  misc_feature 26..50: note = LE
tcctttggattttaactcagttcttcttaagtttgtaatatctatatttc

SEQ ID NO: 37530 - DNA, 50 bp, unidentified
  source 1..50: mol_type = unassigned DNA; note = donor_b6571b6
  misc_feature 1..23: note = RE
  misc_feature 24..25: note = Core
  misc_feature 26..50: note = LE
gcgtaaacgggggcgtccacagatgatggggtggacgccccctcgacggc

SEQ ID NO: 37531 - DNA, 50 bp, unidentified
  source 1..50: mol_type = unassigned DNA; note = donor_b65ecdb
  misc_feature 1..24: note = RE
  misc_feature 25: note = Core
  misc_feature 26..50: note = LE
tggcaaaacaggggcgtccatctataatgggatggacgcccccttcctgc

SEQ ID NO: 37532 - DNA, 50 bp, unidentified
  source 1..50: mol_type = unassigned DNA; note = donor_b66030c
  misc_feature 1..22: note = RE
  misc_feature 23..25: note = Core
  misc_feature 26..50: note = LE
agcttgacaactaagacagttgcttgtatgtttctatgccatggctcatg

SEQ ID NO: 37533 - DNA, 50 bp, unidentified
  source 1..50: mol_type = unassigned DNA; note = donor_b661377
  misc_feature 1..24: note = RE
  misc_feature 25: note = Core
  misc_feature 26..50: note = LE
tgccacgcacggccggaccatacataatgggatggtccggccgtgctcct

SEQ ID NO: 37534 - DNA, 50 bp, unidentified
  source 1..50: mol_type = unassigned DNA; note = donor_b666bc8
  misc_feature 1..22: note = RE
  misc_feature 23..25: note = Core
  misc_feature 26..50: note = LE
ggacttgacaaacattagcaagattagtaatatataagcgagggttttac

SEQ ID NO: 37535 - DNA, 50 bp, unidentified
  source 1..50: mol_type = unassigned DNA; note = donor_b67f817
  misc_feature 1..23: note = RE
  misc_feature 24..25: note = Core
  misc_feature 26..50: note = LE
gacaactgggagtcgtccatacatgatgtgatggacgactcccgcccttc

SEQ ID NO: 37536 - DNA, 50 bp, unidentified
  source 1..50: mol_type = unassigned DNA; note = donor_b6820b5
  misc_feature 1..23: note = RE
  misc_feature 24..25: note = Core
  misc_feature 26..50: note = LE
ttacttgacaattcatagttggtcttgtatgatatagtcgacgactagat

SEQ ID NO: 37537 - DNA, 50 bp, unidentified
  source 1..50: mol_type = unassigned DNA; note = donor_b685a81
  misc_feature 1..24: note = RE
  misc_feature 25: note = Core
  misc_feature 26..50: note = LE
ttagcaaacgggggcgtccatgtacaatgggatggacgcccccacctttg

SEQ ID NO: 37538 - DNA, 50 bp, unidentified
  source 1..50: mol_type = unassigned DNA; note = donor_b6863aa
  misc_feature 1..24: note = RE
  misc_feature 25: note = Core
  misc_feature 26..50: note = LE
tgcaaaaggcgtcgggtccatacatactgagatggacccgacgccccctt

SEQ ID NO: 37539 - DNA, 50 bp, unidentified
  source 1..50: mol_type = unassigned DNA; note = donor_b689bc6
  misc_feature 1..23: note = RE
  misc_feature 24..25: note = Core
  misc_feature 26..50: note = LE
tctattgacatttaatagctggtctcgtataatatagttaaagtttaatt

SEQ ID NO: 37540 - DNA, 50 bp, unidentified
  source 1..50: mol_type = unassigned DNA; note = donor_b68efc9
  misc_feature 1..23: note = RE
  misc_feature 24..25: note = Core
  misc_feature 26..50: note = LE
gcaataggggaggtggccatatacgatgagatggtctcctccccttctat

SEQ ID NO: 37541 - DNA, 50 bp, unidentified
  source 1..50: mol_type = unassigned DNA; note = donor_b6937b9
  misc_feature 1..19: note = RE
  misc_feature 20..25: note = Core
  misc_feature 26..50: note = LE
cttgacatcctcattgagagtccttaagttcgtaggtgcagttacttcgt

SEQ ID NO: 37542 - DNA, 50 bp, unidentified
  source 1..50: mol_type = unassigned DNA; note = donor_b6a621b
  misc_feature 1..24: note = RE
  misc_feature 25: note = Core
  misc_feature 26..50: note = LE
ttgacagtagggggagtccatgtagaatgagatggactccccctatctca

SEQ ID NO: 37543 - DNA, 50 bp, unidentified
  source 1..50: mol_type = unassigned DNA; note = donor_b6a71ae
  misc_feature 1..22: note = RE
  misc_feature 23..25: note = Core
  misc_feature 26..50: note = LE
aatattgacttctattagctggtttcgtattataaggttaaccagttttt

SEQ ID NO: 37544 - DNA, 50 bp, unidentified
  source 1..50: mol_type = unassigned DNA; note = donor_b6a84e5
  misc_feature 1..23: note = RE
  misc_feature 24..25: note = Core
  misc_feature 26..50: note = LE
gcagggatggggtcgtccacatatgttggggtggacgacccccgacggca

SEQ ID NO: 37545 - DNA, 50 bp, unidentified
  source 1..50: mol_type = unassigned DNA; note = donor_b6a963f
  misc_feature 1..24: note = RE
  misc_feature 25: note = Core
  misc_feature 26..50: note = LE
tgcattccggcggcggaccatacatactgagatggtccgccgcttgaact

SEQ ID NO: 37546 - DNA, 50 bp, unidentified
  source 1..50: mol_type = unassigned DNA; note = donor_b6ab4a5
  misc_feature 1..23: note = RE
  misc_feature 24..25: note = Core
  misc_feature 26..50: note = LE
cttgcgcaggaggcgtccatagattatggaatggacgccccttgcaccca

SEQ ID NO: 37547 - DNA, 50 bp, unidentified
  source 1..50: mol_type = unassigned DNA; note = donor_b6c15c2
  misc_feature 1..21: note = RE
  misc_feature 22..25: note = Core
  misc_feature 26..50: note = LE
cacttgactgtttatagtttgtcacgtataatccaattatcttagatggt

SEQ ID NO: 37548 - DNA, 50 bp, unidentified
  source 1..50: mol_type = unassigned DNA; note = donor_b6c88bc
  misc_feature 1..23: note = RE
  misc_feature 24..25: note = Core
  misc_feature 26..50: note = LE
aagcccttgtaaacgaacataagagaccgtatgttcggtctgcgacggta

SEQ ID NO: 37549 - DNA, 50 bp, unidentified; identical to SEQ ID NO: 32058
  source 1..50: mol_type = unassigned DNA; note = donor_b6d064a
  misc_feature 1..24: note = RE
  misc_feature 25: note = Core
  misc_feature 26..50: note = LE

SEQ ID NO: 37550 - DNA, 50 bp, unidentified
  source 1..50: mol_type = unassigned DNA; note = donor_b6d9218
  misc_feature 1..23: note = RE
  misc_feature 24..25: note = Core
  misc_feature 26..50: note = LE
ctatgcaggagccatccacacaggatggagtggatggctcctgctcccgg

SEQ ID NO: 37551 - DNA, 50 bp, unidentified
  source 1..50: mol_type = unassigned DNA; note = donor_b6df760
  misc_feature 1..23: note = RE
  misc_feature 24..25: note = Core
  misc_feature 26..50: note = LE
gctattgacttttgtttgcaggactcctacaataataattacggtttaag

SEQ ID NO: 37552 - DNA, 50 bp, unidentified
  source 1..50: mol_type = unassigned DNA; note = donor_b6e3100
  misc_feature 1..24: note = RE
  misc_feature 25: note = Core
  misc_feature 26..50: note = LE
ctgcttcttgacacagaggggtgcctacttgttctattgcctcatgaccg

SEQ ID NO: 37553 - DNA, 50 bp, unidentified
  source 1..50: mol_type = unassigned DNA; note = donor_b6fd7c8
  misc_feature 1..23: note = RE
  misc_feature 24..25: note = Core
  misc_feature 26..50: note = LE
ttccttgacttttcatagctggtcttgtatgattagttagaagctaaatc

SEQ ID NO: 37554 - DNA, 50 bp, unidentified; identical to SEQ ID NO: 32656
  source 1..50: mol_type = unassigned DNA; note = donor_b6fed16
  misc_feature 1..23: note = RE
  misc_feature 24..25: note = Core
  misc_feature 26..50: note = LE

SEQ ID NO: 37555 - DNA, 50 bp, unidentified
  source 1..50: mol_type = unassigned DNA; note = donor_b7148d4
  misc_feature 1..23: note = RE
  misc_feature 24..25: note = Core
  misc_feature 26..50: note = LE
cctgttagcagggaagacggtatcttgtatctggacatagcgctcctatg

SEQ ID NO: 37556 - DNA, 50 bp, unidentified; identical to SEQ ID NO: 32212
  source 1..50: mol_type = unassigned DNA; note = donor_b71d62b
  misc_feature 1..22: note = RE
  misc_feature 23..25: note = Core
  misc_feature 26..50: note = LE

SEQ ID NO: 37557 - DNA, 50 bp, unidentified
  source 1..50: mol_type = unassigned DNA; note = donor_b721984
  misc_feature 1..23: note = RE
  misc_feature 24..25: note = Core
  misc_feature 26..50: note = LE
ctattgacatttaatagctagtcacgtataatccaattatcctctttttg

SEQ ID NO: 37558 - DNA, 50 bp, unidentified
  source 1..50: mol_type = unassigned DNA; note = donor_b728bc4
  misc_feature 1..21: note = RE
  misc_feature 22..25: note = Core
  misc_feature 26..50: note = LE
ggcttgacaacaccattgagattccgtaagactgtgcgtggcccgggagg

SEQ ID NO: 37559 - DNA, 50 bp, unidentified; identical to SEQ ID NO: 35269
  source 1..50: mol_type = unassigned DNA; note = donor_b72bb39
  misc_feature 1..23: note = RE
  misc_feature 24..25: note = Core
  misc_feature 26..50: note = LE

SEQ ID NO: 37560 - DNA, 50 bp, unidentified
  source 1..50: mol_type = unassigned DNA; note = donor_b733294
  misc_feature 1..23: note = RE
  misc_feature 24..25: note = Core
  misc_feature 26..50: note = LE
cgcggtagggagcaagacggtatcttgtatctcgactaccgacctttttg

SEQ ID NO: 37561 - DNA, 50 bp, unidentified
  source 1..50: mol_type = unassigned DNA; note = donor_b73753b
  misc_feature 1..22: note = RE
  misc_feature 23..25: note = Core
  misc_feature 26..50: note = LE
acacttgacaaacattagcaagattcttaatatataaggcgagggtttta

SEQ ID NO: 37562 - DNA, 50 bp, unidentified
  source 1..50: mol_type = unassigned DNA; note = donor_b73e2b6
  misc_feature 1..24: note = RE
  misc_feature 25: note = Core
  misc_feature 26..50: note = LE
attgttggcagctattggctggtatcgtattatatggtcagccggtcatt

SEQ ID NO: 37563 - DNA, 50 bp, unidentified
  source 1..50: mol_type = unassigned DNA; note = donor_b742056
  misc_feature 1..24: note = RE
  misc_feature 25: note = Core
  misc_feature 26..50: note = LE
tgcaaaactcgggctgaccatagataatgtgatggtcagcctgattcaac

SEQ ID NO: 37564 - DNA, 50 bp, unidentified
  source 1..50: mol_type = unassigned DNA; note = donor_b742889
  misc_feature 1..23: note = RE
  misc_feature 24..25: note = Core
  misc_feature 26..50: note = LE
gcatcgaagggggcatccaaacatgatggggtggatgcccccgcccggcg

SEQ ID NO: 37565 - DNA, 50 bp, unidentified
  source 1..50: mol_type = unassigned DNA; note = donor_b757708
  misc_feature 1..24: note = RE
  misc_feature 25: note = Core
  misc_feature 26..50: note = LE
tgcaatcctgcggcggaccatacataatgagatggtccgccgcagcgtcc

SEQ ID NO: 37566 - DNA, 50 bp, unidentified
  source 1..50: mol_type = unassigned DNA; note = donor_b758d0d
  misc_feature 1..23: note = RE
  misc_feature 24..25: note = Core
  misc_feature 26..50: note = LE
tctgttgacttttcatagttggtcttgtatgatacagtcagtgactgttc

SEQ ID NO: 37567 - DNA, 50 bp, unidentified
  source 1..50: mol_type = unassigned DNA; note = donor_b75d163
  misc_feature 1..23: note = RE
  misc_feature 24..25: note = Core
  misc_feature 26..50: note = LE
tgacttcaaagaacctgggatgtctaatggcatttaccgggcctctttgg

SEQ ID NO: 37568 - DNA, 50 bp, unidentified
  source 1..50: mol_type = unassigned DNA; note = donor_b7605d6
  misc_feature 1..21: note = RE
  misc_feature 22..25: note = Core
  misc_feature 26..50: note = LE
taatttgacaaaacttagataatcacgtataatgttgaacataaagattt

SEQ ID NO: 37569 - DNA, 50 bp, unidentified
  source 1..50: mol_type = unassigned DNA; note = donor_b76223c
  misc_feature 1..23: note = RE
  misc_feature 24..25: note = Core
  misc_feature 26..50: note = LE
atacttgacttttcatagctggtcttgtatgatgtttacagaagcaaaac

SEQ ID NO: 37570 - DNA, 50 bp, unidentified
  source 1..50: mol_type = unassigned DNA; note = donor_b76cce5
  misc_feature 1..24: note = RE
  misc_feature 25: note = Core
  misc_feature 26..50: note = LE
ttggcaaacgggagcgaccatctataatgggatggtcgcccctacccaaa

SEQ ID NO: 37571 - DNA, 50 bp, unidentified
  source 1..50: mol_type = unassigned DNA; note = donor_b76ec54
  misc_feature 1..20: note = RE
  misc_feature 21..25: note = Core
  misc_feature 26..50: note = LE
tattgacttttcttagcaggtttttagtaccataaaagtgtaagtgttaa

SEQ ID NO: 37572 - DNA, 50 bp, unidentified
  source 1..50: mol_type = unassigned DNA; note = donor_b76f27e
  misc_feature 1..23: note = RE
  misc_feature 24..25: note = Core
  misc_feature 26..50: note = LE
gcatccgaggggccgtccacacatgttggggtggacggccccacggcatc

SEQ ID NO: 37573 - DNA, 50 bp, unidentified; identical to SEQ ID NO: 30838
  source 1..50: mol_type = unassigned DNA; note = donor_b76f333
  misc_feature 1..23: note = RE
  misc_feature 24..25: note = Core
  misc_feature 26..50: note = LE

SEQ ID NO: 37574 - DNA, 50 bp, unidentified
  source 1..50: mol_type = unassigned DNA; note = donor_b770457
  misc_feature 1..22: note = RE
  misc_feature 23..25: note = Core
  misc_feature 26..50: note = LE
acctcaacacgccgaatagagaagatgggatattcggcttgtgcccatcg

SEQ ID NO: 37575 - DNA, 50 bp, unidentified
  source 1..50: mol_type = unassigned DNA; note = donor_b7771ec
  misc_feature 1..23: note = RE
  misc_feature 24..25: note = Core
  misc_feature 26..50: note = LE
gcgcttgactgcgaagacggttacttgtatgctcaccccagacccgtgcg

SEQ ID NO: 37576 - DNA, 50 bp, unidentified
  source 1..50: mol_type = unassigned DNA; note = donor_b77d1bf
  misc_feature 1..23: note = RE
  misc_feature 24..25: note = Core
  misc_feature 26..50: note = LE
ataaatgggtctcaagacagttgcttgtatctcaaaagtggattactatg

SEQ ID NO: 37577 - DNA, 50 bp, unidentified
  source 1..50: mol_type = unassigned DNA; note = donor_b77f117
  misc_feature 1..23: note = RE
  misc_feature 24..25: note = Core
  misc_feature 26..50: note = LE
gccaacgaggagccgtccacacatgatgctgtggacggctctccaccaac

SEQ ID NO: 37578 - DNA, 50 bp, unidentified
  source 1..50: mol_type = unassigned DNA; note = donor_b786b30
  misc_feature 1..23: note = RE
  misc_feature 24..25: note = Core
  misc_feature 26..50: note = LE
gcaaaacgggaggagaccatatacgatgagatggtctcctccccccttta

SEQ ID NO: 37579 - DNA, 50 bp, unidentified
  source 1..50: mol_type = unassigned DNA; note = donor_b78aa66
  misc_feature 1..24: note = RE
  misc_feature 25: note = Core
  misc_feature 26..50: note = LE
ggcaaacaagtgggcgtccatgtataatggaatggacgcccactttctgt

SEQ ID NO: 37580 - DNA, 50 bp, unidentified
  source 1..50: mol_type = unassigned DNA; note = donor_b78b044
  misc_feature 1..24: note = RE
  misc_feature 25: note = Core
  misc_feature 26..50: note = LE
aggcccttgacaacaaagaggcttctgattgagacttggtgcaggcgttg

SEQ ID NO: 37581 - DNA, 50 bp, unidentified
  source 1..50: mol_type = unassigned DNA; note = donor_b78c093
  misc_feature 1..24: note = RE
  misc_feature 25: note = Core
  misc_feature 26..50: note = LE
ttgcttgctttttaattcagttcttcttaagtttgattcttattaaattt

SEQ ID NO: 37582 - DNA, 50 bp, unidentified
  source 1..50: mol_type = unassigned DNA; note = donor_b78f45e
  misc_feature 1..23: note = RE
  misc_feature 24..25: note = Core
  misc_feature 26..50: note = LE
atcattgacttttaatagttagtcacgtataatccaattaacctctttaa

SEQ ID NO: 37583 - DNA, 50 bp, unidentified; identical to SEQ ID NO: 34314
  source 1..50: mol_type = unassigned DNA; note = donor_b791d6e
  misc_feature 1..23: note = RE
  misc_feature 24..25: note = Core
  misc_feature 26..50: note = LE

SEQ ID NO: 37584 - DNA, 50 bp, unidentified
  source 1..50: mol_type = unassigned DNA; note = donor_b7994c6
  misc_feature 1..22: note = RE
  misc_feature 23..25: note = Core
  misc_feature 26..50: note = LE
gcaaatgggaggtgaccatataagatggaatggtcgcctcccgccacagt

SEQ ID NO: 37585 - DNA, 50 bp, unidentified
  source 1..50: mol_type = unassigned DNA; note = donor_b7a3c3e
  misc_feature 1..23: note = RE
  misc_feature 24..25: note = Core
  misc_feature 26..50: note = LE
tgcctcaggggccgttccacatatgatgtggtggaacggccccgccgctt

SEQ ID NO: 37586 - DNA, 50 bp, unidentified
  source 1..50: mol_type = unassigned DNA; note = donor_b7ace43
  misc_feature 1..23: note = RE
  misc_feature 24..25: note = Core
  misc_feature 26..50: note = LE
acttgaaaattcaagtggaatgttctaccattgtattttacacaggtgac

SEQ ID NO: 37587 - DNA, 50 bp, unidentified; identical to SEQ ID NO: 30488
  source 1..50: mol_type = unassigned DNA; note = donor_b7b2cab
  misc_feature 1..24: note = RE
  misc_feature 25: note = Core
  misc_feature 26..50: note = LE

SEQ ID NO: 37588 - DNA, 50 bp, unidentified
  source 1..50: mol_type = unassigned DNA; note = donor_b7bc76f
  misc_feature 1..24: note = RE
  misc_feature 25: note = Core
  misc_feature 26..50: note = LE
caaagccttgacacaaagaggcttctgattgatgattggtaggtcgttgc

SEQ ID NO: 37589 - DNA, 50 bp, unidentified
  source 1..50: mol_type = unassigned DNA; note = donor_b7d07cb
  misc_feature 1..23: note = RE
  misc_feature 24..25: note = Core
  misc_feature 26..50: note = LE
ctacttgacgaccaagacggtatcttgtatcttgaatcttgggatggtta

SEQ ID NO: 37590 - DNA, 50 bp, unidentified
  source 1..50: mol_type = unassigned DNA; note = donor_b7d7d91
  misc_feature 1..24: note = RE
  misc_feature 25: note = Core
  misc_feature 26..50: note = LE
gcataacgcgggacggaccatatataatggaatggtccgtcccgcttctt

SEQ ID NO: 37591 - DNA, 50 bp, unidentified
  source 1..50: mol_type = unassigned DNA; note = donor_b7ec3dc
  misc_feature 1..24: note = RE
  misc_feature 25: note = Core
  misc_feature 26..50: note = LE
cacccccttgacacaaagaggcttctgattgatgattggggtggtgctgc

SEQ ID NO: 37592 - DNA, 50 bp, unidentified
  source 1..50: mol_type = unassigned DNA; note = donor_b7f792e
  misc_feature 1..24: note = RE
  misc_feature 25: note = Core
  misc_feature 26..50: note = LE
atgtttggatagaatcataggaagctttaactttgcagccagaaataaga

SEQ ID NO: 37593 - DNA, 50 bp, unidentified; identical to SEQ ID NO: 30477
  source 1..50: mol_type = unassigned DNA; note = donor_b7fb078
  misc_feature 1..24: note = RE
  misc_feature 25: note = Core
  misc_feature 26..50: note = LE

SEQ ID NO: 37594 - DNA, 50 bp, unidentified
  source 1..50: mol_type = unassigned DNA; note = donor_b7fc59a
  misc_feature 1..23: note = RE
  misc_feature 24..25: note = Core
  misc_feature 26..50: note = LE
tatcttgacttattaccacatgactcgtattctataaataaatctttatg

SEQ ID NO: 37595 - DNA, 50 bp, unidentified; identical to SEQ ID NO: 35045
  source 1..50: mol_type = unassigned DNA; note = donor_b803d9f
  misc_feature 1..24: note = RE
  misc_feature 25: note = Core
  misc_feature 26..50: note = LE

SEQ ID NO: 37596 - DNA, 50 bp, unidentified
  source 1..50: mol_type = unassigned DNA; note = donor_b80f42f
  misc_feature 1..23: note = RE
  misc_feature 24..25: note = Core
  misc_feature 26..50: note = LE
cagcttgacgaaaaccatagaatcttgtatggtaaaggttaagagaatcg

SEQ ID NO: 37597 - DNA, 50 bp, unidentified
  source 1..50: mol_type = unassigned DNA; note = donor_b816a80
  misc_feature 1..23: note = RE
  misc_feature 24..25: note = Core
  misc_feature 26..50: note = LE
catcaagggagccatccacagaagatggggtggatggctcccgcccacgg

SEQ ID NO: 37598 - DNA, 50 bp, unidentified; identical to SEQ ID NO: 34409
  source 1..50: mol_type = unassigned DNA; note = donor_b8194be
  misc_feature 1..24: note = RE
  misc_feature 25: note = Core
  misc_feature 26..50: note = LE

SEQ ID NO: 37599 - DNA, 50 bp, unidentified
  source 1..50: mol_type = unassigned DNA; note = donor_b822688
  misc_feature 1..24: note = RE
  misc_feature 25: note = Core
  misc_feature 26..50: note = LE
agcttgacgaaaactatagaagcacgttaccttttaggtagcactgtttt

SEQ ID NO: 37600 - DNA, 50 bp, unidentified
  source 1..50: mol_type = unassigned DNA; note = donor_b82a131
  misc_feature 1..22: note = RE
  misc_feature 23..25: note = Core
  misc_feature 26..50: note = LE
cactaccggggccgtccacacatgatggggtggacggccccaaccaacgg

SEQ ID NO: 37601 - DNA, 50 bp, unidentified
  source 1..50: mol_type = unassigned DNA; note = donor_b82dc47
  misc_feature 1..23: note = RE
  misc_feature 24..25: note = Core
  misc_feature 26..50: note = LE
agacttgacttttaatagttagtctcgtataataaagtagtagtttttat

SEQ ID NO: 37602 - DNA, 50 bp, unidentified
  source 1..50: mol_type = unassigned DNA; note = donor_b82ebeb
  misc_feature 1..24: note = RE
  misc_feature 25: note = Core
  misc_feature 26..50: note = LE
cgacttgaccatctatacgagcatcagtgaagatgggccggtccccgatc

SEQ ID NO: 37603 - DNA, 50 bp, unidentified
  source 1..50: mol_type = unassigned DNA; note = donor_b835dbe
  misc_feature 1..24: note = RE
  misc_feature 25: note = Core
  misc_feature 26..50: note = LE
tgcttaacaacaaccatagggacaccgttacattcattggtaggtcctca

SEQ ID NO: 37604 - DNA, 50 bp, unidentified
  source 1..50: mol_type = unassigned DNA; note = donor_b837c8b
  misc_feature 1..24: note = RE
  misc_feature 25: note = Core
  misc_feature 26..50: note = LE
tgttcaaggggcgcgttcatatagattgaaatgaacgcgccccacccgtg

SEQ ID NO: 37605 - DNA, 50 bp, unidentified
  source 1..50: mol_type = unassigned DNA; note = donor_b8381d7
  misc_feature 1..23: note = RE
  misc_feature 24..25: note = Core
  misc_feature 26..50: note = LE
ggacttgacagtttctatggcttctcatatactaattggtgttgagcaga

SEQ ID NO: 37606 - DNA, 50 bp, unidentified
  source 1..50: mol_type = unassigned DNA; note = donor_b83cac2
  misc_feature 1..23: note = RE
  misc_feature 24..25: note = Core
  misc_feature 26..50: note = LE
atacaatcgccatttaatggttgcttgtattagcgtgatcccttatgctg

SEQ ID NO: 37607 - DNA, 50 bp, unidentified
  source 1..50: mol_type = unassigned DNA; note = donor_b8405a4
  misc_feature 1..22: note = RE
  misc_feature 23..25: note = Core
  misc_feature 26..50: note = LE
cacttgacttaatatagttcgtcttgtatatttagattactcaatcattt

SEQ ID NO: 37608 - DNA, 50 bp, unidentified; identical to SEQ ID NO: 33046
  source 1..50: mol_type = unassigned DNA; note = donor_b844b80
  misc_feature 1..23: note = RE
  misc_feature 24..25: note = Core
  misc_feature 26..50: note = LE

SEQ ID NO: 37609 - DNA, 50 bp, unidentified
  source 1..50: mol_type = unassigned DNA; note = donor_b847d36
  misc_feature 1..24: note = RE
  misc_feature 25: note = Core
  misc_feature 26..50: note = LE
tggcgcatcgggggcgttcatataatggaatgaacgcccccacctaccgg

SEQ ID NO: 37610 - DNA, 50 bp, unidentified
  source 1..50: mol_type = unassigned DNA; note = donor_b8569c3
  misc_feature 1..24: note = RE
  misc_feature 25: note = Core
  misc_feature 26..50: note = LE
ggtcaccgcttgacagaggggtgcctacttgtttcactgacggcacggca

SEQ ID NO: 37611 - DNA, 50 bp, unidentified
  source 1..50: mol_type = unassigned DNA; note = donor_b85c35a
  misc_feature 1..21: note = RE
  misc_feature 22..25: note = Core
  misc_feature 26..50: note = LE
ttacttaatcatccacggttgcttgtgtggaggaaatgtggtttacttgc

SEQ ID NO: 37612 - DNA, 50 bp, unidentified
  source 1..50: mol_type = unassigned DNA; note = donor_b85f738
  misc_feature 1..23: note = RE
  misc_feature 24..25: note = Core
  misc_feature 26..50: note = LE
gcatccagaggtgcgtccatatatgatgtggtggacgcacctcacttcta

SEQ ID NO: 37613 - DNA, 50 bp, unidentified; identical to SEQ ID NO: 32131
  source 1..50: mol_type = unassigned DNA; note = donor_b86073e
  misc_feature 1..22: note = RE
  misc_feature 23..25: note = Core
  misc_feature 26..50: note = LE

SEQ ID NO: 37614 - DNA, 50 bp, unidentified
  source 1..50: mol_type = unassigned DNA; note = donor_b8695fb
  misc_feature 1..23: note = RE
  misc_feature 24..25: note = Core
  misc_feature 26..50: note = LE
tgcggtgaactcatgatagttgactcctaccatgagttcgtgtatagggc

SEQ ID NO: 37615 - DNA, 50 bp, unidentified
  source 1..50: mol_type = unassigned DNA; note = donor_b87a8f4
  misc_feature 1..23: note = RE
  misc_feature 24..25: note = Core
  misc_feature 26..50: note = LE
gacaaattttcgccatgggatgtctaatgagaggtatcgaatcggtcagt

SEQ ID NO: 37616 - DNA, 50 bp, unidentified
  source 1..50: mol_type = unassigned DNA; note = donor_b87bda6
  misc_feature 1..22: note = RE
  misc_feature 23..25: note = Core
  misc_feature 26..50: note = LE
gacttgacttttaatagttagtcttgtattatagagtagtagttttcagt

SEQ ID NO: 37617 - DNA, 50 bp, unidentified; identical to SEQ ID NO: 32453
  source 1..50: mol_type = unassigned DNA; note = donor_b883505
  misc_feature 1..24: note = RE
  misc_feature 25: note = Core
  misc_feature 26..50: note = LE

SEQ ID NO: 37618 - DNA, 50 bp, unidentified
  source 1..50: mol_type = unassigned DNA; note = donor_b88f56d
  misc_feature 1..24: note = RE
  misc_feature 25: note = Core
  misc_feature 26..50: note = LE
ttgcaatacgaggcggaccatatataatggaatggtccgcctcactttta

SEQ ID NO: 37619 - DNA, 50 bp, unidentified; identical to SEQ ID NO: 37329
  source 1..50: mol_type = unassigned DNA; note = donor_b89a1b5
  misc_feature 1..24: note = RE
  misc_feature 25: note = Core
  misc_feature 26..50: note = LE

SEQ ID NO: 37620 - DNA, 50 bp, unidentified
  source 1..50: mol_type = unassigned DNA; note = donor_b89d8b9
  misc_feature 1..23: note = RE
  misc_feature 24..25: note = Core
  misc_feature 26..50: note = LE
atacttgacttttcatagctggtcttgtatgatatttatagaagtaaata

SEQ ID NO: 37621 - DNA, 50 bp, unidentified
  source 1..50: mol_type = unassigned DNA; note = donor_b8a1a17
  misc_feature 1..23: note = RE
  misc_feature 24..25: note = Core
  misc_feature 26..50: note = LE
gcatcctgaggtgcgtccatatatgatgtgatggacgcacctcccttcta

SEQ ID NO: 37622 - DNA, 50 bp, unidentified
  source 1..50: mol_type = unassigned DNA; note = donor_b8a5fb2
  misc_feature 1..24: note = RE
  misc_feature 25: note = Core
  misc_feature 26..50: note = LE
cttgcaaacggggcgagccatacgtatgggatggctcgccccttatccag

SEQ ID NO: 37623 - DNA, 50 bp, unidentified
  source 1..50: mol_type = unassigned DNA; note = donor_b8a8818
  misc_feature 1..22: note = RE
  misc_feature 23..25: note = Core
  misc_feature 26..50: note = LE
tgcaaaccggatgggtccatatatggataatggaatggacccatccactt

SEQ ID NO: 37624 - DNA, 50 bp, unidentified; identical to SEQ ID NO: 37421
  source 1..50: mol_type = unassigned DNA; note = donor_b8b30dd
  misc_feature 1..22: note = RE
  misc_feature 23..25: note = Core
  misc_feature 26..50: note = LE

SEQ ID NO: 37625 - DNA, 50 bp, unidentified
  source 1..50: mol_type = unassigned DNA; note = donor_b8bb67f
  misc_feature 1..23: note = RE
  misc_feature 24..25: note = Core
  misc_feature 26..50: note = LE
tgccaatcaggggcgtccacatatgatgaggtggacgccccctcgcgccg

SEQ ID NO: 37626 - DNA, 50 bp, unidentified
  source 1..50: mol_type = unassigned DNA; note = donor_b8bd926
  misc_feature 1..22: note = RE
  misc_feature 23..25: note = Core
  misc_feature 26..50: note = LE
catgaaccggggcatccatacatgatggagtggatgccccctcccgccgg

SEQ ID NO: 37627 - DNA, 50 bp, unidentified
  source 1..50: mol_type = unassigned DNA; note = donor_b8c7db2
  misc_feature 1..23: note = RE
  misc_feature 24..25: note = Core
  misc_feature 26..50: note = LE
agataaatgtatctaactgagggagcattcctgtagagagttaattattg

SEQ ID NO: 37628 - DNA, 50 bp, unidentified
  source 1..50: mol_type = unassigned DNA; note = donor_b8c8034
  misc_feature 1..23: note = RE
  misc_feature 24..25: note = Core
  misc_feature 26..50: note = LE
cagcttgacaactccattaggaatccctaccttgttgatcgggatgagcg

SEQ ID NO: 37629 - DNA, 50 bp, unidentified
  source 1..50: mol_type = unassigned DNA; note = donor_b8d7bbf
  misc_feature 1..23: note = RE
  misc_feature 24..25: note = Core
  misc_feature 26..50: note = LE
ttgcaaacggcgtgggtccatatataatggtatggacccactccacttcc

SEQ ID NO: 37630 - DNA, 50 bp, unidentified
  source 1..50: mol_type = unassigned DNA; note = donor_b8da3a4
  misc_feature 1..24: note = RE
  misc_feature 25: note = Core
  misc_feature 26..50: note = LE
aaggttgttttttacctcagttcttcttaagtttgatttatattaaaaca

SEQ ID NO: 37631 - DNA, 50 bp, unidentified
  source 1..50: mol_type = unassigned DNA; note = donor_b8dc7ac
  misc_feature 1..23: note = RE
  misc_feature 24..25: note = Core
  misc_feature 26..50: note = LE
gcgtcacacggggcgtctacacatgatggggtggacgccccccgacggcc

SEQ ID NO: 37632 - DNA, 50 bp, unidentified
  source 1..50: mol_type = unassigned DNA; note = donor_b8df121
  misc_feature 1..20: note = RE
  misc_feature 21..25: note = Core
  misc_feature 26..50: note = LE
agtcggcttttatattatagttcattgtataataaattatcgttataaat

SEQ ID NO: 37633 - DNA, 50 bp, unidentified
  source 1..50: mol_type = unassigned DNA; note = donor_b8e5a4a
  misc_feature 1..23: note = RE
  misc_feature 24..25: note = Core
  misc_feature 26..50: note = LE
cataaggggcggcgagacggtatcttatatctcgattttatccaatctca

SEQ ID NO: 37634 - DNA, 50 bp, unidentified
  source 1..50: mol_type = unassigned DNA; note = donor_b8f7818
  misc_feature 1..23: note = RE
  misc_feature 24..25: note = Core
  misc_feature 26..50: note = LE
cgggacgccatacttaatggttgcttgtattggcgggccgggctatgatg

SEQ ID NO: 37635 - DNA, 50 bp, unidentified
  source 1..50: mol_type = unassigned DNA; note = donor_b90331d
  misc_feature 1..24: note = RE
  misc_feature 25: note = Core
  misc_feature 26..50: note = LE
tcggcttgacagacatagaaggatctgtgagtcttggtagtggctggtct

SEQ ID NO: 37636 - DNA, 50 bp, unidentified
  source 1..50: mol_type = unassigned DNA; note = donor_b903ed2
  misc_feature 1..23: note = RE
  misc_feature 24..25: note = Core
  misc_feature 26..50: note = LE
gcatccaaggggccgtccacacatgttggggtggacggccccacggcatc

SEQ ID NO: 37637 - DNA, 50 bp, unidentified
  source 1..50: mol_type = unassigned DNA; note = donor_b90dd4c
  misc_feature 1..22: note = RE
  misc_feature 23..25: note = Core
  misc_feature 26..50: note = LE
ccaaacgggcgccatccagacatgatgtggtggatggcgccctccgacgg

SEQ ID NO: 37638 - DNA, 50 bp, unidentified; identical to SEQ ID NO: 32750
  source 1..50: mol_type = unassigned DNA; note = donor_b920aa3
  misc_feature 1..23: note = RE
  misc_feature 24..25: note = Core
  misc_feature 26..50: note = LE

SEQ ID NO: 37639 - DNA, 50 bp, unidentified
  source 1..50: mol_type = unassigned DNA; note = donor_b921965
  misc_feature 1..23: note = RE
  misc_feature 24..25: note = Core
  misc_feature 26..50: note = LE
gggcttgacttttaatagttagtctcgtattataaagtagtagttattag

SEQ ID NO: 37640 - DNA, 50 bp, unidentified
  source 1..50: mol_type = unassigned DNA; note = donor_b92ba61
  misc_feature 1..23: note = RE
  misc_feature 24..25: note = Core
  misc_feature 26..50: note = LE
gccaaccgggagccgtccacacatgatgctgtggacggctcctccaccgg

SEQ ID NO: 37641 - DNA, 50 bp, unidentified
  source 1..50: mol_type = unassigned DNA; note = donor_b92bb86
  misc_feature 1..22: note = RE
  misc_feature 23..25: note = Core
  misc_feature 26..50: note = LE
cggggccggggccgtccacagatgatggggtggacggcccctgtgtccgg

SEQ ID NO: 37642 - DNA, 50 bp, unidentified
  source 1..50: mol_type = unassigned DNA; note = donor_b92d489
  misc_feature 1..21: note = RE
  misc_feature 22..25: note = Core
  misc_feature 26..50: note = LE
cctcttgcttttgccatagaaatccattaggtttgttttatattgtaaaa

SEQ ID NO: 37643 - DNA, 50 bp, unidentified
  source 1..50: mol_type = unassigned DNA; note = donor_b930b3c
  misc_feature 1..23: note = RE
  misc_feature 24..25: note = Core
  misc_feature 26..50: note = LE
tttcttgacaattcatagttggtcttgtatgatatagtaaactatttaat

SEQ ID NO: 37644 - DNA, 50 bp, unidentified
  source 1..50: mol_type = unassigned DNA; note = donor_b93129f
  misc_feature 1..23: note = RE
  misc_feature 24..25: note = Core
  misc_feature 26..50: note = LE
tacttgactttatatatagttgtctggtatatataaattagctcattcaa

SEQ ID NO: 37645 - DNA, 50 bp, unidentified; identical to SEQ ID NO: 30604
  source 1..50: mol_type = unassigned DNA; note = donor_b93784e
  misc_feature 1..23: note = RE
  misc_feature 24..25: note = Core
  misc_feature 26..50: note = LE

SEQ ID NO: 37646 - DNA, 50 bp, unidentified
  source 1..50: mol_type = unassigned DNA; note = donor_b93e54f
  misc_feature 1..22: note = RE
  misc_feature 23..25: note = Core
  misc_feature 26..50: note = LE
caaaccgggaggcgtccatataagatggtatggacgcctccctcccgcgt

SEQ ID NO: 37647 - DNA, 50 bp, unidentified
  source 1..50: mol_type = unassigned DNA; note = donor_b94165d
  misc_feature 1..23: note = RE
  misc_feature 24..25: note = Core
  misc_feature 26..50: note = LE
aacacccttgatcaaaacggatacttgtcttatgattttggagcttcttc

SEQ ID NO: 37648 - DNA, 50 bp, unidentified
  source 1..50: mol_type = unassigned DNA; note = donor_b942663
  misc_feature 1..23: note = RE
  misc_feature 24..25: note = Core
  misc_feature 26..50: note = LE
aggcttgcttttcaacagagaatcttgtatgttgcgttcagaggcgtgag

SEQ ID NO: 37649 - DNA, 50 bp, unidentified
  source 1..50: mol_type = unassigned DNA; note = donor_b9469f2
  misc_feature 1..23: note = RE
  misc_feature 24..25: note = Core
  misc_feature 26..50: note = LE
atacttgacttttcatagctggtcttgtatgataattacagaagcaaatt

SEQ ID NO: 37650 - DNA, 50 bp, unidentified
  source 1..50: mol_type = unassigned DNA; note = donor_b952d48
  misc_feature 1..21: note = RE
  misc_feature 22..25: note = Core
  misc_feature 26..50: note = LE
cctgaggttgactcaggaagtgtcactagggcaccatcctttctgcggat

SEQ ID NO: 37651 - DNA, 50 bp, unidentified
  source 1..50: mol_type = unassigned DNA; note = donor_b952ea7
  misc_feature 1..23: note = RE
  misc_feature 24..25: note = Core
  misc_feature 26..50: note = LE
acttgaaaattctagcgggatgttctaccatagaatttgtggatgacacc

SEQ ID NO: 37652 - DNA, 50 bp, unidentified; identical to SEQ ID NO: 35408
  source 1..50: mol_type = unassigned DNA; note = donor_b954775
  misc_feature 1..23: note = RE
  misc_feature 24..25: note = Core
  misc_feature 26..50: note = LE

SEQ ID NO: 37653 - DNA, 50 bp, unidentified
  source 1..50: mol_type = unassigned DNA; note = donor_b971e5e
  misc_feature 1..23: note = RE
  misc_feature 24..25: note = Core
  misc_feature 26..50: note = LE
gaccccgaacggccgattagagaagatggggtaatcggccggcgagttgt

SEQ ID NO: 37654 - DNA, 50 bp, unidentified
  source 1..50: mol_type = unassigned DNA; note = donor_b97a558
  misc_feature 1..24: note = RE
  misc_feature 25: note = Core
  misc_feature 26..50: note = LE
ttgcaataaggcggggtccatatacaatggtatggaccccgccgccttcg

SEQ ID NO: 37655 - DNA, 50 bp, unidentified
  source 1..50: mol_type = unassigned DNA; note = donor_b97b07f
  misc_feature 1..23: note = RE
  misc_feature 24..25: note = Core
  misc_feature 26..50: note = LE
tgacacccaagctcctgggatgtctaatgggtggtgagtcggtcatcggg

SEQ ID NO: 37656 - DNA, 50 bp, unidentified
  source 1..50: mol_type = unassigned DNA; note = donor_b98017d
  misc_feature 1..24: note = RE
  misc_feature 25: note = Core
  misc_feature 26..50: note = LE
ttgcaaaagggaggcgtccatatagaatgaaatggacgcctcccacccgt

SEQ ID NO: 37657 - DNA, 50 bp, unidentified
  source 1..50: mol_type = unassigned DNA; note = donor_b98026d
  misc_feature 1..23: note = RE
  misc_feature 24..25: note = Core
  misc_feature 26..50: note = LE
gctatgcaggagccatccacacatgatggtgtggatggctcctgctccaa

SEQ ID NO: 37658 - DNA, 50 bp, unidentified
  source 1..50: mol_type = unassigned DNA; note = donor_b980c79
  misc_feature 1..24: note = RE
  misc_feature 25: note = Core
  misc_feature 26..50: note = LE
ctatctgctacttctttgtttcaaatttataatccgcctttctgcgaaag

SEQ ID NO: 37659 - DNA, 50 bp, unidentified
  source 1..50: mol_type = unassigned DNA; note = donor_b984ca0
  misc_feature 1..24: note = RE
  misc_feature 25: note = Core
  misc_feature 26..50: note = LE
ccttgctacgcgggccgttccacatgatgaggtggaacggcccgcaccca

SEQ ID NO: 37660 - DNA, 50 bp, unidentified
  source 1..50: mol_type = unassigned DNA; note = donor_b99d96a
  misc_feature 1..23: note = RE
  misc_feature 24..25: note = Core
  misc_feature 26..50: note = LE
ccccttgacttaataccattggactcgtataataagatttgcagatgatt

SEQ ID NO: 37661 - DNA, 50 bp, unidentified
  source 1..50: mol_type = unassigned DNA; note = donor_b99f13f
  misc_feature 1..24: note = RE
  misc_feature 25: note = Core
  misc_feature 26..50: note = LE
atgacttgacggatatagaagcatctgtaagtgtttgtagtggctggccc

SEQ ID NO: 37662 - DNA, 50 bp, unidentified
  source 1..50: mol_type = unassigned DNA; note = donor_b9a9f52
  misc_feature 1..21: note = RE
  misc_feature 22..25: note = Core
  misc_feature 26..50: note = LE
cttgacaaccacatagggacaccccgttacctttttcctggctcccgacc

SEQ ID NO: 37663 - DNA, 50 bp, unidentified
  source 1..50: mol_type = unassigned DNA; note = donor_b9ad2aa
  misc_feature 1..23: note = RE
  misc_feature 24..25: note = Core
  misc_feature 26..50: note = LE
cgacgccttgacacagagaggtgccaacttgttgaattggtggcggagat

SEQ ID NO: 37664 - DNA, 50 bp, unidentified
  source 1..50: mol_type = unassigned DNA; note = donor_b9b1095
  misc_feature 1..23: note = RE
  misc_feature 24..25: note = Core
  misc_feature 26..50: note = LE
aggcttgacttttaatagttagtctcgtattatatagtagtagtgtttat

SEQ ID NO: 37665 - DNA, 50 bp, unidentified
  source 1..50: mol_type = unassigned DNA; note = donor_b9b11a3
  misc_feature 1..23: note = RE
  misc_feature 24..25: note = Core
  misc_feature 26..50: note = LE
acgcttgatattgaacagggtatcttgtatgttgccccggaagatattga

SEQ ID NO: 37666 - DNA, 50 bp, unidentified
  source 1..50: mol_type = unassigned DNA; note = donor_b9b22dc
  misc_feature 1..24: note = RE
  misc_feature 25: note = Core
  misc_feature 26..50: note = LE
ttgacttggtgggaagtccctgtagaatgcgaagggacttcccgcaatcc

SEQ ID NO: 37667 - DNA, 50 bp, unidentified
  source 1..50: mol_type = unassigned DNA; note = donor_b9b418a
  misc_feature 1..23: note = RE
  misc_feature 24..25: note = Core
  misc_feature 26..50: note = LE
tccccaggattgacatagaggcgctgacttgtttggatgcatccacgccg

SEQ ID NO: 37668 - DNA, 50 bp, unidentified
  source 1..50: mol_type = unassigned DNA; note = donor_b9c3bc2
  misc_feature 1..24: note = RE
  misc_feature 25: note = Core
  misc_feature 26..50: note = LE
ttgcaatatggggcggaccatatataatggaatggtccgccccacttcct

SEQ ID NO: 37669 - DNA, 50 bp, unidentified
  source 1..50: mol_type = unassigned DNA; note = donor_b9cf331
  misc_feature 1..23: note = RE
  misc_feature 24..25: note = Core
  misc_feature 26..50: note = LE
caggttgacgaccaacagagtatcttgtatgttcaacccggctggtttgc

SEQ ID NO: 37670 - DNA, 50 bp, unidentified
  source 1..50: mol_type = unassigned DNA; note = donor_b9d8aba
  misc_feature 1..23: note = RE
  misc_feature 24..25: note = Core
  misc_feature 26..50: note = LE
gccgcttgacaaatagagaagcaccgacttatatgagagtagcgaggtgc

SEQ ID NO: 37671 - DNA, 50 bp, unidentified
  source 1..50: mol_type = unassigned DNA; note = donor_b9d9ae6
  misc_feature 1..23: note = RE
  misc_feature 24..25: note = Core
  misc_feature 26..50: note = LE
acacttgactagcaagacggttgcttgtatctttacggttgtggatcgga

SEQ ID NO: 37672 - DNA, 50 bp, unidentified
  source 1..50: mol_type = unassigned DNA; note = donor_b9e02d0
  misc_feature 1..23: note = RE
  misc_feature 24..25: note = Core
  misc_feature 26..50: note = LE
gcaaaatgggaggagaccatatacgatgtaatggtctcctcccccttaac

SEQ ID NO: 37673 - DNA, 50 bp, unidentified
  source 1..50: mol_type = unassigned DNA; note = donor_b9e221f
  misc_feature 1..22: note = RE
  misc_feature 23..25: note = Core
  misc_feature 26..50: note = LE
cctcttgactttatttagcaggtttggtacaataattacatagcttgcag

SEQ ID NO: 37674 - DNA, 50 bp, unidentified
  source 1..50: mol_type = unassigned DNA; note = donor_b9edd7d
  misc_feature 1..24: note = RE
  misc_feature 25: note = Core
  misc_feature 26..50: note = LE
gcaaaaaggagggtgaccatagattaatgagatggtcaccctccacccta

SEQ ID NO: 37675 - DNA, 50 bp, unidentified
  source 1..50: mol_type = unassigned DNA; note = donor_b9f0648
  misc_feature 1..23: note = RE
  misc_feature 24..25: note = Core
  misc_feature 26..50: note = LE
agtgcttgacaaagtcatagtgttccattagactaataactatgaatatt

SEQ ID NO: 37676 - DNA, 50 bp, unidentified
  source 1..50: mol_type = unassigned DNA; note = donor_b9f0dbf
  misc_feature 1..23: note = RE
  misc_feature 24..25: note = Core
  misc_feature 26..50: note = LE
catcttgacttattaccacatgactcgtattatataaatcagtccttacg

SEQ ID NO: 37677 - DNA, 50 bp, unidentified; identical to SEQ ID NO: 31238
  source 1..50: mol_type = unassigned DNA; note = donor_b9f1b03
  misc_feature 1..24: note = RE
  misc_feature 25: note = Core
  misc_feature 26..50: note = LE

SEQ ID NO: 37678 - DNA, 50 bp, unidentified; identical to SEQ ID NO: 32579
  source 1..50: mol_type = unassigned DNA; note = donor_b9f7592
  misc_feature 1..24: note = RE
  misc_feature 25: note = Core
  misc_feature 26..50: note = LE

SEQ ID NO: 37679 - DNA, 50 bp, unidentified
  source 1..50: mol_type = unassigned DNA; note = donor_b9f7e5e
  misc_feature 1..21: note = RE
  misc_feature 22..25: note = Core
  misc_feature 26..50: note = LE
cctgaggttgacacagggagtgtcactagggcaccatccttcctacggag

SEQ ID NO: 37680 - DNA, 50 bp, unidentified
  source 1..50: mol_type = unassigned DNA; note = donor_b9f9220
  misc_feature 1..24: note = RE
  misc_feature 25: note = Core
  misc_feature 26..50: note = LE
ttgcaaaaggggatggttcatatataatgtaatgaaccatccccacctac

SEQ ID NO: 37681 - DNA, 50 bp, unidentified; identical to SEQ ID NO: 36807
  source 1..50: mol_type = unassigned DNA; note = donor_b9fca4f
  misc_feature 1..24: note = RE
  misc_feature 25: note = Core
  misc_feature 26..50: note = LE

SEQ ID NO: 37682 - DNA, 50 bp, unidentified
  source 1..50: mol_type = unassigned DNA; note = donor_ba09502
  misc_feature 1..23: note = RE
  misc_feature 24..25: note = Core
  misc_feature 26..50: note = LE
acgcttgacttttcttagcaggtctattacaatataaattggttggaacc

SEQ ID NO: 37683 - DNA, 50 bp, unidentified
  source 1..50: mol_type = unassigned DNA; note = donor_ba098b0
  misc_feature 1..23: note = RE
  misc_feature 24..25: note = Core
  misc_feature 26..50: note = LE
ggggcttgactttaatagttagtcttgtattatagagtagtagtttttag

SEQ ID NO: 37684 - DNA, 50 bp, unidentified
  source 1..50: mol_type = unassigned DNA; note = donor_ba12776
  misc_feature 1..24: note = RE
  misc_feature 25: note = Core
  misc_feature 26..50: note = LE
attgttgacagctattagctggtatcgtattatatggttagtcagtcatt

SEQ ID NO: 37685 - DNA, 50 bp, unidentified
  source 1..50: mol_type = unassigned DNA; note = donor_ba1a9e5
  misc_feature 1..21: note = RE
  misc_feature 22..25: note = Core
  misc_feature 26..50: note = LE
cttcttgacataatccaagacagtcctagtatctcgggtacgagcggcat

SEQ ID NO: 37686 - DNA, 50 bp, unidentified; identical to SEQ ID NO: 30431
  source 1..50: mol_type = unassigned DNA; note = donor_ba2268e
  misc_feature 1..24: note = RE
  misc_feature 25: note = Core
  misc_feature 26..50: note = LE

SEQ ID NO: 37687 - DNA, 50 bp, unidentified
  source 1..50: mol_type = unassigned DNA; note = donor_ba24367
  misc_feature 1..24: note = RE
  misc_feature 25: note = Core
  misc_feature 26..50: note = LE
tgcaatctggcggcggaccatacatattggaatggtccgccgcttgtacc

SEQ ID NO: 37688 - DNA, 50 bp, unidentified
  source 1..50: mol_type = unassigned DNA; note = donor_ba2928e
  misc_feature 1..22: note = RE
  misc_feature 23..25: note = Core
  misc_feature 26..50: note = LE
agtattgatttttcttagcaggtttggtactataaaagtgtagttgttaa

SEQ ID NO: 37689 - DNA, 50 bp, unidentified
  source 1..50: mol_type = unassigned DNA; note = donor_ba316aa
  misc_feature 1..22: note = RE
  misc_feature 23..25: note = Core
  misc_feature 26..50: note = LE
ctcaacggggaccgtccacacatgatggggtggacggcccccgacccctg

SEQ ID NO: 37690 - DNA, 50 bp, unidentified
  source 1..50: mol_type = unassigned DNA; note = donor_ba35933
  misc_feature 1..23: note = RE
  misc_feature 24..25: note = Core
  misc_feature 26..50: note = LE
tcgcttgacagccaacacggttacttgtatgttcagcccagaccggcgcg

SEQ ID NO: 37691 - DNA, 50 bp, unidentified; identical to SEQ ID NO: 35561
  source 1..50: mol_type = unassigned DNA; note = donor_ba3d94f
  misc_feature 1..22: note = RE
  misc_feature 23..25: note = Core
  misc_feature 26..50: note = LE

SEQ ID NO: 37692 - DNA, 50 bp, unidentified
  source 1..50: mol_type = unassigned DNA; note = donor_ba49799
  misc_feature 1..24: note = RE
  misc_feature 25: note = Core
  misc_feature 26..50: note = LE
gcaaaattcgggctgaccatagattaatgaaatggccagcccgatcccag

SEQ ID NO: 37693 - DNA, 50 bp, unidentified
  source 1..50: mol_type = unassigned DNA; note = donor_ba5d784
  misc_feature 1..24: note = RE
  misc_feature 25: note = Core
  misc_feature 26..50: note = LE
tgggcttgactttttatttgcaggcctgttactataaatttgcccccgcg

SEQ ID NO: 37694 - DNA, 50 bp, unidentified
  source 1..50: mol_type = unassigned DNA; note = donor_ba5f4f4
  misc_feature 1..24: note = RE
  misc_feature 25: note = Core
  misc_feature 26..50: note = LE
tggcaaaccgggagcgtccatgtacaatgggatggacgctcccaccttaa

SEQ ID NO: 37695 - DNA, 50 bp, unidentified; identical to SEQ ID NO: 30383
  source 1..50: mol_type = unassigned DNA; note = donor_ba61dc7
  misc_feature 1..23: note = RE
  misc_feature 24..25: note = Core
  misc_feature 26..50: note = LE

SEQ ID NO: 37696 - DNA, 50 bp, unidentified
  source 1..50: mol_type = unassigned DNA; note = donor_ba61f81
  misc_feature 1..23: note = RE
  misc_feature 24..25: note = Core
  misc_feature 26..50: note = LE
gacctcaacacgccgaatagagaagatggggtattcggcttgagccccat

SEQ ID NO: 37697 - DNA, 50 bp, unidentified; identical to SEQ ID NO: 34607
  source 1..50: mol_type = unassigned DNA; note = donor_ba62864
  misc_feature 1..24: note = RE
  misc_feature 25: note = Core
  misc_feature 26..50: note = LE

SEQ ID NO: 37698 - DNA, 50 bp, unidentified
  source 1..50: mol_type = unassigned DNA; note = donor_ba65ca5
  misc_feature 1..23: note = RE
  misc_feature 24..25: note = Core
  misc_feature 26..50: note = LE
ccttagcggccgactaatggttgcttgtattagcgcgaatggctatcgtg

SEQ ID NO: 37699 - DNA, 50 bp, unidentified
  source 1..50: mol_type = unassigned DNA; note = donor_ba688b7
  misc_feature 1..23: note = RE
  misc_feature 24..25: note = Core
  misc_feature 26..50: note = LE
gccgcctgaacacaagacagttgcttatctctcgccaatttgcgaatgtg

SEQ ID NO: 37700 - DNA, 50 bp, unidentified
  source 1..50: mol_type = unassigned DNA; note = donor_ba7a197
  misc_feature 1..22: note = RE
  misc_feature 23..25: note = Core
  misc_feature 26..50: note = LE
caacccaggggccgtccacacatgatggggtggacggcccctgctcaccg

SEQ ID NO: 37701 - DNA, 50 bp, unidentified
  source 1..50: mol_type = unassigned DNA; note = donor_ba7f880
  misc_feature 1..23: note = RE
  misc_feature 24..25: note = Core
  misc_feature 26..50: note = LE
cttgcgcgggagacgtccatagattatgggatggacgtctcccgcttttc

SEQ ID NO: 37702 - DNA, 50 bp, unidentified
  source 1..50: mol_type = unassigned DNA; note = donor_ba886f1
  misc_feature 1..23: note = RE
  misc_feature 24..25: note = Core
  misc_feature 26..50: note = LE
acacttgaccgcgaacagggtatcttgtatgttcgatctggagatttagg

SEQ ID NO: 37703 - DNA, 50 bp, unidentified
  source 1..50: mol_type = unassigned DNA; note = donor_ba8fbec
  misc_feature 1..23: note = RE
  misc_feature 24..25: note = Core
  misc_feature 26..50: note = LE
ctacttgactttatttagattgtcacgtataatgaacttagtaaattgat

SEQ ID NO: 37704 - DNA, 50 bp, unidentified
  source 1..50: mol_type = unassigned DNA; note = donor_ba99c5e
  misc_feature 1..23: note = RE
  misc_feature 24..25: note = Core
  misc_feature 26..50: note = LE
gacctttcgaggcccgttacagaagatggggtaacgggcgcggaggcctt

SEQ ID NO: 37705 - DNA, 50 bp, unidentified
  source 1..50: mol_type = unassigned DNA; note = donor_ba9ae09
  misc_feature 1..22: note = RE
  misc_feature 23..25: note = Core
  misc_feature 26..50: note = LE
gcaacgcaggggccgtccatacatgatgtggtggacggcccctgttgcgg

SEQ ID NO: 37706 - DNA, 50 bp, unidentified
  source 1..50: mol_type = unassigned DNA; note = donor_baa782f
  misc_feature 1..22: note = RE
  misc_feature 23..25: note = Core
  misc_feature 26..50: note = LE
ccgcttgacaacaccattgggaatccataccgttcgtcgtgggccgttcc

SEQ ID NO: 37707 - DNA, 50 bp, unidentified
  source 1..50: mol_type = unassigned DNA; note = donor_bab1acd
  misc_feature 1..24: note = RE
  misc_feature 25: note = Core
  misc_feature 26..50: note = LE
ttgacaaccgggagagtccatgtagaatgacatggactccccctcatcag

SEQ ID NO: 37708 - DNA, 50 bp, unidentified
  source 1..50: mol_type = unassigned DNA; note = donor_bab3007
  misc_feature 1..23: note = RE
  misc_feature 24..25: note = Core
  misc_feature 26..50: note = LE
gacacccctgatcaacatggttgcttgtctgttgaagaggcgttaggctg

SEQ ID NO: 37709 - DNA, 50 bp, unidentified
  source 1..50: mol_type = unassigned DNA; note = donor_bab31f5
  misc_feature 1..20: note = RE
  misc_feature 21..25: note = Core
  misc_feature 26..50: note = LE
tcttgatttttcttagcaggtttttagtaccataaaagtgtaagtgttaa

SEQ ID NO: 37710 - DNA, 50 bp, unidentified; identical to SEQ ID NO: 35789
  source 1..50: mol_type = unassigned DNA; note = donor_babd4e5
  misc_feature 1..23: note = RE
  misc_feature 24..25: note = Core
  misc_feature 26..50: note = LE

SEQ ID NO: 37711 - DNA, 50 bp, unidentified
  source 1..50: mol_type = unassigned DNA; note = donor_bada46d
  misc_feature 1..23: note = RE
  misc_feature 24..25: note = Core
  misc_feature 26..50: note = LE
gctattgactttttatagctggtctcgtataatgtatttacggtttagat

SEQ ID NO: 37712 - DNA, 50 bp, unidentified
  source 1..50: mol_type = unassigned DNA; note = donor_badeba4
  misc_feature 1..23: note = RE
  misc_feature 24..25: note = Core
  misc_feature 26..50: note = LE
gcatcacctggggcatccacacatgatggggtggatgcccctcccgacgg

SEQ ID NO: 37713 - DNA, 50 bp, unidentified
  source 1..50: mol_type = unassigned DNA; note = donor_bae28b3
  misc_feature 1..23: note = RE
  misc_feature 24..25: note = Core
  misc_feature 26..50: note = LE
gcacaaggagccgcgatgagacgacatggggtaatcgcgggagcgagtcg

SEQ ID NO: 37714 - DNA, 50 bp, unidentified; identical to SEQ ID NO: 35877
  source 1..50: mol_type = unassigned DNA; note = donor_baf5ab2
  misc_feature 1..23: note = RE
  misc_feature 24..25: note = Core
  misc_feature 26..50: note = LE

SEQ ID NO: 37715 - DNA, 50 bp, unidentified
  source 1..50: mol_type = unassigned DNA; note = donor_bb02d3c
  misc_feature 1..24: note = RE
  misc_feature 25: note = Core
  misc_feature 26..50: note = LE
gcgcgtcttgacacaaaggggtgcctacttagagacttcactcaggatcg

SEQ ID NO: 37716 - DNA, 50 bp, unidentified
  source 1..50: mol_type = unassigned DNA; note = donor_bb0a9d8
  misc_feature 1..22: note = RE
  misc_feature 23..25: note = Core
  misc_feature 26..50: note = LE
tgcgcttagtctaatggttgcgcttgcataagaaatgttgtaaaggattc

SEQ ID NO: 37717 - DNA, 50 bp, unidentified; identical to SEQ ID NO: 33098
  source 1..50: mol_type = unassigned DNA; note = donor_bb0bdb6
  misc_feature 1..23: note = RE
  misc_feature 24..25: note = Core
  misc_feature 26..50: note = LE

SEQ ID NO: 37718 - DNA, 50 bp, unidentified
  source 1..50: mol_type = unassigned DNA; note = donor_bb0d414
  misc_feature 1..23: note = RE
  misc_feature 24..25: note = Core
  misc_feature 26..50: note = LE
gctttccttgggacgaccatgtaagatggcatggtcgtcccacctacacg

SEQ ID NO: 37719 - DNA, 50 bp, unidentified
  source 1..50: mol_type = unassigned DNA; note = donor_bb10a9f
  misc_feature 1..22: note = RE
  misc_feature 23..25: note = Core
  misc_feature 26..50: note = LE
gccaaccaggggccgtccatacatgatggggtagacggcccccggcggca

SEQ ID NO: 37720 - DNA, 50 bp, unidentified
  source 1..50: mol_type = unassigned DNA; note = donor_bb1ff81
  misc_feature 1..20: note = RE
  misc_feature 21..25: note = Core
  misc_feature 26..50: note = LE
ggcggcttgacacagggctactcactggtgcaccatgcttgtgtcggtag

SEQ ID NO: 37721 - DNA, 50 bp, unidentified; identical to SEQ ID NO: 33497
  source 1..50: mol_type = unassigned DNA; note = donor_bb2fbb7
  misc_feature 1..24: note = RE
  misc_feature 25: note = Core
  misc_feature 26..50: note = LE

SEQ ID NO: 37722 - DNA, 50 bp, unidentified
  source 1..50: mol_type = unassigned DNA; note = donor_bb3767f
  misc_feature 1..23: note = RE
  misc_feature 24..25: note = Core
  misc_feature 26..50: note = LE
gcccttgacaactcttggcaggtttgctacaatgctaacagccgggtgaa

SEQ ID NO: 37723 - DNA, 50 bp, unidentified
  source 1..50: mol_type = unassigned DNA; note = donor_bb3d6c4
  misc_feature 1..23: note = RE
  misc_feature 24..25: note = Core
  misc_feature 26..50: note = LE
gcaagtcagaggccgtccacatatgttggtgtggacggcctccgtacggc

SEQ ID NO: 37724 - DNA, 50 bp, unidentified
  source 1..50: mol_type = unassigned DNA; note = donor_bb3d9f2
  misc_feature 1..21: note = RE
  misc_feature 22..25: note = Core
  misc_feature 26..50: note = LE
gttgacaaaaccatagagacaccccattacagtctgagtcgtccataagg

SEQ ID NO: 37725 - DNA, 50 bp, unidentified
  source 1..50: mol_type = unassigned DNA; note = donor_bb40a03
  misc_feature 1..23: note = RE
  misc_feature 24..25: note = Core
  misc_feature 26..50: note = LE
gacatccaaatgccatgggatgtctaatggggcctaccgggtcggccgtc

SEQ ID NO: 37726 - DNA, 50 bp, unidentified
  source 1..50: mol_type = unassigned DNA; note = donor_bb48fb1
  misc_feature 1..22: note = RE
  misc_feature 23..25: note = Core
  misc_feature 26..50: note = LE
gcccttgacttttgttagcaggtctattacaatataagttggttggaacc

SEQ ID NO: 37727 - DNA, 50 bp, unidentified
  source 1..50: mol_type = unassigned DNA; note = donor_bb4b500
  misc_feature 1..23: note = RE
  misc_feature 24..25: note = Core
  misc_feature 26..50: note = LE
acacttgatttttatatagttagctggtatattataaatgactcatttag

SEQ ID NO: 37728 - DNA, 50 bp, unidentified
  source 1..50: mol_type = unassigned DNA; note = donor_bb4e037
  misc_feature 1..19: note = RE
  misc_feature 20..25: note = Core
  misc_feature 26..50: note = LE
gttgacacgctcattgagattccttagggttgtaggtgtttgggattgga

SEQ ID NO: 37729 - DNA, 50 bp, unidentified
  source 1..50: mol_type = unassigned DNA; note = donor_bb59b40
  misc_feature 1..22: note = RE
  misc_feature 23..25: note = Core
  misc_feature 26..50: note = LE
caccgcgggcgccgtccatacatgatgtggtggacggcgcccgctcccgg

SEQ ID NO: 37730 - DNA, 50 bp, unidentified; identical to SEQ ID NO: 30461
  source 1..50: mol_type = unassigned DNA; note = donor_bb5b6a7
  misc_feature 1..23: note = RE
  misc_feature 24..25: note = Core
  misc_feature 26..50: note = LE

SEQ ID NO: 37731 - DNA, 50 bp, unidentified
  source 1..50: mol_type = unassigned DNA; note = donor_bb61ecc
  misc_feature 1..24: note = RE
  misc_feature 25: note = Core
  misc_feature 26..50: note = LE
tgcacggacggggcggaccatacataatgggatggtccgcaccgtcctcc

SEQ ID NO: 37732 - DNA, 50 bp, unidentified
  source 1..50: mol_type = unassigned DNA; note = donor_bb6866b
  misc_feature 1..23: note = RE
  misc_feature 24..25: note = Core
  misc_feature 26..50: note = LE
gcactacggacggcaaccacacaagatggggtggttgccgtcctccccaa

SEQ ID NO: 37733 - DNA, 50 bp, unidentified
  source 1..50: mol_type = unassigned DNA; note = donor_bb6eaa9
  misc_feature 1..23: note = RE
  misc_feature 24..25: note = Core
  misc_feature 26..50: note = LE
gtaacacccggggcgtccatatatgatgtgatggacgccccttcctaagg

SEQ ID NO: 37734 - DNA, 50 bp, unidentified; identical to SEQ ID NO: 34559
  source 1..50: mol_type = unassigned DNA; note = donor_bb758a3
  misc_feature 1..24: note = RE
  misc_feature 25: note = Core
  misc_feature 26..50: note = LE

SEQ ID NO: 37735 - DNA, 50 bp, unidentified
  source 1..50: mol_type = unassigned DNA; note = donor_bb76162
  misc_feature 1..22: note = RE
  misc_feature 23..25: note = Core
  misc_feature 26..50: note = LE
cgtgcagcagtgaaagacagttgcttgtgtcagcgactttcgataggatc

SEQ ID NO: 37736 - DNA, 50 bp, unidentified
  source 1..50: mol_type = unassigned DNA; note = donor_bb78397
  misc_feature 1..23: note = RE
  misc_feature 24..25: note = Core
  misc_feature 26..50: note = LE
ccgcttgactttcaagacagttgcttgtatctagctctttgacaagtttg

SEQ ID NO: 37737 - DNA, 50 bp, unidentified
  source 1..50: mol_type = unassigned DNA; note = donor_bb7bcc4
  misc_feature 1..22: note = RE
  misc_feature 23..25: note = Core
  misc_feature 26..50: note = LE
gtagttgacaaatcttagaatgtcacgtataatactgattagtaaatgaa

SEQ ID NO: 37738 - DNA, 50 bp, unidentified
  source 1..50: mol_type = unassigned DNA; note = donor_bb87c4c
  misc_feature 1..23: note = RE
  misc_feature 24..25: note = Core
  misc_feature 26..50: note = LE
gtacttgactttatttagattgtcacgtataatgaacttagtaaattgat

SEQ ID NO: 37739 - DNA, 50 bp, unidentified
  source 1..50: mol_type = unassigned DNA; note = donor_bb8bf3c
  misc_feature 1..24: note = RE
  misc_feature 25: note = Core
  misc_feature 26..50: note = LE
tgcaactctgcggcggaccatacataatgtggatggtccgccgcaggaac

SEQ ID NO: 37740 - DNA, 50 bp, unidentified
  source 1..50: mol_type = unassigned DNA; note = donor_bb8e313
  misc_feature 1..23: note = RE
  misc_feature 24..25: note = Core
  misc_feature 26..50: note = LE
acgtcatccagacttaatggttgcttgtaatagcggaatcgaatatcatc

SEQ ID NO: 37741 - DNA, 50 bp, unidentified
  source 1..50: mol_type = unassigned DNA; note = donor_bb917ca
  misc_feature 1..24: note = RE
  misc_feature 25: note = Core
  misc_feature 26..50: note = LE
ttgcaatcggagagagtccatatataatggaatggactctctccactccc

SEQ ID NO: 37742 - DNA, 50 bp, unidentified; identical to SEQ ID NO: 32146
  source 1..50: mol_type = unassigned DNA; note = donor_bb94c95
  misc_feature 1..23: note = RE
  misc_feature 24..25: note = Core
  misc_feature 26..50: note = LE

SEQ ID NO: 37743 - DNA, 50 bp, unidentified
  source 1..50: mol_type = unassigned DNA; note = donor_bb97271
  misc_feature 1..23: note = RE
  misc_feature 24..25: note = Core
  misc_feature 26..50: note = LE
cgtattgccctaaaccatagaatcttgtatggtggtactcgaaggggtgg

SEQ ID NO: 37744 - DNA, 50 bp, unidentified
  source 1..50: mol_type = unassigned DNA; note = donor_bb991d6
  misc_feature 1..23: note = RE
  misc_feature 24..25: note = Core
  misc_feature 26..50: note = LE
gacaagttagccccgtgggatgtctaatgggaatgcaccaggcagttccg

SEQ ID NO: 37745 - DNA, 50 bp, unidentified
  source 1..50: mol_type = unassigned DNA; note = donor_bb9b743
  misc_feature 1..23: note = RE
  misc_feature 24..25: note = Core
  misc_feature 26..50: note = LE
caaaaaacgggagtgaccatagattaatgagatggtcactccctcccttc

SEQ ID NO: 37746 - DNA, 50 bp, unidentified
  source 1..50: mol_type = unassigned DNA; note = donor_bba2685
  misc_feature 1..21: note = RE
  misc_feature 22..25: note = Core
  misc_feature 26..50: note = LE
gcggaggttgacacagggcaactcactggactaccttccttgcgttggca

SEQ ID NO: 37747 - DNA, 50 bp, unidentified
  source 1..50: mol_type = unassigned DNA; note = donor_bba2f2e
  misc_feature 1..23: note = RE
  misc_feature 24..25: note = Core
  misc_feature 26..50: note = LE
ctatgcagcagctatccacacaggatggtgtggatagctcctgctcaaac

SEQ ID NO: 37748 - DNA, 50 bp, unidentified
  source 1..50: mol_type = unassigned DNA; note = donor_bbad913
  misc_feature 1..22: note = RE
  misc_feature 23..25: note = Core
  misc_feature 26..50: note = LE
ctattgacaattaatagttagtcttgtataatatacttagggtttaaagt

SEQ ID NO: 37749 - DNA, 50 bp, unidentified; identical to SEQ ID NO: 35016
  source 1..50: mol_type = unassigned DNA; note = donor_bbaf3f4
  misc_feature 1..23: note = RE
  misc_feature 24..25: note = Core
  misc_feature 26..50: note = LE

SEQ ID NO: 37750 - DNA, 50 bp, unidentified
  source 1..50: mol_type = unassigned DNA; note = donor_bbb5a35
  misc_feature 1..24: note = RE
  misc_feature 25: note = Core
  misc_feature 26..50: note = LE
tgcaaaaacaggggtgaccatagataatgggatggtcacccctccacata

SEQ ID NO: 37751 - DNA, 50 bp, unidentified
  source 1..50: mol_type = unassigned DNA; note = donor_bbc12e4
  misc_feature 1..23: note = RE
  misc_feature 24..25: note = Core
  misc_feature 26..50: note = LE
tatattgacaaactattagctggttcgtattataaggtcagccagaaaat

SEQ ID NO: 37752 - DNA, 50 bp, unidentified
  source 1..50: mol_type = unassigned DNA; note = donor_bbc6921
  misc_feature 1..23: note = RE
  misc_feature 24..25: note = Core
  misc_feature 26..50: note = LE
aaaccgcttgatcaacacggatacttgtcttatgactttccgtgccgaca

SEQ ID NO: 37753 - DNA, 50 bp, unidentified
  source 1..50: mol_type = unassigned DNA; note = donor_bbc8ece
  misc_feature 1..23: note = RE
  misc_feature 24..25: note = Core
  misc_feature 26..50: note = LE
gacggcttatgcccttgggatgtctaatgggactggatcagccgattttg

SEQ ID NO: 37754 - DNA, 50 bp, unidentified
  source 1..50: mol_type = unassigned DNA; note = donor_bbdb3be
  misc_feature 1..23: note = RE
  misc_feature 24..25: note = Core
  misc_feature 26..50: note = LE
acagcttgactaagtcataatattccattagacttagtgtgtaatttatt

SEQ ID NO: 37755 - DNA, 50 bp, unidentified
  source 1..50: mol_type = unassigned DNA; note = donor_bbdbb8b
  misc_feature 1..23: note = RE
  misc_feature 24..25: note = Core
  misc_feature 26..50: note = LE
ctacttgacttcatatagttagtcttgtataatgaactcgtagtcaaact

SEQ ID NO: 37756 - DNA, 50 bp, unidentified
  source 1..50: mol_type = unassigned DNA; note = donor_bbdcabb
  misc_feature 1..21: note = RE
  misc_feature 22..25: note = Core
  misc_feature 26..50: note = LE
cccttgactatttatagtttgtcacgtataatccaattatcttagatggt

SEQ ID NO: 37757 - DNA, 50 bp, unidentified
  source 1..50: mol_type = unassigned DNA; note = donor_bbdddfb
  misc_feature 1..23: note = RE
  misc_feature 24..25: note = Core
  misc_feature 26..50: note = LE
cggcttgacaacgtcattgggaagtcctactttcttcttgggcttgatcg

SEQ ID NO: 37758 - DNA, 50 bp, unidentified
  source 1..50: mol_type = unassigned DNA; note = donor_bc0152f
  misc_feature 1..23: note = RE
  misc_feature 24..25: note = Core
  misc_feature 26..50: note = LE
atcatttggaggtgtcatagaaatcctttagatttgtttttataatatta

SEQ ID NO: 37759 - DNA, 50 bp, unidentified
  source 1..50: mol_type = unassigned DNA; note = donor_bc04d5d
  misc_feature 1..24: note = RE
  misc_feature 25: note = Core
  misc_feature 26..50: note = LE
tgcagtcgagcggcggaccatacataatgagatggtccgccgccgagtgg

SEQ ID NO: 37760 - DNA, 50 bp, unidentified
  source 1..50: mol_type = unassigned DNA; note = donor_bc0b408
  misc_feature 1..23: note = RE
  misc_feature 24..25: note = Core
  misc_feature 26..50: note = LE
atacggttgggtagacatagaatcttgtatgtcctaaggtaggcctgtcg

SEQ ID NO: 37761 - DNA, 50 bp, unidentified
  source 1..50: mol_type = unassigned DNA; note = donor_bc0f4e6
  misc_feature 1..23: note = RE
  misc_feature 24..25: note = Core
  misc_feature 26..50: note = LE
gcgtcacaaggggcgtccacacatgatgaggtggacgccccccaacggcc

SEQ ID NO: 37762 - DNA, 50 bp, unidentified
  source 1..50: mol_type = unassigned DNA; note = donor_bc12890
  misc_feature 1..23: note = RE
  misc_feature 24..25: note = Core
  misc_feature 26..50: note = LE
gacccggaccggccgattagagaagatgggataatcggccggcgaatttg

SEQ ID NO: 37763 - DNA, 50 bp, unidentified
  source 1..50: mol_type = unassigned DNA; note = donor_bc4003c
  misc_feature 1..22: note = RE
  misc_feature 23..25: note = Core
  misc_feature 26..50: note = LE
gacctgaagagccgcttcacagaagatgggatgaagcggctggccgccac

SEQ ID NO: 37764 - DNA, 50 bp, unidentified
  source 1..50: mol_type = unassigned DNA; note = donor_bc406f2
  misc_feature 1..23: note = RE
  misc_feature 24..25: note = Core
  misc_feature 26..50: note = LE
tacattgacttattaccacatgactcgtattatataaattaaatcagtga

SEQ ID NO: 37765 - DNA, 50 bp, unidentified
  source 1..50: mol_type = unassigned DNA; note = donor_bc40741
  misc_feature 1..23: note = RE
  misc_feature 24..25: note = Core
  misc_feature 26..50: note = LE
ccggtctacttccagcacagttgcttgtgtccggaaaatctgtcagaatg

SEQ ID NO: 37766 - DNA, 50 bp, unidentified
  source 1..50: mol_type = unassigned DNA; note = donor_bc4ce60
  misc_feature 1..24: note = RE
  misc_feature 25: note = Core
  misc_feature 26..50: note = LE
tgcgacaaggcggcggaccatacataatgggatggtccgccgcctttgac

SEQ ID NO: 37767 - DNA, 50 bp, unidentified
  source 1..50: mol_type = unassigned DNA; note = donor_bc5f268
  misc_feature 1..23: note = RE
  misc_feature 24..25: note = Core
  misc_feature 26..50: note = LE
gccaactgggagccgtccacacatgatgctgtggacggctcccgccaccg

SEQ ID NO: 37768 - DNA, 50 bp, unidentified
  source 1..50: mol_type = unassigned DNA; note = donor_bc6242e
  misc_feature 1..23: note = RE
  misc_feature 24..25: note = Core
  misc_feature 26..50: note = LE
agggttgacttttaatagttagtctcgtattatattgtcatagcccctct

SEQ ID NO: 37769 - DNA, 50 bp, unidentified; identical to SEQ ID NO: 35243
  source 1..50: mol_type = unassigned DNA; note = donor_bc6998f
  misc_feature 1..21: note = RE
  misc_feature 22..25: note = Core
  misc_feature 26..50: note = LE

SEQ ID NO: 37770 - DNA, 50 bp, unidentified
  source 1..50: mol_type = unassigned DNA; note = donor_bc69bb4
  misc_feature 1..23: note = RE
  misc_feature 24..25: note = Core
  misc_feature 26..50: note = LE
tagcttgactttttatttgcaggctactacaatatatttatggttaatct

SEQ ID NO: 37771 - DNA, 50 bp, unidentified
  source 1..50: mol_type = unassigned DNA; note = donor_bc6a81a
  misc_feature 1..23: note = RE
  misc_feature 24..25: note = Core
  misc_feature 26..50: note = LE
catcgggggcgacttaatggttgcttgtattagcgcgccgggttaggatg

SEQ ID NO: 37772 - DNA, 50 bp, unidentified
  source 1..50: mol_type = unassigned DNA; note = donor_bc70432
  misc_feature 1..23: note = RE
  misc_feature 24..25: note = Core
  misc_feature 26..50: note = LE
ttgcaaaagggaggcgtccatatagaatgaaatggacgcctcccacctca

SEQ ID NO: 37773 - DNA, 50 bp, unidentified; identical to SEQ ID NO: 36311
  source 1..50: mol_type = unassigned DNA; note = donor_bc7cad5
  misc_feature 1..23: note = RE
  misc_feature 24..25: note = Core
  misc_feature 26..50: note = LE

SEQ ID NO: 37774 - DNA, 50 bp, unidentified
  source 1..50: mol_type = unassigned DNA; note = donor_bc96ab8
  misc_feature 1..23: note = RE
  misc_feature 24..25: note = Core
  misc_feature 26..50: note = LE
ttagttgacttttaacagagtatcttgtatgatcaaatctaataaaaaat

SEQ ID NO: 37775 - DNA, 50 bp, unidentified; identical to SEQ ID NO: 36030
  source 1..50: mol_type = unassigned DNA; note = donor_bc97e0d
  misc_feature 1..22: note = RE
  misc_feature 23..25: note = Core
  misc_feature 26..50: note = LE

SEQ ID NO: 37776 - DNA, 50 bp, unidentified
  source 1..50: mol_type = unassigned DNA; note = donor_bc98d96
  misc_feature 1..24: note = RE
  misc_feature 25: note = Core
  misc_feature 26..50: note = LE
tgctatgcaagaggagtccatatacaatggtatggactcctcacctttgg

SEQ ID NO: 37777 - DNA, 50 bp, unidentified
  source 1..50: mol_type = unassigned DNA; note = donor_bc9dda3
  misc_feature 1..23: note = RE
  misc_feature 24..25: note = Core
  misc_feature 26..50: note = LE
tttattgtaagttaagacagaatctcctatgtttgtaaaagtattaaatc

SEQ ID NO: 37778 - DNA, 50 bp, unidentified; identical to SEQ ID NO: 35477
  source 1..50: mol_type = unassigned DNA; note = donor_bca3860
  misc_feature 1..22: note = RE
  misc_feature 23..25: note = Core
  misc_feature 26..50: note = LE

SEQ ID NO: 37779 - DNA, 50 bp, unidentified; identical to SEQ ID NO: 32501
  source 1..50: mol_type = unassigned DNA; note = donor_bcaf4f6
  misc_feature 1..23: note = RE
  misc_feature 24..25: note = Core
  misc_feature 26..50: note = LE

SEQ ID NO: 37780 - DNA, 50 bp, unidentified
  source 1..50: mol_type = unassigned DNA; note = donor_bcb4508
  misc_feature 1..23: note = RE
  misc_feature 24..25: note = Core
  misc_feature 26..50: note = LE
cttcttgacttttaatagctggtctcgtataataatgttatagtttaata

SEQ ID NO: 37781 - DNA, 50 bp, unidentified
  source 1..50: mol_type = unassigned DNA; note = donor_bcbaa11
  misc_feature 1..23: note = RE
  misc_feature 24..25: note = Core
  misc_feature 26..50: note = LE
gacttcgacacaccgaatagagaagatggggtattcggcctggtgcccgg

SEQ ID NO: 37782 - DNA, 50 bp, unidentified
  source 1..50: mol_type = unassigned DNA; note = donor_bcc9cf7
  misc_feature 1..24: note = RE
  misc_feature 25: note = Core
  misc_feature 26..50: note = LE
tgcaaaaacggagcagaccatacataatgggatggtctgctcctccctct

SEQ ID NO: 37783 - DNA, 50 bp, unidentified
  source 1..50: mol_type = unassigned DNA; note = donor_bcce063
  misc_feature 1..23: note = RE
  misc_feature 24..25: note = Core
  misc_feature 26..50: note = LE
gttgacaagggggagtccacataagataattggactccctctacaccttc

SEQ ID NO: 37784 - DNA, 50 bp, unidentified
  source 1..50: mol_type = unassigned DNA; note = donor_bcce634
  misc_feature 1..23: note = RE
  misc_feature 24..25: note = Core
  misc_feature 26..50: note = LE
cttgccaaacgggcgtctacacatgatgatgtagacgcccgcgacgaccg

SEQ ID NO: 37785 - DNA, 50 bp, unidentified
  source 1..50: mol_type = unassigned DNA; note = donor_bcce8e7
  misc_feature 1..23: note = RE
  misc_feature 24..25: note = Core
  misc_feature 26..50: note = LE
tgacacttaagctcctgagatgtctaataagagttaacgggtccgccgta

SEQ ID NO: 37786 - DNA, 50 bp, unidentified
  source 1..50: mol_type = unassigned DNA; note = donor_bcce9f1
  misc_feature 1..24: note = RE
  misc_feature 25: note = Core
  misc_feature 26..50: note = LE
gccgcttgacaaacagaagggcgtcagtaaatagatcgaagccagttccc

SEQ ID NO: 37787 - DNA, 50 bp, unidentified
  source 1..50: mol_type = unassigned DNA; note = donor_bcd39d8
  misc_feature 1..23: note = RE
  misc_feature 24..25: note = Core
  misc_feature 26..50: note = LE
aattatgactctattttcatagtaaacggtcatgcatcgtgatacaccac

SEQ ID NO: 37788 - DNA, 50 bp, unidentified
  source 1..50: mol_type = unassigned DNA; note = donor_bcd802d
  misc_feature 1..23: note = RE
  misc_feature 24..25: note = Core
  misc_feature 26..50: note = LE
atcggaccccgctttaatggttgcttgtattgctgcgccagattagaatg

SEQ ID NO: 37789 - DNA, 50 bp, unidentified
  source 1..50: mol_type = unassigned DNA; note = donor_bcd88eb
  misc_feature 1..22: note = RE
  misc_feature 23..25: note = Core
  misc_feature 26..50: note = LE
cagcacaggggccatccacagatgatgaggtggatggcccctgtgtccga

SEQ ID NO: 37790 - DNA, 50 bp, unidentified
  source 1..50: mol_type = unassigned DNA; note = donor_bcda791
  misc_feature 1..23: note = RE
  misc_feature 24..25: note = Core
  misc_feature 26..50: note = LE
gggcttgactttttatttgcagactactacaatgtatttatggttgatat

SEQ ID NO: 37791 - DNA, 50 bp, unidentified
  source 1..50: mol_type = unassigned DNA; note = donor_bcdc147
  misc_feature 1..23: note = RE
  misc_feature 24..25: note = Core
  misc_feature 26..50: note = LE
atgcttgactttaaagacggtatcttgtatctttcttcccgtggtggtta

SEQ ID NO: 37792 - DNA, 50 bp, unidentified
  source 1..50: mol_type = unassigned DNA; note = donor_bce267e
  misc_feature 1..24: note = RE
  misc_feature 25: note = Core
  misc_feature 26..50: note = LE
tgcaaaccggggagcgtccatatataatgggatggacgctcccctcccgc

SEQ ID NO: 37793 - DNA, 50 bp, unidentified
  source 1..50: mol_type = unassigned DNA; note = donor_bce82af
  misc_feature 1..23: note = RE
  misc_feature 24..25: note = Core
  misc_feature 26..50: note = LE
gccaacggagggccgtccacacatgataacgtggacggccctccacccca

SEQ ID NO: 37794 - DNA, 50 bp, unidentified
  source 1..50: mol_type = unassigned DNA; note = donor_bced576
  misc_feature 1..23: note = RE
  misc_feature 24..25: note = Core
  misc_feature 26..50: note = LE
gactcgggaaggcccgttacagaagatggtgtaacgggcggagcccaacc

SEQ ID NO: 37795 - DNA, 50 bp, unidentified
  source 1..50: mol_type = unassigned DNA; note = donor_bceed1e
  misc_feature 1..22: note = RE
  misc_feature 23..25: note = Core
  misc_feature 26..50: note = LE
cttgactagaaaagccccatacaagatgctatggggcggcgccgaggata

SEQ ID NO: 37796 - DNA, 50 bp, unidentified
  source 1..50: mol_type = unassigned DNA; note = donor_bcf3346
  misc_feature 1..23: note = RE
  misc_feature 24..25: note = Core
  misc_feature 26..50: note = LE
gcaccttcaggggcgtccacagatgatggggtggacgccccccgacggca

SEQ ID NO: 37797 - DNA, 50 bp, unidentified
  source 1..50: mol_type = unassigned DNA; note = donor_bcf36c3
  misc_feature 1..21: note = RE
  misc_feature 22..25: note = Core
  misc_feature 26..50: note = LE
gtcttgacttcgtcattgagactccgtaagttgttgggtggcccgggagg

SEQ ID NO: 37798 - DNA, 50 bp, unidentified
  source 1..50: mol_type = unassigned DNA; note = donor_bd069b3
  misc_feature 1..23: note = RE
  misc_feature 24..25: note = Core
  misc_feature 26..50: note = LE
tctcttgacaccttataggatgtctggtataatgatcacagtatgtgatc

SEQ ID NO: 37799 - DNA, 50 bp, unidentified; identical to SEQ ID NO: 34564
  source 1..50: mol_type = unassigned DNA; note = donor_bd10035
  misc_feature 1..23: note = RE
  misc_feature 24..25: note = Core
  misc_feature 26..50: note = LE

SEQ ID NO: 37800 - DNA, 50 bp, unidentified
  source 1..50: mol_type = unassigned DNA; note = donor_bd138c7
  misc_feature 1..23: note = RE
  misc_feature 24..25: note = Core
  misc_feature 26..50: note = LE
gcaccgcgggcgccgtccatacatgatgtggtggacggcgcccgctctcg

SEQ ID NO: 37801 - DNA, 50 bp, unidentified
  source 1..50: mol_type = unassigned DNA; note = donor_bd1f09b
  misc_feature 1..24: note = RE
  misc_feature 25: note = Core
  misc_feature 26..50: note = LE
tgcagttcggcggcggaccatacataatgagatggtccgccgttaagaaa

SEQ ID NO: 37802 - DNA, 50 bp, unidentified
  source 1..50: mol_type = unassigned DNA; note = donor_bd2170e
  misc_feature 1..23: note = RE
  misc_feature 24..25: note = Core
  misc_feature 26..50: note = LE
tgctcggtttggagagatggtatcttgtatctctccaggaatatctgttt

SEQ ID NO: 37803 - DNA, 50 bp, unidentified
  source 1..50: mol_type = unassigned DNA; note = donor_bd23faa
  misc_feature 1..21: note = RE
  misc_feature 22..25: note = Core
  misc_feature 26..50: note = LE
gcttgactgaagcattaggctgccttaccttgcttctgcgcttcggcgtc

SEQ ID NO: 37804 - DNA, 50 bp, unidentified; identical to SEQ ID NO: 35677
  source 1..50: mol_type = unassigned DNA; note = donor_bd260fc
  misc_feature 1..24: note = RE
  misc_feature 25: note = Core
  misc_feature 26..50: note = LE

SEQ ID NO: 37805 - DNA, 50 bp, unidentified
  source 1..50: mol_type = unassigned DNA; note = donor_bd272ce
  misc_feature 1..23: note = RE
  misc_feature 24..25: note = Core
  misc_feature 26..50: note = LE
tgcaagtgggggccgtccacatatgttggagtggacggcccccaacggca

SEQ ID NO: 37806 - DNA, 50 bp, unidentified
  source 1..50: mol_type = unassigned DNA; note = donor_bd2a219
  misc_feature 1..23: note = RE
  misc_feature 24..25: note = Core
  misc_feature 26..50: note = LE
gacaagttacgaccctggggtgtctaatgggactcgaccagcgttgccga

SEQ ID NO: 37807 - DNA, 50 bp, unidentified
  source 1..50: mol_type = unassigned DNA; note = donor_bd2c002
  misc_feature 1..23: note = RE
  misc_feature 24..25: note = Core
  misc_feature 26..50: note = LE
atgcttgcctttctacagagaatcttgtatgttgcgatcagaggcgtgag

SEQ ID NO: 37808 - DNA, 50 bp, unidentified
  source 1..50: mol_type = unassigned DNA; note = donor_bd3365c
  misc_feature 1..24: note = RE
  misc_feature 25: note = Core
  misc_feature 26..50: note = LE
tgcgaaggtggggaagcccttgtagaatgaaagggacttccccctcccga

SEQ ID NO: 37809 - DNA, 50 bp, unidentified
  source 1..50: mol_type = unassigned DNA; note = donor_bd3d9fa
  misc_feature 1..23: note = RE
  misc_feature 24..25: note = Core
  misc_feature 26..50: note = LE
atgcttgaccggcaacacggttacttgtatcttatcccatgtggtgatta

SEQ ID NO: 37810 - DNA, 50 bp, unidentified
  source 1..50: mol_type = unassigned DNA; note = donor_bd5201b
  misc_feature 1..24: note = RE
  misc_feature 25: note = Core
  misc_feature 26..50: note = LE
atcttgacaagctattagctggtatcgtattataaagtcaaccagctctt

SEQ ID NO: 37811 - DNA, 50 bp, unidentified
  source 1..50: mol_type = unassigned DNA; note = donor_bd5dcc9
  misc_feature 1..23: note = RE
  misc_feature 24..25: note = Core
  misc_feature 26..50: note = LE
gcaaggaggcggccgtccacatatgttggggtggacggccgccggcggca

SEQ ID NO: 37812 - DNA, 50 bp, unidentified; identical to SEQ ID NO: 37043
  source 1..50: mol_type = unassigned DNA; note = donor_bd619ad
  misc_feature 1..23: note = RE
  misc_feature 24..25: note = Core
  misc_feature 26..50: note = LE

SEQ ID NO: 37813 - DNA, 50 bp, unidentified
  source 1..50: mol_type = unassigned DNA; note = donor_bd66b27
  misc_feature 1..23: note = RE
  misc_feature 24..25: note = Core
  misc_feature 26..50: note = LE
gtgcaaacgggatgcgttcatataaatgtgatgaacgcatcccactcttt

SEQ ID NO: 37814 - DNA, 50 bp, unidentified
  source 1..50: mol_type = unassigned DNA; note = donor_bd6ccbe
  misc_feature 1..24: note = RE
  misc_feature 25: note = Core
  misc_feature 26..50: note = LE
tccggtctgatcaagacagttgctcttgtgtctgggttttgccctagggt

SEQ ID NO: 37815 - DNA, 50 bp, unidentified
  source 1..50: mol_type = unassigned DNA; note = donor_bd74f66
  misc_feature 1..22: note = RE
  misc_feature 23..25: note = Core
  misc_feature 26..50: note = LE
cactacgggcggcaaccacagaagatggggtggttgccgccctccccaag

SEQ ID NO: 37816 - DNA, 50 bp, unidentified
  source 1..50: mol_type = unassigned DNA; note = donor_bd78734
  misc_feature 1..24: note = RE
  misc_feature 25: note = Core
  misc_feature 26..50: note = LE
ttgccatcgggaggcgtccatataaaatggtatggacgcctcccacctga

SEQ ID NO: 37817 - DNA, 50 bp, unidentified
  source 1..50: mol_type = unassigned DNA; note = donor_bd7cf26
  misc_feature 1..22: note = RE
  misc_feature 23..25: note = Core
  misc_feature 26..50: note = LE
ccaagagagcgccgtccacacatgatggtgtggacggcgctcaccgggcg

SEQ ID NO: 37818 - DNA, 50 bp, unidentified
  source 1..50: mol_type = unassigned DNA; note = donor_bd80620
  misc_feature 1..23: note = RE
  misc_feature 24..25: note = Core
  misc_feature 26..50: note = LE
cttgcgcaaggggcggttatacatgatggtgtgcccccccgacggcatcg

SEQ ID NO: 37819 - DNA, 50 bp, unidentified
  source 1..50: mol_type = unassigned DNA; note = donor_bd845e7
  misc_feature 1..22: note = RE
  misc_feature 23..25: note = Core
  misc_feature 26..50: note = LE
cttgacatcgaagtccccatggaagatgctatggggcaggcggcgaaaca

SEQ ID NO: 37820 - DNA, 50 bp, unidentified
  source 1..50: mol_type = unassigned DNA; note = donor_bd88477
  misc_feature 1..23: note = RE
  misc_feature 24..25: note = Core
  misc_feature 26..50: note = LE
aggcttgatatttaatagttagtctcgtattatagtgtcatagccttttc

SEQ ID NO: 37821 - DNA, 50 bp, unidentified
  source 1..50: mol_type = unassigned DNA; note = donor_bd89fe4
  misc_feature 1..22: note = RE
  misc_feature 23..25: note = Core
  misc_feature 26..50: note = LE
caacgcgggagccatccacacaagatggggtggatggctcccgctcacgg

SEQ ID NO: 37822 - DNA, 50 bp, unidentified
  source 1..50: mol_type = unassigned DNA; note = donor_bd98dba
  misc_feature 1..23: note = RE
  misc_feature 24..25: note = Core
  misc_feature 26..50: note = LE
gcatccaaagggccgtccacacacgttggggtggacggccccgcggcatc

SEQ ID NO: 37823 - DNA, 50 bp, unidentified
  source 1..50: mol_type = unassigned DNA; note = donor_bda25c6
  misc_feature 1..23: note = RE
  misc_feature 24..25: note = Core
  misc_feature 26..50: note = LE
tgcttgaggttgacagaggatgtctgatggcagtaccttctttcgtcatc

SEQ ID NO: 37824 - DNA, 50 bp, unidentified
  source 1..50: mol_type = unassigned DNA; note = donor_bdac358
  misc_feature 1..22: note = RE
  misc_feature 23..25: note = Core
  misc_feature 26..50: note = LE
gatattgacaaactattagctggttcgtattataaggtcagccagatatt

SEQ ID NO: 37825 - DNA, 50 bp, unidentified; identical to SEQ ID NO: 31537
  source 1..50: mol_type = unassigned DNA; note = donor_bdb3887
  misc_feature 1..23: note = RE
  misc_feature 24..25: note = Core
  misc_feature 26..50: note = LE

SEQ ID NO: 37826 - DNA, 50 bp, unidentified
  source 1..50: mol_type = unassigned DNA; note = donor_bdb3f06
  misc_feature 1..24: note = RE
  misc_feature 25: note = Core
  misc_feature 26..50: note = LE
cggcttgacaaccacatagagacacgttaccttgttggtgggctcgtcag

SEQ ID NO: 37827 - DNA, 50 bp, unidentified
  source 1..50: mol_type = unassigned DNA; note = donor_bdbca4f
  misc_feature 1..21: note = RE
  misc_feature 22..25: note = Core
  misc_feature 26..50: note = LE
caacgcaggggctgtccacacatgatggggtggacggcccctgctcaccg

SEQ ID NO: 37828 - DNA, 50 bp, unidentified
  source 1..50: mol_type = unassigned DNA; note = donor_bdbdd45
  misc_feature 1..22: note = RE
  misc_feature 23..25: note = Core
  misc_feature 26..50: note = LE
ccaaacgggcgccatccagacatgatgtgatggatggcgccctccgacgg

SEQ ID NO: 37829 - DNA, 50 bp, unidentified
  source 1..50: mol_type = unassigned DNA; note = donor_bdc60dc
  misc_feature 1..21: note = RE
  misc_feature 22..25: note = Core
  misc_feature 26..50: note = LE
ccgctgcttgacacagggctactcactggtgcaccatttgtgtgtcggtg

SEQ ID NO: 37830 - DNA, 50 bp, unidentified
  source 1..50: mol_type = unassigned DNA; note = donor_bdc748d
  misc_feature 1..24: note = RE
  misc_feature 25: note = Core
  misc_feature 26..50: note = LE
cttgcagacggggcgggccatacgtatggaatggcccgccccttttccag

SEQ ID NO: 37831 - DNA, 50 bp, unidentified
  source 1..50: mol_type = unassigned DNA; note = donor_bdd35df
  misc_feature 1..23: note = RE
  misc_feature 24..25: note = Core
  misc_feature 26..50: note = LE
gcattgcgggcggcaaccacagaagatgggatggttgccgccctccccag

SEQ ID NO: 37832 - DNA, 50 bp, unidentified
  source 1..50: mol_type = unassigned DNA; note = donor_bddc81b
  misc_feature 1..22: note = RE
  misc_feature 23..25: note = Core
  misc_feature 26..50: note = LE
cactacagacggcaaccacagaagatggggtggttgccgtcctccccgaa

SEQ ID NO: 37833 - DNA, 50 bp, unidentified; identical to SEQ ID NO: 30919
  source 1..50: mol_type = unassigned DNA; note = donor_bde322e
  misc_feature 1..23: note = RE
  misc_feature 24..25: note = Core
  misc_feature 26..50: note = LE

SEQ ID NO: 37834 - DNA, 50 bp, unidentified
  source 1..50: mol_type = unassigned DNA; note = donor_bde6c11
  misc_feature 1..23: note = RE
  misc_feature 24..25: note = Core
  misc_feature 26..50: note = LE
taggcttgatttttattatctaattcgtattatgaaaccaggaagaaaag

SEQ ID NO: 37835 - DNA, 50 bp, unidentified
  source 1..50: mol_type = unassigned DNA; note = donor_bde7da5
  misc_feature 1..22: note = RE
  misc_feature 23..25: note = Core
  misc_feature 26..50: note = LE
gacgaatggactgcgattagacaacatggagtaatcgcggcgcgccctag

SEQ ID NO: 37836 - DNA, 50 bp, unidentified
  source 1..50: mol_type = unassigned DNA; note = donor_bde99d9
  misc_feature 1..24: note = RE
  misc_feature 25: note = Core
  misc_feature 26..50: note = LE
tggaagtaacttaaacctagaatacctttggtcttacaaagaatcattta

SEQ ID NO: 37837 - DNA, 50 bp, unidentified
  source 1..50: mol_type = unassigned DNA; note = donor_bdf0232
  misc_feature 1..23: note = RE
  misc_feature 24..25: note = Core
  misc_feature 26..50: note = LE
tctattgacttttcatttgcaggctactacaatgtatttatgggtaaagt

SEQ ID NO: 37838 - DNA, 50 bp, unidentified
  source 1..50: mol_type = unassigned DNA; note = donor_bdf75db
  misc_feature 1..24: note = RE
  misc_feature 25: note = Core
  misc_feature 26..50: note = LE
tcttgacaatggctttctcatattagacgatatgagaaagccattgaagg

SEQ ID NO: 37839 - DNA, 50 bp, unidentified
  source 1..50: mol_type = unassigned DNA; note = donor_be06605
  misc_feature 1..23: note = RE
  misc_feature 24..25: note = Core
  misc_feature 26..50: note = LE
atacttgacttttcatagctggtcttgtatgatgtttatagaaacaaaaa

SEQ ID NO: 37840 - DNA, 50 bp, unidentified; identical to SEQ ID NO: 30383
  source 1..50: mol_type = unassigned DNA; note = donor_be09847
  misc_feature 1..23: note = RE
  misc_feature 24..25: note = Core
  misc_feature 26..50: note = LE

SEQ ID NO: 37841 - DNA, 50 bp, unidentified
  source 1..50: mol_type = unassigned DNA; note = donor_be09c4b
  misc_feature 1..23: note = RE
  misc_feature 24..25: note = Core
  misc_feature 26..50: note = LE
tctcttgacttcatatagttagtcttgtataatgaaatatagggaaattc

SEQ ID NO: 37842 - DNA, 50 bp, unidentified; identical to SEQ ID NO: 31428
  source 1..50: mol_type = unassigned DNA; note = donor_be0b340
  misc_feature 1..22: note = RE
  misc_feature 23..25: note = Core
  misc_feature 26..50: note = LE

SEQ ID NO: 37843 - DNA, 50 bp, unidentified
  source 1..50: mol_type = unassigned DNA; note = donor_be0f88d
  misc_feature 1..22: note = RE
  misc_feature 23..25: note = Core
  misc_feature 26..50: note = LE
ggcttgacaacctcattgagaatccttacctttcttggagggtgttcggg

SEQ ID NO: 37844 - DNA, 50 bp, unidentified
  source 1..50: mol_type = unassigned DNA; note = donor_be129d2
  misc_feature 1..24: note = RE
  misc_feature 25: note = Core
  misc_feature 26..50: note = LE
tgcattcacacggcggaccatacatactaagatggtccgccgcttgatct

SEQ ID NO: 37845 - DNA, 50 bp, unidentified; identical to SEQ ID NO: 36433
  source 1..50: mol_type = unassigned DNA; note = donor_be1d275
  misc_feature 1..22: note = RE
  misc_feature 23..25: note = Core
  misc_feature 26..50: note = LE

SEQ ID NO: 37846 - DNA, 50 bp, unidentified; identical to SEQ ID NO: 37487
  source 1..50: mol_type = unassigned DNA; note = donor_be22b34
  misc_feature 1..23: note = RE
  misc_feature 24..25: note = Core
  misc_feature 26..50: note = LE

SEQ ID NO: 37847 - DNA, 50 bp, unidentified
  source 1..50: mol_type = unassigned DNA; note = donor_be2b14b
  misc_feature 1..23: note = RE
  misc_feature 24..25: note = Core
  misc_feature 26..50: note = LE
gcaaaaatgggggtgaccatagattaatgagatggtcacccccactctgt

SEQ ID NO: 37848 - DNA, 50 bp, unidentified
  source 1..50: mol_type = unassigned DNA; note = donor_be300eb
  misc_feature 1..23: note = RE
  misc_feature 24..25: note = Core
  misc_feature 26..50: note = LE
tgacatctaagctcctgggatgtctaataagagttatcgagtccgccatc

SEQ ID NO: 37849 - DNA, 50 bp, unidentified
  source 1..50: mol_type = unassigned DNA; note = donor_be32285
  misc_feature 1..24: note = RE
  misc_feature 25: note = Core
  misc_feature 26..50: note = LE
tgccacacgggaggcgtccatataatggtatggacgcctcccatccacct

SEQ ID NO: 37850 - DNA, 50 bp, unidentified
  source 1..50: mol_type = unassigned DNA; note = donor_be38277
  misc_feature 1..23: note = RE
  misc_feature 24..25: note = Core
  misc_feature 26..50: note = LE
gcggcagcataaaaacacagttgcctgtgtgtccgaactgtgcgaaagtg

SEQ ID NO: 37851 - DNA, 50 bp, unidentified
  source 1..50: mol_type = unassigned DNA; note = donor_be3fd40
  misc_feature 1..23: note = RE
  misc_feature 24..25: note = Core
  misc_feature 26..50: note = LE
ctttgcagcagctatccacacaggatggtgtggatagctcctgctccaac

SEQ ID NO: 37852 - DNA, 50 bp, unidentified
  source 1..50: mol_type = unassigned DNA; note = donor_be412fe
  misc_feature 1..22: note = RE
  misc_feature 23..25: note = Core
  misc_feature 26..50: note = LE
atgttgactttttatagttggtcttatataatatatttaggttaataaag

SEQ ID NO: 37853 - DNA, 50 bp, unidentified
  source 1..50: mol_type = unassigned DNA; note = donor_be41ecc
  misc_feature 1..23: note = RE
  misc_feature 24..25: note = Core
  misc_feature 26..50: note = LE
cttgacagaagcttcctcatggatgaaactatgtaggaagcctccgtcgg

SEQ ID NO: 37854 - DNA, 50 bp, unidentified
  source 1..50: mol_type = unassigned DNA; note = donor_be429e6
  misc_feature 1..23: note = RE
  misc_feature 24..25: note = Core
  misc_feature 26..50: note = LE
ccgcttgacattccgattgggaagtcctaccttccaagcgtgggtttgag

SEQ ID NO: 37855 - DNA, 50 bp, unidentified
  source 1..50: mol_type = unassigned DNA; note = donor_be4563f
  misc_feature 1..23: note = RE
  misc_feature 24..25: note = Core
  misc_feature 26..50: note = LE
cccatttggttatatcatagaaatcctttagattagcataattaaattta

SEQ ID NO: 37856 - DNA, 50 bp, unidentified
  source 1..50: mol_type = unassigned DNA; note = donor_be4a55b
  misc_feature 1..23: note = RE
  misc_feature 24..25: note = Core
  misc_feature 26..50: note = LE
aaaccgctaccagctaatggttgcttgtattagcgcgaatcgatattttg

SEQ ID NO: 37857 - DNA, 50 bp, unidentified
  source 1..50: mol_type = unassigned DNA; note = donor_be4fb2b
  misc_feature 1..23: note = RE
  misc_feature 24..25: note = Core
  misc_feature 26..50: note = LE
gacacgttagaaccgtgggatgtctaatggggttgcatcgcctcgctttg

SEQ ID NO: 37858 - DNA, 50 bp, unidentified
  source 1..50: mol_type = unassigned DNA; note = donor_be51a46
  misc_feature 1..23: note = RE
  misc_feature 24..25: note = Core
  misc_feature 26..50: note = LE
tatcttgacttttcatagttggtcttgtatgattagctcataggctaaat

SEQ ID NO: 37859 - DNA, 50 bp, unidentified
  source 1..50: mol_type = unassigned DNA; note = donor_be57e26
  misc_feature 1..24: note = RE
  misc_feature 25: note = Core
  misc_feature 26..50: note = LE
tggcaatcgggatgcgttcatatagaatggaatgaacgcatccccccgga

SEQ ID NO: 37860 - DNA, 50 bp, unidentified
  source 1..50: mol_type = unassigned DNA; note = donor_be5821e
  misc_feature 1..22: note = RE
  misc_feature 23..25: note = Core
  misc_feature 26..50: note = LE
caataagggcgccgtccacacatgatgaggtggacggcgcccgctcgcgg

SEQ ID NO: 37861 - DNA, 50 bp, unidentified
  source 1..50: mol_type = unassigned DNA; note = donor_be5a0fd
  misc_feature 1..23: note = RE
  misc_feature 24..25: note = Core
  misc_feature 26..50: note = LE
cagcttgacttttaatagttaatcttgtattatagagtagtagttattag

SEQ ID NO: 37862 - DNA, 50 bp, unidentified; identical to SEQ ID NO: 37006
  source 1..50: mol_type = unassigned DNA; note = donor_be5aaf6
  misc_feature 1..22: note = RE
  misc_feature 23..25: note = Core
  misc_feature 26..50: note = LE

SEQ ID NO: 37863 - DNA, 50 bp, unidentified
  source 1..50: mol_type = unassigned DNA; note = donor_be5ac3a
  misc_feature 1..21: note = RE
  misc_feature 22..25: note = Core
  misc_feature 26..50: note = LE
ttcttgatttttcttagcaggttttagtaccataaaagtgtagttgatag

SEQ ID NO: 37864 - DNA, 50 bp, unidentified
  source 1..50: mol_type = unassigned DNA; note = donor_be5cc52
  misc_feature 1..24: note = RE
  misc_feature 25: note = Core
  misc_feature 26..50: note = LE
aatcacttttattactatagttcattatatattcggtagaactttgtaat

SEQ ID NO: 37865 - DNA, 50 bp, unidentified
  source 1..50: mol_type = unassigned DNA; note = donor_be5ffdf
  misc_feature 1..23: note = RE
  misc_feature 24..25: note = Core
  misc_feature 26..50: note = LE
gcatcacgggcggcaaccacagaagatggagtggttgccgccctacccat

SEQ ID NO: 37866 - DNA, 50 bp, unidentified
  source 1..50: mol_type = unassigned DNA; note = donor_be6a4f7
  misc_feature 1..23: note = RE
  misc_feature 24..25: note = Core
  misc_feature 26..50: note = LE
aaagcgcttgatcaaaacggatacttgtcttatgctttctccatcaatcg

SEQ ID NO: 37867 - DNA, 50 bp, unidentified
  source 1..50: mol_type = unassigned DNA; note = donor_be6dcf4
  misc_feature 1..23: note = RE
  misc_feature 24..25: note = Core
  misc_feature 26..50: note = LE
aaccgagcggcatccacaaaagaagatggggtggatgccgctctcccctg

SEQ ID NO: 37868 - DNA, 50 bp, unidentified
  source 1..50: mol_type = unassigned DNA; note = donor_be74cac
  misc_feature 1..23: note = RE
  misc_feature 24..25: note = Core
  misc_feature 26..50: note = LE
tagttgacggaggagtccagatacgatggaatggactcctcctgccgtgc

SEQ ID NO: 37869 - DNA, 50 bp, unidentified
  source 1..50: mol_type = unassigned DNA; note = donor_be757bc
  misc_feature 1..23: note = RE
  misc_feature 24..25: note = Core
  misc_feature 26..50: note = LE
gagtggcttgaccatcacggatacttgtcttatgacctttaccgctgatt

SEQ ID NO: 37870 - DNA, 50 bp, unidentified
  source 1..50: mol_type = unassigned DNA; note = donor_be89640
  misc_feature 1..22: note = RE
  misc_feature 23..25: note = Core
  misc_feature 26..50: note = LE
ctattgacttttaatagttagtcttatataatgtatttaggttgataaag

SEQ ID NO: 37871 - DNA, 50 bp, unidentified
  source 1..50: mol_type = unassigned DNA; note = donor_be8bd89
  misc_feature 1..21: note = RE
  misc_feature 22..25: note = Core
  misc_feature 26..50: note = LE
ggcttgacgtcatcatggagactccgtaagtcgtcgggtggcgcgggagg

SEQ ID NO: 37872 - DNA, 50 bp, unidentified; identical to SEQ ID NO: 31029
  source 1..50: mol_type = unassigned DNA; note = donor_be8f4cb
  misc_feature 1..23: note = RE
  misc_feature 24..25: note = Core
  misc_feature 26..50: note = LE

SEQ ID NO: 37873 - DNA, 50 bp, unidentified; identical to SEQ ID NO: 30609
  source 1..50: mol_type = unassigned DNA; note = donor_be967fa
  misc_feature 1..22: note = RE
  misc_feature 23..25: note = Core
  misc_feature 26..50: note = LE

SEQ ID NO: 37874 - DNA, 50 bp, unidentified
  source 1..50: mol_type = unassigned DNA; note = donor_be96d04
  misc_feature 1..23: note = RE
  misc_feature 24..25: note = Core
  misc_feature 26..50: note = LE
caaaaaaggggggagaccatatacgatgagatggtctccccccgcttcac

SEQ ID NO: 37875 - DNA, 50 bp, unidentified
  source 1..50: mol_type = unassigned DNA; note = donor_be98e32
  misc_feature 1..23: note = RE
  misc_feature 24..25: note = Core
  misc_feature 26..50: note = LE
gacgacttacagccgtgggatgtctaatggggctgcatccggtcgcttct

SEQ ID NO: 37876 - DNA, 50 bp, unidentified
  source 1..50: mol_type = unassigned DNA; note = donor_bea8ffd
  misc_feature 1..23: note = RE
  misc_feature 24..25: note = Core
  misc_feature 26..50: note = LE
aacgcccttgaccaagacggatacttgtcttatgacaatgcacggctcct

SEQ ID NO: 37877 - DNA, 50 bp, unidentified
  source 1..50: mol_type = unassigned DNA; note = donor_bea93fb
  misc_feature 1..24: note = RE
  misc_feature 25: note = Core
  misc_feature 26..50: note = LE
tgcaactctgcggcggaccatacataatgggatggtccgccgcagacctc

SEQ ID NO: 37878 - DNA, 50 bp, unidentified
  source 1..50: mol_type = unassigned DNA; note = donor_beacbd3
  misc_feature 1..21: note = RE
  misc_feature 22..25: note = Core
  misc_feature 26..50: note = LE
cttgaggttgacacagggggtgtcactagggcaccctctttctcatgggc

SEQ ID NO: 37879 - DNA, 50 bp, unidentified
  source 1..50: mol_type = unassigned DNA; note = donor_beadd73
  misc_feature 1..23: note = RE
  misc_feature 24..25: note = Core
  misc_feature 26..50: note = LE
gtatccagcggggcgtccacacacgttggggtggacgccccctgacggca

SEQ ID NO: 37880 - DNA, 50 bp, unidentified
  source 1..50: mol_type = unassigned DNA; note = donor_bec521b
  misc_feature 1..24: note = RE
  misc_feature 25: note = Core
  misc_feature 26..50: note = LE
gccaaggtcttgacgtaggagcttcacttcctccaggattgttcgagcga

SEQ ID NO: 37881 - DNA, 50 bp, unidentified
  source 1..50: mol_type = unassigned DNA; note = donor_bec7a17
  misc_feature 1..19: note = RE
  misc_feature 20..25: note = Core
  misc_feature 26..50: note = LE
aagcttaaaatgagagatggtatctctcattgataaatgattagctatca

SEQ ID NO: 37882 - DNA, 50 bp, unidentified
  source 1..50: mol_type = unassigned DNA; note = donor_becc327
  misc_feature 1..22: note = RE
  misc_feature 23..25: note = Core
  misc_feature 26..50: note = LE
tgcttgactttttatagttagtcttgtataatatagttacattatacaag

SEQ ID NO: 37883 - DNA, 50 bp, unidentified
  source 1..50: mol_type = unassigned DNA; note = donor_bed1440
  misc_feature 1..23: note = RE
  misc_feature 24..25: note = Core
  misc_feature 26..50: note = LE
cataatgtgcttcaagacggtatcttatatcttgattctgtcttcttttg

SEQ ID NO: 37884 - DNA, 50 bp, unidentified
  source 1..50: mol_type = unassigned DNA; note = donor_bed95e1
  misc_feature 1..23: note = RE
  misc_feature 24..25: note = Core
  misc_feature 26..50: note = LE
ctacttgatttttatatagttagctggtatattgtaattgactcatctaa

SEQ ID NO: 37885 - DNA, 50 bp, unidentified
  source 1..50: mol_type = unassigned DNA; note = donor_beddf7c
  misc_feature 1..21: note = RE
  misc_feature 22..25: note = Core
  misc_feature 26..50: note = LE
ggcttgactttctatagttggtcacgtataattaaaaccatctcgaaagg

SEQ ID NO: 37886 - DNA, 50 bp, unidentified
  source 1..50: mol_type = unassigned DNA; note = donor_beed8cb
  misc_feature 1..23: note = RE
  misc_feature 24..25: note = Core
  misc_feature 26..50: note = LE
acccttgacttttaatagttagtctcgtataataaagtagtagttattag

SEQ ID NO: 37887 - DNA, 50 bp, unidentified
  source 1..50: mol_type = unassigned DNA; note = donor_beef511
  misc_feature 1..24: note = RE
  misc_feature 25: note = Core
  misc_feature 26..50: note = LE
cgcggcttgacaagaacataggggccgttactttcttcgtagcccttgat

SEQ ID NO: 37888 - DNA, 50 bp, unidentified
  source 1..50: mol_type = unassigned DNA; note = donor_bef10b2
  misc_feature 1..23: note = RE
  misc_feature 24..25: note = Core
  misc_feature 26..50: note = LE
gcaatgtgggggccgtccacacatgatggggtggacggcccctgctcccc

SEQ ID NO: 37889 - DNA, 50 bp, unidentified
  source 1..50: mol_type = unassigned DNA; note = donor_bef6ff4
  misc_feature 1..24: note = RE
  misc_feature 25: note = Core
  misc_feature 26..50: note = LE
cgccagttgacaacagaggggagcctactagagactttcggcaaggccgg

SEQ ID NO: 37890 - DNA, 50 bp, unidentified; identical to SEQ ID NO: 31736
  source 1..50: mol_type = unassigned DNA; note = donor_befa25a
  misc_feature 1..24: note = RE
  misc_feature 25: note = Core
  misc_feature 26..50: note = LE

SEQ ID NO: 37891 - DNA, 50 bp, unidentified
  source 1..50: mol_type = unassigned DNA; note = donor_bf00849
  misc_feature 1..23: note = RE
  misc_feature 24..25: note = Core
  misc_feature 26..50: note = LE
gacaccaaccacccgtgggatgtctaatgggggtcgattgttctggctga

SEQ ID NO: 37892 - DNA, 50 bp, unidentified
  source 1..50: mol_type = unassigned DNA; note = donor_bf02287
  misc_feature 1..24: note = RE
  misc_feature 25: note = Core
  misc_feature 26..50: note = LE
gcagcttgacgtctataggagcatcagtgatgatggaggtggcatcccca

SEQ ID NO: 37893 - DNA, 50 bp, unidentified
  source 1..50: mol_type = unassigned DNA; note = donor_bf0b71e
  misc_feature 1..23: note = RE
  misc_feature 24..25: note = Core
  misc_feature 26..50: note = LE
agtgcttgacaaagtcatagtgttccattagacttataactatgaattta

SEQ ID NO: 37894 - DNA, 50 bp, unidentified
  source 1..50: mol_type = unassigned DNA; note = donor_bf2444a
  misc_feature 1..23: note = RE
  misc_feature 24..25: note = Core
  misc_feature 26..50: note = LE
gacttcaaaacgccgaatagagaagatggggtattcggctcgagcctcgt

SEQ ID NO: 37895 - DNA, 50 bp, unidentified
  source 1..50: mol_type = unassigned DNA; note = donor_bf25eab
  misc_feature 1..23: note = RE
  misc_feature 24..25: note = Core
  misc_feature 26..50: note = LE
aacccgcttgattgagacggatacttgtcttatgactgtgcctgcttctt

SEQ ID NO: 37896 - DNA, 50 bp, unidentified
  source 1..50: mol_type = unassigned DNA; note = donor_bf32694
  misc_feature 1..23: note = RE
  misc_feature 24..25: note = Core
  misc_feature 26..50: note = LE
cacctgccgagcccgtccacacatgatgttgtggacgggctcggctcccg

SEQ ID NO: 37897 - DNA, 50 bp, unidentified; identical to SEQ ID NO: 35600
  source 1..50: mol_type = unassigned DNA; note = donor_bf3690d
  misc_feature 1..23: note = RE
  misc_feature 24..25: note = Core
  misc_feature 26..50: note = LE

SEQ ID NO: 37898 - DNA, 50 bp, unidentified; identical to SEQ ID NO: 36563
  source 1..50: mol_type = unassigned DNA; note = donor_bf39afd
  misc_feature 1..22: note = RE
  misc_feature 23..25: note = Core
  misc_feature 26..50: note = LE

SEQ ID NO: 37899 - DNA, 50 bp, unidentified
  source 1..50: mol_type = unassigned DNA; note = donor_bf4524a
  misc_feature 1..22: note = RE
  misc_feature 23..25: note = Core
  misc_feature 26..50: note = LE
cttgacgaacaccatagggacacccgttacctttttcgtgggcccgggaa

SEQ ID NO: 37900 - DNA, 50 bp, unidentified
  source 1..50: mol_type = unassigned DNA; note = donor_bf516d1
  misc_feature 1..21: note = RE
  misc_feature 22..25: note = Core
  misc_feature 26..50: note = LE
ccgagagggggccgtccatacatgatggggtggacggcccccgaccggca

SEQ ID NO: 37901 - DNA, 50 bp, unidentified
  source 1..50: mol_type = unassigned DNA; note = donor_bf52d99
  misc_feature 1..20: note = RE
  misc_feature 21..25: note = Core
  misc_feature 26..50: note = LE
tgatcaaagacatagagacacccccgtaatcttcttcggcggtcctgcaa

SEQ ID NO: 37902 - DNA, 50 bp, unidentified
  source 1..50: mol_type = unassigned DNA; note = donor_bf5383c
  misc_feature 1..22: note = RE
  misc_feature 23..25: note = Core
  misc_feature 26..50: note = LE
ccttgacaagaagatggggacacccttaccttctctgtaggccctgggtc

SEQ ID NO: 37903 - DNA, 50 bp, unidentified
  source 1..50: mol_type = unassigned DNA; note = donor_bf53cc6
  misc_feature 1..24: note = RE
  misc_feature 25: note = Core
  misc_feature 26..50: note = LE
tgcagtccggcggcggaccatacataatgagatggtccgccgccgggtag

SEQ ID NO: 37904 - DNA, 50 bp, unidentified
  source 1..50: mol_type = unassigned DNA; note = donor_bf595db
  misc_feature 1..23: note = RE
  misc_feature 24..25: note = Core
  misc_feature 26..50: note = LE
ctgcttgactatttatttgcagactactacaatatatttgtggttaatac

SEQ ID NO: 37905 - DNA, 50 bp, unidentified
  source 1..50: mol_type = unassigned DNA; note = donor_bf5ba15
  misc_feature 1..23: note = RE
  misc_feature 24..25: note = Core
  misc_feature 26..50: note = LE
gcattacgggcggcaaccacagaagatgggatggttgccgccctccccag

SEQ ID NO: 37906 - DNA, 50 bp, unidentified
  source 1..50: mol_type = unassigned DNA; note = donor_bf7cbf4
  misc_feature 1..24: note = RE
  misc_feature 25: note = Core
  misc_feature 26..50: note = LE
tgcacttcggcggcggaccatacataatgagaaggtccgccgtatagaaa

SEQ ID NO: 37907 - DNA, 50 bp, unidentified
  source 1..50: mol_type = unassigned DNA; note = donor_bf7f9e0
  misc_feature 1..23: note = RE
  misc_feature 24..25: note = Core
  misc_feature 26..50: note = LE
tattgacaggtttaatacatatcagacataatgtattaaacctgtccaac

SEQ ID NO: 37908 - DNA, 50 bp, unidentified
  source 1..50: mol_type = unassigned DNA; note = donor_bf88789
  misc_feature 1..22: note = RE
  misc_feature 23..25: note = Core
  misc_feature 26..50: note = LE
cttgacaaggaacatggggacacccttaccttgttcatgggcgccaggta

SEQ ID NO: 37909 - DNA, 50 bp, unidentified
  source 1..50: mol_type = unassigned DNA; note = donor_bfaaa4f
  misc_feature 1..23: note = RE
  misc_feature 24..25: note = Core
  misc_feature 26..50: note = LE
tcacttgacttcccatatagtcactggtatattgtgtcatccactcgtta

SEQ ID NO: 37910 - DNA, 50 bp, unidentified
  source 1..50: mol_type = unassigned DNA; note = donor_bfb53a9
  misc_feature 1..23: note = RE
  misc_feature 24..25: note = Core
  misc_feature 26..50: note = LE
gcatcttccggggcgtccacacacgatggggtggacgccccccgacggtc

SEQ ID NO: 37911 - DNA, 50 bp, unidentified; identical to SEQ ID NO: 36680
  source 1..50: mol_type = unassigned DNA; note = donor_bfb8d61
  misc_feature 1..22: note = RE
  misc_feature 23..25: note = Core
  misc_feature 26..50: note = LE

SEQ ID NO: 37912 - DNA, 50 bp, unidentified
  source 1..50: mol_type = unassigned DNA; note = donor_bfbf5df
  misc_feature 1..20: note = RE
  misc_feature 21..25: note = Core
  misc_feature 26..50: note = LE
tttggaatttaaaacagtaccttttatatttactgagaattacaaaaagg

SEQ ID NO: 37913 - DNA, 50 bp, unidentified
  source 1..50: mol_type = unassigned DNA; note = donor_bfc508d
  misc_feature 1..23: note = RE
  misc_feature 24..25: note = Core
  misc_feature 26..50: note = LE
gtatccggaggggcgtccacacacgttggggtggacgccccctgacggca

SEQ ID NO: 37914 - DNA, 50 bp, unidentified
  source 1..50: mol_type = unassigned DNA; note = donor_bfc86d0
  misc_feature 1..24: note = RE
  misc_feature 25: note = Core
  misc_feature 26..50: note = LE
cccgcttgacatccataggagcgtctgtgaggatggcgttcgcagcctga

SEQ ID NO: 37915 - DNA, 50 bp, unidentified
  source 1..50: mol_type = unassigned DNA; note = donor_bfd203b
  misc_feature 1..23: note = RE
  misc_feature 24..25: note = Core
  misc_feature 26..50: note = LE
gaacccgaggggtcgtccacacatgttggggtggacgaccccgcggcatc

SEQ ID NO: 37916 - DNA, 50 bp, unidentified; identical to SEQ ID NO: 34158
  source 1..50: mol_type = unassigned DNA; note = donor_bfd3b3f
  misc_feature 1..24: note = RE
  misc_feature 25: note = Core
  misc_feature 26..50: note = LE

SEQ ID NO: 37917 - DNA, 50 bp, unidentified
  source 1..50: mol_type = unassigned DNA; note = donor_bfd4991
  misc_feature 1..22: note = RE
  misc_feature 23..25: note = Core
  misc_feature 26..50: note = LE
gctgcttgtttttatcttagaatacctttagattagcatctaagtttatt

SEQ ID NO: 37918 - DNA, 50 bp, unidentified
  source 1..50: mol_type = unassigned DNA; note = donor_bfd8fcd
  misc_feature 1..24: note = RE
  misc_feature 25: note = Core
  misc_feature 26..50: note = LE
ttgcaatacggggcggaccatatataatggaatggtccgcctcactttac

SEQ ID NO: 37919 - DNA, 50 bp, unidentified
  source 1..50: mol_type = unassigned DNA; note = donor_bfde68a
  misc_feature 1..24: note = RE
  misc_feature 25: note = Core
  misc_feature 26..50: note = LE
tgcagaaaaggggggaaccatagataatgaaatggctccccccgccgccc

SEQ ID NO: 37920 - DNA, 50 bp, unidentified
  source 1..50: mol_type = unassigned DNA; note = donor_bfe42c7
  misc_feature 1..23: note = RE
  misc_feature 24..25: note = Core
  misc_feature 26..50: note = LE
cctcttgacttattaccggaaatctcgtataataagttcggtaaaaatta

SEQ ID NO: 37921 - DNA, 50 bp, unidentified
  source 1..50: mol_type = unassigned DNA; note = donor_bfe7514
  misc_feature 1..21: note = RE
  misc_feature 22..25: note = Core
  misc_feature 26..50: note = LE
caacgcagggggagtccatatatcatgacatggactccccctgctcctac

SEQ ID NO: 37922 - DNA, 50 bp, unidentified
  source 1..50: mol_type = unassigned DNA; note = donor_c007889
  misc_feature 1..24: note = RE
  misc_feature 25: note = Core
  misc_feature 26..50: note = LE
tggcgcatcgggggcgttcatataatggaatgaacgcccccacccaatag

SEQ ID NO: 37923 - DNA, 50 bp, unidentified
  source 1..50: mol_type = unassigned DNA; note = donor_c01c7d0
  misc_feature 1..22: note = RE
  misc_feature 23..25: note = Core
  misc_feature 26..50: note = LE
gcactacgcttttctacatagcagtaattatgtaagaaaagcatagtgca

SEQ ID NO: 37924 - DNA, 50 bp, unidentified
  source 1..50: mol_type = unassigned DNA; note = donor_c027a85
  misc_feature 1..24: note = RE
  misc_feature 25: note = Core
  misc_feature 26..50: note = LE
attgcttgacacagaacataggggccgttatgttgttgacagcccctaaa

SEQ ID NO: 37925 - DNA, 50 bp, unidentified
  source 1..50: mol_type = unassigned DNA; note = donor_c02a9f6
  misc_feature 1..24: note = RE
  misc_feature 25: note = Core
  misc_feature 26..50: note = LE
aatagttgttttaaccataggatacctttagatttgtattataaatataa

SEQ ID NO: 37926 - DNA, 50 bp, unidentified
  source 1..50: mol_type = unassigned DNA; note = donor_c02c3cc
  misc_feature 1..23: note = RE
  misc_feature 24..25: note = Core
  misc_feature 26..50: note = LE
gcttgacgaggaacatagggacaccgttaccttgctggtgaccccgtagg

SEQ ID NO: 37927 - DNA, 50 bp, unidentified; identical to SEQ ID NO: 34054
  source 1..50: mol_type = unassigned DNA; note = donor_c036047
  misc_feature 1..22: note = RE
  misc_feature 23..25: note = Core
  misc_feature 26..50: note = LE

SEQ ID NO: 37928 - DNA, 50 bp, unidentified
  source 1..50: mol_type = unassigned DNA; note = donor_c03c6ab
  misc_feature 1..23: note = RE
  misc_feature 24..25: note = Core
  misc_feature 26..50: note = LE
agggttgacttttcatagctggtcttgtatgattttttagaagctaaata

SEQ ID NO: 37929 - DNA, 50 bp, unidentified; identical to SEQ ID NO: 31810
  source 1..50: mol_type = unassigned DNA; note = donor_c03dd05
  misc_feature 1..23: note = RE
  misc_feature 24..25: note = Core
  misc_feature 26..50: note = LE

SEQ ID NO: 37930 - DNA, 50 bp, unidentified
  source 1..50: mol_type = unassigned DNA; note = donor_c03e1e3
  misc_feature 1..23: note = RE
  misc_feature 24..25: note = Core
  misc_feature 26..50: note = LE
cgcaaaagggacgcgttcatatagaatgaaatgaacgcgtcccacccgtg

SEQ ID NO: 37931 - DNA, 50 bp, unidentified
  source 1..50: mol_type = unassigned DNA; note = donor_c04393e
  misc_feature 1..24: note = RE
  misc_feature 25: note = Core
  misc_feature 26..50: note = LE
tataagtacttgactaatcgtaggaaaacatactaagattagctatgaag

SEQ ID NO: 37932 - DNA, 50 bp, unidentified
  source 1..50: mol_type = unassigned DNA; note = donor_c0442e8
  misc_feature 1..23: note = RE
  misc_feature 24..25: note = Core
  misc_feature 26..50: note = LE
aatttttaccttcaagacagttgcttgtatcttgagatttggttactatg

SEQ ID NO: 37933 - DNA, 50 bp, unidentified; identical to SEQ ID NO: 35124
  source 1..50: mol_type = unassigned DNA; note = donor_c044d92
  misc_feature 1..23: note = RE
  misc_feature 24..25: note = Core
  misc_feature 26..50: note = LE

SEQ ID NO: 37934 - DNA, 50 bp, unidentified
  source 1..50: mol_type = unassigned DNA; note = donor_c053750
  misc_feature 1..22: note = RE
  misc_feature 23..25: note = Core
  misc_feature 26..50: note = LE
atccttgacttttaatagttagactcgtattatatagtagtagtttttat

SEQ ID NO: 37935 - DNA, 50 bp, unidentified
  source 1..50: mol_type = unassigned DNA; note = donor_c062c2a
  misc_feature 1..23: note = RE
  misc_feature 24..25: note = Core
  misc_feature 26..50: note = LE
gacccgcttgaccaagacggatacttgtcttatgacttccctcggcttcc

SEQ ID NO: 37936 - DNA, 50 bp, unidentified
  source 1..50: mol_type = unassigned DNA; note = donor_c06ae45
  misc_feature 1..23: note = RE
  misc_feature 24..25: note = Core
  misc_feature 26..50: note = LE
ttgacacaacggcccattacagaagatacagtaatgggcctcccttcagc

SEQ ID NO: 37937 - DNA, 50 bp, unidentified
  source 1..50: mol_type = unassigned DNA; note = donor_c06de9f
  misc_feature 1..23: note = RE
  misc_feature 24..25: note = Core
  misc_feature 26..50: note = LE
ttatttggattttaatatagttcgtcgtacatttgtacggttaaaagttt

SEQ ID NO: 37938 - DNA, 50 bp, unidentified
  source 1..50: mol_type = unassigned DNA; note = donor_c074544
  misc_feature 1..22: note = RE
  misc_feature 23..25: note = Core
  misc_feature 26..50: note = LE
tttagttagtatattttcgtgctaaccatccatgcttagcaaagcacaac

SEQ ID NO: 37939 - DNA, 50 bp, unidentified; identical to SEQ ID NO: 32462
  source 1..50: mol_type = unassigned DNA; note = donor_c080805
  misc_feature 1..23: note = RE
  misc_feature 24..25: note = Core
  misc_feature 26..50: note = LE

SEQ ID NO: 37940 - DNA, 50 bp, unidentified
  source 1..50: mol_type = unassigned DNA; note = donor_c0865ec
  misc_feature 1..24: note = RE
  misc_feature 25: note = Core
  misc_feature 26..50: note = LE
ttgctattgacaattcatagttggtgtatgatgtatttagcctaaataca

SEQ ID NO: 37941 - DNA, 50 bp, unidentified; identical to SEQ ID NO: 30609
  source 1..50: mol_type = unassigned DNA; note = donor_c092f02
  misc_feature 1..22: note = RE
  misc_feature 23..25: note = Core
  misc_feature 26..50: note = LE

SEQ ID NO: 37942 - DNA, 50 bp, unidentified
  source 1..50: mol_type = unassigned DNA; note = donor_c0955b3
  misc_feature 1..24: note = RE
  misc_feature 25: note = Core
  misc_feature 26..50: note = LE
gcgagttgacatacataggagcttcactgataatgggaatcgcgctgtcg

SEQ ID NO: 37943 - DNA, 50 bp, unidentified
  source 1..50: mol_type = unassigned DNA; note = donor_c0965b9
  misc_feature 1..24: note = RE
  misc_feature 25: note = Core
  misc_feature 26..50: note = LE
ttgacaccgacagcaaagaggactctaattgaacctgacgggcgctgcga

SEQ ID NO: 37944 - DNA, 50 bp, unidentified
  source 1..50: mol_type = unassigned DNA; note = donor_c096b19
  misc_feature 1..23: note = RE
  misc_feature 24..25: note = Core
  misc_feature 26..50: note = LE
atcagaaggttgacagcgggagtctcatctattaacaatggacgagccgg

SEQ ID NO: 37945 - DNA, 50 bp, unidentified
  source 1..50: mol_type = unassigned DNA; note = donor_c0a5950
  misc_feature 1..24: note = RE
  misc_feature 25: note = Core
  misc_feature 26..50: note = LE
gcaaaagtgggggtgaccatagattaatgagatggtcacccccaccctac

SEQ ID NO: 37946 - DNA, 50 bp, unidentified
  source 1..50: mol_type = unassigned DNA; note = donor_c0aa432
  misc_feature 1..22: note = RE
  misc_feature 23..25: note = Core
  misc_feature 26..50: note = LE
acgacagccgagagtccatataagatgtatggactctctcccttcgggga

SEQ ID NO: 37947 - DNA, 50 bp, unidentified
  source 1..50: mol_type = unassigned DNA; note = donor_c0acc25
  misc_feature 1..24: note = RE
  misc_feature 25: note = Core
  misc_feature 26..50: note = LE
catccacttgacacaaagaggcttctgattgatacttgtgtcgggtgttg

SEQ ID NO: 37948 - DNA, 50 bp, unidentified
  source 1..50: mol_type = unassigned DNA; note = donor_c0ad4a4
  misc_feature 1..23: note = RE
  misc_feature 24..25: note = Core
  misc_feature 26..50: note = LE
acccttgacttttatttgcaggtctgatacaatataattgaccgaaaaag

SEQ ID NO: 37949 - DNA, 50 bp, unidentified
  source 1..50: mol_type = unassigned DNA; note = donor_c0b377f
  misc_feature 1..24: note = RE
  misc_feature 25: note = Core
  misc_feature 26..50: note = LE
ttgcaaaagggaggcgtccatatagaatgaaatggacgcctcccgcctct

SEQ ID NO: 37950 - DNA, 50 bp, unidentified
  source 1..50: mol_type = unassigned DNA; note = donor_c0b4bff
  misc_feature 1..23: note = RE
  misc_feature 24..25: note = Core
  misc_feature 26..50: note = LE
gcgcttgactttgaagacggttacttgtatcttccatccgaccctcgcgg

SEQ ID NO: 37951 - DNA, 50 bp, unidentified
  source 1..50: mol_type = unassigned DNA; note = donor_c0cdc68
  misc_feature 1..22: note = RE
  misc_feature 23..25: note = Core
  misc_feature 26..50: note = LE
gcaccaaaggcggcatccatacatgatggtgtggatgccgccgcccggcg

SEQ ID NO: 37952 - DNA, 50 bp, unidentified
  source 1..50: mol_type = unassigned DNA; note = donor_c0de85f
  misc_feature 1..20: note = RE
  misc_feature 21..25: note = Core
  misc_feature 26..50: note = LE
gtaggcttgacacaggatgtctcactggactaccttggtggaagtcgggg

SEQ ID NO: 37953 - DNA, 50 bp, unidentified
  source 1..50: mol_type = unassigned DNA; note = donor_c0e7f23
  misc_feature 1..22: note = RE
  misc_feature 23..25: note = Core
  misc_feature 26..50: note = LE
gacaaactggcccgatcagagaagcatcggtgagcgggcgggttgattga

SEQ ID NO: 37954 - DNA, 50 bp, unidentified
  source 1..50: mol_type = unassigned DNA; note = donor_c0eb0c0
  misc_feature 1..23: note = RE
  misc_feature 24..25: note = Core
  misc_feature 26..50: note = LE
cttgcgcaaggggcggttatacatgatgctgtaaccgccccccgacgtca

SEQ ID NO: 37955 - DNA, 50 bp, unidentified
  source 1..50: mol_type = unassigned DNA; note = donor_c0eec76
  misc_feature 1..23: note = RE
  misc_feature 24..25: note = Core
  misc_feature 26..50: note = LE
gacagctcaaggcccgttacagaagatggcgtaacgggccggcgccggcg

SEQ ID NO: 37956 - DNA, 50 bp, unidentified; identical to SEQ ID NO: 32099
  source 1..50: mol_type = unassigned DNA; note = donor_c0f9ecc
  misc_feature 1..24: note = RE
  misc_feature 25: note = Core
  misc_feature 26..50: note = LE

SEQ ID NO: 37957 - DNA, 50 bp, unidentified
  source 1..50: mol_type = unassigned DNA; note = donor_c0fe11c
  misc_feature 1..21: note = RE
  misc_feature 22..25: note = Core
  misc_feature 26..50: note = LE
cccttgactactgatagtaaatcacgtatactcaatttaaggttagaatt

SEQ ID NO: 37958 - DNA, 50 bp, unidentified
  source 1..50: mol_type = unassigned DNA; note = donor_c101ad9
  misc_feature 1..23: note = RE
  misc_feature 24..25: note = Core
  misc_feature 26..50: note = LE
gacttcaacacgccgaatagagaagatggggtattcggctgtccgagccc

SEQ ID NO: 37959 - DNA, 50 bp, unidentified
  source 1..50: mol_type = unassigned DNA; note = donor_c102438
  misc_feature 1..23: note = RE
  misc_feature 24..25: note = Core
  misc_feature 26..50: note = LE
tcccttgacttttatttgcaggtctgttacaatataattgtcgggtaaat

SEQ ID NO: 37960 - DNA, 50 bp, unidentified
  source 1..50: mol_type = unassigned DNA; note = donor_c10804a
  misc_feature 1..23: note = RE
  misc_feature 24..25: note = Core
  misc_feature 26..50: note = LE
acacttgactttaaacacggttgcttgtatgttttgtgttgctggacagt

SEQ ID NO: 37961 - DNA, 50 bp, unidentified
  source 1..50: mol_type = unassigned DNA; note = donor_c10a174
  misc_feature 1..20: note = RE
  misc_feature 21..25: note = Core
  misc_feature 26..50: note = LE
gcttgacttttcttagcaggtttttagtaccataaaagtgtagttgttag

SEQ ID NO: 37962 - DNA, 50 bp, unidentified
  source 1..50: mol_type = unassigned DNA; note = donor_c115827
  misc_feature 1..23: note = RE
  misc_feature 24..25: note = Core
  misc_feature 26..50: note = LE
actcttgatttttatatagttagctggtatattataaataacttatttag

SEQ ID NO: 37963 - DNA, 50 bp, unidentified; identical to SEQ ID NO: 37946
  source 1..50: mol_type = unassigned DNA; note = donor_c11e491
  misc_feature 1..22: note = RE
  misc_feature 23..25: note = Core
  misc_feature 26..50: note = LE

SEQ ID NO: 37964 - DNA, 50 bp, unidentified; identical to SEQ ID NO: 31151
  source 1..50: mol_type = unassigned DNA; note = donor_c1216b8
  misc_feature 1..22: note = RE
  misc_feature 23..25: note = Core
  misc_feature 26..50: note = LE

SEQ ID NO: 37965 - DNA, 50 bp, unidentified
  source 1..50: mol_type = unassigned DNA; note = donor_c12ac7b
  misc_feature 1..24: note = RE
  misc_feature 25: note = Core
  misc_feature 26..50: note = LE
agattgacaaactatataggaacacattacgttattagcagttccgctta

SEQ ID NO: 37966 - DNA, 50 bp, unidentified
  source 1..50: mol_type = unassigned DNA; note = donor_c1382e0
  misc_feature 1..23: note = RE
  misc_feature 24..25: note = Core
  misc_feature 26..50: note = LE
tgacttttccagccgtgggatgtctaataggggcagagccgccaagatgg

SEQ ID NO: 37967 - DNA, 50 bp, unidentified
  source 1..50: mol_type = unassigned DNA; note = donor_c154397
  misc_feature 1..24: note = RE
  misc_feature 25: note = Core
  misc_feature 26..50: note = LE
gcttgacaacggggagtccatgtagaatgatatggactcctcactcggca

SEQ ID NO: 37968 - DNA, 50 bp, unidentified
  source 1..50: mol_type = unassigned DNA; note = donor_c157bf4
  misc_feature 1..23: note = RE
  misc_feature 24..25: note = Core
  misc_feature 26..50: note = LE
gacacaacggggaagtccttagagaatgtaagggacttccccgtcccgaa

SEQ ID NO: 37969 - DNA, 50 bp, unidentified
  source 1..50: mol_type = unassigned DNA; note = donor_c160a51
  misc_feature 1..24: note = RE
  misc_feature 25: note = Core
  misc_feature 26..50: note = LE
tgcgacgcacggccggaccatacataatggaatggtccggtcgtgctcct

SEQ ID NO: 37970 - DNA, 50 bp, unidentified
  source 1..50: mol_type = unassigned DNA; note = donor_c16d787
  misc_feature 1..23: note = RE
  misc_feature 24..25: note = Core
  misc_feature 26..50: note = LE
gcataacgggagatgtccatatacgatgtaatggacacctcccaccttac

SEQ ID NO: 37971 - DNA, 50 bp, unidentified
  source 1..50: mol_type = unassigned DNA; note = donor_c170742
  misc_feature 1..23: note = RE
  misc_feature 24..25: note = Core
  misc_feature 26..50: note = LE
gggcttccccccaaacatagaatcttgtatgtttagacttgtaggggtgg

SEQ ID NO: 37972 - DNA, 50 bp, unidentified; identical to SEQ ID NO: 32508
  source 1..50: mol_type = unassigned DNA; note = donor_c171558
  misc_feature 1..23: note = RE
  misc_feature 24..25: note = Core
  misc_feature 26..50: note = LE

SEQ ID NO: 37973 - DNA, 50 bp, unidentified; identical to SEQ ID NO: 36897
  source 1..50: mol_type = unassigned DNA; note = donor_c17253d
  misc_feature 1..24: note = RE
  misc_feature 25: note = Core
  misc_feature 26..50: note = LE

SEQ ID NO: 37974 - DNA, 50 bp, unidentified; identical to SEQ ID NO: 30604
  source 1..50: mol_type = unassigned DNA; note = donor_c174885
  misc_feature 1..23: note = RE
  misc_feature 24..25: note = Core
  misc_feature 26..50: note = LE

SEQ ID NO: 37975 - DNA, 50 bp, unidentified
  source 1..50: mol_type = unassigned DNA; note = donor_c1769f6
  misc_feature 1..23: note = RE
  misc_feature 24..25: note = Core
  misc_feature 26..50: note = LE
gaccccaccgggccgtccacgcatgttggggtggacggcccaacggcatc

SEQ ID NO: 37976 - DNA, 50 bp, unidentified
  source 1..50: mol_type = unassigned DNA; note = donor_c17749c
  misc_feature 1..23: note = RE
  misc_feature 24..25: note = Core
  misc_feature 26..50: note = LE
aatctgccgcgatctaatggttgcttgtattagcgcgacctgctatcctt

SEQ ID NO: 37977 - DNA, 50 bp, unidentified
  source 1..50: mol_type = unassigned DNA; note = donor_c188ca6
  misc_feature 1..23: note = RE
  misc_feature 24..25: note = Core
  misc_feature 26..50: note = LE
gccaaaggagagccgtccacacatgatgccgtggacggctctccacccac

SEQ ID NO: 37978 - DNA, 50 bp, unidentified
  source 1..50: mol_type = unassigned DNA; note = donor_c18d221
  misc_feature 1..23: note = RE
  misc_feature 24..25: note = Core
  misc_feature 26..50: note = LE
gacctcgacccgccgattagagaagatggggtaatcggcttcgtgcccca

SEQ ID NO: 37979 - DNA, 50 bp, unidentified
  source 1..50: mol_type = unassigned DNA; note = donor_c19a467
  misc_feature 1..21: note = RE
  misc_feature 22..25: note = Core
  misc_feature 26..50: note = LE
gcagtgagttgacctagagagctcattggatgagtatgggtgggcaggtc

SEQ ID NO: 37980 - DNA, 50 bp, unidentified
  source 1..50: mol_type = unassigned DNA; note = donor_c19ec37
  misc_feature 1..23: note = RE
  misc_feature 24..25: note = Core
  misc_feature 26..50: note = LE
ttgcaaacggggtgggtccatatataatggtatggacccactccacttcc

SEQ ID NO: 37981 - DNA, 50 bp, unidentified
  source 1..50: mol_type = unassigned DNA; note = donor_c1a5483
  misc_feature 1..23: note = RE
  misc_feature 24..25: note = Core
  misc_feature 26..50: note = LE
tgcagacggggcgggccatacgtttatgggatggcccgccccttttcccc

SEQ ID NO: 37982 - DNA, 50 bp, unidentified; identical to SEQ ID NO: 32324
  source 1..50: mol_type = unassigned DNA; note = donor_c1a59d6
  misc_feature 1..22: note = RE
  misc_feature 23..25: note = Core
  misc_feature 26..50: note = LE

SEQ ID NO: 37983 - DNA, 50 bp, unidentified
  source 1..50: mol_type = unassigned DNA; note = donor_c1ae03f
  misc_feature 1..24: note = RE
  misc_feature 25: note = Core
  misc_feature 26..50: note = LE
agctgcttgacaaaaacataggggcgttaccttgtttatatcttcggatg

SEQ ID NO: 37984 - DNA, 50 bp, unidentified
  source 1..50: mol_type = unassigned DNA; note = donor_c1afab2
  misc_feature 1..23: note = RE
  misc_feature 24..25: note = Core
  misc_feature 26..50: note = LE
aagttagtcattcaagatggttgcttatatgtctcgaatcattcaaactt

SEQ ID NO: 37985 - DNA, 50 bp, unidentified
  source 1..50: mol_type = unassigned DNA; note = donor_c1b8e51
  misc_feature 1..23: note = RE
  misc_feature 24..25: note = Core
  misc_feature 26..50: note = LE
ctggtctacttccggcacagttgcttgtgtccgcaaaatctgccagaatg

SEQ ID NO: 37986 - DNA, 50 bp, unidentified; identical to SEQ ID NO: 36296
  source 1..50: mol_type = unassigned DNA; note = donor_c1d14c8
  misc_feature 1..23: note = RE
  misc_feature 24..25: note = Core
  misc_feature 26..50: note = LE

SEQ ID NO: 37987 - DNA, 50 bp, unidentified
  source 1..50: mol_type = unassigned DNA; note = donor_c1e43e4
  misc_feature 1..24: note = RE
  misc_feature 25: note = Core
  misc_feature 26..50: note = LE
gcagcttgacaaccataggagcatcagtgaggatgtaggggtggatcgcc

SEQ ID NO: 37988 - DNA, 50 bp, unidentified
  source 1..50: mol_type = unassigned DNA; note = donor_c1e706f
  misc_feature 1..24: note = RE
  misc_feature 25: note = Core
  misc_feature 26..50: note = LE
tgcaaacgaggaggagtccatatacaatgggatggactcctcctcacccg

SEQ ID NO: 37989 - DNA, 50 bp, unidentified; identical to SEQ ID NO: 32122
  source 1..50: mol_type = unassigned DNA; note = donor_c1ebc7e
  misc_feature 1..24: note = RE
  misc_feature 25: note = Core
  misc_feature 26..50: note = LE

SEQ ID NO: 37990 - DNA, 50 bp, unidentified
  source 1..50: mol_type = unassigned DNA; note = donor_c1f59b7
  misc_feature 1..23: note = RE
  misc_feature 24..25: note = Core
  misc_feature 26..50: note = LE
ccgcttgactttcaatagctggtctggtaaaatatggtagaattatccca

SEQ ID NO: 37991 - DNA, 50 bp, unidentified
  source 1..50: mol_type = unassigned DNA; note = donor_c1fdb29
  misc_feature 1..23: note = RE
  misc_feature 24..25: note = Core
  misc_feature 26..50: note = LE
tgccaaccgggccgttccacatatgatggtgtggaacggcccttcgcgcc

SEQ ID NO: 37992 - DNA, 50 bp, unidentified
  source 1..50: mol_type = unassigned DNA; note = donor_c203c17
  misc_feature 1..24: note = RE
  misc_feature 25: note = Core
  misc_feature 26..50: note = LE
acttgacaatgttcaactcatattacgatatgagttgaacattgggagcc

SEQ ID NO: 37993 - DNA, 50 bp, unidentified
  source 1..50: mol_type = unassigned DNA; note = donor_c21b10d
  misc_feature 1..23: note = RE
  misc_feature 24..25: note = Core
  misc_feature 26..50: note = LE
aaaacgcttgatcaagacggatacttgtcttatggattggagcggctctc

SEQ ID NO: 37994 - DNA, 50 bp, unidentified
  source 1..50: mol_type = unassigned DNA; note = donor_c224e6e
  misc_feature 1..23: note = RE
  misc_feature 24..25: note = Core
  misc_feature 26..50: note = LE
cataggcgtcatcaagacggtatcttatgtcttgatcccggcccttccaa

SEQ ID NO: 37995 - DNA, 50 bp, unidentified
  source 1..50: mol_type = unassigned DNA; note = donor_c226f02
  misc_feature 1..23: note = RE
  misc_feature 24..25: note = Core
  misc_feature 26..50: note = LE
gcaaaccgggaggagaccatatacgatgagatggtctcctcccccttatt

SEQ ID NO: 37996 - DNA, 50 bp, unidentified
  source 1..50: mol_type = unassigned DNA; note = donor_c229f9c
  misc_feature 1..24: note = RE
  misc_feature 25: note = Core
  misc_feature 26..50: note = LE
tggcataccgtgggtgtccatgtataatggaatggacgcccactacccta

SEQ ID NO: 37997 - DNA, 50 bp, unidentified; identical to SEQ ID NO: 31922
  source 1..50: mol_type = unassigned DNA; note = donor_c22f637
  misc_feature 1..23: note = RE
  misc_feature 24..25: note = Core
  misc_feature 26..50: note = LE

SEQ ID NO: 37998 - DNA, 50 bp, unidentified
  source 1..50: mol_type = unassigned DNA; note = donor_c2303ec
  misc_feature 1..21: note = RE
  misc_feature 22..25: note = Core
  misc_feature 26..50: note = LE
cttgaggttgacacagagggtgtcactggtccaccctcttctgtgcgggg

SEQ ID NO: 37999 - DNA, 50 bp, unidentified
  source 1..50: mol_type = unassigned DNA; note = donor_c23587f
  misc_feature 1..23: note = RE
  misc_feature 24..25: note = Core
  misc_feature 26..50: note = LE
gggcttgacggccaagacggtatcttgtatcttgatcgagttggtggtta

SEQ ID NO: 38000 - DNA, 50 bp, unidentified; identical to SEQ ID NO: 37621
  source 1..50: mol_type = unassigned DNA; note = donor_c238a68
  misc_feature 1..23: note = RE
  misc_feature 24..25: note = Core
  misc_feature 26..50: note = LE

SEQ ID NO: 38001 - DNA, 50 bp, unidentified
  source 1..50: mol_type = unassigned DNA; note = donor_c2476c9
  misc_feature 1..23: note = RE
  misc_feature 24..25: note = Core
  misc_feature 26..50: note = LE
ggcttgacaagaccctatgggatctgatataccgccttgtggaggtcgat

SEQ ID NO: 38002 - DNA, 50 bp, unidentified
  source 1..50: mol_type = unassigned DNA; note = donor_c262bcc
  misc_feature 1..23: note = RE
  misc_feature 24..25: note = Core
  misc_feature 26..50: note = LE
gcatcctgaggtgcgtccatatatgatgtgatggacgcacctccttttta

SEQ ID NO: 38003 - DNA, 50 bp, unidentified
  source 1..50: mol_type = unassigned DNA; note = donor_c267b02
  misc_feature 1..23: note = RE
  misc_feature 24..25: note = Core
  misc_feature 26..50: note = LE
gcaacaccgggggcgtccatacatgatggtatggacgccccctattacgg

SEQ ID NO: 38004 - DNA, 50 bp, unidentified; identical to SEQ ID NO: 35927
  source 1..50: mol_type = unassigned DNA; note = donor_c268729
  misc_feature 1..23: note = RE
  misc_feature 24..25: note = Core
  misc_feature 26..50: note = LE

SEQ ID NO: 38005 - DNA, 50 bp, unidentified
  source 1..50: mol_type = unassigned DNA; note = donor_c2690bd
  misc_feature 1..24: note = RE
  misc_feature 25: note = Core
  misc_feature 26..50: note = LE
tgcaatgcgcgggaagcccttgtagaatgaaagggacttccccgtcccga

SEQ ID NO: 38006 - DNA, 50 bp, unidentified
  source 1..50: mol_type = unassigned DNA; note = donor_c26affb
  misc_feature 1..23: note = RE
  misc_feature 24..25: note = Core
  misc_feature 26..50: note = LE
aaatcggttcggagagatggtatcttgtatctctccagatagagtaatat

SEQ ID NO: 38007 - DNA, 50 bp, unidentified
  source 1..50: mol_type = unassigned DNA; note = donor_c26e6e6
  misc_feature 1..23: note = RE
  misc_feature 24..25: note = Core
  misc_feature 26..50: note = LE
gcagaagatgggctgaccatacattaatgagatggtcagcccggtgagat

SEQ ID NO: 38008 - DNA, 50 bp, unidentified
  source 1..50: mol_type = unassigned DNA; note = donor_c26fb57
  misc_feature 1..24: note = RE
  misc_feature 25: note = Core
  misc_feature 26..50: note = LE
ccgcgtcttgacacagagaggagcctacttgtttcattgacgtcatggcc

SEQ ID NO: 38009 - DNA, 50 bp, unidentified
  source 1..50: mol_type = unassigned DNA; note = donor_c27390e
  misc_feature 1..24: note = RE
  misc_feature 25: note = Core
  misc_feature 26..50: note = LE
tgcgacgcacggccgggccatacataatgggatggccgggccgtgctccc

SEQ ID NO: 38010 - DNA, 50 bp, unidentified
  source 1..50: mol_type = unassigned DNA; note = donor_c2765c0
  misc_feature 1..23: note = RE
  misc_feature 24..25: note = Core
  misc_feature 26..50: note = LE
gccgcttgacaaatagagaggcaccgacttatgttcgtgtcaccggttcg

SEQ ID NO: 38011 - DNA, 50 bp, unidentified
  source 1..50: mol_type = unassigned DNA; note = donor_c282630
  misc_feature 1..24: note = RE
  misc_feature 25: note = Core
  misc_feature 26..50: note = LE
tgcaagcgaggaggagtccatatacaatgggatggactcctcctcttcca

SEQ ID NO: 38012 - DNA, 50 bp, unidentified
  source 1..50: mol_type = unassigned DNA; note = donor_c2859d2
  misc_feature 1..23: note = RE
  misc_feature 24..25: note = Core
  misc_feature 26..50: note = LE
gattttatcattcaagacagttgcttgtatcttgaaactcagttagtatg

SEQ ID NO: 38013 - DNA, 50 bp, unidentified
  source 1..50: mol_type = unassigned DNA; note = donor_c287f91
  misc_feature 1..24: note = RE
  misc_feature 25: note = Core
  misc_feature 26..50: note = LE
ccgctcgcgttgacatagaagcatctattggtgcacagtgttaaggccgg

SEQ ID NO: 38014 - DNA, 50 bp, unidentified
  source 1..50: mol_type = unassigned DNA; note = donor_c2902d5
  misc_feature 1..22: note = RE
  misc_feature 23..25: note = Core
  misc_feature 26..50: note = LE
gccaacagggagccgtccacacatgatgctgtggacggctccccccaccg

SEQ ID NO: 38015 - DNA, 50 bp, unidentified
  source 1..50: mol_type = unassigned DNA; note = donor_c29a96b
  misc_feature 1..23: note = RE
  misc_feature 24..25: note = Core
  misc_feature 26..50: note = LE
tcacttgactaattcatagctagctcgtatattaatattgtcagatacat

SEQ ID NO: 38016 - DNA, 50 bp, unidentified; identical to SEQ ID NO: 32431
  source 1..50: mol_type = unassigned DNA; note = donor_c2b112e
  misc_feature 1..24: note = RE
  misc_feature 25: note = Core
  misc_feature 26..50: note = LE

SEQ ID NO: 38017 - DNA, 50 bp, unidentified
  source 1..50: mol_type = unassigned DNA; note = donor_c2b20fe
  misc_feature 1..23: note = RE
  misc_feature 24..25: note = Core
  misc_feature 26..50: note = LE
cctcttgacttttaatagttagtctcgtataataaatgtagtagttttta

SEQ ID NO: 38018 - DNA, 50 bp, unidentified
  source 1..50: mol_type = unassigned DNA; note = donor_c2ca253
  misc_feature 1..23: note = RE
  misc_feature 24..25: note = Core
  misc_feature 26..50: note = LE
agacttgaccacgaacataggatcttgtatgttcccgccggctcctacga

SEQ ID NO: 38019 - DNA, 50 bp, unidentified
  source 1..50: mol_type = unassigned DNA; note = donor_c2f4f8d
  misc_feature 1..23: note = RE
  misc_feature 24..25: note = Core
  misc_feature 26..50: note = LE
atgcttgccttgcaagagagaatcttgtatgttgcagattgaggcgtgag

SEQ ID NO: 38020 - DNA, 50 bp, unidentified
  source 1..50: mol_type = unassigned DNA; note = donor_c2f8e7d
  misc_feature 1..22: note = RE
  misc_feature 23..25: note = Core
  misc_feature 26..50: note = LE
caggccgggggccatccacacatgatggggtggatggccccgtgacggca

SEQ ID NO: 38021 - DNA, 50 bp, unidentified
  source 1..50: mol_type = unassigned DNA; note = donor_c2fa234
  misc_feature 1..23: note = RE
  misc_feature 24..25: note = Core
  misc_feature 26..50: note = LE
gctaacggagagccatccacacatgatgctgtggacggctctccacccac

SEQ ID NO: 38022 - DNA, 50 bp, unidentified; identical to SEQ ID NO: 33675
  source 1..50: mol_type = unassigned DNA; note = donor_c2fca32
  misc_feature 1..23: note = RE
  misc_feature 24..25: note = Core
  misc_feature 26..50: note = LE

SEQ ID NO: 38023 - DNA, 50 bp, unidentified
  source 1..50: mol_type = unassigned DNA; note = donor_c2fdfa7
  misc_feature 1..23: note = RE
  misc_feature 24..25: note = Core
  misc_feature 26..50: note = LE
gtgcttgacatcacagacggtatcttgtatcttgttttccggtcatggtt

SEQ ID NO: 38024 - DNA, 50 bp, unidentified
  source 1..50: mol_type = unassigned DNA; note = donor_c308f49
  misc_feature 1..24: note = RE
  misc_feature 25: note = Core
  misc_feature 26..50: note = LE
gccacttgacatccataggagcgtctgtgagaatccactacgcggcctgg

SEQ ID NO: 38025 - DNA, 50 bp, unidentified
  source 1..50: mol_type = unassigned DNA; note = donor_c30d462
  misc_feature 1..23: note = RE
  misc_feature 24..25: note = Core
  misc_feature 26..50: note = LE
tgacattcaaactcctgggatgtctaatgagttctgggagtaagccatcc

SEQ ID NO: 38026 - DNA, 50 bp, unidentified; identical to SEQ ID NO: 32137
  source 1..50: mol_type = unassigned DNA; note = donor_c3174d0
  misc_feature 1..22: note = RE
  misc_feature 23..25: note = Core
  misc_feature 26..50: note = LE

SEQ ID NO: 38027 - DNA, 50 bp, unidentified
  source 1..50: mol_type = unassigned DNA; note = donor_c3255b0
  misc_feature 1..23: note = RE
  misc_feature 24..25: note = Core
  misc_feature 26..50: note = LE
acgtcaagccgacataacagttgccctgtgtcttggaagcctgtcatgat

SEQ ID NO: 38028 - DNA, 50 bp, unidentified
  source 1..50: mol_type = unassigned DNA; note = donor_c32a27b
  misc_feature 1..23: note = RE
  misc_feature 24..25: note = Core
  misc_feature 26..50: note = LE
tgcagaaaaggggataaccatagatgaaatggctacccccaccgccccct

SEQ ID NO: 38029 - DNA, 50 bp, unidentified
  source 1..50: mol_type = unassigned DNA; note = donor_c32c544
  misc_feature 1..23: note = RE
  misc_feature 24..25: note = Core
  misc_feature 26..50: note = LE
tctcttgacattttaccgctggactcgtataatatgttttgtagggtttt

SEQ ID NO: 38030 - DNA, 50 bp, unidentified
  source 1..50: mol_type = unassigned DNA; note = donor_c342351
  misc_feature 1..23: note = RE
  misc_feature 24..25: note = Core
  misc_feature 26..50: note = LE
cctcttgactttttatagctggtctcgtataatggatttacggtttggat

SEQ ID NO: 38031 - DNA, 50 bp, unidentified
  source 1..50: mol_type = unassigned DNA; note = donor_c344848
  misc_feature 1..23: note = RE
  misc_feature 24..25: note = Core
  misc_feature 26..50: note = LE
gcccaacgggggccgtccatacatgatgggtggacggccccctgacggca

SEQ ID NO: 38032 - DNA, 50 bp, unidentified
  source 1..50: mol_type = unassigned DNA; note = donor_c363695
  misc_feature 1..23: note = RE
  misc_feature 24..25: note = Core
  misc_feature 26..50: note = LE
ggacttgacatcacatagctggtctagtatattgatgtcacgtactccgg

SEQ ID NO: 38033 - DNA, 50 bp, unidentified
  source 1..50: mol_type = unassigned DNA; note = donor_c372305
  misc_feature 1..20: note = RE
  misc_feature 21..25: note = Core
  misc_feature 26..50: note = LE
caggggttgacacagggcaactcactggtgcaccatcgtcgtatccgagt

SEQ ID NO: 38034 - DNA, 50 bp, unidentified
  source 1..50: mol_type = unassigned DNA; note = donor_c379a48
  misc_feature 1..23: note = RE
  misc_feature 24..25: note = Core
  misc_feature 26..50: note = LE
gcgtcgcgcggggcgtccacagatgatggggtggacgccccccgacggta

SEQ ID NO: 38035 - DNA, 50 bp, unidentified
  source 1..50: mol_type = unassigned DNA; note = donor_c3951a2
  misc_feature 1..24: note = RE
  misc_feature 25: note = Core
  misc_feature 26..50: note = LE
gggcttcttgacacagaggggagcctacctgttgactcgacagcagccgc

SEQ ID NO: 38036 - DNA, 50 bp, unidentified; identical to SEQ ID NO: 30604
  source 1..50: mol_type = unassigned DNA; note = donor_c39ebfb
  misc_feature 1..23: note = RE
  misc_feature 24..25: note = Core
  misc_feature 26..50: note = LE

SEQ ID NO: 38037 - DNA, 50 bp, unidentified
  source 1..50: mol_type = unassigned DNA; note = donor_c3ab03e
  misc_feature 1..21: note = RE
  misc_feature 22..25: note = Core
  misc_feature 26..50: note = LE
ctaatcaagcgccgtccacacatgatgctgtggacggcgcccactctgcg

SEQ ID NO: 38038 - DNA, 50 bp, unidentified
  source 1..50: mol_type = unassigned DNA; note = donor_c3b1cd4
  misc_feature 1..22: note = RE
  misc_feature 23..25: note = Core
  misc_feature 26..50: note = LE
tgacttgacaattaacacagaacatcgtatattgattcctataccaaaaa

SEQ ID NO: 38039 - DNA, 50 bp, unidentified
  source 1..50: mol_type = unassigned DNA; note = donor_c3be8e4
  misc_feature 1..24: note = RE
  misc_feature 25: note = Core
  misc_feature 26..50: note = LE
ccacttgacactccataggagcatcagtgaggatgtaagggcgggtcacc

SEQ ID NO: 38040 - DNA, 50 bp, unidentified
  source 1..50: mol_type = unassigned DNA; note = donor_c3c2e29
  misc_feature 1..24: note = RE
  misc_feature 25: note = Core
  misc_feature 26..50: note = LE
tgcacggacagggcgggtcatacataatgggatgacccgccctgtcttct

SEQ ID NO: 38041 - DNA, 50 bp, unidentified
  source 1..50: mol_type = unassigned DNA; note = donor_c3cd4aa
  misc_feature 1..24: note = RE
  misc_feature 25: note = Core
  misc_feature 26..50: note = LE
gccgcttgacaaacaacataggggcccacccgttactttgttcgtagctc

SEQ ID NO: 38042 - DNA, 50 bp, unidentified
  source 1..50: mol_type = unassigned DNA; note = donor_c3cfd62
  misc_feature 1..24: note = RE
  misc_feature 25: note = Core
  misc_feature 26..50: note = LE
ttgaccgaatgggaagtccctgtagaatacgaagggacttcccgcaatcc

SEQ ID NO: 38043 - DNA, 50 bp, unidentified
  source 1..50: mol_type = unassigned DNA; note = donor_c3d4bee
  misc_feature 1..24: note = RE
  misc_feature 25: note = Core
  misc_feature 26..50: note = LE
tgcaccacacggccggaccatacataatgggatggtccggccgtgctccc

SEQ ID NO: 38044 - DNA, 50 bp, unidentified; identical to SEQ ID NO: 31272
  source 1..50: mol_type = unassigned DNA; note = donor_c3d8ab1
  misc_feature 1..24: note = RE
  misc_feature 25: note = Core
  misc_feature 26..50: note = LE

SEQ ID NO: 38045 - DNA, 50 bp, unidentified; identical to SEQ ID NO: 35441
  source 1..50: mol_type = unassigned DNA; note = donor_c3dac0c
  misc_feature 1..24: note = RE
  misc_feature 25: note = Core
  misc_feature 26..50: note = LE

SEQ ID NO: 38046 - DNA, 50 bp, unidentified
  source 1..50: mol_type = unassigned DNA; note = donor_c3dc0ad
  misc_feature 1..22: note = RE
  misc_feature 23..25: note = Core
  misc_feature 26..50: note = LE
acttgacaaaaacatagggacacccgttaccttgtcagtatccccgataa

SEQ ID NO: 38047 - DNA, 50 bp, unidentified
  source 1..50: mol_type = unassigned DNA; note = donor_c3dff76
  misc_feature 1..23: note = RE
  misc_feature 24..25: note = Core
  misc_feature 26..50: note = LE
cttcttgacaaaacttagcaggtctattacaataagttttggttggaagc

SEQ ID NO: 38048 - DNA, 50 bp, unidentified; identical to SEQ ID NO: 32699
  source 1..50: mol_type = unassigned DNA; note = donor_c3e5bcf
  misc_feature 1..24: note = RE
  misc_feature 25: note = Core
  misc_feature 26..50: note = LE

SEQ ID NO: 38049 - DNA, 50 bp, unidentified
  source 1..50: mol_type = unassigned DNA; note = donor_c3f097e
  misc_feature 1..23: note = RE
  misc_feature 24..25: note = Core
  misc_feature 26..50: note = LE
ttgcagacggggcgagccatacgttatggaatggctcgcccctgcattgt

SEQ ID NO: 38050 - DNA, 50 bp, unidentified
  source 1..50: mol_type = unassigned DNA; note = donor_c3f83de
  misc_feature 1..24: note = RE
  misc_feature 25: note = Core
  misc_feature 26..50: note = LE
gctcaaacgggaggcgttcatatagaatgtaatgaacgcctcccaccagt

SEQ ID NO: 38051 - DNA, 50 bp, unidentified
  source 1..50: mol_type = unassigned DNA; note = donor_c402e22
  misc_feature 1..21: note = RE
  misc_feature 22..25: note = Core
  misc_feature 26..50: note = LE
atattgacttttaatagttagtcacgtataatccaattatccttttctat

SEQ ID NO: 38052 - DNA, 50 bp, unidentified
  source 1..50: mol_type = unassigned DNA; note = donor_c405db7
  misc_feature 1..24: note = RE
  misc_feature 25: note = Core
  misc_feature 26..50: note = LE
tttaagctattctttataggatggtcgtataatacatttatcaatcaaat

SEQ ID NO: 38053 - DNA, 50 bp, unidentified
  source 1..50: mol_type = unassigned DNA; note = donor_c40de00
  misc_feature 1..22: note = RE
  misc_feature 23..25: note = Core
  misc_feature 26..50: note = LE
cacgaacgggggcatccatacatgatggagtggatgccccctcccgacgg

SEQ ID NO: 38054 - DNA, 50 bp, unidentified
  source 1..50: mol_type = unassigned DNA; note = donor_c413ec8
  misc_feature 1..23: note = RE
  misc_feature 24..25: note = Core
  misc_feature 26..50: note = LE
ttacttgactttttattagcagactactataatatatttggatgaagaac

SEQ ID NO: 38055 - DNA, 50 bp, unidentified
  source 1..50: mol_type = unassigned DNA; note = donor_c41a67a
  misc_feature 1..23: note = RE
  misc_feature 24..25: note = Core
  misc_feature 26..50: note = LE
cgcttgacaaaaagacagggacaccttaccttgttgggcagctctgatcc

SEQ ID NO: 38056 - DNA, 50 bp, unidentified
  source 1..50: mol_type = unassigned DNA; note = donor_c41dc81
  misc_feature 1..23: note = RE
  misc_feature 24..25: note = Core
  misc_feature 26..50: note = LE
tgaggccgtcgttgacatagaatcttgtatggcgttagggtaggagcctg

SEQ ID NO: 38057 - DNA, 50 bp, unidentified
  source 1..50: mol_type = unassigned DNA; note = donor_c41dfda
  misc_feature 1..21: note = RE
  misc_feature 22..25: note = Core
  misc_feature 26..50: note = LE
tcgcgggttgacacagggtgtctcactaggctaccctcgcctcggagatg

SEQ ID NO: 38058 - DNA, 50 bp, unidentified
  source 1..50: mol_type = unassigned DNA; note = donor_c424d5a
  misc_feature 1..23: note = RE
  misc_feature 24..25: note = Core
  misc_feature 26..50: note = LE
atcgcctaactcagacacggttgcttgtatgttcaatttccggcagactt

SEQ ID NO: 38059 - DNA, 50 bp, unidentified
  source 1..50: mol_type = unassigned DNA; note = donor_c42742a
  misc_feature 1..24: note = RE
  misc_feature 25: note = Core
  misc_feature 26..50: note = LE
ccgattgacagcgggagtcatatcagtcagtatgactcccgcggggcaaa

SEQ ID NO: 38060 - DNA, 50 bp, unidentified
  source 1..50: mol_type = unassigned DNA; note = donor_c42a596
  misc_feature 1..23: note = RE
  misc_feature 24..25: note = Core
  misc_feature 26..50: note = LE
gcaacaacggggcggaccatacattaattagatggtccgcctcaccttaa

SEQ ID NO: 38061 - DNA, 50 bp, unidentified; identical to SEQ ID NO: 35103
  source 1..50: mol_type = unassigned DNA; note = donor_c42f49e
  misc_feature 1..23: note = RE
  misc_feature 24..25: note = Core
  misc_feature 26..50: note = LE

SEQ ID NO: 38062 - DNA, 50 bp, unidentified
  source 1..50: mol_type = unassigned DNA; note = donor_c43d05d
  misc_feature 1..23: note = RE
  misc_feature 24..25: note = Core
  misc_feature 26..50: note = LE
tgcaccgcgggccgttccacatatgatgaggtggaacggcccgcttcgac

SEQ ID NO: 38063 - DNA, 50 bp, unidentified
  source 1..50: mol_type = unassigned DNA; note = donor_c442036
  misc_feature 1..23: note = RE
  misc_feature 24..25: note = Core
  misc_feature 26..50: note = LE
gcaaggagggggccgtccacatatgttgggttggacggcccccgaaacgg

SEQ ID NO: 38064 - DNA, 50 bp, unidentified
  source 1..50: mol_type = unassigned DNA; note = donor_c4454a5
  misc_feature 1..24: note = RE
  misc_feature 25: note = Core
  misc_feature 26..50: note = LE
cgcttgacaaagtccatagggacacgttatcttcttgatggtccccgtcg

SEQ ID NO: 38065 - DNA, 50 bp, unidentified
  source 1..50: mol_type = unassigned DNA; note = donor_c448881
  misc_feature 1..23: note = RE
  misc_feature 24..25: note = Core
  misc_feature 26..50: note = LE
aattttatcgttcaagacagttgcttgtatcttgaaatctggttactatg

SEQ ID NO: 38066 - DNA, 50 bp, unidentified; identical to SEQ ID NO: 31445
  source 1..50: mol_type = unassigned DNA; note = donor_c44da85
  misc_feature 1..23: note = RE
  misc_feature 24..25: note = Core
  misc_feature 26..50: note = LE

SEQ ID NO: 38067 - DNA, 50 bp, unidentified
  source 1..50: mol_type = unassigned DNA; note = donor_c44de6f
  misc_feature 1..24: note = RE
  misc_feature 25: note = Core
  misc_feature 26..50: note = LE
cgacttgacgatctatacgagcatcagtgaagatggcggtggtccctgat

SEQ ID NO: 38068 - DNA, 50 bp, unidentified
  source 1..50: mol_type = unassigned DNA; note = donor_c46bf72
  misc_feature 1..23: note = RE
  misc_feature 24..25: note = Core
  misc_feature 26..50: note = LE
caacgcaggagccatccacacaggatggggtggatggctcctgctccacc

SEQ ID NO: 38069 - DNA, 50 bp, unidentified; identical to SEQ ID NO: 33046
  source 1..50: mol_type = unassigned DNA; note = donor_c46f838
  misc_feature 1..23: note = RE
  misc_feature 24..25: note = Core
  misc_feature 26..50: note = LE

SEQ ID NO: 38070 - DNA, 50 bp, unidentified
  source 1..50: mol_type = unassigned DNA; note = donor_c4706e7
  misc_feature 1..23: note = RE
  misc_feature 24..25: note = Core
  misc_feature 26..50: note = LE
agtcttgacatttaatagttagtctcgtattatatagtcatacccattct

SEQ ID NO: 38071 - DNA, 50 bp, unidentified
  source 1..50: mol_type = unassigned DNA; note = donor_c478a65
  misc_feature 1..23: note = RE
  misc_feature 24..25: note = Core
  misc_feature 26..50: note = LE
cttgacaaaaagagccccatacaagattctatggggcaggcaggcggcga

SEQ ID NO: 38072 - DNA, 50 bp, unidentified
  source 1..50: mol_type = unassigned DNA; note = donor_c47d168
  misc_feature 1..23: note = RE
  misc_feature 24..25: note = Core
  misc_feature 26..50: note = LE
acttttgcatatcaacacagaatctcctatgtttacatctaatattattg

SEQ ID NO: 38073 - DNA, 50 bp, unidentified
  source 1..50: mol_type = unassigned DNA; note = donor_c47f0d9
  misc_feature 1..22: note = RE
  misc_feature 23..25: note = Core
  misc_feature 26..50: note = LE
gggttgacttttaatagttaatcttgtattatagagtagtagttattagg

SEQ ID NO: 38074 - DNA, 50 bp, unidentified
  source 1..50: mol_type = unassigned DNA; note = donor_c482139
  misc_feature 1..23: note = RE
  misc_feature 24..25: note = Core
  misc_feature 26..50: note = LE
tgacacctacgaccgtgggatgtctaatggggtcgtagccaggttgtcgc

SEQ ID NO: 38075 - DNA, 50 bp, unidentified
  source 1..50: mol_type = unassigned DNA; note = donor_c483ebe
  misc_feature 1..24: note = RE
  misc_feature 25: note = Core
  misc_feature 26..50: note = LE
ttgcaaaggcgcagggtccatacatactgagatggaccctgcgccgcccc

SEQ ID NO: 38076 - DNA, 50 bp, unidentified
  source 1..50: mol_type = unassigned DNA; note = donor_c4860c4
  misc_feature 1..23: note = RE
  misc_feature 24..25: note = Core
  misc_feature 26..50: note = LE
ttgacaggagggacttacatatcagacggtatgaagtgaccgcctcgtgt

SEQ ID NO: 38077 - DNA, 50 bp, unidentified
  source 1..50: mol_type = unassigned DNA; note = donor_c489cd1
  misc_feature 1..24: note = RE
  misc_feature 25: note = Core
  misc_feature 26..50: note = LE
gcgcttaacggggaagcccttgtagaatgaaagggacttcccagtcccga

SEQ ID NO: 38078 - DNA, 50 bp, unidentified
  source 1..50: mol_type = unassigned DNA; note = donor_c4942c4
  misc_feature 1..24: note = RE
  misc_feature 25: note = Core
  misc_feature 26..50: note = LE
cttgcagacggggcgggccatacgtatggaatggcccgccactccttccg

SEQ ID NO: 38079 - DNA, 50 bp, unidentified
  source 1..50: mol_type = unassigned DNA; note = donor_c49b7c0
  misc_feature 1..21: note = RE
  misc_feature 22..25: note = Core
  misc_feature 26..50: note = LE
ccaggggttgacacagggagtctcactggtcatcctttgtgttggcgacg

SEQ ID NO: 38080 - DNA, 50 bp, unidentified
  source 1..50: mol_type = unassigned DNA; note = donor_c4a2d97
  misc_feature 1..23: note = RE
  misc_feature 24..25: note = Core
  misc_feature 26..50: note = LE
gcaccacttgacacacagaggcgctgacttgtctaatgaggtcagacgcg

SEQ ID NO: 38081 - DNA, 50 bp, unidentified
  source 1..50: mol_type = unassigned DNA; note = donor_c4a7cdd
  misc_feature 1..23: note = RE
  misc_feature 24..25: note = Core
  misc_feature 26..50: note = LE
gattactttagggagtccatataagatgtatggactcccacccaataatt

SEQ ID NO: 38082 - DNA, 50 bp, unidentified
  source 1..50: mol_type = unassigned DNA; note = donor_c4ab12c
  misc_feature 1..21: note = RE
  misc_feature 22..25: note = Core
  misc_feature 26..50: note = LE
gcttgactttttatttgcagactcctacaatatagttgcggaaaaaggca

SEQ ID NO: 38083 - DNA, 50 bp, unidentified
  source 1..50: mol_type = unassigned DNA; note = donor_c4b26ee
  misc_feature 1..22: note = RE
  misc_feature 23..25: note = Core
  misc_feature 26..50: note = LE
tattcatttttcaatatagctcgttgtataattagaattgttattattat

SEQ ID NO: 38084 - DNA, 50 bp, unidentified
  source 1..50: mol_type = unassigned DNA; note = donor_c4ba3b8
  misc_feature 1..23: note = RE
  misc_feature 24..25: note = Core
  misc_feature 26..50: note = LE
acacttgactcggaacacggttacttgtatcttccagccagaccagcacg

SEQ ID NO: 38085 - DNA, 50 bp, unidentified
  source 1..50: mol_type = unassigned DNA; note = donor_c4ba9f3
  misc_feature 1..22: note = RE
  misc_feature 23..25: note = Core
  misc_feature 26..50: note = LE
gtacttgatttatattagcaagtttggtactataaaagtgtaagaagtag

SEQ ID NO: 38086 - DNA, 50 bp, unidentified
  source 1..50: mol_type = unassigned DNA; note = donor_c4bc288
  misc_feature 1..23: note = RE
  misc_feature 24..25: note = Core
  misc_feature 26..50: note = LE
tgccgacggggcgagccatacgtttatggatggctcgccccttaactagg

SEQ ID NO: 38087 - DNA, 50 bp, unidentified
  source 1..50: mol_type = unassigned DNA; note = donor_c4c1de5
  misc_feature 1..23: note = RE
  misc_feature 24..25: note = Core
  misc_feature 26..50: note = LE
gccaagcggaggccgtccatacatgatgaggtggacggcctccgcacccg

SEQ ID NO: 38088 - DNA, 50 bp, unidentified; identical to SEQ ID NO: 34347
  source 1..50: mol_type = unassigned DNA; note = donor_c4c29b5
  misc_feature 1..23: note = RE
  misc_feature 24..25: note = Core
  misc_feature 26..50: note = LE

SEQ ID NO: 38089 - DNA, 50 bp, unidentified
  source 1..50: mol_type = unassigned DNA; note = donor_c4dd1ce
  misc_feature 1..23: note = RE
  misc_feature 24..25: note = Core
  misc_feature 26..50: note = LE
ggtattgactcattatactaagtcttgtataatatgtttaggctgtagag

SEQ ID NO: 38090 - DNA, 50 bp, unidentified
  source 1..50: mol_type = unassigned DNA; note = donor_c4de7a6
  misc_feature 1..23: note = RE
  misc_feature 24..25: note = Core
  misc_feature 26..50: note = LE
cgtagactgatttaagacggtatcttaaatctcgattctgatctcaaaaa

SEQ ID NO: 38091 - DNA, 50 bp, unidentified
  source 1..50: mol_type = unassigned DNA; note = donor_c4e62c9
  misc_feature 1..22: note = RE
  misc_feature 23..25: note = Core
  misc_feature 26..50: note = LE
aaattttgaaatcaacacagaatctcctatgtttgcgaagttattgatta

SEQ ID NO: 38092 - DNA, 50 bp, unidentified
  source 1..50: mol_type = unassigned DNA; note = donor_c4e984c
  misc_feature 1..23: note = RE
  misc_feature 24..25: note = Core
  misc_feature 26..50: note = LE
ggctattccgatcatcacagttgcttgtgtccggtgaatgtgggaggttc

SEQ ID NO: 38093 - DNA, 50 bp, unidentified; identical to SEQ ID NO: 30619
  source 1..50: mol_type = unassigned DNA; note = donor_c4eeee7
  misc_feature 1..23: note = RE
  misc_feature 24..25: note = Core
  misc_feature 26..50: note = LE

SEQ ID NO: 38094 - DNA, 50 bp, unidentified; identical to SEQ ID NO: 34943
  source 1..50: mol_type = unassigned DNA; note = donor_c4f835f
  misc_feature 1..23: note = RE
  misc_feature 24..25: note = Core
  misc_feature 26..50: note = LE

SEQ ID NO: 38095 - DNA, 50 bp, unidentified
  source 1..50: mol_type = unassigned DNA; note = donor_c5048f7
  misc_feature 1..23: note = RE
  misc_feature 24..25: note = Core
  misc_feature 26..50: note = LE
tgacatctaagcccctgggatgtctaatgggatctaccgggcctgcatac

SEQ ID NO: 38096 - DNA, 50 bp, unidentified
  source 1..50: mol_type = unassigned DNA; note = donor_c514021
  misc_feature 1..23: note = RE
  misc_feature 24..25: note = Core
  misc_feature 26..50: note = LE
gtggctcgggggccgtccacatatgatggtgtggacggccccctacggca

SEQ ID NO: 38097 - DNA, 50 bp, unidentified
  source 1..50: mol_type = unassigned DNA; note = donor_c518264
  misc_feature 1..24: note = RE
  misc_feature 25: note = Core
  misc_feature 26..50: note = LE
ccgcgtcttgacacaaaggggagcctacttagagacttggtgtaggaccg

SEQ ID NO: 38098 - DNA, 50 bp, unidentified; identical to SEQ ID NO: 35342
  source 1..50: mol_type = unassigned DNA; note = donor_c51b6e8
  misc_feature 1..23: note = RE
  misc_feature 24..25: note = Core
  misc_feature 26..50: note = LE

SEQ ID NO: 38099 - DNA, 50 bp, unidentified
  source 1..50: mol_type = unassigned DNA; note = donor_c55feb2
  misc_feature 1..23: note = RE
  misc_feature 24..25: note = Core
  misc_feature 26..50: note = LE
cctcttgactttttattagtaggctcctaatatatagattgtaggtattg

SEQ ID NO: 38100 - DNA, 50 bp, unidentified; identical to SEQ ID NO: 36586
  source 1..50: mol_type = unassigned DNA; note = donor_c56c4b3
  misc_feature 1..23: note = RE
  misc_feature 24..25: note = Core
  misc_feature 26..50: note = LE

SEQ ID NO: 38101 - DNA, 50 bp, unidentified
  source 1..50: mol_type = unassigned DNA; note = donor_c56f9df
  misc_feature 1..23: note = RE
  misc_feature 24..25: note = Core
  misc_feature 26..50: note = LE
cgtaatttcgctcaagacggtatcttatgtcttggaactagtccttgcgg

SEQ ID NO: 38102 - DNA, 50 bp, unidentified
  source 1..50: mol_type = unassigned DNA; note = donor_c5715ba
  misc_feature 1..24: note = RE
  misc_feature 25: note = Core
  misc_feature 26..50: note = LE
ttggtgatttgacataggagcgtcactcagtctaaaatgatgttgaacgt

SEQ ID NO: 38103 - DNA, 50 bp, unidentified
  source 1..50: mol_type = unassigned DNA; note = donor_c578059
  misc_feature 1..21: note = RE
  misc_feature 22..25: note = Core
  misc_feature 26..50: note = LE
aggtggcttgacatagggctactcactggtgcaccatccattcaccgtcg

SEQ ID NO: 38104 - DNA, 50 bp, unidentified; identical to SEQ ID NO: 33509
  source 1..50: mol_type = unassigned DNA; note = donor_c5af62a
  misc_feature 1..23: note = RE
  misc_feature 24..25: note = Core
  misc_feature 26..50: note = LE

SEQ ID NO: 38105 - DNA, 50 bp, unidentified
  source 1..50: mol_type = unassigned DNA; note = donor_c5b0e07
  misc_feature 1..23: note = RE
  misc_feature 24..25: note = Core
  misc_feature 26..50: note = LE
tggctcattgggagagacggtatcttgtgtctctccggtggaaggatttg

SEQ ID NO: 38106 - DNA, 50 bp, unidentified
  source 1..50: mol_type = unassigned DNA; note = donor_c5b2ede
  misc_feature 1..23: note = RE
  misc_feature 24..25: note = Core
  misc_feature 26..50: note = LE
caaggcggggggccgtccatagatgatgagatggacgaccccccgtttcc

SEQ ID NO: 38107 - DNA, 50 bp, unidentified
  source 1..50: mol_type = unassigned DNA; note = donor_c5be64a
  misc_feature 1..24: note = RE
  misc_feature 25: note = Core
  misc_feature 26..50: note = LE
ttacttgcacaggaacatagaatgcattaagtttgcagcgtgattgcggg

SEQ ID NO: 38108 - DNA, 50 bp, unidentified
  source 1..50: mol_type = unassigned DNA; note = donor_c5c1dc5
  misc_feature 1..23: note = RE
  misc_feature 24..25: note = Core
  misc_feature 26..50: note = LE
tagcttgacttcttatagtaagtcttgtatactcaatactgtaataatag

SEQ ID NO: 38109 - DNA, 50 bp, unidentified
  source 1..50: mol_type = unassigned DNA; note = donor_c5c2ab9
  misc_feature 1..23: note = RE
  misc_feature 24..25: note = Core
  misc_feature 26..50: note = LE
cttgccaagaggccgtccacatatgatgatgtggacggcctcgcccgaac

SEQ ID NO: 38110 - DNA, 50 bp, unidentified
  source 1..50: mol_type = unassigned DNA; note = donor_c5c38da
  misc_feature 1..23: note = RE
  misc_feature 24..25: note = Core
  misc_feature 26..50: note = LE
ccaatacgggcggcatccatataagatgagatggatgccgccctcttctg

SEQ ID NO: 38111 - DNA, 50 bp, unidentified; identical to SEQ ID NO: 32963
  source 1..50: mol_type = unassigned DNA; note = donor_c5c39da
  misc_feature 1..23: note = RE
  misc_feature 24..25: note = Core
  misc_feature 26..50: note = LE

SEQ ID NO: 38112 - DNA, 50 bp, unidentified; identical to SEQ ID NO: 37116
  source 1..50: mol_type = unassigned DNA; note = donor_c5c957b
  misc_feature 1..23: note = RE
  misc_feature 24..25: note = Core
  misc_feature 26..50: note = LE

SEQ ID NO: 38113 - DNA, 50 bp, unidentified
  source 1..50: mol_type = unassigned DNA; note = donor_c5d056e
  misc_feature 1..24: note = RE
  misc_feature 25: note = Core
  misc_feature 26..50: note = LE
ccctctacttctcattttcaatcttatccattcctttcgcttcgctcagg

SEQ ID NO: 38114 - DNA, 50 bp, unidentified
  source 1..50: mol_type = unassigned DNA; note = donor_c5d65cf
  misc_feature 1..23: note = RE
  misc_feature 24..25: note = Core
  misc_feature 26..50: note = LE
gccaacggggagccgtccacacatgatgctgtggacggctctcccaccgg

SEQ ID NO: 38115 - DNA, 50 bp, unidentified
  source 1..50: mol_type = unassigned DNA; note = donor_c5d6d41
  misc_feature 1..24: note = RE
  misc_feature 25: note = Core
  misc_feature 26..50: note = LE
aaaatcacttgttttttatatagttggtatattgttaatgactcatcaaa

SEQ ID NO: 38116 - DNA, 50 bp, unidentified; identical to SEQ ID NO: 30373
  source 1..50: mol_type = unassigned DNA; note = donor_c5d999f
  misc_feature 1..23: note = RE
  misc_feature 24..25: note = Core
  misc_feature 26..50: note = LE

SEQ ID NO: 38117 - DNA, 50 bp, unidentified
  source 1..50: mol_type = unassigned DNA; note = donor_c5eb6c0
  misc_feature 1..23: note = RE
  misc_feature 24..25: note = Core
  misc_feature 26..50: note = LE
aaacagccccggtttaatggttgcttgtattagcgcgaatcattacactg

SEQ ID NO: 38118 - DNA, 50 bp, unidentified; identical to SEQ ID NO: 31800
  source 1..50: mol_type = unassigned DNA; note = donor_c5ec070
  misc_feature 1..23: note = RE
  misc_feature 24..25: note = Core
  misc_feature 26..50: note = LE

SEQ ID NO: 38119 - DNA, 50 bp, unidentified; identical to SEQ ID NO: 34311
  source 1..50: mol_type = unassigned DNA; note = donor_c5f7328
  misc_feature 1..23: note = RE
  misc_feature 24..25: note = Core
  misc_feature 26..50: note = LE

SEQ ID NO: 38120 - DNA, 50 bp, unidentified
  source 1..50: mol_type = unassigned DNA; note = donor_c5f7a71
  misc_feature 1..23: note = RE
  misc_feature 24..25: note = Core
  misc_feature 26..50: note = LE
aagtattgactttcattagcaggttggtactgtatatagtgtaaatacta

SEQ ID NO: 38121 - DNA, 50 bp, unidentified; identical to SEQ ID NO: 33705
  source 1..50: mol_type = unassigned DNA; note = donor_c605eb6
  misc_feature 1..24: note = RE
  misc_feature 25: note = Core
  misc_feature 26..50: note = LE

SEQ ID NO: 38122 - DNA, 50 bp, unidentified
  source 1..50: mol_type = unassigned DNA; note = donor_c606d54
  misc_feature 1..23: note = RE
  misc_feature 24..25: note = Core
  misc_feature 26..50: note = LE
gcaggtaaattcatgatagttgactcctaccatgaattcgtatagaatag

SEQ ID NO: 38123 - DNA, 50 bp, unidentified; identical to SEQ ID NO: 30919
  source 1..50: mol_type = unassigned DNA; note = donor_c615a81
  misc_feature 1..23: note = RE
  misc_feature 24..25: note = Core
  misc_feature 26..50: note = LE

SEQ ID NO: 38124 - DNA, 50 bp, unidentified
  source 1..50: mol_type = unassigned DNA; note = donor_c61f66d
  misc_feature 1..23: note = RE
  misc_feature 24..25: note = Core
  misc_feature 26..50: note = LE
cctcttgacttttatttgcaggtctactataataaaattagtcgttaaat

SEQ ID NO: 38125 - DNA, 50 bp, unidentified
  source 1..50: mol_type = unassigned DNA; note = donor_c6213e1
  misc_feature 1..23: note = RE
  misc_feature 24..25: note = Core
  misc_feature 26..50: note = LE
gcaaaacgggaggagaccatatacgatgagatggtctcctccccccttaa

SEQ ID NO: 38126 - DNA, 50 bp, unidentified
  source 1..50: mol_type = unassigned DNA; note = donor_c62782f
  misc_feature 1..24: note = RE
  misc_feature 25: note = Core
  misc_feature 26..50: note = LE
ccctcgacttcttatagttggtcacgtataatagaaaccatctcaaaggg

SEQ ID NO: 38127 - DNA, 50 bp, unidentified; identical to SEQ ID NO: 37146
  source 1..50: mol_type = unassigned DNA; note = donor_c636525
  misc_feature 1..23: note = RE
  misc_feature 24..25: note = Core
  misc_feature 26..50: note = LE

SEQ ID NO: 38128 - DNA, 50 bp, unidentified
  source 1..50: mol_type = unassigned DNA; note = donor_c64226a
  misc_feature 1..23: note = RE
  misc_feature 24..25: note = Core
  misc_feature 26..50: note = LE
gggcttgactttgaagacagttacttgtatcttctacctgaccaccgcgg

SEQ ID NO: 38129 - DNA, 50 bp, unidentified
  source 1..50: mol_type = unassigned DNA; note = donor_c64510a
  misc_feature 1..23: note = RE
  misc_feature 24..25: note = Core
  misc_feature 26..50: note = LE
aggtggtggttgacaaagggtgtctgatggctctaccctcccctcttgag

SEQ ID NO: 38130 - DNA, 50 bp, unidentified
  source 1..50: mol_type = unassigned DNA; note = donor_c6457e1
  misc_feature 1..24: note = RE
  misc_feature 25: note = Core
  misc_feature 26..50: note = LE
ttacttgttttttaccacagtacttcttaagttagcattttaataaaaag

SEQ ID NO: 38131 - DNA, 50 bp, unidentified
  source 1..50: mol_type = unassigned DNA; note = donor_c64900f
  misc_feature 1..23: note = RE
  misc_feature 24..25: note = Core
  misc_feature 26..50: note = LE
aacgtgcttgatcacaacggaaacttgtcttatgactttccaggccgttt

SEQ ID NO: 38132 - DNA, 50 bp, unidentified
  source 1..50: mol_type = unassigned DNA; note = donor_c64f0a5
  misc_feature 1..22: note = RE
  misc_feature 23..25: note = Core
  misc_feature 26..50: note = LE
caaaaggcttgacatagagagtcttatacattaaactaagaacaagccct

SEQ ID NO: 38133 - DNA, 50 bp, unidentified
  source 1..50: mol_type = unassigned DNA; note = donor_c655f51
  misc_feature 1..23: note = RE
  misc_feature 24..25: note = Core
  misc_feature 26..50: note = LE
gtttccgaaggggcgtccacacacgttggggtggacgccccctgacggca

SEQ ID NO: 38134 - DNA, 50 bp, unidentified
  source 1..50: mol_type = unassigned DNA; note = donor_c65a911
  misc_feature 1..23: note = RE
  misc_feature 24..25: note = Core
  misc_feature 26..50: note = LE
ctacttgacttctaatagttagtctcgtattatatagtcatacccattct

SEQ ID NO: 38135 - DNA, 50 bp, unidentified
  source 1..50: mol_type = unassigned DNA; note = donor_c65b6fc
  misc_feature 1..23: note = RE
  misc_feature 24..25: note = Core
  misc_feature 26..50: note = LE
gcattatgggcggtaaccacagaagatggagtggttgccgccctccccaa

SEQ ID NO: 38136 - DNA, 50 bp, unidentified
  source 1..50: mol_type = unassigned DNA; note = donor_c65d81f
  misc_feature 1..23: note = RE
  misc_feature 24..25: note = Core
  misc_feature 26..50: note = LE
gctttccttgggcggaccatgtaagatggcatggtccgcccacccaaaca

SEQ ID NO: 38137 - DNA, 50 bp, unidentified
  source 1..50: mol_type = unassigned DNA; note = donor_c6823e9
  misc_feature 1..22: note = RE
  misc_feature 23..25: note = Core
  misc_feature 26..50: note = LE
tgacgaactacatagggacacccccgttaccttgatcgtgtctccgtaag

SEQ ID NO: 38138 - DNA, 50 bp, unidentified
  source 1..50: mol_type = unassigned DNA; note = donor_c68cc86
  misc_feature 1..24: note = RE
  misc_feature 25: note = Core
  misc_feature 26..50: note = LE
tcacttgacttccttatagttaaatggtatatacaaattaagctcatcca

SEQ ID NO: 38139 - DNA, 50 bp, unidentified
  source 1..50: mol_type = unassigned DNA; note = donor_c68ce10
  misc_feature 1..24: note = RE
  misc_feature 25: note = Core
  misc_feature 26..50: note = LE
ttgtgccacgggggccgtccacatatgatggggtggacggccccctacgg

SEQ ID NO: 38140 - DNA, 50 bp, unidentified; identical to SEQ ID NO: 34032
  source 1..50: mol_type = unassigned DNA; note = donor_c6a2070
  misc_feature 1..23: note = RE
  misc_feature 24..25: note = Core
  misc_feature 26..50: note = LE

SEQ ID NO: 38141 - DNA, 50 bp, unidentified
  source 1..50: mol_type = unassigned DNA; note = donor_c6b46e0
  misc_feature 1..23: note = RE
  misc_feature 24..25: note = Core
  misc_feature 26..50: note = LE
gcatcaaggggggcatccaaacatgatggagtggatgcccccacccgacg

SEQ ID NO: 38142 - DNA, 50 bp, unidentified; identical to SEQ ID NO: 33846
  source 1..50: mol_type = unassigned DNA; note = donor_c6b49b4
  misc_feature 1..23: note = RE
  misc_feature 24..25: note = Core
  misc_feature 26..50: note = LE

SEQ ID NO: 38143 - DNA, 50 bp, unidentified
  source 1..50: mol_type = unassigned DNA; note = donor_c6b85dd
  misc_feature 1..23: note = RE
  misc_feature 24..25: note = Core
  misc_feature 26..50: note = LE
gccaacggggtgccgtccacacatgatgctgtggacggcatccatcaccc

SEQ ID NO: 38144 - DNA, 50 bp, unidentified
  source 1..50: mol_type = unassigned DNA; note = donor_c6b9d16
  misc_feature 1..24: note = RE
  misc_feature 25: note = Core
  misc_feature 26..50: note = LE
tggcgcatcgggggcgttcatataatggaatgaacgcccccgcctacctg

SEQ ID NO: 38145 - DNA, 50 bp, unidentified; identical to SEQ ID NO: 30668
  source 1..50: mol_type = unassigned DNA; note = donor_c6c61c8
  misc_feature 1..23: note = RE
  misc_feature 24..25: note = Core
  misc_feature 26..50: note = LE

SEQ ID NO: 38146 - DNA, 50 bp, unidentified
  source 1..50: mol_type = unassigned DNA; note = donor_c6cbe85
  misc_feature 1..24: note = RE
  misc_feature 25: note = Core
  misc_feature 26..50: note = LE
tgcagtcgggcggcggaccatacataatgagatggtccgccggcttgatc

SEQ ID NO: 38147 - DNA, 50 bp, unidentified
  source 1..50: mol_type = unassigned DNA; note = donor_c6cdb79
  misc_feature 1..23: note = RE
  misc_feature 24..25: note = Core
  misc_feature 26..50: note = LE
gattaaaacgaggagtccatataagatgtatggactcctctcccctcggg

SEQ ID NO: 38148 - DNA, 50 bp, unidentified; identical to SEQ ID NO: 30693
  source 1..50: mol_type = unassigned DNA; note = donor_c6d07eb
  misc_feature 1..23: note = RE
  misc_feature 24..25: note = Core
  misc_feature 26..50: note = LE

SEQ ID NO: 38149 - DNA, 50 bp, unidentified
  source 1..50: mol_type = unassigned DNA; note = donor_c6d4cbd
  misc_feature 1..24: note = RE
  misc_feature 25: note = Core
  misc_feature 26..50: note = LE
cgccggttgacaacagaggggagcctactagagacttccctgcaggatcg

SEQ ID NO: 38150 - DNA, 50 bp, unidentified
  source 1..50: mol_type = unassigned DNA; note = donor_c6db7a6
  misc_feature 1..24: note = RE
  misc_feature 25: note = Core
  misc_feature 26..50: note = LE
ttacttgttttttaccacagtacttcttaagtttacaatctattaaatta

SEQ ID NO: 38151 - DNA, 50 bp, unidentified
  source 1..50: mol_type = unassigned DNA; note = donor_c6df2c4
  misc_feature 1..23: note = RE
  misc_feature 24..25: note = Core
  misc_feature 26..50: note = LE
ccgcttgacaggaaacggagtatcttgtatgttgaagccgtctggtttga

SEQ ID NO: 38152 - DNA, 50 bp, unidentified
  source 1..50: mol_type = unassigned DNA; note = donor_c6e38c8
  misc_feature 1..23: note = RE
  misc_feature 24..25: note = Core
  misc_feature 26..50: note = LE
cttgttgacttttaatagctggtctcgtataatatagttgaagttaaaat

SEQ ID NO: 38153 - DNA, 50 bp, unidentified; identical to SEQ ID NO: 30865
  source 1..50: mol_type = unassigned DNA; note = donor_c6f12b2
  misc_feature 1..23: note = RE
  misc_feature 24..25: note = Core
  misc_feature 26..50: note = LE

SEQ ID NO: 38154 - DNA, 50 bp, unidentified
  source 1..50: mol_type = unassigned DNA; note = donor_c6f1619
  misc_feature 1..24: note = RE
  misc_feature 25: note = Core
  misc_feature 26..50: note = LE
acccgcagcttgacatagaagcatctattggtgcacagtggttcatgccg

SEQ ID NO: 38155 - DNA, 50 bp, unidentified
  source 1..50: mol_type = unassigned DNA; note = donor_c6f1be6
  misc_feature 1..23: note = RE
  misc_feature 24..25: note = Core
  misc_feature 26..50: note = LE
tgaacaactgagggagatggtatcttgtgtctctctcgatatgctgatta

SEQ ID NO: 38156 - DNA, 50 bp, unidentified
  source 1..50: mol_type = unassigned DNA; note = donor_c6f2d46
  misc_feature 1..22: note = RE
  misc_feature 23..25: note = Core
  misc_feature 26..50: note = LE
ccaaaacggagccgtccacacatgatgctgtggacggctcctccgccggc

SEQ ID NO: 38157 - DNA, 50 bp, unidentified
  source 1..50: mol_type = unassigned DNA; note = donor_c6f6650
  misc_feature 1..22: note = RE
  misc_feature 23..25: note = Core
  misc_feature 26..50: note = LE
aaaaaggcttgacatagagagtcttatacagtaaactatgagcaagccca

SEQ ID NO: 38158 - DNA, 50 bp, unidentified
  source 1..50: mol_type = unassigned DNA; note = donor_c6f90b0
  misc_feature 1..23: note = RE
  misc_feature 24..25: note = Core
  misc_feature 26..50: note = LE
gccaacgaggcgccgtccatacatgatggtgtggacggcgccctcgcgcg

SEQ ID NO: 38159 - DNA, 50 bp, unidentified
  source 1..50: mol_type = unassigned DNA; note = donor_c70609a
  misc_feature 1..24: note = RE
  misc_feature 25: note = Core
  misc_feature 26..50: note = LE
gctcaaattacagtgtttcaaccttatgaccattcctttccgctgcgctc

SEQ ID NO: 38160 - DNA, 50 bp, unidentified; identical to SEQ ID NO: 32139
  source 1..50: mol_type = unassigned DNA; note = donor_c706c8c
  misc_feature 1..24: note = RE
  misc_feature 25: note = Core
  misc_feature 26..50: note = LE

SEQ ID NO: 38161 - DNA, 50 bp, unidentified; identical to SEQ ID NO: 30865
  source 1..50: mol_type = unassigned DNA; note = donor_c709d12
  misc_feature 1..22: note = RE
  misc_feature 23..25: note = Core
  misc_feature 26..50: note = LE

SEQ ID NO: 38162 - DNA, 50 bp, unidentified
  source 1..50: mol_type = unassigned DNA; note = donor_c710d6a
  misc_feature 1..23: note = RE
  misc_feature 24..25: note = Core
  misc_feature 26..50: note = LE
tctccttgacttttgttagcaggttagtaccataaatagtgtaagagaga

SEQ ID NO: 38163 - DNA, 50 bp, unidentified
  source 1..50: mol_type = unassigned DNA; note = donor_c719036
  misc_feature 1..24: note = RE
  misc_feature 25: note = Core
  misc_feature 26..50: note = LE
tctattgacttttcatttgcaggctcctccctactacaatgtatttatgg

SEQ ID NO: 38164 - DNA, 50 bp, unidentified
  source 1..50: mol_type = unassigned DNA; note = donor_c72841a
  misc_feature 1..23: note = RE
  misc_feature 24..25: note = Core
  misc_feature 26..50: note = LE
aacccgattgacacggacggatacttgtcttatgactttttcggttccat

SEQ ID NO: 38165 - DNA, 50 bp, unidentified; identical to SEQ ID NO: 32699
  source 1..50: mol_type = unassigned DNA; note = donor_c72c8c1
  misc_feature 1..24: note = RE
  misc_feature 25: note = Core
  misc_feature 26..50: note = LE

SEQ ID NO: 38166 - DNA, 50 bp, unidentified
  source 1..50: mol_type = unassigned DNA; note = donor_c735086
  misc_feature 1..24: note = RE
  misc_feature 25: note = Core
  misc_feature 26..50: note = LE
ttgcaacgcgggacggaccatatataatgggatggtccgttccgctccca

SEQ ID NO: 38167 - DNA, 50 bp, unidentified
  source 1..50: mol_type = unassigned DNA; note = donor_c738a2b
  misc_feature 1..23: note = RE
  misc_feature 24..25: note = Core
  misc_feature 26..50: note = LE
aggcgtccgcgacttaatggttgcttgtaataacgcgatcggttatcgtc

SEQ ID NO: 38168 - DNA, 50 bp, unidentified
  source 1..50: mol_type = unassigned DNA; note = donor_c748767
  misc_feature 1..24: note = RE
  misc_feature 25: note = Core
  misc_feature 26..50: note = LE
gcaggttgacagatataggagcttctgtgaatatagtattgtggcttgat

SEQ ID NO: 38169 - DNA, 50 bp, unidentified
  source 1..50: mol_type = unassigned DNA; note = donor_c766ada
  misc_feature 1..23: note = RE
  misc_feature 24..25: note = Core
  misc_feature 26..50: note = LE
tgacatctaagctcctgggatgtctaatgagagttaacggatccgcccgg

SEQ ID NO: 38170 - DNA, 50 bp, unidentified
  source 1..50: mol_type = unassigned DNA; note = donor_c76d413
  misc_feature 1..22: note = RE
  misc_feature 23..25: note = Core
  misc_feature 26..50: note = LE
gcaaatgggaggcgaccatataagatggaatggtcgcctcccgcctcagc

SEQ ID NO: 38171 - DNA, 50 bp, unidentified
  source 1..50: mol_type = unassigned DNA; note = donor_c76ffd0
  misc_feature 1..23: note = RE
  misc_feature 24..25: note = Core
  misc_feature 26..50: note = LE
gcgctgcaggggtcgtccacacatgatggcgtggacggcccctgtatcag

SEQ ID NO: 38172 - DNA, 50 bp, unidentified; identical to SEQ ID NO: 31255
  source 1..50: mol_type = unassigned DNA; note = donor_c776149
  misc_feature 1..24: note = RE
  misc_feature 25: note = Core
  misc_feature 26..50: note = LE

SEQ ID NO: 38173 - DNA, 50 bp, unidentified
  source 1..50: mol_type = unassigned DNA; note = donor_c77a486
  misc_feature 1..24: note = RE
  misc_feature 25: note = Core
  misc_feature 26..50: note = LE
cggtgcgttgacagaaaggggtgcctacttagagactgggtgtaggaccg

SEQ ID NO: 38174 - DNA, 50 bp, unidentified; identical to SEQ ID NO: 33448
  source 1..50: mol_type = unassigned DNA; note = donor_c77fcfd
  misc_feature 1..24: note = RE
  misc_feature 25: note = Core
  misc_feature 26..50: note = LE

SEQ ID NO: 38175 - DNA, 50 bp, unidentified
  source 1..50: mol_type = unassigned DNA; note = donor_c780dec
  misc_feature 1..23: note = RE
  misc_feature 24..25: note = Core
  misc_feature 26..50: note = LE
actattgatttttatatagttagctggtatattgaaattgactcataaaa

SEQ ID NO: 38176 - DNA, 50 bp, unidentified
  source 1..50: mol_type = unassigned DNA; note = donor_c78405f
  misc_feature 1..22: note = RE
  misc_feature 23..25: note = Core
  misc_feature 26..50: note = LE
acccgtgggcgccgtccacacatgatgtggtggacggcgcccactctgcg

SEQ ID NO: 38177 - DNA, 50 bp, unidentified
  source 1..50: mol_type = unassigned DNA; note = donor_c788fab
  misc_feature 1..24: note = RE
  misc_feature 25: note = Core
  misc_feature 26..50: note = LE
tgccacacgggaggcgtccatataatggtatggacgcctcccaccccgct

SEQ ID NO: 38178 - DNA, 50 bp, unidentified
  source 1..50: mol_type = unassigned DNA; note = donor_c792bb5
  misc_feature 1..23: note = RE
  misc_feature 24..25: note = Core
  misc_feature 26..50: note = LE
gcatcccaggggccgtccacacatgttggggtggacggccccacggcatc

SEQ ID NO: 38179 - DNA, 50 bp, unidentified
  source 1..50: mol_type = unassigned DNA; note = donor_c792dc5
  misc_feature 1..22: note = RE
  misc_feature 23..25: note = Core
  misc_feature 26..50: note = LE
caccgcgggcgtcgtccacacatgatgtagtggacgacgcccgctcccgg

SEQ ID NO: 38180 - DNA, 50 bp, unidentified; identical to SEQ ID NO: 30497
  source 1..50: mol_type = unassigned DNA; note = donor_c794c11
  misc_feature 1..24: note = RE
  misc_feature 25: note = Core
  misc_feature 26..50: note = LE

SEQ ID NO: 38181 - DNA, 50 bp, unidentified
  source 1..50: mol_type = unassigned DNA; note = donor_c7a267b
  misc_feature 1..24: note = RE
  misc_feature 25: note = Core
  misc_feature 26..50: note = LE
tgcaacgcacggccgcaccatacataatggaatggtgcggccgtgctccc

SEQ ID NO: 38182 - DNA, 50 bp, unidentified
  source 1..50: mol_type = unassigned DNA; note = donor_c7ac150
  misc_feature 1..22: note = RE
  misc_feature 23..25: note = Core
  misc_feature 26..50: note = LE
aggcttgacaggtaacacggtatcttgtatgttcacgccgctgcttgact

SEQ ID NO: 38183 - DNA, 50 bp, unidentified
  source 1..50: mol_type = unassigned DNA; note = donor_c7b0f9f
  misc_feature 1..23: note = RE
  misc_feature 24..25: note = Core
  misc_feature 26..50: note = LE
gcgctccaggggccgtccacacatgttggggtggacggcccccacggcat

SEQ ID NO: 38184 - DNA, 50 bp, unidentified
  source 1..50: mol_type = unassigned DNA; note = donor_c7b6439
  misc_feature 1..22: note = RE
  misc_feature 23..25: note = Core
  misc_feature 26..50: note = LE
tctcttgactttgtttagcaggtttggtacaatatttgcatagtctactg

SEQ ID NO: 38185 - DNA, 50 bp, unidentified
  source 1..50: mol_type = unassigned DNA; note = donor_c7bfe05
  misc_feature 1..23: note = RE
  misc_feature 24..25: note = Core
  misc_feature 26..50: note = LE
tgcccgcgtggccgttccacatatgatggtgtggaacggccccgctaccg

SEQ ID NO: 38186 - DNA, 50 bp, unidentified
  source 1..50: mol_type = unassigned DNA; note = donor_c7c7dd5
  misc_feature 1..22: note = RE
  misc_feature 23..25: note = Core
  misc_feature 26..50: note = LE
gacacttagaagcctgggatgtctaatgggagtggattggcgtgttggcg

SEQ ID NO: 38187 - DNA, 50 bp, unidentified
  source 1..50: mol_type = unassigned DNA; note = donor_c7d6ffc
  misc_feature 1..24: note = RE
  misc_feature 25: note = Core
  misc_feature 26..50: note = LE
atgttgacaagctattagctggtatcgtattatgagatcaaccagttctt

SEQ ID NO: 38188 - DNA, 50 bp, unidentified
  source 1..50: mol_type = unassigned DNA; note = donor_c7e39a8
  misc_feature 1..24: note = RE
  misc_feature 25: note = Core
  misc_feature 26..50: note = LE
tacaaactaggaggagtccatatacaatggtatggactcctccttcccta

SEQ ID NO: 38189 - DNA, 50 bp, unidentified
  source 1..50: mol_type = unassigned DNA; note = donor_c7e6158
  misc_feature 1..23: note = RE
  misc_feature 24..25: note = Core
  misc_feature 26..50: note = LE
ttgccgacggggcgggccatacgttatggatggcccgcccctcctgctga

SEQ ID NO: 38190 - DNA, 50 bp, unidentified; identical to SEQ ID NO: 30928
  source 1..50: mol_type = unassigned DNA; note = donor_c7e7277
  misc_feature 1..24: note = RE
  misc_feature 25: note = Core
  misc_feature 26..50: note = LE

SEQ ID NO: 38191 - DNA, 50 bp, unidentified
  source 1..50: mol_type = unassigned DNA; note = donor_c7f8717
  misc_feature 1..24: note = RE
  misc_feature 25: note = Core
  misc_feature 26..50: note = LE
tgcacgtcgggaggcgtccatataatggtatggacgcctcccactttaga

SEQ ID NO: 38192 - DNA, 50 bp, unidentified
  source 1..50: mol_type = unassigned DNA; note = donor_c8017c5
  misc_feature 1..23: note = RE
  misc_feature 24..25: note = Core
  misc_feature 26..50: note = LE
ggacttgacgggagagacggtatcttgtatcttgaacgtgttggtggtta

SEQ ID NO: 38193 - DNA, 50 bp, unidentified
  source 1..50: mol_type = unassigned DNA; note = donor_c80b741
  misc_feature 1..24: note = RE
  misc_feature 25: note = Core
  misc_feature 26..50: note = LE
ggctcttgacatacataggagcatcagtgaggatgttgtcggccgtcgtg

SEQ ID NO: 38194 - DNA, 50 bp, unidentified
  source 1..50: mol_type = unassigned DNA; note = donor_c80d686
  misc_feature 1..23: note = RE
  misc_feature 24..25: note = Core
  misc_feature 26..50: note = LE
ctgcttgacaagcacaacggtgtctgatattgtttctcccgctcccgtcg

SEQ ID NO: 38195 - DNA, 50 bp, unidentified
  source 1..50: mol_type = unassigned DNA; note = donor_c8117d4
  misc_feature 1..24: note = RE
  misc_feature 25: note = Core
  misc_feature 26..50: note = LE
tagacacggactgcaaagaggactctaattgcacccgagagcgctgcggg

SEQ ID NO: 38196 - DNA, 50 bp, unidentified; identical to SEQ ID NO: 30383
  source 1..50: mol_type = unassigned DNA; note = donor_c819303
  misc_feature 1..23: note = RE
  misc_feature 24..25: note = Core
  misc_feature 26..50: note = LE

SEQ ID NO: 38197 - DNA, 50 bp, unidentified
  source 1..50: mol_type = unassigned DNA; note = donor_c82d740
  misc_feature 1..24: note = RE
  misc_feature 25: note = Core
  misc_feature 26..50: note = LE
gcaaaaatgggggcgaccatagattaatgggatggtcgcccccgcctccg

SEQ ID NO: 38198 - DNA, 50 bp, unidentified
  source 1..50: mol_type = unassigned DNA; note = donor_c833f1d
  misc_feature 1..23: note = RE
  misc_feature 24..25: note = Core
  misc_feature 26..50: note = LE
ggcggtctacttcagcacagttgcttgtgtccgcagattctgccagaatg

SEQ ID NO: 38199 - DNA, 50 bp, unidentified
  source 1..50: mol_type = unassigned DNA; note = donor_c83ea9c
  misc_feature 1..23: note = RE
  misc_feature 24..25: note = Core
  misc_feature 26..50: note = LE
gacaacttacgcccgtgggatgtctaatgggtgtgcaccagcccggtcgg

SEQ ID NO: 38200 - DNA, 50 bp, unidentified
  source 1..50: mol_type = unassigned DNA; note = donor_c84e739
  misc_feature 1..24: note = RE
  misc_feature 25: note = Core
  misc_feature 26..50: note = LE
ttgcttgttttttaactcagttcttcttaagtttacaatccattaaattt

SEQ ID NO: 38201 - DNA, 50 bp, unidentified
  source 1..50: mol_type = unassigned DNA; note = donor_c850d87
  misc_feature 1..23: note = RE
  misc_feature 24..25: note = Core
  misc_feature 26..50: note = LE
gcggagcaggggccatccacagatgatggggtggatggcccctgtttgcg

SEQ ID NO: 38202 - DNA, 50 bp, unidentified
  source 1..50: mol_type = unassigned DNA; note = donor_c85ae1e
  misc_feature 1..23: note = RE
  misc_feature 24..25: note = Core
  misc_feature 26..50: note = LE
gcaaaatgggaggagaccatatacgatgagatcggtctcctccccttcta

SEQ ID NO: 38203 - DNA, 50 bp, unidentified
  source 1..50: mol_type = unassigned DNA; note = donor_c85fcc5
  misc_feature 1..23: note = RE
  misc_feature 24..25: note = Core
  misc_feature 26..50: note = LE
aaaaactacttgattatgtgaggagcttcctgtatagtttaaatcgtggt

SEQ ID NO: 38204 - DNA, 50 bp, unidentified
  source 1..50: mol_type = unassigned DNA; note = donor_c863837
  misc_feature 1..24: note = RE
  misc_feature 25: note = Core
  misc_feature 26..50: note = LE
ctgcgtcttgacacagaggggtgcctacttgtttcattgactgcaggatc

SEQ ID NO: 38205 - DNA, 50 bp, unidentified; identical to SEQ ID NO: 38096
  source 1..50: mol_type = unassigned DNA; note = donor_c864b13
  misc_feature 1..23: note = RE
  misc_feature 24..25: note = Core
  misc_feature 26..50: note = LE

SEQ ID NO: 38206 - DNA, 50 bp, unidentified
  source 1..50: mol_type = unassigned DNA; note = donor_c869008
  misc_feature 1..23: note = RE
  misc_feature 24..25: note = Core
  misc_feature 26..50: note = LE
ccaattgacttttaatagttagtctcgtattattaagttgtagcttttct

SEQ ID NO: 38207 - DNA, 50 bp, unidentified
  source 1..50: mol_type = unassigned DNA; note = donor_c86d297
  misc_feature 1..24: note = RE
  misc_feature 25: note = Core
  misc_feature 26..50: note = LE
ttagttgttttttagcacagttcttcttaagcttgtaaagtattaagttt

SEQ ID NO: 38208 - DNA, 50 bp, unidentified
  source 1..50: mol_type = unassigned DNA; note = donor_c8763ba
  misc_feature 1..24: note = RE
  misc_feature 25: note = Core
  misc_feature 26..50: note = LE
aaaccccttgacctagaggggagcctacttgtttaatttgatctacgaca

SEQ ID NO: 38209 - DNA, 50 bp, unidentified
  source 1..50: mol_type = unassigned DNA; note = donor_c87bc18
  misc_feature 1..23: note = RE
  misc_feature 24..25: note = Core
  misc_feature 26..50: note = LE
aggtcttgatttttaatagttagtcgtattattaaatagtagtatttatg

SEQ ID NO: 38210 - DNA, 50 bp, unidentified
  source 1..50: mol_type = unassigned DNA; note = donor_c8932e2
  misc_feature 1..23: note = RE
  misc_feature 24..25: note = Core
  misc_feature 26..50: note = LE
ccttgaaaatccgagagggatgttctacctttggatttcgcaggccggcg

SEQ ID NO: 38211 - DNA, 50 bp, unidentified
  source 1..50: mol_type = unassigned DNA; note = donor_c89bd0c
  misc_feature 1..24: note = RE
  misc_feature 25: note = Core
  misc_feature 26..50: note = LE
gccaaaccgggaggcgtccatataatgtaatggacgcctccctcccgcct

SEQ ID NO: 38212 - DNA, 50 bp, unidentified
  source 1..50: mol_type = unassigned DNA; note = donor_c8a23f8
  misc_feature 1..23: note = RE
  misc_feature 24..25: note = Core
  misc_feature 26..50: note = LE
gtacttgacttttattagcagggttcgtacaatataagagtagggattac

SEQ ID NO: 38213 - DNA, 50 bp, unidentified
  source 1..50: mol_type = unassigned DNA; note = donor_c8a428c
  misc_feature 1..23: note = RE
  misc_feature 24..25: note = Core
  misc_feature 26..50: note = LE
tgacacttcagctcctgggatgtctaatgagttccgggagccagccatcc

SEQ ID NO: 38214 - DNA, 50 bp, unidentified; identical to SEQ ID NO: 34040
  source 1..50: mol_type = unassigned DNA; note = donor_c8a7281
  misc_feature 1..24: note = RE
  misc_feature 25: note = Core
  misc_feature 26..50: note = LE

SEQ ID NO: 38215 - DNA, 50 bp, unidentified
  source 1..50: mol_type = unassigned DNA; note = donor_c8b416e
  misc_feature 1..20: note = RE
  misc_feature 21..25: note = Core
  misc_feature 26..50: note = LE
caggggttgacacagggcaactcactggtgcaccatcttggtatccgagt

SEQ ID NO: 38216 - DNA, 50 bp, unidentified
  source 1..50: mol_type = unassigned DNA; note = donor_c8b717f
  misc_feature 1..23: note = RE
  misc_feature 24..25: note = Core
  misc_feature 26..50: note = LE
gccccttgagttctttcattggagaggtgacatgaaagaggccacctccg

SEQ ID NO: 38217 - DNA, 50 bp, unidentified
  source 1..50: mol_type = unassigned DNA; note = donor_c8b82c0
  misc_feature 1..23: note = RE
  misc_feature 24..25: note = Core
  misc_feature 26..50: note = LE
gacacctacgccccgtgggatgtctaatggcttccgagcagccaacgaat

SEQ ID NO: 38218 - DNA, 50 bp, unidentified
  source 1..50: mol_type = unassigned DNA; note = donor_c8c5d0b
  misc_feature 1..23: note = RE
  misc_feature 24..25: note = Core
  misc_feature 26..50: note = LE
ttgcggacggggcgggccatacgttatggatggcccgcccctacctcacc

SEQ ID NO: 38219 - DNA, 50 bp, unidentified
  source 1..50: mol_type = unassigned DNA; note = donor_c8cc646
  misc_feature 1..22: note = RE
  misc_feature 23..25: note = Core
  misc_feature 26..50: note = LE
ctctacttctttgtttcaaacttattacccgtcttttctgcgaaagacac

SEQ ID NO: 38220 - DNA, 50 bp, unidentified
  source 1..50: mol_type = unassigned DNA; note = donor_c8d1433
  misc_feature 1..22: note = RE
  misc_feature 23..25: note = Core
  misc_feature 26..50: note = LE
cctgttgatttttgttagcaggtttggtactataaaagtgtaattgttgt

SEQ ID NO: 38221 - DNA, 50 bp, unidentified
  source 1..50: mol_type = unassigned DNA; note = donor_c8d570f
  misc_feature 1..20: note = RE
  misc_feature 21..25: note = Core
  misc_feature 26..50: note = LE
cttgacacgcaacatagggacacccgttaccttgttggtagccccagttg

SEQ ID NO: 38222 - DNA, 50 bp, unidentified
  source 1..50: mol_type = unassigned DNA; note = donor_c8dbec3
  misc_feature 1..23: note = RE
  misc_feature 24..25: note = Core
  misc_feature 26..50: note = LE
gctcccgtgggggcgtccacagatgatggggtggacgccccccgacggca

SEQ ID NO: 38223 - DNA, 50 bp, unidentified
  source 1..50: mol_type = unassigned DNA; note = donor_c8df7cd
  misc_feature 1..23: note = RE
  misc_feature 24..25: note = Core
  misc_feature 26..50: note = LE
gccccgcgggcgccatccatacatgatgggctggatggcgcccgcttccg

SEQ ID NO: 38224 - DNA, 50 bp, unidentified
  source 1..50: mol_type = unassigned DNA; note = donor_c8f536b
  misc_feature 1..22: note = RE
  misc_feature 23..25: note = Core
  misc_feature 26..50: note = LE
tttggctcttgacatagagggtcttatatgttactattgttgcagaccct

SEQ ID NO: 38225 - DNA, 50 bp, unidentified
  source 1..50: mol_type = unassigned DNA; note = donor_c8f56b7
  misc_feature 1..22: note = RE
  misc_feature 23..25: note = Core
  misc_feature 26..50: note = LE
aatgttgacaaactattagctggttcgtaatataaggttaaccagatttc

SEQ ID NO: 38226 - DNA, 50 bp, unidentified; identical to SEQ ID NO: 30854
  source 1..50: mol_type = unassigned DNA; note = donor_c8f97cd
  misc_feature 1..23: note = RE
  misc_feature 24..25: note = Core
  misc_feature 26..50: note = LE

SEQ ID NO: 38227 - DNA, 50 bp, unidentified
  source 1..50: mol_type = unassigned DNA; note = donor_c8fb896
  misc_feature 1..23: note = RE
  misc_feature 24..25: note = Core
  misc_feature 26..50: note = LE
tacatttggaattatcatagaaatcctttagacttgtaaatgattaaatt

SEQ ID NO: 38228 - DNA, 50 bp, unidentified
  source 1..50: mol_type = unassigned DNA; note = donor_c904e51
  misc_feature 1..23: note = RE
  misc_feature 24..25: note = Core
  misc_feature 26..50: note = LE
gcattcaccggggtgtccacagatgatggggtggacacccctcgacggca

SEQ ID NO: 38229 - DNA, 50 bp, unidentified
  source 1..50: mol_type = unassigned DNA; note = donor_c90e048
  misc_feature 1..23: note = RE
  misc_feature 24..25: note = Core
  misc_feature 26..50: note = LE
aacctgcttgatcaaaacggatacttgtcttatgactatctgcgcttctt

SEQ ID NO: 38230 - DNA, 50 bp, unidentified; identical to SEQ ID NO: 30526
  source 1..50: mol_type = unassigned DNA; note = donor_c920c59
  misc_feature 1..23: note = RE
  misc_feature 24..25: note = Core
  misc_feature 26..50: note = LE

SEQ ID NO: 38231 - DNA, 50 bp, unidentified
  source 1..50: mol_type = unassigned DNA; note = donor_c929b10
  misc_feature 1..24: note = RE
  misc_feature 25: note = Core
  misc_feature 26..50: note = LE
gcttgactttttatttgcagactgtactacaatgtatttatggttaatat

SEQ ID NO: 38232 - DNA, 50 bp, unidentified
  source 1..50: mol_type = unassigned DNA; note = donor_c92bc15
  misc_feature 1..23: note = RE
  misc_feature 24..25: note = Core
  misc_feature 26..50: note = LE
atgcttgacagccaagacagttgcttgtatcttggaccgagtgcggcaat

SEQ ID NO: 38233 - DNA, 50 bp, unidentified
  source 1..50: mol_type = unassigned DNA; note = donor_c93064d
  misc_feature 1..24: note = RE
  misc_feature 25: note = Core
  misc_feature 26..50: note = LE
ttgaaatacgaggtggaccatatataatggaatggtccacctcactttta

SEQ ID NO: 38234 - DNA, 50 bp, unidentified; identical to SEQ ID NO: 37572
  source 1..50: mol_type = unassigned DNA; note = donor_c931156
  misc_feature 1..23: note = RE
  misc_feature 24..25: note = Core
  misc_feature 26..50: note = LE

SEQ ID NO: 38235 - DNA, 50 bp, unidentified
  source 1..50: mol_type = unassigned DNA; note = donor_c932435
  misc_feature 1..23: note = RE
  misc_feature 24..25: note = Core
  misc_feature 26..50: note = LE
gtacttgactttttattagcaggctcctactatatagttgtagtggttat

SEQ ID NO: 38236 - DNA, 50 bp, unidentified
  source 1..50: mol_type = unassigned DNA; note = donor_c94c352
  misc_feature 1..24: note = RE
  misc_feature 25: note = Core
  misc_feature 26..50: note = LE
tcagggtcttcaagatggttgctgtatatctttcgatgggttcaaacttc

SEQ ID NO: 38237 - DNA, 50 bp, unidentified
  source 1..50: mol_type = unassigned DNA; note = donor_c951b3e
  misc_feature 1..24: note = RE
  misc_feature 25: note = Core
  misc_feature 26..50: note = LE
taagcttgacaagccagacagtcgccttgtatctggcgaatcgcgccgcc

SEQ ID NO: 38238 - DNA, 50 bp, unidentified
  source 1..50: mol_type = unassigned DNA; note = donor_c957128
  misc_feature 1..24: note = RE
  misc_feature 25: note = Core
  misc_feature 26..50: note = LE
tgcaaaacagaggtagtccatagataatgggatggactacctcttccctc

SEQ ID NO: 38239 - DNA, 50 bp, unidentified; identical to SEQ ID NO: 31445
  source 1..50: mol_type = unassigned DNA; note = donor_c95f2de
  misc_feature 1..23: note = RE
  misc_feature 24..25: note = Core
  misc_feature 26..50: note = LE

SEQ ID NO: 38240 - DNA, 50 bp, unidentified
  source 1..50: mol_type = unassigned DNA; note = donor_c972168
  misc_feature 1..23: note = RE
  misc_feature 24..25: note = Core
  misc_feature 26..50: note = LE
aattaaacccgacaatacagttgcctgtgtatcgacattgtgctataaga

SEQ ID NO: 38241 - DNA, 50 bp, unidentified
  source 1..50: mol_type = unassigned DNA; note = donor_c9763b1
  misc_feature 1..23: note = RE
  misc_feature 24..25: note = Core
  misc_feature 26..50: note = LE
gacaccttgccgccgtgggatgtctaatgggggtgcaccagctggttcag

SEQ ID NO: 38242 - DNA, 50 bp, unidentified
  source 1..50: mol_type = unassigned DNA; note = donor_c97c2b2
  misc_feature 1..23: note = RE
  misc_feature 24..25: note = Core
  misc_feature 26..50: note = LE
gcccagcgggtgccatccatacatgatggagtggatggcgcccgcctgcg

SEQ ID NO: 38243 - DNA, 50 bp, unidentified
  source 1..50: mol_type = unassigned DNA; note = donor_c97d1ef
  misc_feature 1..23: note = RE
  misc_feature 24..25: note = Core
  misc_feature 26..50: note = LE
aagatttggttttatcatagaaatcctttagatttgttttttgaaaattg

SEQ ID NO: 38244 - DNA, 50 bp, unidentified
  source 1..50: mol_type = unassigned DNA; note = donor_c97eda3
  misc_feature 1..24: note = RE
  misc_feature 25: note = Core
  misc_feature 26..50: note = LE
ttgcaataagagagggtccatatataatggaatggaccctctctacccca

SEQ ID NO: 38245 - DNA, 50 bp, unidentified
  source 1..50: mol_type = unassigned DNA; note = donor_c9834b9
  misc_feature 1..23: note = RE
  misc_feature 24..25: note = Core
  misc_feature 26..50: note = LE
tgccaataggggccgtccacatatgatgttgtggacggccccacctacac

SEQ ID NO: 38246 - DNA, 50 bp, unidentified; identical to SEQ ID NO: 31238
  source 1..50: mol_type = unassigned DNA; note = donor_c99173f
  misc_feature 1..24: note = RE
  misc_feature 25: note = Core
  misc_feature 26..50: note = LE

SEQ ID NO: 38247 - DNA, 50 bp, unidentified
  source 1..50: mol_type = unassigned DNA; note = donor_c999ab8
  misc_feature 1..22: note = RE
  misc_feature 23..25: note = Core
  misc_feature 26..50: note = LE
ctgcttgactttttatttgcagactacaatatatttatgattaatacccc

SEQ ID NO: 38248 - DNA, 50 bp, unidentified
  source 1..50: mol_type = unassigned DNA; note = donor_c9a0c27
  misc_feature 1..23: note = RE
  misc_feature 24..25: note = Core
  misc_feature 26..50: note = LE
tgacctccaaaccgatgggatgtctaatgagtgctgcgggcctgccgtga

SEQ ID NO: 38249 - DNA, 50 bp, unidentified
  source 1..50: mol_type = unassigned DNA; note = donor_c9a2081
  misc_feature 1..22: note = RE
  misc_feature 23..25: note = Core
  misc_feature 26..50: note = LE
ggtattgatttttattagcaagtttggtactataaaagtgtaatgattaa

SEQ ID NO: 38250 - DNA, 50 bp, unidentified
  source 1..50: mol_type = unassigned DNA; note = donor_c9a8356
  misc_feature 1..24: note = RE
  misc_feature 25: note = Core
  misc_feature 26..50: note = LE
ggccgccgcttgacataggagaaactcagtgtcattttgggtggtgccgc

SEQ ID NO: 38251 - DNA, 50 bp, unidentified; identical to SEQ ID NO: 30510
  source 1..50: mol_type = unassigned DNA; note = donor_c9aa87d
  misc_feature 1..23: note = RE
  misc_feature 24..25: note = Core
  misc_feature 26..50: note = LE

SEQ ID NO: 38252 - DNA, 50 bp, unidentified
  source 1..50: mol_type = unassigned DNA; note = donor_c9b05cd
  misc_feature 1..20: note = RE
  misc_feature 21..25: note = Core
  misc_feature 26..50: note = LE
cgagggttgacacaggatgtctcactgggctaccctgccacggagatgtt

SEQ ID NO: 38253 - DNA, 50 bp, unidentified
  source 1..50: mol_type = unassigned DNA; note = donor_c9c2aa7
  misc_feature 1..23: note = RE
  misc_feature 24..25: note = Core
  misc_feature 26..50: note = LE
gcataaaccggggcatccacacatgatggagtggatgcccctcccgcctt

SEQ ID NO: 38254 - DNA, 50 bp, unidentified
  source 1..50: mol_type = unassigned DNA; note = donor_c9c95f3
  misc_feature 1..23: note = RE
  misc_feature 24..25: note = Core
  misc_feature 26..50: note = LE
actgttgatttttatatagttagctggtatattgtaaatgactcatttaa

SEQ ID NO: 38255 - DNA, 50 bp, unidentified
  source 1..50: mol_type = unassigned DNA; note = donor_c9d2bc8
  misc_feature 1..22: note = RE
  misc_feature 23..25: note = Core
  misc_feature 26..50: note = LE
ttagattttggacaagacagttgcttgtgtcttgataggggattagaatc

SEQ ID NO: 38256 - DNA, 50 bp, unidentified
  source 1..50: mol_type = unassigned DNA; note = donor_c9d48d1
  misc_feature 1..24: note = RE
  misc_feature 25: note = Core
  misc_feature 26..50: note = LE
ttgacgaacggggaagcccttgtagaatgaaagggacttccccgtcccga

SEQ ID NO: 38257 - DNA, 50 bp, unidentified
  source 1..50: mol_type = unassigned DNA; note = donor_c9ec8c8
  misc_feature 1..20: note = RE
  misc_feature 21..25: note = Core
  misc_feature 26..50: note = LE
gacgaacgacatagggacaccccccgttaccttcctcgtggtccccgggt

SEQ ID NO: 38258 - DNA, 50 bp, unidentified
  source 1..50: mol_type = unassigned DNA; note = donor_c9ed431
  misc_feature 1..23: note = RE
  misc_feature 24..25: note = Core
  misc_feature 26..50: note = LE
ataatttgcaaaaatcatagtagtaccttagatttgcagctgaggattac

SEQ ID NO: 38259 - DNA, 50 bp, unidentified
  source 1..50: mol_type = unassigned DNA; note = donor_ca0d84e
  misc_feature 1..23: note = RE
  misc_feature 24..25: note = Core
  misc_feature 26..50: note = LE
gcattgaaaggggcatccacacatgatggggtggatgccccacccggcgg

SEQ ID NO: 38260 - DNA, 50 bp, unidentified
  source 1..50: mol_type = unassigned DNA; note = donor_ca133d5
  misc_feature 1..24: note = RE
  misc_feature 25: note = Core
  misc_feature 26..50: note = LE
tgcagtcggacggcggaccatacataatgagatggtccgccgcttgattc

SEQ ID NO: 38261 - DNA, 50 bp, unidentified; identical to SEQ ID NO: 31591
  source 1..50: mol_type = unassigned DNA; note = donor_ca1ae18
  misc_feature 1..23: note = RE
  misc_feature 24..25: note = Core
  misc_feature 26..50: note = LE

SEQ ID NO: 38262 - DNA, 50 bp, unidentified
  source 1..50: mol_type = unassigned DNA; note = donor_ca22ea9
  misc_feature 1..24: note = RE
  misc_feature 25: note = Core
  misc_feature 26..50: note = LE
gccgcttgacaaacagaagggcgtcagtcagaagatggttgccagctccc

SEQ ID NO: 38263 - DNA, 50 bp, unidentified
  source 1..50: mol_type = unassigned DNA; note = donor_ca44db7
  misc_feature 1..23: note = RE
  misc_feature 24..25: note = Core
  misc_feature 26..50: note = LE
cttgacaaaaaaagccccatacaagatgctatggggcggcggcgaggatt

SEQ ID NO: 38264 - DNA, 50 bp, unidentified; identical to SEQ ID NO: 30604
  source 1..50: mol_type = unassigned DNA; note = donor_ca58ee9
  misc_feature 1..23: note = RE
  misc_feature 24..25: note = Core
  misc_feature 26..50: note = LE

SEQ ID NO: 38265 - DNA, 50 bp, unidentified
  source 1..50: mol_type = unassigned DNA; note = donor_ca59c9e
  misc_feature 1..23: note = RE
  misc_feature 24..25: note = Core
  misc_feature 26..50: note = LE
caatgcaggagccatccacagaggatgaggtggatggctcctgctccacc

SEQ ID NO: 38266 - DNA, 50 bp, unidentified
  source 1..50: mol_type = unassigned DNA; note = donor_ca5c218
  misc_feature 1..22: note = RE
  misc_feature 23..25: note = Core
  misc_feature 26..50: note = LE
tttattgacaatctattagctggttcgtattataaggtcaaccggagaaa

SEQ ID NO: 38267 - DNA, 50 bp, unidentified; identical to SEQ ID NO: 31537
  source 1..50: mol_type = unassigned DNA; note = donor_ca5c4df
  misc_feature 1..23: note = RE
  misc_feature 24..25: note = Core
  misc_feature 26..50: note = LE

SEQ ID NO: 38268 - DNA, 50 bp, unidentified; identical to SEQ ID NO: 32586
  source 1..50: mol_type = unassigned DNA; note = donor_ca5c52a
  misc_feature 1..23: note = RE
  misc_feature 24..25: note = Core
  misc_feature 26..50: note = LE

SEQ ID NO: 38269 - DNA, 50 bp, unidentified
  source 1..50: mol_type = unassigned DNA; note = donor_ca60319
  misc_feature 1..24: note = RE
  misc_feature 25: note = Core
  misc_feature 26..50: note = LE
ccgcttgacaggacataggagcatcgttgatactgataacgccctgctcg

SEQ ID NO: 38270 - DNA, 50 bp, unidentified
  source 1..50: mol_type = unassigned DNA; note = donor_ca77d20
  misc_feature 1..23: note = RE
  misc_feature 24..25: note = Core
  misc_feature 26..50: note = LE
aagccgcttgacacacagaggcgctgacttgttgaatgacaaccggatac

SEQ ID NO: 38271 - DNA, 50 bp, unidentified
  source 1..50: mol_type = unassigned DNA; note = donor_ca7c54c
  misc_feature 1..23: note = RE
  misc_feature 24..25: note = Core
  misc_feature 26..50: note = LE
aaaccgcttgatcaagacggatacttgtcttatgctgatcccggctcttg

SEQ ID NO: 38272 - DNA, 50 bp, unidentified
  source 1..50: mol_type = unassigned DNA; note = donor_ca80f54
  misc_feature 1..23: note = RE
  misc_feature 24..25: note = Core
  misc_feature 26..50: note = LE
ttgactgagggtcattccatatcagacaatatggaatgaccggcccgcta

SEQ ID NO: 38273 - DNA, 50 bp, unidentified
  source 1..50: mol_type = unassigned DNA; note = donor_ca998a2
  misc_feature 1..23: note = RE
  misc_feature 24..25: note = Core
  misc_feature 26..50: note = LE
gctcccaacgggccgtccacacatgatgtggtggacggcccttccacctg

SEQ ID NO: 38274 - DNA, 50 bp, unidentified
  source 1..50: mol_type = unassigned DNA; note = donor_ca9bab5
  misc_feature 1..24: note = RE
  misc_feature 25: note = Core
  misc_feature 26..50: note = LE
ccccttgacatatcaccgctggactcgtataataagtttatagttaatag

SEQ ID NO: 38275 - DNA, 50 bp, unidentified
  source 1..50: mol_type = unassigned DNA; note = donor_ca9ec14
  misc_feature 1..21: note = RE
  misc_feature 22..25: note = Core
  misc_feature 26..50: note = LE
tgaccaaaagcatagggacacccccgttacatttattgggtccccgagtg

SEQ ID NO: 38276 - DNA, 50 bp, unidentified; identical to SEQ ID NO: 37379
  source 1..50: mol_type = unassigned DNA; note = donor_caa5d28
  misc_feature 1..24: note = RE
  misc_feature 25: note = Core
  misc_feature 26..50: note = LE

SEQ ID NO: 38277 - DNA, 50 bp, unidentified
  source 1..50: mol_type = unassigned DNA; note = donor_caa9b6f
  misc_feature 1..24: note = RE
  misc_feature 25: note = Core
  misc_feature 26..50: note = LE
ttgcaaaaagagcctgtacatagataatgagatggtcacccccacccggt

SEQ ID NO: 38278 - DNA, 50 bp, unidentified
  source 1..50: mol_type = unassigned DNA; note = donor_caabec7
  misc_feature 1..23: note = RE
  misc_feature 24..25: note = Core
  misc_feature 26..50: note = LE
tgccatgcgggccgttccacatatgatgtggtggaacggcccgctccaca

SEQ ID NO: 38279 - DNA, 50 bp, unidentified; identical to SEQ ID NO: 37262
  source 1..50: mol_type = unassigned DNA; note = donor_cab67a3
  misc_feature 1..23: note = RE
  misc_feature 24..25: note = Core
  misc_feature 26..50: note = LE

SEQ ID NO: 38280 - DNA, 50 bp, unidentified
  source 1..50: mol_type = unassigned DNA; note = donor_cac86de
  misc_feature 1..23: note = RE
  misc_feature 24..25: note = Core
  misc_feature 26..50: note = LE
cttgacttatattaaatagttggctaatatatatatgtagtcctcaaata

SEQ ID NO: 38281 - DNA, 50 bp, unidentified
  source 1..50: mol_type = unassigned DNA; note = donor_cacf14c
  misc_feature 1..23: note = RE
  misc_feature 24..25: note = Core
  misc_feature 26..50: note = LE
gcgggccgggggccgtccacatatgttggggtggacggcccccgacggca

SEQ ID NO: 38282 - DNA, 50 bp, unidentified
  source 1..50: mol_type = unassigned DNA; note = donor_cae7fc0
  misc_feature 1..23: note = RE
  misc_feature 24..25: note = Core
  misc_feature 26..50: note = LE
tatcttgactctttatagttagtctcgtattataaagtagtagtgtttat

SEQ ID NO: 38283 - DNA, 50 bp, unidentified
  source 1..50: mol_type = unassigned DNA; note = donor_caea550
  misc_feature 1..23: note = RE
  misc_feature 24..25: note = Core
  misc_feature 26..50: note = LE
gcgccaaaagggccgtccacacacgttggggtggacggccccgcggcatc

SEQ ID NO: 38284 - DNA, 50 bp, unidentified
  source 1..50: mol_type = unassigned DNA; note = donor_caee69e
  misc_feature 1..23: note = RE
  misc_feature 24..25: note = Core
  misc_feature 26..50: note = LE
tctcttgacttcatatagttagtcttgtataatggaactatagtaattcc

SEQ ID NO: 38285 - DNA, 50 bp, unidentified
  source 1..50: mol_type = unassigned DNA; note = donor_caf5859
  misc_feature 1..24: note = RE
  misc_feature 25: note = Core
  misc_feature 26..50: note = LE
atgcttggaagttagcttagttcttcttaagtttaaattctctaaatttt

SEQ ID NO: 38286 - DNA, 50 bp, unidentified
  source 1..50: mol_type = unassigned DNA; note = donor_cafa773
  misc_feature 1..24: note = RE
  misc_feature 25: note = Core
  misc_feature 26..50: note = LE
aagttcttgacttttcatagttggtgtatgataaatacataaagtattta

SEQ ID NO: 38287 - DNA, 50 bp, unidentified
  source 1..50: mol_type = unassigned DNA; note = donor_cb0298c
  misc_feature 1..21: note = RE
  misc_feature 22..25: note = Core
  misc_feature 26..50: note = LE
agggaccttgacacagggtgtctcattggtgcaccttggcttgcgaacac

SEQ ID NO: 38288 - DNA, 50 bp, unidentified
  source 1..50: mol_type = unassigned DNA; note = donor_cb0a1ea
  misc_feature 1..23: note = RE
  misc_feature 24..25: note = Core
  misc_feature 26..50: note = LE
atgagggcggcatccacaagagaagatggggtggatgccgctctctcccc

SEQ ID NO: 38289 - DNA, 50 bp, unidentified; identical to SEQ ID NO: 32945
  source 1..50: mol_type = unassigned DNA; note = donor_cb0b97b
  misc_feature 1..22: note = RE
  misc_feature 23..25: note = Core
  misc_feature 26..50: note = LE

SEQ ID NO: 38290 - DNA, 50 bp, unidentified
  source 1..50: mol_type = unassigned DNA; note = donor_cb1a52e
  misc_feature 1..22: note = RE
  misc_feature 23..25: note = Core
  misc_feature 26..50: note = LE
ttacttgacttttgttagcaggtctattacaatataatcagaccggaaag

SEQ ID NO: 38291 - DNA, 50 bp, unidentified
  source 1..50: mol_type = unassigned DNA; note = donor_cb1c22c
  misc_feature 1..21: note = RE
  misc_feature 22..25: note = Core
  misc_feature 26..50: note = LE
ccactgcttgacacagggctactcactggtgcaccatccttgtgtcggtg

SEQ ID NO: 38292 - DNA, 50 bp, unidentified; identical to SEQ ID NO: 33497
  source 1..50: mol_type = unassigned DNA; note = donor_cb2c168
  misc_feature 1..24: note = RE
  misc_feature 25: note = Core
  misc_feature 26..50: note = LE

SEQ ID NO: 38293 - DNA, 50 bp, unidentified
  source 1..50: mol_type = unassigned DNA; note = donor_cb3092f
  misc_feature 1..22: note = RE
  misc_feature 23..25: note = Core
  misc_feature 26..50: note = LE
atgttgacaaactattagctggtttcgtattataagatcaactagaaatg

SEQ ID NO: 38294 - DNA, 50 bp, unidentified
  source 1..50: mol_type = unassigned DNA; note = donor_cb3247b
  misc_feature 1..24: note = RE
  misc_feature 25: note = Core
  misc_feature 26..50: note = LE
gttgcaaacgggacgcgttcatataattgaaatgaacgcgtcccgccggt

SEQ ID NO: 38295 - DNA, 50 bp, unidentified
  source 1..50: mol_type = unassigned DNA; note = donor_cb3ac2d
  misc_feature 1..24: note = RE
  misc_feature 25: note = Core
  misc_feature 26..50: note = LE
tgcagttctgggggcgtccatatataatgtaatggacgcccgctttccag

SEQ ID NO: 38296 - DNA, 50 bp, unidentified
  source 1..50: mol_type = unassigned DNA; note = donor_cb3c5e6
  misc_feature 1..23: note = RE
  misc_feature 24..25: note = Core
  misc_feature 26..50: note = LE
tggcaaactgggggcgaccatgtataatgggatggtcgccccctccctaa

SEQ ID NO: 38297 - DNA, 50 bp, unidentified; identical to SEQ ID NO: 31751
  source 1..50: mol_type = unassigned DNA; note = donor_cb458f6
  misc_feature 1..24: note = RE
  misc_feature 25: note = Core
  misc_feature 26..50: note = LE

SEQ ID NO: 38298 - DNA, 50 bp, unidentified
  source 1..50: mol_type = unassigned DNA; note = donor_cb4b227
  misc_feature 1..23: note = RE
  misc_feature 24..25: note = Core
  misc_feature 26..50: note = LE
agtcggcttgatcaagacggatacttgtcttatgctgatctcggctcttg

SEQ ID NO: 38299 - DNA, 50 bp, unidentified; identical to SEQ ID NO: 32489
  source 1..50: mol_type = unassigned DNA; note = donor_cb4b90f
  misc_feature 1..23: note = RE
  misc_feature 24..25: note = Core
  misc_feature 26..50: note = LE

SEQ ID NO: 38300 - DNA, 50 bp, unidentified
  source 1..50: mol_type = unassigned DNA; note = donor_cb52e81
  misc_feature 1..23: note = RE
  misc_feature 24..25: note = Core
  misc_feature 26..50: note = LE
tgttgaaaattacagcgggatgttctaccatcggatttgcagagtgacgg

SEQ ID NO: 38301 - DNA, 50 bp, unidentified; identical to SEQ ID NO: 33873
  source 1..50: mol_type = unassigned DNA; note = donor_cb60d9f
  misc_feature 1..24: note = RE
  misc_feature 25: note = Core
  misc_feature 26..50: note = LE

SEQ ID NO: 38302 - DNA, 50 bp, unidentified
  source 1..50: mol_type = unassigned DNA; note = donor_cb62657
  misc_feature 1..23: note = RE
  misc_feature 24..25: note = Core
  misc_feature 26..50: note = LE
gacaccgccagaacctgggatgtctaatgggttctgccgaagcctctggc

SEQ ID NO: 38303 - DNA, 50 bp, unidentified
  source 1..50: mol_type = unassigned DNA; note = donor_cb670d8
  misc_feature 1..23: note = RE
  misc_feature 24..25: note = Core
  misc_feature 26..50: note = LE
agacttgacattggttagcaagtctggtaccatataagtgtaatatcaat

SEQ ID NO: 38304 - DNA, 50 bp, unidentified
  source 1..50: mol_type = unassigned DNA; note = donor_cb6909e
  misc_feature 1..24: note = RE
  misc_feature 25: note = Core
  misc_feature 26..50: note = LE
gcaaaaacggggggtgaccatagataatgagatggtcaccccctccttgt

SEQ ID NO: 38305 - DNA, 50 bp, unidentified
  source 1..50: mol_type = unassigned DNA; note = donor_cb70d1d
  misc_feature 1..24: note = RE
  misc_feature 25: note = Core
  misc_feature 26..50: note = LE
cggcgtcttgacatagaggggtgcctacgtgtttcattgacgtcaggatt

SEQ ID NO: 38306 - DNA, 50 bp, unidentified
  source 1..50: mol_type = unassigned DNA; note = donor_cb7174e
  misc_feature 1..21: note = RE
  misc_feature 22..25: note = Core
  misc_feature 26..50: note = LE
gacgcggttgacacagggcaactcactggtgcaccatcctcacgttggtg

SEQ ID NO: 38307 - DNA, 50 bp, unidentified; identical to SEQ ID NO: 31628
  source 1..50: mol_type = unassigned DNA; note = donor_cb7292c
  misc_feature 1..24: note = RE
  misc_feature 25: note = Core
  misc_feature 26..50: note = LE

SEQ ID NO: 38308 - DNA, 50 bp, unidentified
  source 1..50: mol_type = unassigned DNA; note = donor_cb78d32
  misc_feature 1..24: note = RE
  misc_feature 25: note = Core
  misc_feature 26..50: note = LE
ctgccccttgacacaaagaggcttctgattgatgatggacatgcgttgcg

SEQ ID NO: 38309 - DNA, 50 bp, unidentified
  source 1..50: mol_type = unassigned DNA; note = donor_cb7cf19
  misc_feature 1..23: note = RE
  misc_feature 24..25: note = Core
  misc_feature 26..50: note = LE
ttgcggacggggcgggccatacgttatggatggcccgcccctcaccggac

SEQ ID NO: 38310 - DNA, 50 bp, unidentified; identical to SEQ ID NO: 31853
  source 1..50: mol_type = unassigned DNA; note = donor_cb7d733
  misc_feature 1..24: note = RE
  misc_feature 25: note = Core
  misc_feature 26..50: note = LE

SEQ ID NO: 38311 - DNA, 50 bp, unidentified; identical to SEQ ID NO: 37847
  source 1..50: mol_type = unassigned DNA; note = donor_cb88e9a
  misc_feature 1..23: note = RE
  misc_feature 24..25: note = Core
  misc_feature 26..50: note = LE

SEQ ID NO: 38312 - DNA, 50 bp, unidentified
  source 1..50: mol_type = unassigned DNA; note = donor_cb8ecf2
  misc_feature 1..22: note = RE
  misc_feature 23..25: note = Core
  misc_feature 26..50: note = LE
gcgaaacgggggccgtccatacatgctgggtggacggcccccgacggcat

SEQ ID NO: 38313 - DNA, 50 bp, unidentified
  source 1..50: mol_type = unassigned DNA; note = donor_cb8ef92
  misc_feature 1..23: note = RE
  misc_feature 24..25: note = Core
  misc_feature 26..50: note = LE
aagcattgacttttattagcaggttggtactgtataagtgtaagtgtaaa

SEQ ID NO: 38314 - DNA, 50 bp, unidentified
  source 1..50: mol_type = unassigned DNA; note = donor_cb97cba
  misc_feature 1..23: note = RE
  misc_feature 24..25: note = Core
  misc_feature 26..50: note = LE
aacgcccttgaccaagacggatacttgtcttatggaatttttggctcctg

SEQ ID NO: 38315 - DNA, 50 bp, unidentified; identical to SEQ ID NO: 34409
  source 1..50: mol_type = unassigned DNA; note = donor_cb99a1c
  misc_feature 1..24: note = RE
  misc_feature 25: note = Core
  misc_feature 26..50: note = LE

SEQ ID NO: 38316 - DNA, 50 bp, unidentified
  source 1..50: mol_type = unassigned DNA; note = donor_cb9d1e5
  misc_feature 1..24: note = RE
  misc_feature 25: note = Core
  misc_feature 26..50: note = LE
tgcagttcggcggcggaccatacatactgagatggtccgccgcttgatca

SEQ ID NO: 38317 - DNA, 50 bp, unidentified; identical to SEQ ID NO: 31800
  source 1..50: mol_type = unassigned DNA; note = donor_cb9e798
  misc_feature 1..23: note = RE
  misc_feature 24..25: note = Core
  misc_feature 26..50: note = LE

SEQ ID NO: 38318 - DNA, 50 bp, unidentified
  source 1..50: mol_type = unassigned DNA; note = donor_cba687a
  misc_feature 1..24: note = RE
  misc_feature 25: note = Core
  misc_feature 26..50: note = LE
cttgcggacggggcgggccatacgtatgggatggcccgcccctcaatccg

SEQ ID NO: 38319 - DNA, 50 bp, unidentified
  source 1..50: mol_type = unassigned DNA; note = donor_cba9bf5
  misc_feature 1..21: note = RE
  misc_feature 22..25: note = Core
  misc_feature 26..50: note = LE
cggaaggttgacacagggtgtctcactggactacctttccggtattcgaa

SEQ ID NO: 38320 - DNA, 50 bp, unidentified
  source 1..50: mol_type = unassigned DNA; note = donor_cbb38a1
  misc_feature 1..24: note = RE
  misc_feature 25: note = Core
  misc_feature 26..50: note = LE
tggcaaaacaggggcgaccatctataatggaatggtcgccccttctctaa

SEQ ID NO: 38321 - DNA, 50 bp, unidentified; identical to SEQ ID NO: 30544
  source 1..50: mol_type = unassigned DNA; note = donor_cbc360e
  misc_feature 1..23: note = RE
  misc_feature 24..25: note = Core
  misc_feature 26..50: note = LE

SEQ ID NO: 38322 - DNA, 50 bp, unidentified
  source 1..50: mol_type = unassigned DNA; note = donor_cbc674c
  misc_feature 1..24: note = RE
  misc_feature 25: note = Core
  misc_feature 26..50: note = LE
ttgcatcgcggggcggaccatatataatggaatggtccgccccgctccca

SEQ ID NO: 38323 - DNA, 50 bp, unidentified; identical to SEQ ID NO: 31600
  source 1..50: mol_type = unassigned DNA; note = donor_cbcec2f
  misc_feature 1..23: note = RE
  misc_feature 24..25: note = Core
  misc_feature 26..50: note = LE

SEQ ID NO: 38324 - DNA, 50 bp, unidentified
  source 1..50: mol_type = unassigned DNA; note = donor_cbd760f
  misc_feature 1..23: note = RE
  misc_feature 24..25: note = Core
  misc_feature 26..50: note = LE
tgacttcgaagaacctgggatgtctaatggtattggccgggtcggtttgg

SEQ ID NO: 38325 - DNA, 50 bp, unidentified
  source 1..50: mol_type = unassigned DNA; note = donor_cbe7790
  misc_feature 1..24: note = RE
  misc_feature 25: note = Core
  misc_feature 26..50: note = LE
accgcttgacaaagcacatagaggcgttacctttttcctggccccgcaat

SEQ ID NO: 38326 - DNA, 50 bp, unidentified
  source 1..50: mol_type = unassigned DNA; note = donor_cbeaa52
  misc_feature 1..23: note = RE
  misc_feature 24..25: note = Core
  misc_feature 26..50: note = LE
gcaggcagggcgccgtccacatatgatggggtggacggcgcccgacggca

SEQ ID NO: 38327 - DNA, 50 bp, unidentified
  source 1..50: mol_type = unassigned DNA; note = donor_cbed0e8
  misc_feature 1..23: note = RE
  misc_feature 24..25: note = Core
  misc_feature 26..50: note = LE
gcttgaaatttccagcgggatgatctaccatcggaatttgcaggtgacag

SEQ ID NO: 38328 - DNA, 50 bp, unidentified; identical to SEQ ID NO: 31794
  source 1..50: mol_type = unassigned DNA; note = donor_cbf0447
  misc_feature 1..23: note = RE
  misc_feature 24..25: note = Core
  misc_feature 26..50: note = LE

SEQ ID NO: 38329 - DNA, 50 bp, unidentified
  source 1..50: mol_type = unassigned DNA; note = donor_cbf137e
  misc_feature 1..22: note = RE
  misc_feature 23..25: note = Core
  misc_feature 26..50: note = LE
ccaactcggagccgtccacacatgatgctgtggacggctcctccacgggc

SEQ ID NO: 38330 - DNA, 50 bp, unidentified
  source 1..50: mol_type = unassigned DNA; note = donor_cbf69cd
  misc_feature 1..24: note = RE
  misc_feature 25: note = Core
  misc_feature 26..50: note = LE
agtacttgacaaacatagaagggtctgtgagtcttgaattagttggtctg

SEQ ID NO: 38331 - DNA, 50 bp, unidentified
  source 1..50: mol_type = unassigned DNA; note = donor_cc049be
  misc_feature 1..21: note = RE
  misc_feature 22..25: note = Core
  misc_feature 26..50: note = LE
atcatgggcggcaaccacagaagatggggtggttgccgccctcccagacg

SEQ ID NO: 38332 - DNA, 50 bp, unidentified
  source 1..50: mol_type = unassigned DNA; note = donor_cc07032
  misc_feature 1..23: note = RE
  misc_feature 24..25: note = Core
  misc_feature 26..50: note = LE
tgcttgaaaccaagacagttactaatctatcttctttaaaagcaccttga

SEQ ID NO: 38333 - DNA, 50 bp, unidentified
  source 1..50: mol_type = unassigned DNA; note = donor_cc0e566
  misc_feature 1..21: note = RE
  misc_feature 22..25: note = Core
  misc_feature 26..50: note = LE
ttgacgaaatccatagggacaccccgttaccttgttcgtgggcccggcac

SEQ ID NO: 38334 - DNA, 50 bp, unidentified
  source 1..50: mol_type = unassigned DNA; note = donor_cc118b7
  misc_feature 1..21: note = RE
  misc_feature 22..25: note = Core
  misc_feature 26..50: note = LE
ttgaccaaaagcatagggacaccccgttacatttatttgagtcctcgaag

SEQ ID NO: 38335 - DNA, 50 bp, unidentified
  source 1..50: mol_type = unassigned DNA; note = donor_cc15435
  misc_feature 1..21: note = RE
  misc_feature 22..25: note = Core
  misc_feature 26..50: note = LE
caatttgacaaaacttagataatcacgtataatgttgaacataaagattt

SEQ ID NO: 38336 - DNA, 50 bp, unidentified
  source 1..50: mol_type = unassigned DNA; note = donor_cc20921
  misc_feature 1..24: note = RE
  misc_feature 25: note = Core
  misc_feature 26..50: note = LE
ggcaaacgaggaggagtccatatacaatgggatggactcctcctcacctt

SEQ ID NO: 38337 - DNA, 50 bp, unidentified
  source 1..50: mol_type = unassigned DNA; note = donor_cc240c6
  misc_feature 1..24: note = RE
  misc_feature 25: note = Core
  misc_feature 26..50: note = LE
ttggcaaaccggggcgaccatctataatgggatggccgcccctccctaag

SEQ ID NO: 38338 - DNA, 50 bp, unidentified; identical to SEQ ID NO: 31193
  source 1..50: mol_type = unassigned DNA; note = donor_cc27b51
  misc_feature 1..22: note = RE
  misc_feature 23..25: note = Core
  misc_feature 26..50: note = LE

SEQ ID NO: 38339 - DNA, 50 bp, unidentified
  source 1..50: mol_type = unassigned DNA; note = donor_cc28161
  misc_feature 1..23: note = RE
  misc_feature 24..25: note = Core
  misc_feature 26..50: note = LE
aagccgcttgaccacaacggatacttgtcttatgacctttccaccgactg

SEQ ID NO: 38340 - DNA, 50 bp, unidentified
  source 1..50: mol_type = unassigned DNA; note = donor_cc29426
  misc_feature 1..23: note = RE
  misc_feature 24..25: note = Core
  misc_feature 26..50: note = LE
tatgcttgaactcaagacagttacttgtatcttctttaaaggcgtcctga

SEQ ID NO: 38341 - DNA, 50 bp, unidentified; identical to SEQ ID NO: 37484
  source 1..50: mol_type = unassigned DNA; note = donor_cc39aba
  misc_feature 1..23: note = RE
  misc_feature 24..25: note = Core
  misc_feature 26..50: note = LE

SEQ ID NO: 38342 - DNA, 50 bp, unidentified
  source 1..50: mol_type = unassigned DNA; note = donor_cc4f8b3
  misc_feature 1..23: note = RE
  misc_feature 24..25: note = Core
  misc_feature 26..50: note = LE
gcaatcaggcgacggaccatacataatgggatggtccgtcgtcttccaga

SEQ ID NO: 38343 - DNA, 50 bp, unidentified
  source 1..50: mol_type = unassigned DNA; note = donor_cc52644
  misc_feature 1..23: note = RE
  misc_feature 24..25: note = Core
  misc_feature 26..50: note = LE
gcttgacacggtcattgagattttccttaagaatgtgaggcggtccggga

SEQ ID NO: 38344 - DNA, 50 bp, unidentified; identical to SEQ ID NO: 30493
  source 1..50: mol_type = unassigned DNA; note = donor_cc557a7
  misc_feature 1..23: note = RE
  misc_feature 24..25: note = Core
  misc_feature 26..50: note = LE

SEQ ID NO: 38345 - DNA, 50 bp, unidentified
  source 1..50: mol_type = unassigned DNA; note = donor_cc5a125
  misc_feature 1..23: note = RE
  misc_feature 24..25: note = Core
  misc_feature 26..50: note = LE
gacccgcttgaccaagacggatacttgtcttatgacttccctcggctcct

SEQ ID NO: 38346 - DNA, 50 bp, unidentified
  source 1..50: mol_type = unassigned DNA; note = donor_cc680aa
  misc_feature 1..23: note = RE
  misc_feature 24..25: note = Core
  misc_feature 26..50: note = LE
gcatttccagaggcgtccacacacgatggggtggacgcctcctaacggca

SEQ ID NO: 38347 - DNA, 50 bp, unidentified
  source 1..50: mol_type = unassigned DNA; note = donor_cc6b0ae
  misc_feature 1..22: note = RE
  misc_feature 23..25: note = Core
  misc_feature 26..50: note = LE
ggcttgacatcagcattgggaagccctactttcttgattgttgggttcga

SEQ ID NO: 38348 - DNA, 50 bp, unidentified
  source 1..50: mol_type = unassigned DNA; note = donor_cc6dc91
  misc_feature 1..24: note = RE
  misc_feature 25: note = Core
  misc_feature 26..50: note = LE
ttgcaaaaggggatggttcatatataatgtaatgaaccatccctacccac

SEQ ID NO: 38349 - DNA, 50 bp, unidentified
  source 1..50: mol_type = unassigned DNA; note = donor_cc6f2d1
  misc_feature 1..23: note = RE
  misc_feature 24..25: note = Core
  misc_feature 26..50: note = LE
tgacacttaagctcctgggatgtctaatgagtgttggcgagcctgctgtc

SEQ ID NO: 38350 - DNA, 50 bp, unidentified
  source 1..50: mol_type = unassigned DNA; note = donor_cc72094
  misc_feature 1..24: note = RE
  misc_feature 25: note = Core
  misc_feature 26..50: note = LE
cgcacaaaccggggcgtccatagataatgggatggacgcccctcttaagc

SEQ ID NO: 38351 - DNA, 50 bp, unidentified
  source 1..50: mol_type = unassigned DNA; note = donor_cc8bd78
  misc_feature 1..24: note = RE
  misc_feature 25: note = Core
  misc_feature 26..50: note = LE
acaccccttgacacaaagaggcttctgatggaggatctgggcgggcgttg

SEQ ID NO: 38352 - DNA, 50 bp, unidentified
  source 1..50: mol_type = unassigned DNA; note = donor_cc8ef41
  misc_feature 1..22: note = RE
  misc_feature 23..25: note = Core
  misc_feature 26..50: note = LE
tgtggctcttgacatagagggtcttatatgttaatatttttccaagccct

SEQ ID NO: 38353 - DNA, 50 bp, unidentified; identical to SEQ ID NO: 31549
  source 1..50: mol_type = unassigned DNA; note = donor_cc942b6
  misc_feature 1..22: note = RE
  misc_feature 23..25: note = Core
  misc_feature 26..50: note = LE

SEQ ID NO: 38354 - DNA, 50 bp, unidentified
  source 1..50: mol_type = unassigned DNA; note = donor_cca2ee3
  misc_feature 1..24: note = RE
  misc_feature 25: note = Core
  misc_feature 26..50: note = LE
aacacttgactttttattagcaggcctaatatataagtgtagggtttcag

SEQ ID NO: 38355 - DNA, 50 bp, unidentified
  source 1..50: mol_type = unassigned DNA; note = donor_cca3309
  misc_feature 1..23: note = RE
  misc_feature 24..25: note = Core
  misc_feature 26..50: note = LE
gccaacaggatgccgtccacacatgatgctgtggacggcagccatcaccc

SEQ ID NO: 38356 - DNA, 50 bp, unidentified; identical to SEQ ID NO: 32562
  source 1..50: mol_type = unassigned DNA; note = donor_ccaaaa3
  misc_feature 1..23: note = RE
  misc_feature 24..25: note = Core
  misc_feature 26..50: note = LE

SEQ ID NO: 38357 - DNA, 50 bp, unidentified
  source 1..50: mol_type = unassigned DNA; note = donor_ccd15c7
  misc_feature 1..22: note = RE
  misc_feature 23..25: note = Core
  misc_feature 26..50: note = LE
caatgagggaggagaccatatacgatgagatggtctcctccctcccccct

SEQ ID NO: 38358 - DNA, 50 bp, unidentified
  source 1..50: mol_type = unassigned DNA; note = donor_cce0564
  misc_feature 1..24: note = RE
  misc_feature 25: note = Core
  misc_feature 26..50: note = LE
tggcattatcggagcgtccatataataatgagatggacgctccaacgttg

SEQ ID NO: 38359 - DNA, 50 bp, unidentified; identical to SEQ ID NO: 34994
  source 1..50: mol_type = unassigned DNA; note = donor_cce1328
  misc_feature 1..24: note = RE
  misc_feature 25: note = Core
  misc_feature 26..50: note = LE

SEQ ID NO: 38360 - DNA, 50 bp, unidentified
  source 1..50: mol_type = unassigned DNA; note = donor_cce544b
  misc_feature 1..23: note = RE
  misc_feature 24..25: note = Core
  misc_feature 26..50: note = LE
tcgcttgactgacaagacggttgcttgtatctttaagcctcggaccggct

SEQ ID NO: 38361 - DNA, 50 bp, unidentified; identical to SEQ ID NO: 31773
  source 1..50: mol_type = unassigned DNA; note = donor_cce6874
  misc_feature 1..24: note = RE
  misc_feature 25: note = Core
  misc_feature 26..50: note = LE

SEQ ID NO: 38362 - DNA, 50 bp, unidentified
  source 1..50: mol_type = unassigned DNA; note = donor_ccf1ad3
  misc_feature 1..21: note = RE
  misc_feature 22..25: note = Core
  misc_feature 26..50: note = LE
agttcctggagagagagagagagcgtacacaaaaccttcggctctgtgac

SEQ ID NO: 38363 - DNA, 50 bp, unidentified
  source 1..50: mol_type = unassigned DNA; note = donor_ccf4ede
  misc_feature 1..24: note = RE
  misc_feature 25: note = Core
  misc_feature 26..50: note = LE
tgcaaaagaggaggagtccatacacaatgggatggactcctcctcatccg

SEQ ID NO: 38364 - DNA, 50 bp, unidentified
  source 1..50: mol_type = unassigned DNA; note = donor_ccf5cd9
  misc_feature 1..23: note = RE
  misc_feature 24..25: note = Core
  misc_feature 26..50: note = LE
agtcggcaacctcttaatggttgcttgtattagcgcccagcgttacattg

SEQ ID NO: 38365 - DNA, 50 bp, unidentified
  source 1..50: mol_type = unassigned DNA; note = donor_cd001ba
  misc_feature 1..23: note = RE
  misc_feature 24..25: note = Core
  misc_feature 26..50: note = LE
tgacatctacgcccctgggatgtctaatcagttctaggagtgagccatcc

SEQ ID NO: 38366 - DNA, 50 bp, unidentified
  source 1..50: mol_type = unassigned DNA; note = donor_cd2ba41
  misc_feature 1..22: note = RE
  misc_feature 23..25: note = Core
  misc_feature 26..50: note = LE
tgcaaacaggatgcgttcatatagaatgtaatgagcgcatcccaatcact

SEQ ID NO: 38367 - DNA, 50 bp, unidentified
  source 1..50: mol_type = unassigned DNA; note = donor_cd32405
  misc_feature 1..20: note = RE
  misc_feature 21..25: note = Core
  misc_feature 26..50: note = LE
gacaggaaccatagggacaccccccgttaccttctaggtatccccgatgg

SEQ ID NO: 38368 - DNA, 50 bp, unidentified
  source 1..50: mol_type = unassigned DNA; note = donor_cd43c82
  misc_feature 1..20: note = RE
  misc_feature 21..25: note = Core
  misc_feature 26..50: note = LE
ggcggcttgacacagggctactcactggtggacccttgtgtcgtcagtgg

SEQ ID NO: 38369 - DNA, 50 bp, unidentified
  source 1..50: mol_type = unassigned DNA; note = donor_cd4b26a
  misc_feature 1..23: note = RE
  misc_feature 24..25: note = Core
  misc_feature 26..50: note = LE
gtatccagcggggcgtccacacacgttggggtggacgccgcctgacggca

SEQ ID NO: 38370 - DNA, 50 bp, unidentified; identical to SEQ ID NO: 30575
  source 1..50: mol_type = unassigned DNA; note = donor_cd4e74c
  misc_feature 1..23: note = RE
  misc_feature 24..25: note = Core
  misc_feature 26..50: note = LE

SEQ ID NO: 38371 - DNA, 50 bp, unidentified; identical to SEQ ID NO: 30709
  source 1..50: mol_type = unassigned DNA; note = donor_cd66c34
  misc_feature 1..23: note = RE
  misc_feature 24..25: note = Core
  misc_feature 26..50: note = LE

SEQ ID NO: 38372 - DNA, 50 bp, unidentified; identical to SEQ ID NO: 31948
  source 1..50: mol_type = unassigned DNA; note = donor_cd6a9ec
  misc_feature 1..23: note = RE
  misc_feature 24..25: note = Core
  misc_feature 26..50: note = LE

SEQ ID NO: 38373 - DNA, 50 bp, unidentified; identical to SEQ ID NO: 30779
  source 1..50: mol_type = unassigned DNA; note = donor_cd6ad0d
  misc_feature 1..24: note = RE
  misc_feature 25: note = Core
  misc_feature 26..50: note = LE

SEQ ID NO: 38374 - DNA, 50 bp, unidentified
  source 1..50: mol_type = unassigned DNA; note = donor_cd6c0b8
  misc_feature 1..24: note = RE
  misc_feature 25: note = Core
  misc_feature 26..50: note = LE
gcaaaatgtgggcgtccatgtatgatggaatggacgcccacttccccaac

SEQ ID NO: 38375 - DNA, 50 bp, unidentified; identical to SEQ ID NO: 32559
  source 1..50: mol_type = unassigned DNA; note = donor_cd71266
  misc_feature 1..24: note = RE
  misc_feature 25: note = Core
  misc_feature 26..50: note = LE

SEQ ID NO: 38376 - DNA, 50 bp, unidentified
  source 1..50: mol_type = unassigned DNA; note = donor_cd725fd
  misc_feature 1..22: note = RE
  misc_feature 23..25: note = Core
  misc_feature 26..50: note = LE
acaacctacggtcctgggatgtctaatgggatctgatcagcgagcctgcg

SEQ ID NO: 38377 - DNA, 50 bp, unidentified
  source 1..50: mol_type = unassigned DNA; note = donor_cd7b0f8
  misc_feature 1..22: note = RE
  misc_feature 23..25: note = Core
  misc_feature 26..50: note = LE
ccagctgggggccatccacacatgatggggtggatggccccctcacggca

SEQ ID NO: 38378 - DNA, 50 bp, unidentified
  source 1..50: mol_type = unassigned DNA; note = donor_cd7c4ba
  misc_feature 1..24: note = RE
  misc_feature 25: note = Core
  misc_feature 26..50: note = LE
tgactgttcggggaagtccttatagaatggaagggacttcccctggatat

SEQ ID NO: 38379 - DNA, 50 bp, unidentified
  source 1..50: mol_type = unassigned DNA; note = donor_cd7cf59
  misc_feature 1..20: note = RE
  misc_feature 21..25: note = Core
  misc_feature 26..50: note = LE
cttgacttcatatagctggtctcctatctttaagtagttgcatttctagg

SEQ ID NO: 38380 - DNA, 50 bp, unidentified
  source 1..50: mol_type = unassigned DNA; note = donor_cd83820
  misc_feature 1..24: note = RE
  misc_feature 25: note = Core
  misc_feature 26..50: note = LE
tttgattgatttttgtttcacactttcctccatttccccgcgccttcgtt

SEQ ID NO: 38381 - DNA, 50 bp, unidentified
  source 1..50: mol_type = unassigned DNA; note = donor_cd8d120
  misc_feature 1..23: note = RE
  misc_feature 24..25: note = Core
  misc_feature 26..50: note = LE
cggcttgacatcagcattgggaagtcctacctttcaagcgggtctgatct

SEQ ID NO: 38382 - DNA, 50 bp, unidentified; identical to SEQ ID NO: 30475
  source 1..50: mol_type = unassigned DNA; note = donor_cd8f907
  misc_feature 1..23: note = RE
  misc_feature 24..25: note = Core
  misc_feature 26..50: note = LE

SEQ ID NO: 38383 - DNA, 50 bp, unidentified
  source 1..50: mol_type = unassigned DNA; note = donor_cd9f274
  misc_feature 1..23: note = RE
  misc_feature 24..25: note = Core
  misc_feature 26..50: note = LE
gcaatcaggcgacggaccatacataatgggatggtccgtcgtcttcaact

SEQ ID NO: 38384 - DNA, 50 bp, unidentified; identical to SEQ ID NO: 30381
  source 1..50: mol_type = unassigned DNA; note = donor_cda010f
  misc_feature 1..24: note = RE
  misc_feature 25: note = Core
  misc_feature 26..50: note = LE

SEQ ID NO: 38385 - DNA, 50 bp, unidentified
  source 1..50: mol_type = unassigned DNA; note = donor_cdb8df5
  misc_feature 1..24: note = RE
  misc_feature 25: note = Core
  misc_feature 26..50: note = LE
aaacgttgcgtaagtcttagaatacctttagacttgccttcgtaacttca

SEQ ID NO: 38386 - DNA, 50 bp, unidentified; identical to SEQ ID NO: 32756
  source 1..50: mol_type = unassigned DNA; note = donor_cdc2e2d
  misc_feature 1..23: note = RE
  misc_feature 24..25: note = Core
  misc_feature 26..50: note = LE

SEQ ID NO: 38387 - DNA, 50 bp, unidentified
  source 1..50: mol_type = unassigned DNA; note = donor_cdc3af6
  misc_feature 1..24: note = RE
  misc_feature 25: note = Core
  misc_feature 26..50: note = LE
tgcaacgcacggccggaccatacataatggaatggtccggccgtgttccg

SEQ ID NO: 38388 - DNA, 50 bp, unidentified; identical to SEQ ID NO: 32300
  source 1..50: mol_type = unassigned DNA; note = donor_cdc606d
  misc_feature 1..23: note = RE
  misc_feature 24..25: note = Core
  misc_feature 26..50: note = LE

SEQ ID NO: 38389 - DNA, 50 bp, unidentified
  source 1..50: mol_type = unassigned DNA; note = donor_cdc9086
  misc_feature 1..23: note = RE
  misc_feature 24..25: note = Core
  misc_feature 26..50: note = LE
tgcagacggggcgggccatacgtttatgggatggcccgcccctcttcctg

SEQ ID NO: 38390 - DNA, 50 bp, unidentified
  source 1..50: mol_type = unassigned DNA; note = donor_cdc9a6c
  misc_feature 1..21: note = RE
  misc_feature 22..25: note = Core
  misc_feature 26..50: note = LE
cctgaggttgacacagggagtgtcactagggcaccatccttcctacgagg

SEQ ID NO: 38391 - DNA, 50 bp, unidentified
  source 1..50: mol_type = unassigned DNA; note = donor_cdccef3
  misc_feature 1..21: note = RE
  misc_feature 22..25: note = Core
  misc_feature 26..50: note = LE
ggcttgacttcgtcattgagattccctaagaatggttggcggtccgggag

SEQ ID NO: 38392 - DNA, 50 bp, unidentified
  source 1..50: mol_type = unassigned DNA; note = donor_cddaf9d
  misc_feature 1..23: note = RE
  misc_feature 24..25: note = Core
  misc_feature 26..50: note = LE
gacacgctaagcccctgggatgtctaataaggggtaccgggtcgcctttg

SEQ ID NO: 38393 - DNA, 50 bp, unidentified
  source 1..50: mol_type = unassigned DNA; note = donor_cde4cf7
  misc_feature 1..23: note = RE
  misc_feature 24..25: note = Core
  misc_feature 26..50: note = LE
gagcttgacatcggagacggttacttgtatgtttaagccggaccagcgcg

SEQ ID NO: 38394 - DNA, 50 bp, unidentified
  source 1..50: mol_type = unassigned DNA; note = donor_cdef819
  misc_feature 1..24: note = RE
  misc_feature 25: note = Core
  misc_feature 26..50: note = LE
tgcaaaacgggaggtgtccatatacaatggtatggacccctcccacctta

SEQ ID NO: 38395 - DNA, 50 bp, unidentified; identical to SEQ ID NO: 30717
  source 1..50: mol_type = unassigned DNA; note = donor_cdf25cf
  misc_feature 1..23: note = RE
  misc_feature 24..25: note = Core
  misc_feature 26..50: note = LE

SEQ ID NO: 38396 - DNA, 50 bp, unidentified
  source 1..50: mol_type = unassigned DNA; note = donor_cdf82c1
  misc_feature 1..23: note = RE
  misc_feature 24..25: note = Core
  misc_feature 26..50: note = LE
tgacaaatttcaggatgggatgtctaatgagatcagtcgggtccgcttct

SEQ ID NO: 38397 - DNA, 50 bp, unidentified
  source 1..50: mol_type = unassigned DNA; note = donor_cdfb253
  misc_feature 1..22: note = RE
  misc_feature 23..25: note = Core
  misc_feature 26..50: note = LE
gaggctgtatgagaagacagttgcttgtgtctgccagcttgtctagcatt

SEQ ID NO: 38398 - DNA, 50 bp, unidentified
  source 1..50: mol_type = unassigned DNA; note = donor_cdfb9f8
  misc_feature 1..24: note = RE
  misc_feature 25: note = Core
  misc_feature 26..50: note = LE
tgcaacgcacggtcggtccatacataatgggatggaccgaccgtgctctt

SEQ ID NO: 38399 - DNA, 50 bp, unidentified
  source 1..50: mol_type = unassigned DNA; note = donor_ce13850
  misc_feature 1..24: note = RE
  misc_feature 25: note = Core
  misc_feature 26..50: note = LE
cggcttgacaacccataggagcgtctgtgaggatcgacagcgcagcctga

SEQ ID NO: 38400 - DNA, 50 bp, unidentified
  source 1..50: mol_type = unassigned DNA; note = donor_ce1b039
  misc_feature 1..23: note = RE
  misc_feature 24..25: note = Core
  misc_feature 26..50: note = LE
gcaaagacgggggcgtccacacatgatggggtggacgccccctgctcccc

SEQ ID NO: 38401 - DNA, 50 bp, unidentified
  source 1..50: mol_type = unassigned DNA; note = donor_ce200e2
  misc_feature 1..22: note = RE
  misc_feature 23..25: note = Core
  misc_feature 26..50: note = LE
caaagagggaggggaccatatacgatgagatggtctcctccctctccctc

SEQ ID NO: 38402 - DNA, 50 bp, unidentified
  source 1..50: mol_type = unassigned DNA; note = donor_ce21be3
  misc_feature 1..24: note = RE
  misc_feature 25: note = Core
  misc_feature 26..50: note = LE
aggcctcttgacacagaagggagcctactagttctattgaccttaggtcg

SEQ ID NO: 38403 - DNA, 50 bp, unidentified; identical to SEQ ID NO: 30609
  source 1..50: mol_type = unassigned DNA; note = donor_ce22de2
  misc_feature 1..22: note = RE
  misc_feature 23..25: note = Core
  misc_feature 26..50: note = LE

SEQ ID NO: 38404 - DNA, 50 bp, unidentified
  source 1..50: mol_type = unassigned DNA; note = donor_ce24a5e
  misc_feature 1..23: note = RE
  misc_feature 24..25: note = Core
  misc_feature 26..50: note = LE
gcttccgcaggggcgtccacagatgatggggtggacgccccccgacggca

SEQ ID NO: 38405 - DNA, 50 bp, unidentified
  source 1..50: mol_type = unassigned DNA; note = donor_ce282dc
  misc_feature 1..23: note = RE
  misc_feature 24..25: note = Core
  misc_feature 26..50: note = LE
gcaaggagggggtcgtccacatatgttggggtggacgacccccgaacggc

SEQ ID NO: 38406 - DNA, 50 bp, unidentified
  source 1..50: mol_type = unassigned DNA; note = donor_ce2a95f
  misc_feature 1..23: note = RE
  misc_feature 24..25: note = Core
  misc_feature 26..50: note = LE
actattgactttttctttgcaggctcctgatctactacaatgtttttatg

SEQ ID NO: 38407 - DNA, 50 bp, unidentified
  source 1..50: mol_type = unassigned DNA; note = donor_ce3718e
  misc_feature 1..23: note = RE
  misc_feature 24..25: note = Core
  misc_feature 26..50: note = LE
cagtcgagatatcaagacgatatcttgtatctcgactttgtcttctcaga

SEQ ID NO: 38408 - DNA, 50 bp, unidentified
  source 1..50: mol_type = unassigned DNA; note = donor_ce38db9
  misc_feature 1..23: note = RE
  misc_feature 24..25: note = Core
  misc_feature 26..50: note = LE
gcatcgcccgaggtatccacacatgatggtgtggatacctcacccagaaa

SEQ ID NO: 38409 - DNA, 50 bp, unidentified; identical to SEQ ID NO: 37541
  source 1..50: mol_type = unassigned DNA; note = donor_ce3bb86
  misc_feature 1..20: note = RE
  misc_feature 21..25: note = Core
  misc_feature 26..50: note = LE

SEQ ID NO: 38410 - DNA, 50 bp, unidentified
  source 1..50: mol_type = unassigned DNA; note = donor_ce3fea4
  misc_feature 1..24: note = RE
  misc_feature 25: note = Core
  misc_feature 26..50: note = LE
ctgcttcttgacacagaggggcgcctacttgtttcattgatctacgaccg

SEQ ID NO: 38411 - DNA, 50 bp, unidentified
  source 1..50: mol_type = unassigned DNA; note = donor_ce43f1c
  misc_feature 1..24: note = RE
  misc_feature 25: note = Core
  misc_feature 26..50: note = LE
acggcttgacgaaaaccatagaggcgttaccgtcttcgtggccctgaaac

SEQ ID NO: 38412 - DNA, 50 bp, unidentified
  source 1..50: mol_type = unassigned DNA; note = donor_ce473bf
  misc_feature 1..24: note = RE
  misc_feature 25: note = Core
  misc_feature 26..50: note = LE
tgcgacgcacggccgggccatacataatgggatggcccggccgtgctcag

SEQ ID NO: 38413 - DNA, 50 bp, unidentified
  source 1..50: mol_type = unassigned DNA; note = donor_ce4e972
  misc_feature 1..23: note = RE
  misc_feature 24..25: note = Core
  misc_feature 26..50: note = LE
ctccttgactttttattagccggctcctacaataagattacaaggtacag

SEQ ID NO: 38414 - DNA, 50 bp, unidentified
  source 1..50: mol_type = unassigned DNA; note = donor_ce5477e
  misc_feature 1..23: note = RE
  misc_feature 24..25: note = Core
  misc_feature 26..50: note = LE
caagttgacatctcacctctggactcgtataaatatgtatatctacattt

SEQ ID NO: 38415 - DNA, 50 bp, unidentified
  source 1..50: mol_type = unassigned DNA; note = donor_ce54d11
  misc_feature 1..22: note = RE
  misc_feature 23..25: note = Core
  misc_feature 26..50: note = LE
caagccggggagccatccacacatgatggtgtggacggctccccactcgg

SEQ ID NO: 38416 - DNA, 50 bp, unidentified
  source 1..50: mol_type = unassigned DNA; note = donor_ce65ae2
  misc_feature 1..22: note = RE
  misc_feature 23..25: note = Core
  misc_feature 26..50: note = LE
ctattgacttttaatagttagtcttgtattatagagtagtagtgtttata

SEQ ID NO: 38417 - DNA, 50 bp, unidentified
  source 1..50: mol_type = unassigned DNA; note = donor_ce67849
  misc_feature 1..23: note = RE
  misc_feature 24..25: note = Core
  misc_feature 26..50: note = LE
tgacacctaagcccctgggatgtctaatgagagctagcgggtcggcatcc

SEQ ID NO: 38418 - DNA, 50 bp, unidentified
  source 1..50: mol_type = unassigned DNA; note = donor_ce6c8a3
  misc_feature 1..23: note = RE
  misc_feature 24..25: note = Core
  misc_feature 26..50: note = LE
tggcttgacaccccttaggaactcatttagccttggagtaggtccgcggc

SEQ ID NO: 38419 - DNA, 50 bp, unidentified; identical to SEQ ID NO: 30383
  source 1..50: mol_type = unassigned DNA; note = donor_ce74977
  misc_feature 1..23: note = RE
  misc_feature 24..25: note = Core
  misc_feature 26..50: note = LE

SEQ ID NO: 38420 - DNA, 50 bp, unidentified
  source 1..50: mol_type = unassigned DNA; note = donor_ce80fc6
  misc_feature 1..23: note = RE
  misc_feature 24..25: note = Core
  misc_feature 26..50: note = LE
aagtaacttgatcaagacggatacttgtcttatcctgaacctggctcttg

SEQ ID NO: 38421 - DNA, 50 bp, unidentified
  source 1..50: mol_type = unassigned DNA; note = donor_ce8d7c3
  misc_feature 1..23: note = RE
  misc_feature 24..25: note = Core
  misc_feature 26..50: note = LE
atagtttgaatatgtcatagaaatcctttagatttgtattgtaaaaaatt

SEQ ID NO: 38422 - DNA, 50 bp, unidentified
  source 1..50: mol_type = unassigned DNA; note = donor_ce9006e
  misc_feature 1..22: note = RE
  misc_feature 23..25: note = Core
  misc_feature 26..50: note = LE
tgcggacggggcgggccatacgttatgggatggcccgcccctctccggag

SEQ ID NO: 38423 - DNA, 50 bp, unidentified
  source 1..50: mol_type = unassigned DNA; note = donor_ce9b4c6
  misc_feature 1..23: note = RE
  misc_feature 24..25: note = Core
  misc_feature 26..50: note = LE
cgcctgaggttgacagagggtgtctgatggcactaccttcctttcgcacg

SEQ ID NO: 38424 - DNA, 50 bp, unidentified
  source 1..50: mol_type = unassigned DNA; note = donor_ce9ba28
  misc_feature 1..24: note = RE
  misc_feature 25: note = Core
  misc_feature 26..50: note = LE
gcccacgcgttgacatagaagcatctattggtacacagtgttggtgccgg

SEQ ID NO: 38425 - DNA, 50 bp, unidentified
  source 1..50: mol_type = unassigned DNA; note = donor_ce9c4c3
  misc_feature 1..24: note = RE
  misc_feature 25: note = Core
  misc_feature 26..50: note = LE
gaacttgttttttaactcagttcttcttaagtttgattctgattaaatta

SEQ ID NO: 38426 - DNA, 50 bp, unidentified
  source 1..50: mol_type = unassigned DNA; note = donor_ceace9f
  misc_feature 1..23: note = RE
  misc_feature 24..25: note = Core
  misc_feature 26..50: note = LE
gttgacattggggagtccacataagataattggactccccttcctcatag

SEQ ID NO: 38427 - DNA, 50 bp, unidentified
  source 1..50: mol_type = unassigned DNA; note = donor_ceba7c0
  misc_feature 1..23: note = RE
  misc_feature 24..25: note = Core
  misc_feature 26..50: note = LE
ggacttgacaagcgataccgtatctcgtatattgagagggtccgattcct

SEQ ID NO: 38428 - DNA, 50 bp, unidentified
  source 1..50: mol_type = unassigned DNA; note = donor_cec045d
  misc_feature 1..22: note = RE
  misc_feature 23..25: note = Core
  misc_feature 26..50: note = LE
catccgcggggccgtctatacatgatggggaagacggccccgctccctcg

SEQ ID NO: 38429 - DNA, 50 bp, unidentified
  source 1..50: mol_type = unassigned DNA; note = donor_cec3880
  misc_feature 1..21: note = RE
  misc_feature 22..25: note = Core
  misc_feature 26..50: note = LE
aggaggcttgacacagggctactcactggtgcaccctccccggggaggta

SEQ ID NO: 38430 - DNA, 50 bp, unidentified
  source 1..50: mol_type = unassigned DNA; note = donor_cecbd9c
  misc_feature 1..23: note = RE
  misc_feature 24..25: note = Core
  misc_feature 26..50: note = LE
gcagagcgggggccgtccatagatgatgggatggacggcccccgtttccg

SEQ ID NO: 38431 - DNA, 50 bp, unidentified
  source 1..50: mol_type = unassigned DNA; note = donor_cece387
  misc_feature 1..23: note = RE
  misc_feature 24..25: note = Core
  misc_feature 26..50: note = LE
gcacttacgggggtgtccacagatgatggggtggacacccccctcgacgg

SEQ ID NO: 38432 - DNA, 50 bp, unidentified; identical to SEQ ID NO: 32462
  source 1..50: mol_type = unassigned DNA; note = donor_ced0984
  misc_feature 1..23: note = RE
  misc_feature 24..25: note = Core
  misc_feature 26..50: note = LE

SEQ ID NO: 38433 - DNA, 50 bp, unidentified
  source 1..50: mol_type = unassigned DNA; note = donor_ced3a6f
  misc_feature 1..22: note = RE
  misc_feature 23..25: note = Core
  misc_feature 26..50: note = LE
gtaaataatttacaacatagttgattgtaagttaaatctccagtataatt

SEQ ID NO: 38434 - DNA, 50 bp, unidentified
  source 1..50: mol_type = unassigned DNA; note = donor_ced4e21
  misc_feature 1..23: note = RE
  misc_feature 24..25: note = Core
  misc_feature 26..50: note = LE
gcaaaccggggagcgtccatgtaagatggtatggacgctccccgttctgc

SEQ ID NO: 38435 - DNA, 50 bp, unidentified; identical to SEQ ID NO: 34514
  source 1..50: mol_type = unassigned DNA; note = donor_ced61ee
  misc_feature 1..23: note = RE
  misc_feature 24..25: note = Core
  misc_feature 26..50: note = LE

SEQ ID NO: 38436 - DNA, 50 bp, unidentified
  source 1..50: mol_type = unassigned DNA; note = donor_cee041b
  misc_feature 1..24: note = RE
  misc_feature 25: note = Core
  misc_feature 26..50: note = LE
gacagcttaatagggggccccccccgttactttattcgtaccccttataa

SEQ ID NO: 38437 - DNA, 50 bp, unidentified
  source 1..50: mol_type = unassigned DNA; note = donor_cee58db
  misc_feature 1..24: note = RE
  misc_feature 25: note = Core
  misc_feature 26..50: note = LE
gccgcttgacacaccacataggggcgttaccttgttggtggtcctgggtg

SEQ ID NO: 38438 - DNA, 50 bp, unidentified
  source 1..50: mol_type = unassigned DNA; note = donor_cee5c10
  misc_feature 1..24: note = RE
  misc_feature 25: note = Core
  misc_feature 26..50: note = LE
tgcaaaaggcgcggggtccatacatactgagatggaccccgcgccgcccc

SEQ ID NO: 38439 - DNA, 50 bp, unidentified
  source 1..50: mol_type = unassigned DNA; note = donor_cee6a11
  misc_feature 1..23: note = RE
  misc_feature 24..25: note = Core
  misc_feature 26..50: note = LE
gcaaaaaagggggggaccatagattaatgagatggtcacccccaccctac

SEQ ID NO: 38440 - DNA, 50 bp, unidentified; identical to SEQ ID NO: 30604
  source 1..50: mol_type = unassigned DNA; note = donor_cefc545
  misc_feature 1..23: note = RE
  misc_feature 24..25: note = Core
  misc_feature 26..50: note = LE

SEQ ID NO: 38441 - DNA, 50 bp, unidentified
  source 1..50: mol_type = unassigned DNA; note = donor_cf05416
  misc_feature 1..24: note = RE
  misc_feature 25: note = Core
  misc_feature 26..50: note = LE
tgcaaaacggcggcggaccatacatactggcatggtccgccgcctaagct

SEQ ID NO: 38442 - DNA, 50 bp, unidentified
  source 1..50: mol_type = unassigned DNA; note = donor_cf084cc
  misc_feature 1..23: note = RE
  misc_feature 24..25: note = Core
  misc_feature 26..50: note = LE
cgcctgagcaaatatcacagttgcttgtatgacgagaaagtagcatattg

SEQ ID NO: 38443 - DNA, 50 bp, unidentified
  source 1..50: mol_type = unassigned DNA; note = donor_cf0e426
  misc_feature 1..23: note = RE
  misc_feature 24..25: note = Core
  misc_feature 26..50: note = LE
ataacttggttttgtcatagaaatcctttagatttgaaaatcttaaattg

SEQ ID NO: 38444 - DNA, 50 bp, unidentified
  source 1..50: mol_type = unassigned DNA; note = donor_cf112c7
  misc_feature 1..24: note = RE
  misc_feature 25: note = Core
  misc_feature 26..50: note = LE
atattaggatattagcatagaatactctaagtttgcagtcaatagataaa

SEQ ID NO: 38445 - DNA, 50 bp, unidentified
  source 1..50: mol_type = unassigned DNA; note = donor_cf2a979
  misc_feature 1..19: note = RE
  misc_feature 20..25: note = Core
  misc_feature 26..50: note = LE
tggaaattaacatagaaagcagatctcactctaagtttgcaccgagaatt

SEQ ID NO: 38446 - DNA, 50 bp, unidentified; identical to SEQ ID NO: 31272
  source 1..50: mol_type = unassigned DNA; note = donor_cf360e7
  misc_feature 1..24: note = RE
  misc_feature 25: note = Core
  misc_feature 26..50: note = LE

SEQ ID NO: 38447 - DNA, 50 bp, unidentified
  source 1..50: mol_type = unassigned DNA; note = donor_cf368de
  misc_feature 1..23: note = RE
  misc_feature 24..25: note = Core
  misc_feature 26..50: note = LE
gcatcctgcggggcgtccacagatgatggggtggacgccccccggcggca

SEQ ID NO: 38448 - DNA, 50 bp, unidentified
  source 1..50: mol_type = unassigned DNA; note = donor_cf39830
  misc_feature 1..23: note = RE
  misc_feature 24..25: note = Core
  misc_feature 26..50: note = LE
atagttgacttcgaacagagaatcttgtatgttgcgtttagaggcgtgag

SEQ ID NO: 38449 - DNA, 50 bp, unidentified
  source 1..50: mol_type = unassigned DNA; note = donor_cf40710
  misc_feature 1..21: note = RE
  misc_feature 22..25: note = Core
  misc_feature 26..50: note = LE
taatttgcaatttaacacagatcatcctatgtttgcaaaacaataaattt

SEQ ID NO: 38450 - DNA, 50 bp, unidentified
  source 1..50: mol_type = unassigned DNA; note = donor_cf43523
  misc_feature 1..23: note = RE
  misc_feature 24..25: note = Core
  misc_feature 26..50: note = LE
cggcttgacatcaacattgggaagctctaccttccttcctgggttgaccc

SEQ ID NO: 38451 - DNA, 50 bp, unidentified
  source 1..50: mol_type = unassigned DNA; note = donor_cf48e45
  misc_feature 1..24: note = RE
  misc_feature 25: note = Core
  misc_feature 26..50: note = LE
agcgcttgacagacatagaagagtctgtgagactttcttgtagctggtct

SEQ ID NO: 38452 - DNA, 50 bp, unidentified
  source 1..50: mol_type = unassigned DNA; note = donor_cf4ae81
  misc_feature 1..24: note = RE
  misc_feature 25: note = Core
  misc_feature 26..50: note = LE
gggacttgactttttatttgcaggcctgttactatatatttgtcccatgt

SEQ ID NO: 38453 - DNA, 50 bp, unidentified
  source 1..50: mol_type = unassigned DNA; note = donor_cf5de33
  misc_feature 1..22: note = RE
  misc_feature 23..25: note = Core
  misc_feature 26..50: note = LE
gtatggcagggtgaagacagttgcttgtgtctagatctaggaataagctc

SEQ ID NO: 38454 - DNA, 50 bp, unidentified
  source 1..50: mol_type = unassigned DNA; note = donor_cf83aba
  misc_feature 1..23: note = RE
  misc_feature 24..25: note = Core
  misc_feature 26..50: note = LE
tttttcttgactcaacacggtagcttgtatgtaataaatatgtgatggtt

SEQ ID NO: 38455 - DNA, 50 bp, unidentified; identical to SEQ ID NO: 31323
  source 1..50: mol_type = unassigned DNA; note = donor_cf85676
  misc_feature 1..23: note = RE
  misc_feature 24..25: note = Core
  misc_feature 26..50: note = LE

SEQ ID NO: 38456 - DNA, 50 bp, unidentified
  source 1..50: mol_type = unassigned DNA; note = donor_cf8c9a5
  misc_feature 1..24: note = RE
  misc_feature 25: note = Core
  misc_feature 26..50: note = LE
tgcagtccggcggcggaccatacataatgagatggtccgccgccgagtac

SEQ ID NO: 38457 - DNA, 50 bp, unidentified; identical to SEQ ID NO: 31193
  source 1..50: mol_type = unassigned DNA; note = donor_cf8e1b3
  misc_feature 1..22: note = RE
  misc_feature 23..25: note = Core
  misc_feature 26..50: note = LE

SEQ ID NO: 38458 - DNA, 50 bp, unidentified
  source 1..50: mol_type = unassigned DNA; note = donor_cf8e43a
  misc_feature 1..24: note = RE
  misc_feature 25: note = Core
  misc_feature 26..50: note = LE
ttgcaatcgggcggggtccatatacaatggtatggaccccgccctccaag

SEQ ID NO: 38459 - DNA, 50 bp, unidentified
  source 1..50: mol_type = unassigned DNA; note = donor_cf9245c
  misc_feature 1..20: note = RE
  misc_feature 21..25: note = Core
  misc_feature 26..50: note = LE
tttggaattgataacagtaccttttatttttactgagaatttagaaagtc

SEQ ID NO: 38460 - DNA, 50 bp, unidentified
  source 1..50: mol_type = unassigned DNA; note = donor_cf94f78
  misc_feature 1..23: note = RE
  misc_feature 24..25: note = Core
  misc_feature 26..50: note = LE
gggcttcccctcaaccatagaatcttgtatggcaggacttgaagggagga

SEQ ID NO: 38461 - DNA, 50 bp, unidentified
  source 1..50: mol_type = unassigned DNA; note = donor_cf96d18
  misc_feature 1..23: note = RE
  misc_feature 24..25: note = Core
  misc_feature 26..50: note = LE
gacctcaacacgccgaatagagaagatggggtattcggcttgcgcttcgt

SEQ ID NO: 38462 - DNA, 50 bp, unidentified
  source 1..50: mol_type = unassigned DNA; note = donor_cf9716f
  misc_feature 1..23: note = RE
  misc_feature 24..25: note = Core
  misc_feature 26..50: note = LE
gcgcaaagggacgcgttcatatagaatgaaatgaacgcgtcccacttcgt

SEQ ID NO: 38463 - DNA, 50 bp, unidentified
  source 1..50: mol_type = unassigned DNA; note = donor_cf9a08d
  misc_feature 1..22: note = RE
  misc_feature 23..25: note = Core
  misc_feature 26..50: note = LE
atgttgacatcctattagctggtttcgtattatgaggtcagccagttttt

SEQ ID NO: 38464 - DNA, 50 bp, unidentified
  source 1..50: mol_type = unassigned DNA; note = donor_cf9b509
  misc_feature 1..24: note = RE
  misc_feature 25: note = Core
  misc_feature 26..50: note = LE
actgcttgacgaatcacataggggccgctactatcttcactcctcgacaa

SEQ ID NO: 38465 - DNA, 50 bp, unidentified
  source 1..50: mol_type = unassigned DNA; note = donor_cf9dcc2
  misc_feature 1..23: note = RE
  misc_feature 24..25: note = Core
  misc_feature 26..50: note = LE
aggtcacctgagaaatacagttgcttctgtatctccggtttgctatgttg

SEQ ID NO: 38466 - DNA, 50 bp, unidentified
  source 1..50: mol_type = unassigned DNA; note = donor_cf9fbf7
  misc_feature 1..21: note = RE
  misc_feature 22..25: note = Core
  misc_feature 26..50: note = LE
cttgaggttgacacaaggggtgtcactagtgcaccctcttccgtgcgggc

SEQ ID NO: 38467 - DNA, 50 bp, unidentified
  source 1..50: mol_type = unassigned DNA; note = donor_cfa8cf9
  misc_feature 1..23: note = RE
  misc_feature 24..25: note = Core
  misc_feature 26..50: note = LE
tgacacctcaggtcatgggatgtctaatgggacctaccgggtcggtgatg

SEQ ID NO: 38468 - DNA, 50 bp, unidentified
  source 1..50: mol_type = unassigned DNA; note = donor_cfaacf2
  misc_feature 1..23: note = RE
  misc_feature 24..25: note = Core
  misc_feature 26..50: note = LE
tgacttgacatttaatagttagtctcgtataatatttatataataattta

SEQ ID NO: 38469 - DNA, 50 bp, unidentified
  source 1..50: mol_type = unassigned DNA; note = donor_cfc2006
  misc_feature 1..22: note = RE
  misc_feature 23..25: note = Core
  misc_feature 26..50: note = LE
catcacgggcggcaaccacagaagatggggtggttgccgccctccccaga

SEQ ID NO: 38470 - DNA, 50 bp, unidentified
  source 1..50: mol_type = unassigned DNA; note = donor_cfcaf0c
  misc_feature 1..23: note = RE
  misc_feature 24..25: note = Core
  misc_feature 26..50: note = LE
ccaccgcgtgagggatacagttgcttctgtatctgagtttcgctaaactt

SEQ ID NO: 38471 - DNA, 50 bp, unidentified
  source 1..50: mol_type = unassigned DNA; note = donor_cfd9c5e
  misc_feature 1..24: note = RE
  misc_feature 25: note = Core
  misc_feature 26..50: note = LE
ggggcttgactttttatttgcaggcctgttactatatatttgccccttgt

SEQ ID NO: 38472 - DNA, 50 bp, unidentified
  source 1..50: mol_type = unassigned DNA; note = donor_cfdc72b
  misc_feature 1..23: note = RE
  misc_feature 24..25: note = Core
  misc_feature 26..50: note = LE
gcaaaaatcgggctgaccatagattaatgagatggtcagcccgatcccta

SEQ ID NO: 38473 - DNA, 50 bp, unidentified
  source 1..50: mol_type = unassigned DNA; note = donor_cfdf6ba
  misc_feature 1..23: note = RE
  misc_feature 24..25: note = Core
  misc_feature 26..50: note = LE
gacatcccaagctcctgggatgtctaatgagagtcagcgagtccggtcat

SEQ ID NO: 38474 - DNA, 50 bp, unidentified; identical to SEQ ID NO: 33245
  source 1..50: mol_type = unassigned DNA; note = donor_cfe00d9
  misc_feature 1..23: note = RE
  misc_feature 24..25: note = Core
  misc_feature 26..50: note = LE

SEQ ID NO: 38475 - DNA, 50 bp, unidentified
  source 1..50: mol_type = unassigned DNA; note = donor_cfe61cc
  misc_feature 1..24: note = RE
  misc_feature 25: note = Core
  misc_feature 26..50: note = LE
ttgaaagacggggatgcccttgtagaacgaaagggacatccccatagcgt

SEQ ID NO: 38476 - DNA, 50 bp, unidentified
  source 1..50: mol_type = unassigned DNA; note = donor_cfe70c4
  misc_feature 1..23: note = RE
  misc_feature 24..25: note = Core
  misc_feature 26..50: note = LE
cttgcaaccgacgcgattagacgacatggggtaatcgcgggagcgagcta

SEQ ID NO: 38477 - DNA, 50 bp, unidentified
  source 1..50: mol_type = unassigned DNA; note = donor_cfe7cb8
  misc_feature 1..23: note = RE
  misc_feature 24..25: note = Core
  misc_feature 26..50: note = LE
gttagaggcatggcatgtaatgcctcctcctcctacggggaatccacgca

SEQ ID NO: 38478 - DNA, 50 bp, unidentified
  source 1..50: mol_type = unassigned DNA; note = donor_cfe936f
  misc_feature 1..21: note = RE
  misc_feature 22..25: note = Core
  misc_feature 26..50: note = LE
gccttgacttcgtcattgagactccgtaagttgttgggcggcccgggagg

SEQ ID NO: 38479 - DNA, 50 bp, unidentified
  source 1..50: mol_type = unassigned DNA; note = donor_cfed46c
  misc_feature 1..24: note = RE
  misc_feature 25: note = Core
  misc_feature 26..50: note = LE
ccttgcaggcgggcgggccatacgtatgggatggcccgcccttctcgcgg

SEQ ID NO: 38480 - DNA, 50 bp, unidentified
  source 1..50: mol_type = unassigned DNA; note = donor_cfef1a2
  misc_feature 1..23: note = RE
  misc_feature 24..25: note = Core
  misc_feature 26..50: note = LE
gcgaggaaggggccgtccacatatgttggtgtggacggccccccgacagc

SEQ ID NO: 38481 - DNA, 50 bp, unidentified
  source 1..50: mol_type = unassigned DNA; note = donor_cfef84a
  misc_feature 1..23: note = RE
  misc_feature 24..25: note = Core
  misc_feature 26..50: note = LE
ccgcttgacaaaagcattaggaagctctaccttcttggtcgggttgatcg

SEQ ID NO: 38482 - DNA, 50 bp, unidentified; identical to SEQ ID NO: 34146
  source 1..50: mol_type = unassigned DNA; note = donor_cff330d
  misc_feature 1..22: note = RE
  misc_feature 23..25: note = Core
  misc_feature 26..50: note = LE

SEQ ID NO: 38483 - DNA, 50 bp, unidentified
  source 1..50: mol_type = unassigned DNA; note = donor_cff8d6c
  misc_feature 1..20: note = RE
  misc_feature 21..25: note = Core
  misc_feature 26..50: note = LE
cgtacttgatgttttcacactaatccccatgccggtgcggcaaccggcac

SEQ ID NO: 38484 - DNA, 50 bp, unidentified
  source 1..50: mol_type = unassigned DNA; note = donor_cffa4a4
  misc_feature 1..21: note = RE
  misc_feature 22..25: note = Core
  misc_feature 26..50: note = LE
cctgaggttgacatagggagtgtcactagggcaccatccttccgacaggg

SEQ ID NO: 38485 - DNA, 50 bp, unidentified; identical to SEQ ID NO: 36535
  source 1..50: mol_type = unassigned DNA; note = donor_cffd0cb
  misc_feature 1..22: note = RE
  misc_feature 23..25: note = Core
  misc_feature 26..50: note = LE

SEQ ID NO: 38486 - DNA, 50 bp, unidentified
  source 1..50: mol_type = unassigned DNA; note = donor_d00c77e
  misc_feature 1..23: note = RE
  misc_feature 24..25: note = Core
  misc_feature 26..50: note = LE
cgcttgacaacaagacaggaacaccttaccttggttggaggccttgagat

SEQ ID NO: 38487 - DNA, 50 bp, unidentified
  source 1..50: mol_type = unassigned DNA; note = donor_d00de73
  misc_feature 1..24: note = RE
  misc_feature 25: note = Core
  misc_feature 26..50: note = LE
gacccttgacaagcataggagcatcagggaggatgtgggtagtgcttctg

SEQ ID NO: 38488 - DNA, 50 bp, unidentified
  source 1..50: mol_type = unassigned DNA; note = donor_d00e0f2
  misc_feature 1..23: note = RE
  misc_feature 24..25: note = Core
  misc_feature 26..50: note = LE
gcaccaacgggggcatccacacatgatggcgttgatgcccccacctacgg

SEQ ID NO: 38489 - DNA, 50 bp, unidentified
  source 1..50: mol_type = unassigned DNA; note = donor_d013fc6
  misc_feature 1..24: note = RE
  misc_feature 25: note = Core
  misc_feature 26..50: note = LE
gcgaagaaggcggcggaccatacataatgggatggtccgccgccgatcca

SEQ ID NO: 38490 - DNA, 50 bp, unidentified; identical to SEQ ID NO: 33705
  source 1..50: mol_type = unassigned DNA; note = donor_d015127
  misc_feature 1..24: note = RE
  misc_feature 25: note = Core
  misc_feature 26..50: note = LE

SEQ ID NO: 38491 - DNA, 50 bp, unidentified
  source 1..50: mol_type = unassigned DNA; note = donor_d022462
  misc_feature 1..24: note = RE
  misc_feature 25: note = Core
  misc_feature 26..50: note = LE
cttgaattcagtcggtgtccatatatggacacctccccaaaacggcttca

SEQ ID NO: 38492 - DNA, 50 bp, unidentified
  source 1..50: mol_type = unassigned DNA; note = donor_d02b345
  misc_feature 1..23: note = RE
  misc_feature 24..25: note = Core
  misc_feature 26..50: note = LE
gcacacatggaggcatccatataagatggcatggatgcctccccctacac

SEQ ID NO: 38493 - DNA, 50 bp, unidentified; identical to SEQ ID NO: 37512
  source 1..50: mol_type = unassigned DNA; note = donor_d0367fd
  misc_feature 1..24: note = RE
  misc_feature 25: note = Core
  misc_feature 26..50: note = LE

SEQ ID NO: 38494 - DNA, 50 bp, unidentified; identical to SEQ ID NO: 36393
  source 1..50: mol_type = unassigned DNA; note = donor_d0475b1
  misc_feature 1..22: note = RE
  misc_feature 23..25: note = Core
  misc_feature 26..50: note = LE

SEQ ID NO: 38495 - DNA, 50 bp, unidentified
  source 1..50: mol_type = unassigned DNA; note = donor_d04bd58
  misc_feature 1..23: note = RE
  misc_feature 24..25: note = Core
  misc_feature 26..50: note = LE
tacttgacttctaatagttagtcacgtataatccaattattctcttttag

SEQ ID NO: 38496 - DNA, 50 bp, unidentified
  source 1..50: mol_type = unassigned DNA; note = donor_d053035
  misc_feature 1..24: note = RE
  misc_feature 25: note = Core
  misc_feature 26..50: note = LE
gccgcttgacatccataggagcatcagtgatgatgtagatgagcgcctct

SEQ ID NO: 38497 - DNA, 50 bp, unidentified
  source 1..50: mol_type = unassigned DNA; note = donor_d05a988
  misc_feature 1..24: note = RE
  misc_feature 25: note = Core
  misc_feature 26..50: note = LE
acaaagttcttcatagaagggagcctacttatgtcttccaagacaacccg

SEQ ID NO: 38498 - DNA, 50 bp, unidentified
  source 1..50: mol_type = unassigned DNA; note = donor_d06740a
  misc_feature 1..24: note = RE
  misc_feature 25: note = Core
  misc_feature 26..50: note = LE
ttatttggattttaacatagaaagctctaagtttgcaaagtgaaagcgac

SEQ ID NO: 38499 - DNA, 50 bp, unidentified
  source 1..50: mol_type = unassigned DNA; note = donor_d06a361
  misc_feature 1..23: note = RE
  misc_feature 24..25: note = Core
  misc_feature 26..50: note = LE
gactcatcgaggcccgttacagaagatggggcaacgggccccggtctgcc

SEQ ID NO: 38500 - DNA, 50 bp, unidentified
  source 1..50: mol_type = unassigned DNA; note = donor_d06b5e5
  misc_feature 1..23: note = RE
  misc_feature 24..25: note = Core
  misc_feature 26..50: note = LE
gcggaccaggggccatccacagatgatggggtggatggcccctgactgcg

SEQ ID NO: 38501 - DNA, 50 bp, unidentified
  source 1..50: mol_type = unassigned DNA; note = donor_d06f506
  misc_feature 1..21: note = RE
  misc_feature 22..25: note = Core
  misc_feature 26..50: note = LE
cgagtcgggggccatccacacatgatggggtggatggccccctcacggca

SEQ ID NO: 38502 - DNA, 50 bp, unidentified
  source 1..50: mol_type = unassigned DNA; note = donor_d077086
  misc_feature 1..23: note = RE
  misc_feature 24..25: note = Core
  misc_feature 26..50: note = LE
ggacttgacttttatttgcaggactcctacaataataaataaggttaaag

SEQ ID NO: 38503 - DNA, 50 bp, unidentified
  source 1..50: mol_type = unassigned DNA; note = donor_d07f18c
  misc_feature 1..23: note = RE
  misc_feature 24..25: note = Core
  misc_feature 26..50: note = LE
gttgacaagggggagtccacataagataattggactccctcactccctaa

SEQ ID NO: 38504 - DNA, 50 bp, unidentified
  source 1..50: mol_type = unassigned DNA; note = donor_d090a52
  misc_feature 1..23: note = RE
  misc_feature 24..25: note = Core
  misc_feature 26..50: note = LE
gcgctaatgcccgcgattagacgacatggggtaatcgcgggaagcgagtc

SEQ ID NO: 38505 - DNA, 50 bp, unidentified
  source 1..50: mol_type = unassigned DNA; note = donor_d09434b
  misc_feature 1..23: note = RE
  misc_feature 24..25: note = Core
  misc_feature 26..50: note = LE
gcgaggcgggggccgtccacatatgatggggtggacggcccccgacggca

SEQ ID NO: 38506 - DNA, 50 bp, unidentified
  source 1..50: mol_type = unassigned DNA; note = donor_d094603
  misc_feature 1..23: note = RE
  misc_feature 24..25: note = Core
  misc_feature 26..50: note = LE
gggcttgacttttcatagctggtcttgtatgataaatacggaagcgaaaa

SEQ ID NO: 38507 - DNA, 50 bp, unidentified
  source 1..50: mol_type = unassigned DNA; note = donor_d095380
  misc_feature 1..24: note = RE
  misc_feature 25: note = Core
  misc_feature 26..50: note = LE
gtattgacttttcatagttagtcacgtataataaaaccatcccgaaatgg

SEQ ID NO: 38508 - DNA, 50 bp, unidentified
  source 1..50: mol_type = unassigned DNA; note = donor_d09e1bf
  misc_feature 1..23: note = RE
  misc_feature 24..25: note = Core
  misc_feature 26..50: note = LE
ttgcggacggggcgggccatacgttatggatggcccgcccctcaccgggc

SEQ ID NO: 38509 - DNA, 50 bp, unidentified
  source 1..50: mol_type = unassigned DNA; note = donor_d09f01d
  misc_feature 1..22: note = RE
  misc_feature 23..25: note = Core
  misc_feature 26..50: note = LE
tgcttgacttaatatagtttgtcttgtatatttagattactcaattaatc

SEQ ID NO: 38510 - DNA, 50 bp, unidentified
  source 1..50: mol_type = unassigned DNA; note = donor_d09fb57
  misc_feature 1..23: note = RE
  misc_feature 24..25: note = Core
  misc_feature 26..50: note = LE
cggcttgacatctctattgggaagtcctacctttcaagcgggtcggatct

SEQ ID NO: 38511 - DNA, 50 bp, unidentified
  source 1..50: mol_type = unassigned DNA; note = donor_d0a0390
  misc_feature 1..24: note = RE
  misc_feature 25: note = Core
  misc_feature 26..50: note = LE
tgcagcaacgcggcggaccatacataatggaatggtccgccgccgttgat

SEQ ID NO: 38512 - DNA, 50 bp, unidentified
  source 1..50: mol_type = unassigned DNA; note = donor_d0b214b
  misc_feature 1..23: note = RE
  misc_feature 24..25: note = Core
  misc_feature 26..50: note = LE
cggcttgacaacatagaaggtctggcgtatgaaatcccccggtgggttcc

SEQ ID NO: 38513 - DNA, 50 bp, unidentified
  source 1..50: mol_type = unassigned DNA; note = donor_d0b9dc0
  misc_feature 1..24: note = RE
  misc_feature 25: note = Core
  misc_feature 26..50: note = LE
ttgcatcgcgggatggaccatatataatggaatggtccaccccgccccat

SEQ ID NO: 38514 - DNA, 50 bp, unidentified
  source 1..50: mol_type = unassigned DNA; note = donor_d0cba15
  misc_feature 1..23: note = RE
  misc_feature 24..25: note = Core
  misc_feature 26..50: note = LE
tttctattgactttttatagttggtataatatatttaggctaatgaaggc

SEQ ID NO: 38515 - DNA, 50 bp, unidentified
  source 1..50: mol_type = unassigned DNA; note = donor_d0d787b
  misc_feature 1..23: note = RE
  misc_feature 24..25: note = Core
  misc_feature 26..50: note = LE
caacgcgggagccatccacacaggatgggttggatggctcccgctcacgg

SEQ ID NO: 38516 - DNA, 50 bp, unidentified
  source 1..50: mol_type = unassigned DNA; note = donor_d0da593
  misc_feature 1..24: note = RE
  misc_feature 25: note = Core
  misc_feature 26..50: note = LE
ttgacgtatggggaagcccttgtagaatgaaagggacttccccgtcccga

SEQ ID NO: 38517 - DNA, 50 bp, unidentified
  source 1..50: mol_type = unassigned DNA; note = donor_d0db0cd
  misc_feature 1..23: note = RE
  misc_feature 24..25: note = Core
  misc_feature 26..50: note = LE
agactgcttgaccaagacggatacttgtcttatccagaacgtggctcttg

SEQ ID NO: 38518 - DNA, 50 bp, unidentified
  source 1..50: mol_type = unassigned DNA; note = donor_d0e04d7
  misc_feature 1..24: note = RE
  misc_feature 25: note = Core
  misc_feature 26..50: note = LE
agcgggttgacaacagaggggagcctaccagagacttcccgcaggatcgg

SEQ ID NO: 38519 - DNA, 50 bp, unidentified
  source 1..50: mol_type = unassigned DNA; note = donor_d0e9219
  misc_feature 1..23: note = RE
  misc_feature 24..25: note = Core
  misc_feature 26..50: note = LE
acaggtacgcctgttttcatagaagatgtaatgaaaacaaaaaaggcgtg

SEQ ID NO: 38520 - DNA, 50 bp, unidentified
  source 1..50: mol_type = unassigned DNA; note = donor_d0ec7f6
  misc_feature 1..24: note = RE
  misc_feature 25: note = Core
  misc_feature 26..50: note = LE
aggcgtcttgacacagaagggagcctactagttccattgaccttaggtcg

SEQ ID NO: 38521 - DNA, 50 bp, unidentified
  source 1..50: mol_type = unassigned DNA; note = donor_d10683f
  misc_feature 1..22: note = RE
  misc_feature 23..25: note = Core
  misc_feature 26..50: note = LE
cagctctgaggttgacacagagggtcactcctgtacctcttctcttgcag

SEQ ID NO: 38522 - DNA, 50 bp, unidentified
  source 1..50: mol_type = unassigned DNA; note = donor_d110a81
  misc_feature 1..23: note = RE
  misc_feature 24..25: note = Core
  misc_feature 26..50: note = LE
agacttgacttttaatagttagtctcgtattatatagacatagccattct

SEQ ID NO: 38523 - DNA, 50 bp, unidentified
  source 1..50: mol_type = unassigned DNA; note = donor_d111e70
  misc_feature 1..22: note = RE
  misc_feature 23..25: note = Core
  misc_feature 26..50: note = LE
actgttgacaacctgattgagattccttaccttgttgctcgggcggtttc

SEQ ID NO: 38524 - DNA, 50 bp, unidentified
  source 1..50: mol_type = unassigned DNA; note = donor_d117bff
  misc_feature 1..24: note = RE
  misc_feature 25: note = Core
  misc_feature 26..50: note = LE
cttgcagtcagacgggaccatacatactgagatggtccgccgcttgaact

SEQ ID NO: 38525 - DNA, 50 bp, unidentified
  source 1..50: mol_type = unassigned DNA; note = donor_d12d443
  misc_feature 1..24: note = RE
  misc_feature 25: note = Core
  misc_feature 26..50: note = LE
atgcttgacaagtattagctggtttcgtattaataggtcagccagagatt

SEQ ID NO: 38526 - DNA, 50 bp, unidentified
  source 1..50: mol_type = unassigned DNA; note = donor_d12da00
  misc_feature 1..23: note = RE
  misc_feature 24..25: note = Core
  misc_feature 26..50: note = LE
cttgacagaaaaatcctcatacaagaagctatgggacgggcggcgaggga

SEQ ID NO: 38527 - DNA, 50 bp, unidentified
  source 1..50: mol_type = unassigned DNA; note = donor_d133af2
  misc_feature 1..21: note = RE
  misc_feature 22..25: note = Core
  misc_feature 26..50: note = LE
tccttgacttttgttagcaggttttagtaccataaaagtgtagttgttag

SEQ ID NO: 38528 - DNA, 50 bp, unidentified; identical to SEQ ID NO: 35927
  source 1..50: mol_type = unassigned DNA; note = donor_d13698d
  misc_feature 1..23: note = RE
  misc_feature 24..25: note = Core
  misc_feature 26..50: note = LE

SEQ ID NO: 38529 - DNA, 50 bp, unidentified
  source 1..50: mol_type = unassigned DNA; note = donor_d13b637
  misc_feature 1..24: note = RE
  misc_feature 25: note = Core
  misc_feature 26..50: note = LE
tgcaaaacggagatagttcatagataatgggatggaccacctccttcctc

SEQ ID NO: 38530 - DNA, 50 bp, unidentified
  source 1..50: mol_type = unassigned DNA; note = donor_d13b747
  misc_feature 1..20: note = RE
  misc_feature 21..25: note = Core
  misc_feature 26..50: note = LE
tgacaaattccatagggacacccccgttatctttttggtggctcctgatc

SEQ ID NO: 38531 - DNA, 50 bp, unidentified; identical to SEQ ID NO: 32398
  source 1..50: mol_type = unassigned DNA; note = donor_d148bb5
  misc_feature 1..23: note = RE
  misc_feature 24..25: note = Core
  misc_feature 26..50: note = LE

SEQ ID NO: 38532 - DNA, 50 bp, unidentified
  source 1..50: mol_type = unassigned DNA; note = donor_d14a7b6
  misc_feature 1..24: note = RE
  misc_feature 25: note = Core
  misc_feature 26..50: note = LE
caccggttgacaacaaaggggagcctactagagacttccctgcaggatcg

SEQ ID NO: 38533 - DNA, 50 bp, unidentified
  source 1..50: mol_type = unassigned DNA; note = donor_d14c665
  misc_feature 1..20: note = RE
  misc_feature 21..25: note = Core
  misc_feature 26..50: note = LE
tgacacagaacatagggacacccccgttacctttctggtggccccatggt

SEQ ID NO: 38534 - DNA, 50 bp, unidentified; identical to SEQ ID NO: 34575
  source 1..50: mol_type = unassigned DNA; note = donor_d14f88d
  misc_feature 1..24: note = RE
  misc_feature 25: note = Core
  misc_feature 26..50: note = LE

SEQ ID NO: 38535 - DNA, 50 bp, unidentified; identical to SEQ ID NO: 30604
  source 1..50: mol_type = unassigned DNA; note = donor_d14ff4b
  misc_feature 1..23: note = RE
  misc_feature 24..25: note = Core
  misc_feature 26..50: note = LE

SEQ ID NO: 38536 - DNA, 50 bp, unidentified
  source 1..50: mol_type = unassigned DNA; note = donor_d155eab
  misc_feature 1..23: note = RE
  misc_feature 24..25: note = Core
  misc_feature 26..50: note = LE
gcaatatcggggcggaccatacattaattatatggtccgcctcactctca

SEQ ID NO: 38537 - DNA, 50 bp, unidentified; identical to SEQ ID NO: 32099
  source 1..50: mol_type = unassigned DNA; note = donor_d1662dd
  misc_feature 1..24: note = RE
  misc_feature 25: note = Core
  misc_feature 26..50: note = LE

SEQ ID NO: 38538 - DNA, 50 bp, unidentified
  source 1..50: mol_type = unassigned DNA; note = donor_d16a76a
  misc_feature 1..23: note = RE
  misc_feature 24..25: note = Core
  misc_feature 26..50: note = LE
ttagcttgacaaagtcatagtgttccattagactataaaatataaaatag

SEQ ID NO: 38539 - DNA, 50 bp, unidentified
  source 1..50: mol_type = unassigned DNA; note = donor_d17877e
  misc_feature 1..22: note = RE
  misc_feature 23..25: note = Core
  misc_feature 26..50: note = LE
cacttgactttttatagttggtcacgtataatataattatgtgatttttt

SEQ ID NO: 38540 - DNA, 50 bp, unidentified; identical to SEQ ID NO: 32559
  source 1..50: mol_type = unassigned DNA; note = donor_d1792e4
  misc_feature 1..24: note = RE
  misc_feature 25: note = Core
  misc_feature 26..50: note = LE

SEQ ID NO: 38541 - DNA, 50 bp, unidentified
  source 1..50: mol_type = unassigned DNA; note = donor_d186469
  misc_feature 1..23: note = RE
  misc_feature 24..25: note = Core
  misc_feature 26..50: note = LE
cttgactcatggcccattacagaagatacggtaatgggccgcgtctccag

SEQ ID NO: 38542 - DNA, 50 bp, unidentified
  source 1..50: mol_type = unassigned DNA; note = donor_d187969
  misc_feature 1..23: note = RE
  misc_feature 24..25: note = Core
  misc_feature 26..50: note = LE
cttgcaacggggcgggccatacgttatggatggcccgcccctcccgccgg

SEQ ID NO: 38543 - DNA, 50 bp, unidentified
  source 1..50: mol_type = unassigned DNA; note = donor_d18cef7
  misc_feature 1..24: note = RE
  misc_feature 25: note = Core
  misc_feature 26..50: note = LE
agcaaaaggtgggctgaccatacataatgagatggtcagcccggcgagaa

SEQ ID NO: 38544 - DNA, 50 bp, unidentified
  source 1..50: mol_type = unassigned DNA; note = donor_d18e067
  misc_feature 1..24: note = RE
  misc_feature 25: note = Core
  misc_feature 26..50: note = LE
cttgcaggcggggcgagccatacgtatggaatggctcgcccctttccccc

SEQ ID NO: 38545 - DNA, 50 bp, unidentified
  source 1..50: mol_type = unassigned DNA; note = donor_d1ad5d1
  misc_feature 1..20: note = RE
  misc_feature 21..25: note = Core
  misc_feature 26..50: note = LE
cttgacgaaacccatagggacacccgttaccttcttcgtgcgccgtgaac

SEQ ID NO: 38546 - DNA, 50 bp, unidentified
  source 1..50: mol_type = unassigned DNA; note = donor_d1b5b72
  misc_feature 1..23: note = RE
  misc_feature 24..25: note = Core
  misc_feature 26..50: note = LE
gcgctttagggggcgtccacagatgatggggtggacgccccccaacggca

SEQ ID NO: 38547 - DNA, 50 bp, unidentified; identical to SEQ ID NO: 33215
  source 1..50: mol_type = unassigned DNA; note = donor_d1c296f
  misc_feature 1..23: note = RE
  misc_feature 24..25: note = Core
  misc_feature 26..50: note = LE

SEQ ID NO: 38548 - DNA, 50 bp, unidentified
  source 1..50: mol_type = unassigned DNA; note = donor_d1d99c4
  misc_feature 1..23: note = RE
  misc_feature 24..25: note = Core
  misc_feature 26..50: note = LE
taacttgaaaattaacggtataacttatatgtttgttttagtgtttcgaa

SEQ ID NO: 38549 - DNA, 50 bp, unidentified; identical to SEQ ID NO: 31931
  source 1..50: mol_type = unassigned DNA; note = donor_d1dc4d2
  misc_feature 1..22: note = RE
  misc_feature 23..25: note = Core
  misc_feature 26..50: note = LE

SEQ ID NO: 38550 - DNA, 50 bp, unidentified
  source 1..50: mol_type = unassigned DNA; note = donor_d1dca92
  misc_feature 1..23: note = RE
  misc_feature 24..25: note = Core
  misc_feature 26..50: note = LE
caacgcgggagccatccacacaggatggagtggatggctcccgctcacgg

SEQ ID NO: 38551 - DNA, 50 bp, unidentified
  source 1..50: mol_type = unassigned DNA; note = donor_d1e6eb1
  misc_feature 1..22: note = RE
  misc_feature 23..25: note = Core
  misc_feature 26..50: note = LE
aatttttcgggtttttcatgcgaaacccacatgagcacattgctcatgca

SEQ ID NO: 38552 - DNA, 50 bp, unidentified
  source 1..50: mol_type = unassigned DNA; note = donor_d1e7e24
  misc_feature 1..23: note = RE
  misc_feature 24..25: note = Core
  misc_feature 26..50: note = LE
tggcttgacaaccaagacggttgcttgtatctttggatctcggaccgatt

SEQ ID NO: 38553 - DNA, 50 bp, unidentified
  source 1..50: mol_type = unassigned DNA; note = donor_d1e85fd
  misc_feature 1..24: note = RE
  misc_feature 25: note = Core
  misc_feature 26..50: note = LE
ggcgtcttgacaacagaagggagcctactagaggattccctcagggccgg

SEQ ID NO: 38554 - DNA, 50 bp, unidentified
  source 1..50: mol_type = unassigned DNA; note = donor_d1ea044
  misc_feature 1..24: note = RE
  misc_feature 25: note = Core
  misc_feature 26..50: note = LE
agtattgacaactattggctggtatcgtattatatggtcagccggtcatt

SEQ ID NO: 38555 - DNA, 50 bp, unidentified
  source 1..50: mol_type = unassigned DNA; note = donor_d1ec4eb
  misc_feature 1..23: note = RE
  misc_feature 24..25: note = Core
  misc_feature 26..50: note = LE
cccgctgaggggcaagacggtatcttgtatctcgactattgcttcccaaa

SEQ ID NO: 38556 - DNA, 50 bp, unidentified
  source 1..50: mol_type = unassigned DNA; note = donor_d1f0608
  misc_feature 1..21: note = RE
  misc_feature 22..25: note = Core
  misc_feature 26..50: note = LE
gttgacatcaacatagggacaccccgttaccttcttcgtagtcccgcacc

SEQ ID NO: 38557 - DNA, 50 bp, unidentified
  source 1..50: mol_type = unassigned DNA; note = donor_d1ffc53
  misc_feature 1..24: note = RE
  misc_feature 25: note = Core
  misc_feature 26..50: note = LE
tgcaatagcggggcggaccatacataatgggatggtccgccccgcaccca

SEQ ID NO: 38558 - DNA, 50 bp, unidentified
  source 1..50: mol_type = unassigned DNA; note = donor_d2046f4
  misc_feature 1..23: note = RE
  misc_feature 24..25: note = Core
  misc_feature 26..50: note = LE
gacctcccaaggcccgttacagaagatggggtaacgggcgatcgttggcg

SEQ ID NO: 38559 - DNA, 50 bp, unidentified
  source 1..50: mol_type = unassigned DNA; note = donor_d209fe7
  misc_feature 1..23: note = RE
  misc_feature 24..25: note = Core
  misc_feature 26..50: note = LE
gcgctaaaggcggcaaccacagaagatggagtggttgccgccctcccctg

SEQ ID NO: 38560 - DNA, 50 bp, unidentified
  source 1..50: mol_type = unassigned DNA; note = donor_d20e53f
  misc_feature 1..24: note = RE
  misc_feature 25: note = Core
  misc_feature 26..50: note = LE
ctgccccttgacacaaagaggcttctgattgagactggtaggtgcgttac

SEQ ID NO: 38561 - DNA, 50 bp, unidentified
  source 1..50: mol_type = unassigned DNA; note = donor_d20eef8
  misc_feature 1..23: note = RE
  misc_feature 24..25: note = Core
  misc_feature 26..50: note = LE
tgcaaacggggccgttccacatatgatgatgtggaacggcccctcccgaa

SEQ ID NO: 38562 - DNA, 50 bp, unidentified
  source 1..50: mol_type = unassigned DNA; note = donor_d2166de
  misc_feature 1..22: note = RE
  misc_feature 23..25: note = Core
  misc_feature 26..50: note = LE
ctatgcaggagctatccacacaggatggtgtggatagctcctgctccacc

SEQ ID NO: 38563 - DNA, 50 bp, unidentified
  source 1..50: mol_type = unassigned DNA; note = donor_d225501
  misc_feature 1..24: note = RE
  misc_feature 25: note = Core
  misc_feature 26..50: note = LE
ttgacgaaaaacatagggacaccccgttacctttttagtagccccttaga

SEQ ID NO: 38564 - DNA, 50 bp, unidentified; identical to SEQ ID NO: 30919
  source 1..50: mol_type = unassigned DNA; note = donor_d225e01
  misc_feature 1..23: note = RE
  misc_feature 24..25: note = Core
  misc_feature 26..50: note = LE

SEQ ID NO: 38565 - DNA, 50 bp, unidentified
  source 1..50: mol_type = unassigned DNA; note = donor_d229014
  misc_feature 1..23: note = RE
  misc_feature 24..25: note = Core
  misc_feature 26..50: note = LE
ttccttgaaattaaacacagttgcttgtatgtttattttgcacgtataaa

SEQ ID NO: 38566 - DNA, 50 bp, unidentified
  source 1..50: mol_type = unassigned DNA; note = donor_d22a73c
  misc_feature 1..21: note = RE
  misc_feature 22..25: note = Core
  misc_feature 26..50: note = LE
ggcttgacaccttcattgagactccgtaagttggtaggcggcccgggagg

SEQ ID NO: 38567 - DNA, 50 bp, unidentified
  source 1..50: mol_type = unassigned DNA; note = donor_d22d6b3
  misc_feature 1..23: note = RE
  misc_feature 24..25: note = Core
  misc_feature 26..50: note = LE
tctcttgacatcattaccggttgctcgtataataagtgtataagatcttg

SEQ ID NO: 38568 - DNA, 50 bp, unidentified
  source 1..50: mol_type = unassigned DNA; note = donor_d22dc1e
  misc_feature 1..23: note = RE
  misc_feature 24..25: note = Core
  misc_feature 26..50: note = LE
ctgacccgccttactttcgtattagcgtgtgagcgccgctggcgcgccgt

SEQ ID NO: 38569 - DNA, 50 bp, unidentified
  source 1..50: mol_type = unassigned DNA; note = donor_d22dfe5
  misc_feature 1..23: note = RE
  misc_feature 24..25: note = Core
  misc_feature 26..50: note = LE
acatcaccggggcccattacagaagatgccgtaatgggccctgcaccgaa

SEQ ID NO: 38570 - DNA, 50 bp, unidentified
  source 1..50: mol_type = unassigned DNA; note = donor_d22f82e
  misc_feature 1..23: note = RE
  misc_feature 24..25: note = Core
  misc_feature 26..50: note = LE
caagatgaggatcaagacggtatcttgtatctcgactactgcttatttta

SEQ ID NO: 38571 - DNA, 50 bp, unidentified
  source 1..50: mol_type = unassigned DNA; note = donor_d231b19
  misc_feature 1..23: note = RE
  misc_feature 24..25: note = Core
  misc_feature 26..50: note = LE
tgccttgacctcgaacatagaatcttgtatgtttggtcttggcaagtcaa

SEQ ID NO: 38572 - DNA, 50 bp, unidentified
  source 1..50: mol_type = unassigned DNA; note = donor_d259649
  misc_feature 1..23: note = RE
  misc_feature 24..25: note = Core
  misc_feature 26..50: note = LE
agtcgattggtacaagatggtatcttgtatctgtcagtgccatttgatta

SEQ ID NO: 38573 - DNA, 50 bp, unidentified; identical to SEQ ID NO: 31508
  source 1..50: mol_type = unassigned DNA; note = donor_d25e521
  misc_feature 1..24: note = RE
  misc_feature 25: note = Core
  misc_feature 26..50: note = LE

SEQ ID NO: 38574 - DNA, 50 bp, unidentified
  source 1..50: mol_type = unassigned DNA; note = donor_d2616de
  misc_feature 1..23: note = RE
  misc_feature 24..25: note = Core
  misc_feature 26..50: note = LE
gtgcaataggaggagtccatataagatgtatggactcctcccccaaatag

SEQ ID NO: 38575 - DNA, 50 bp, unidentified
  source 1..50: mol_type = unassigned DNA; note = donor_d27276b
  misc_feature 1..24: note = RE
  misc_feature 25: note = Core
  misc_feature 26..50: note = LE
ccgcctcttgacacagaggggagcctacttgtttcattgacgtcagggtc

SEQ ID NO: 38576 - DNA, 50 bp, unidentified
  source 1..50: mol_type = unassigned DNA; note = donor_d273fdb
  misc_feature 1..23: note = RE
  misc_feature 24..25: note = Core
  misc_feature 26..50: note = LE
gtgcttgactttcgagacagttgcttgtatctagctcctcgcggagtttg

SEQ ID NO: 38577 - DNA, 50 bp, unidentified
  source 1..50: mol_type = unassigned DNA; note = donor_d2773ca
  misc_feature 1..24: note = RE
  misc_feature 25: note = Core
  misc_feature 26..50: note = LE
ttatttggtttttacctcagttcttcttaagttagcattttattaaatta

SEQ ID NO: 38578 - DNA, 50 bp, unidentified; identical to SEQ ID NO: 31193
  source 1..50: mol_type = unassigned DNA; note = donor_d27eac3
  misc_feature 1..22: note = RE
  misc_feature 23..25: note = Core
  misc_feature 26..50: note = LE

SEQ ID NO: 38579 - DNA, 50 bp, unidentified
  source 1..50: mol_type = unassigned DNA; note = donor_d282130
  misc_feature 1..23: note = RE
  misc_feature 24..25: note = Core
  misc_feature 26..50: note = LE
aaacctcttgatcactacggatacttgtcttatgacttttcccgtcgccg

SEQ ID NO: 38580 - DNA, 50 bp, unidentified
  source 1..50: mol_type = unassigned DNA; note = donor_d288c9c
  misc_feature 1..23: note = RE
  misc_feature 24..25: note = Core
  misc_feature 26..50: note = LE
gatttttacgttcaagacagttgcttgtatcttgaaaattggttaatata

SEQ ID NO: 38581 - DNA, 50 bp, unidentified
  source 1..50: mol_type = unassigned DNA; note = donor_d2a72b5
  misc_feature 1..23: note = RE
  misc_feature 24..25: note = Core
  misc_feature 26..50: note = LE
cttgcgcaaggggcggttacacatgatgatgtgaccgccctccggacggc

SEQ ID NO: 38582 - DNA, 50 bp, unidentified; identical to SEQ ID NO: 32147
  source 1..50: mol_type = unassigned DNA; note = donor_d2ac1a6
  misc_feature 1..23: note = RE
  misc_feature 24..25: note = Core
  misc_feature 26..50: note = LE

SEQ ID NO: 38583 - DNA, 50 bp, unidentified; identical to SEQ ID NO: 31844
  source 1..50: mol_type = unassigned DNA; note = donor_d2b6c7d
  misc_feature 1..22: note = RE
  misc_feature 23..25: note = Core
  misc_feature 26..50: note = LE

SEQ ID NO: 38584 - DNA, 50 bp, unidentified
  source 1..50: mol_type = unassigned DNA; note = donor_d2bddbc
  misc_feature 1..24: note = RE
  misc_feature 25: note = Core
  misc_feature 26..50: note = LE
ctggcccttgacacaaagaggattctgattgaggatgtgggtgggcgcca

SEQ ID NO: 38585 - DNA, 50 bp, unidentified
  source 1..50: mol_type = unassigned DNA; note = donor_d2c9cfb
  misc_feature 1..21: note = RE
  misc_feature 22..25: note = Core
  misc_feature 26..50: note = LE
aaggaggttgacacagggctactcactggtgcaccctccccacggaggaa

SEQ ID NO: 38586 - DNA, 50 bp, unidentified
  source 1..50: mol_type = unassigned DNA; note = donor_d2ca2f9
  misc_feature 1..23: note = RE
  misc_feature 24..25: note = Core
  misc_feature 26..50: note = LE
actcttgatttatatatagttgtctggtatattcaatttgacctatatag

SEQ ID NO: 38587 - DNA, 50 bp, unidentified; identical to SEQ ID NO: 30383
  source 1..50: mol_type = unassigned DNA; note = donor_d2ca7f7
  misc_feature 1..23: note = RE
  misc_feature 24..25: note = Core
  misc_feature 26..50: note = LE

SEQ ID NO: 38588 - DNA, 50 bp, unidentified
  source 1..50: mol_type = unassigned DNA; note = donor_d2ca942
  misc_feature 1..24: note = RE
  misc_feature 25: note = Core
  misc_feature 26..50: note = LE
gcagcttaacaaacaacataggggcgttaccttgttgacaggtccttttg

SEQ ID NO: 38589 - DNA, 50 bp, unidentified
  source 1..50: mol_type = unassigned DNA; note = donor_d2cecf5
  misc_feature 1..23: note = RE
  misc_feature 24..25: note = Core
  misc_feature 26..50: note = LE
aaacggcttgatcaagacggatacttgtcttatcctgaacctggttcctg

SEQ ID NO: 38590 - DNA, 50 bp, unidentified
  source 1..50: mol_type = unassigned DNA; note = donor_d2d1b49
  misc_feature 1..23: note = RE
  misc_feature 24..25: note = Core
  misc_feature 26..50: note = LE
ccgcttgacattcaagacagttgcttgtatctagctcctgccggagtttg

SEQ ID NO: 38591 - DNA, 50 bp, unidentified
  source 1..50: mol_type = unassigned DNA; note = donor_d2da9ed
  misc_feature 1..23: note = RE
  misc_feature 24..25: note = Core
  misc_feature 26..50: note = LE
tgacatctacgctcctgggatgtctaatcagttctgggagtgagccatcc

SEQ ID NO: 38592 - DNA, 50 bp, unidentified; identical to SEQ ID NO: 33200
  source 1..50: mol_type = unassigned DNA; note = donor_d2dc662
  misc_feature 1..24: note = RE
  misc_feature 25: note = Core
  misc_feature 26..50: note = LE

SEQ ID NO: 38593 - DNA, 50 bp, unidentified; identical to SEQ ID NO: 35757
  source 1..50: mol_type = unassigned DNA; note = donor_d2e137e
  misc_feature 1..24: note = RE
  misc_feature 25: note = Core
  misc_feature 26..50: note = LE

SEQ ID NO: 38594 - DNA, 50 bp, unidentified
  source 1..50: mol_type = unassigned DNA; note = donor_d2e3bbc
  misc_feature 1..23: note = RE
  misc_feature 24..25: note = Core
  misc_feature 26..50: note = LE
tttctttgaaaataatacagtatctcttacctttgcacccgattatagaa

SEQ ID NO: 38595 - DNA, 50 bp, unidentified
  source 1..50: mol_type = unassigned DNA; note = donor_d2e6c6a
  misc_feature 1..24: note = RE
  misc_feature 25: note = Core
  misc_feature 26..50: note = LE
gggcttgacgggatataggagcatcagtgaagatgtccccggcacccgtc

SEQ ID NO: 38596 - DNA, 50 bp, unidentified
  source 1..50: mol_type = unassigned DNA; note = donor_d2eb8fd
  misc_feature 1..24: note = RE
  misc_feature 25: note = Core
  misc_feature 26..50: note = LE
tggcaaaccgggagcgaccatctataatgggatggtcgccccctcctgaa

SEQ ID NO: 38597 - DNA, 50 bp, unidentified
  source 1..50: mol_type = unassigned DNA; note = donor_d2f0016
  misc_feature 1..23: note = RE
  misc_feature 24..25: note = Core
  misc_feature 26..50: note = LE
gcacaacgggcggcaaccacagaagatggagtggttgccgccctccccag

SEQ ID NO: 38598 - DNA, 50 bp, unidentified
  source 1..50: mol_type = unassigned DNA; note = donor_d2faf9e
  misc_feature 1..21: note = RE
  misc_feature 22..25: note = Core
  misc_feature 26..50: note = LE
aaaaggggttgacttagggaactcattgctccaccatgaggggtgcgacc

SEQ ID NO: 38599 - DNA, 50 bp, unidentified
  source 1..50: mol_type = unassigned DNA; note = donor_d2fef68
  misc_feature 1..23: note = RE
  misc_feature 24..25: note = Core
  misc_feature 26..50: note = LE
gcatccgacggggcctccacacatgatggggtggacgccccccgacggca

SEQ ID NO: 38600 - DNA, 50 bp, unidentified
  source 1..50: mol_type = unassigned DNA; note = donor_d303463
  misc_feature 1..22: note = RE
  misc_feature 23..25: note = Core
  misc_feature 26..50: note = LE
aagcttggttttatcttagaatgctattagatttgttgtttatattgaag

SEQ ID NO: 38601 - DNA, 50 bp, unidentified
  source 1..50: mol_type = unassigned DNA; note = donor_d31b8c6
  misc_feature 1..24: note = RE
  misc_feature 25: note = Core
  misc_feature 26..50: note = LE
acaaatcccttcatagaagggagcctacttatgtctttcaagacggcccg

SEQ ID NO: 38602 - DNA, 50 bp, unidentified
  source 1..50: mol_type = unassigned DNA; note = donor_d32384e
  misc_feature 1..23: note = RE
  misc_feature 24..25: note = Core
  misc_feature 26..50: note = LE
ggggttgacttttatttgcaggtctgttacaatataattagtcgggtaac

SEQ ID NO: 38603 - DNA, 50 bp, unidentified
  source 1..50: mol_type = unassigned DNA; note = donor_d326399
  misc_feature 1..23: note = RE
  misc_feature 24..25: note = Core
  misc_feature 26..50: note = LE
tgacttgacttttaatagttagtctcgtattataaagtagtagtgattat

SEQ ID NO: 38604 - DNA, 50 bp, unidentified
  source 1..50: mol_type = unassigned DNA; note = donor_d32a399
  misc_feature 1..23: note = RE
  misc_feature 24..25: note = Core
  misc_feature 26..50: note = LE
aggccgcttgacacacagaggcgctgacttgttgaatcgactccagacgc

SEQ ID NO: 38605 - DNA, 50 bp, unidentified
  source 1..50: mol_type = unassigned DNA; note = donor_d33b2e8
  misc_feature 1..24: note = RE
  misc_feature 25: note = Core
  misc_feature 26..50: note = LE
ggcttgacttttaatagttagtcttcgtattattaagtagtagttattag

SEQ ID NO: 38606 - DNA, 50 bp, unidentified
  source 1..50: mol_type = unassigned DNA; note = donor_d33c7ae
  misc_feature 1..23: note = RE
  misc_feature 24..25: note = Core
  misc_feature 26..50: note = LE
gcggcacgggggccgtccacatatgatggagtggacggccccctacggca

SEQ ID NO: 38607 - DNA, 50 bp, unidentified
  source 1..50: mol_type = unassigned DNA; note = donor_d340a5d
  misc_feature 1..22: note = RE
  misc_feature 23..25: note = Core
  misc_feature 26..50: note = LE
tctcttgacttttattggcaggtttgttacaataaatttgccgggtaaag

SEQ ID NO: 38608 - DNA, 50 bp, unidentified
  source 1..50: mol_type = unassigned DNA; note = donor_d350b1a
  misc_feature 1..22: note = RE
  misc_feature 23..25: note = Core
  misc_feature 26..50: note = LE
ctctacttctttgtttcaaacttattacccgtctttctgcgaaagacacc

SEQ ID NO: 38609 - DNA, 50 bp, unidentified; identical to SEQ ID NO: 32730
  source 1..50: mol_type = unassigned DNA; note = donor_d353c5b
  misc_feature 1..24: note = RE
  misc_feature 25: note = Core
  misc_feature 26..50: note = LE

SEQ ID NO: 38610 - DNA, 50 bp, unidentified
  source 1..50: mol_type = unassigned DNA; note = donor_d35748c
  misc_feature 1..23: note = RE
  misc_feature 24..25: note = Core
  misc_feature 26..50: note = LE
tgacattcaagctcctgggatgtctaatgagagttgcgggttggtcattg

SEQ ID NO: 38611 - DNA, 50 bp, unidentified
  source 1..50: mol_type = unassigned DNA; note = donor_d368059
  misc_feature 1..23: note = RE
  misc_feature 24..25: note = Core
  misc_feature 26..50: note = LE
acttgacaagcctcatagaaagtcttatattgggagtgttgcagagattg

SEQ ID NO: 38612 - DNA, 50 bp, unidentified
  source 1..50: mol_type = unassigned DNA; note = donor_d368f10
  misc_feature 1..23: note = RE
  misc_feature 24..25: note = Core
  misc_feature 26..50: note = LE
cataatgagcgataagacggtatcttatgtttcgattttatccaaatccc

SEQ ID NO: 38613 - DNA, 50 bp, unidentified; identical to SEQ ID NO: 30354
  source 1..50: mol_type = unassigned DNA; note = donor_d36d837
  misc_feature 1..23: note = RE
  misc_feature 24..25: note = Core
  misc_feature 26..50: note = LE

SEQ ID NO: 38614 - DNA, 50 bp, unidentified
  source 1..50: mol_type = unassigned DNA; note = donor_d36e7ae
  misc_feature 1..24: note = RE
  misc_feature 25: note = Core
  misc_feature 26..50: note = LE
tggcaaaccgggggcgtccatgtacaatggaatggacgcccccaccttaa

SEQ ID NO: 38615 - DNA, 50 bp, unidentified
  source 1..50: mol_type = unassigned DNA; note = donor_d3714f8
  misc_feature 1..24: note = RE
  misc_feature 25: note = Core
  misc_feature 26..50: note = LE
tggcaagccgggggcgtccatgtacaatgggatggacgcccccactcgaa

SEQ ID NO: 38616 - DNA, 50 bp, unidentified
  source 1..50: mol_type = unassigned DNA; note = donor_d383257
  misc_feature 1..23: note = RE
  misc_feature 24..25: note = Core
  misc_feature 26..50: note = LE
ttgcagacggggcgggccatacgttatggaatggcccgccccaatcccgg

SEQ ID NO: 38617 - DNA, 50 bp, unidentified
  source 1..50: mol_type = unassigned DNA; note = donor_d3868d5
  misc_feature 1..23: note = RE
  misc_feature 24..25: note = Core
  misc_feature 26..50: note = LE
cctcttgactttgtaccattagactcgtataataagatttgcagacggtt

SEQ ID NO: 38618 - DNA, 50 bp, unidentified
  source 1..50: mol_type = unassigned DNA; note = donor_d38f0c2
  misc_feature 1..24: note = RE
  misc_feature 25: note = Core
  misc_feature 26..50: note = LE
tggaaatatggtaaacctagaatacctttgatctaacaaagatagttttt

SEQ ID NO: 38619 - DNA, 50 bp, unidentified
  source 1..50: mol_type = unassigned DNA; note = donor_d391fa4
  misc_feature 1..24: note = RE
  misc_feature 25: note = Core
  misc_feature 26..50: note = LE
tgcagtcaggcggcggaccatacataatgagatggtccgccgcttcgatc

SEQ ID NO: 38620 - DNA, 50 bp, unidentified
  source 1..50: mol_type = unassigned DNA; note = donor_d39568d
  misc_feature 1..22: note = RE
  misc_feature 23..25: note = Core
  misc_feature 26..50: note = LE
cagaaatttgaacaagacagttgcttgtgtcttgagggggtattagaatc

SEQ ID NO: 38621 - DNA, 50 bp, unidentified
  source 1..50: mol_type = unassigned DNA; note = donor_d397af1
  misc_feature 1..24: note = RE
  misc_feature 25: note = Core
  misc_feature 26..50: note = LE
tgtaccgcacggccgggccatacataatgggatggcccggtcgtgctcct

SEQ ID NO: 38622 - DNA, 50 bp, unidentified
  source 1..50: mol_type = unassigned DNA; note = donor_d398bc5
  misc_feature 1..24: note = RE
  misc_feature 25: note = Core
  misc_feature 26..50: note = LE
agccggttgacaacagaggggtgcctacttgacacttcctgtaggaccgg

SEQ ID NO: 38623 - DNA, 50 bp, unidentified
  source 1..50: mol_type = unassigned DNA; note = donor_d3a114f
  misc_feature 1..24: note = RE
  misc_feature 25: note = Core
  misc_feature 26..50: note = LE
ccatgcattgacatagaggggtgcctacttgttgtattgacctacggctg

SEQ ID NO: 38624 - DNA, 50 bp, unidentified
  source 1..50: mol_type = unassigned DNA; note = donor_d3b2771
  misc_feature 1..23: note = RE
  misc_feature 24..25: note = Core
  misc_feature 26..50: note = LE
ggcttgacaaaccgcattaggaatccctacgttgtcctgcgggagacggt

SEQ ID NO: 38625 - DNA, 50 bp, unidentified
  source 1..50: mol_type = unassigned DNA; note = donor_d3b3e38
  misc_feature 1..24: note = RE
  misc_feature 25: note = Core
  misc_feature 26..50: note = LE
ttgcaaaaaggaggagtccatatacaatgggatggactcctcctccccta

SEQ ID NO: 38626 - DNA, 50 bp, unidentified
  source 1..50: mol_type = unassigned DNA; note = donor_d3b89cf
  misc_feature 1..23: note = RE
  misc_feature 24..25: note = Core
  misc_feature 26..50: note = LE
ccgcggcttgacataggagaaaccctcagtgtcagggtgacagtgccgct

SEQ ID NO: 38627 - DNA, 50 bp, unidentified
  source 1..50: mol_type = unassigned DNA; note = donor_d3c4cae
  misc_feature 1..24: note = RE
  misc_feature 25: note = Core
  misc_feature 26..50: note = LE
ttgcaatacggggcggaccatatataatggaatgatccgccccacttcct

SEQ ID NO: 38628 - DNA, 50 bp, unidentified
  source 1..50: mol_type = unassigned DNA; note = donor_d3c5a14
  misc_feature 1..23: note = RE
  misc_feature 24..25: note = Core
  misc_feature 26..50: note = LE
caacttgactattaatagtcagtctcgtattatagtgtgtagccaatctt

SEQ ID NO: 38629 - DNA, 50 bp, unidentified
  source 1..50: mol_type = unassigned DNA; note = donor_d3ccea1
  misc_feature 1..23: note = RE
  misc_feature 24..25: note = Core
  misc_feature 26..50: note = LE
ggtattgactttttatagctggtctcgtataataaatttaagggtaattt

SEQ ID NO: 38630 - DNA, 50 bp, unidentified
  source 1..50: mol_type = unassigned DNA; note = donor_d3d883e
  misc_feature 1..21: note = RE
  misc_feature 22..25: note = Core
  misc_feature 26..50: note = LE
acgcacgttgacacagggcaactcactggtgcaccatcctcaggtcggcg

SEQ ID NO: 38631 - DNA, 50 bp, unidentified
  source 1..50: mol_type = unassigned DNA; note = donor_d3e0fb0
  misc_feature 1..23: note = RE
  misc_feature 24..25: note = Core
  misc_feature 26..50: note = LE
tttttattgacgcaacacggtagcttgtatgtaatagtgaggtgatggtt

SEQ ID NO: 38632 - DNA, 50 bp, unidentified
  source 1..50: mol_type = unassigned DNA; note = donor_d3ed602
  misc_feature 1..23: note = RE
  misc_feature 24..25: note = Core
  misc_feature 26..50: note = LE
tgacatttagaaccgtgggatgtctaatgggattgcatcggtcgcaatag

SEQ ID NO: 38633 - DNA, 50 bp, unidentified
  source 1..50: mol_type = unassigned DNA; note = donor_d3efe78
  misc_feature 1..24: note = RE
  misc_feature 25: note = Core
  misc_feature 26..50: note = LE
ttgcaatggggaggagtccatatacaatgggatggactcctccccgcttt

SEQ ID NO: 38634 - DNA, 50 bp, unidentified
  source 1..50: mol_type = unassigned DNA; note = donor_d3f05cb
  misc_feature 1..23: note = RE
  misc_feature 24..25: note = Core
  misc_feature 26..50: note = LE
gccttgactttttatttgcaggctctactacaatgtatttatggttgaga

SEQ ID NO: 38635 - DNA, 50 bp, unidentified
  source 1..50: mol_type = unassigned DNA; note = donor_d3f1d1f
  misc_feature 1..23: note = RE
  misc_feature 24..25: note = Core
  misc_feature 26..50: note = LE
tgcaaaaacgggagtgaccatagatgagatggtcactccctcctcttgga

SEQ ID NO: 38636 - DNA, 50 bp, unidentified; identical to SEQ ID NO: 32915
  source 1..50: mol_type = unassigned DNA; note = donor_d3f5808
  misc_feature 1..23: note = RE
  misc_feature 24..25: note = Core
  misc_feature 26..50: note = LE

SEQ ID NO: 38637 - DNA, 50 bp, unidentified
  source 1..50: mol_type = unassigned DNA; note = donor_d3f991c
  misc_feature 1..23: note = RE
  misc_feature 24..25: note = Core
  misc_feature 26..50: note = LE
acgcttgactttgaagacggttacttgtatctttaaaccagaccagcgcg

SEQ ID NO: 38638 - DNA, 50 bp, unidentified
  source 1..50: mol_type = unassigned DNA; note = donor_d3fe464
  misc_feature 1..23: note = RE
  misc_feature 24..25: note = Core
  misc_feature 26..50: note = LE
gacggcttcgagacgtggggtgtctaatggcactggatcagtctcgtcac

SEQ ID NO: 38639 - DNA, 50 bp, unidentified
  source 1..50: mol_type = unassigned DNA; note = donor_d40940d
  misc_feature 1..23: note = RE
  misc_feature 24..25: note = Core
  misc_feature 26..50: note = LE
cgaagtaaaaaacaagacggtatcttgtatctcgacttgagcctcctcag

SEQ ID NO: 38640 - DNA, 50 bp, unidentified; identical to SEQ ID NO: 34069
  source 1..50: mol_type = unassigned DNA; note = donor_d40c2c7
  misc_feature 1..24: note = RE
  misc_feature 25: note = Core
  misc_feature 26..50: note = LE

SEQ ID NO: 38641 - DNA, 50 bp, unidentified
  source 1..50: mol_type = unassigned DNA; note = donor_d4124eb
  misc_feature 1..24: note = RE
  misc_feature 25: note = Core
  misc_feature 26..50: note = LE
aattagcttgacatatcaccagattcgtataataagtgtatagccagtag

SEQ ID NO: 38642 - DNA, 50 bp, unidentified
  source 1..50: mol_type = unassigned DNA; note = donor_d4133d3
  misc_feature 1..23: note = RE
  misc_feature 24..25: note = Core
  misc_feature 26..50: note = LE
aagcgtaatcgtcaagacagttgcttgtatcttggagttgtggtacatga

SEQ ID NO: 38643 - DNA, 50 bp, unidentified
  source 1..50: mol_type = unassigned DNA; note = donor_d416370
  misc_feature 1..24: note = RE
  misc_feature 25: note = Core
  misc_feature 26..50: note = LE
tgccacacgggaggcgtccatataatggtatggacgcctcccacctcaga

SEQ ID NO: 38644 - DNA, 50 bp, unidentified
  source 1..50: mol_type = unassigned DNA; note = donor_d41b4cf
  misc_feature 1..22: note = RE
  misc_feature 23..25: note = Core
  misc_feature 26..50: note = LE
cttgacttttatgatagtttgtcttatattattattcgtaggtagctcct

SEQ ID NO: 38645 - DNA, 50 bp, unidentified; identical to SEQ ID NO: 35222
  source 1..50: mol_type = unassigned DNA; note = donor_d422812
  misc_feature 1..21: note = RE
  misc_feature 22..25: note = Core
  misc_feature 26..50: note = LE

SEQ ID NO: 38646 - DNA, 50 bp, unidentified
  source 1..50: mol_type = unassigned DNA; note = donor_d42bf61
  misc_feature 1..23: note = RE
  misc_feature 24..25: note = Core
  misc_feature 26..50: note = LE
gtggccgcttgacaggacattgagaggccataacaatggggtggtggtcc

SEQ ID NO: 38647 - DNA, 50 bp, unidentified
  source 1..50: mol_type = unassigned DNA; note = donor_d451c4c
  misc_feature 1..22: note = RE
  misc_feature 23..25: note = Core
  misc_feature 26..50: note = LE
gtccttgacacttcatagttggtcttgtatgatgttttatgtcctgaggg

SEQ ID NO: 38648 - DNA, 50 bp, unidentified
  source 1..50: mol_type = unassigned DNA; note = donor_d451d30
  misc_feature 1..24: note = RE
  misc_feature 25: note = Core
  misc_feature 26..50: note = LE
aaccggttgacaacagaagggagcctactagacgattcacgtaggaccgg

SEQ ID NO: 38649 - DNA, 50 bp, unidentified
  source 1..50: mol_type = unassigned DNA; note = donor_d461da6
  misc_feature 1..23: note = RE
  misc_feature 24..25: note = Core
  misc_feature 26..50: note = LE
acaccaacccgccccgatagagaagatggggtatcggggctggtcgccgc

SEQ ID NO: 38650 - DNA, 50 bp, unidentified; identical to SEQ ID NO: 30668
  source 1..50: mol_type = unassigned DNA; note = donor_d4644ea
  misc_feature 1..23: note = RE
  misc_feature 24..25: note = Core
  misc_feature 26..50: note = LE

SEQ ID NO: 38651 - DNA, 50 bp, unidentified
  source 1..50: mol_type = unassigned DNA; note = donor_d468f00
  misc_feature 1..23: note = RE
  misc_feature 24..25: note = Core
  misc_feature 26..50: note = LE
gcgcctgtaggggcgtccacagatgatggggtggacgccccccgatggca

SEQ ID NO: 38652 - DNA, 50 bp, unidentified
  source 1..50: mol_type = unassigned DNA; note = donor_d46f21b
  misc_feature 1..23: note = RE
  misc_feature 24..25: note = Core
  misc_feature 26..50: note = LE
ataagcccccaatctaatggttgcttgtattagcgggctggtttatcctg

SEQ ID NO: 38653 - DNA, 50 bp, unidentified
  source 1..50: mol_type = unassigned DNA; note = donor_d46f78a
  misc_feature 1..24: note = RE
  misc_feature 25: note = Core
  misc_feature 26..50: note = LE
ttgcaatacggggcggaccatatataatggaatggtccgccccactccca

SEQ ID NO: 38654 - DNA, 50 bp, unidentified
  source 1..50: mol_type = unassigned DNA; note = donor_d4773fc
  misc_feature 1..22: note = RE
  misc_feature 23..25: note = Core
  misc_feature 26..50: note = LE
taggacttgactttttagcaggtttggtacaaaataagcatagcacccga

SEQ ID NO: 38655 - DNA, 50 bp, unidentified
  source 1..50: mol_type = unassigned DNA; note = donor_d4843b4
  misc_feature 1..23: note = RE
  misc_feature 24..25: note = Core
  misc_feature 26..50: note = LE
tgcaattgggtggagtccatagataatgagatggactccaccctcccgac

SEQ ID NO: 38656 - DNA, 50 bp, unidentified
  source 1..50: mol_type = unassigned DNA; note = donor_d485c6e
  misc_feature 1..23: note = RE
  misc_feature 24..25: note = Core
  misc_feature 26..50: note = LE
tttgttgtaagttaatacagaatctcctatgtttgtaaaagaagttaaac

SEQ ID NO: 38657 - DNA, 50 bp, unidentified; identical to SEQ ID NO: 33215
  source 1..50: mol_type = unassigned DNA; note = donor_d487a0d
  misc_feature 1..23: note = RE
  misc_feature 24..25: note = Core
  misc_feature 26..50: note = LE

SEQ ID NO: 38658 - DNA, 50 bp, unidentified
  source 1..50: mol_type = unassigned DNA; note = donor_d488d05
  misc_feature 1..23: note = RE
  misc_feature 24..25: note = Core
  misc_feature 26..50: note = LE
tatcttgactctttatagttagtctcgtattatatagtcatagcttaatt

SEQ ID NO: 38659 - DNA, 50 bp, unidentified
  source 1..50: mol_type = unassigned DNA; note = donor_d48a236
  misc_feature 1..23: note = RE
  misc_feature 24..25: note = Core
  misc_feature 26..50: note = LE
ccttgacaatccaagggggatgttctaccattggatttcgtgcggagacg

SEQ ID NO: 38660 - DNA, 50 bp, unidentified
  source 1..50: mol_type = unassigned DNA; note = donor_d498aaa
  misc_feature 1..23: note = RE
  misc_feature 24..25: note = Core
  misc_feature 26..50: note = LE
ctacttgacttttatttgcaggtctgttacaatatatttgtcgggtaatt

SEQ ID NO: 38661 - DNA, 50 bp, unidentified; identical to SEQ ID NO: 33669
  source 1..50: mol_type = unassigned DNA; note = donor_d4a47c8
  misc_feature 1..23: note = RE
  misc_feature 24..25: note = Core
  misc_feature 26..50: note = LE

SEQ ID NO: 38662 - DNA, 50 bp, unidentified
  source 1..50: mol_type = unassigned DNA; note = donor_d4ab020
  misc_feature 1..23: note = RE
  misc_feature 24..25: note = Core
  misc_feature 26..50: note = LE
gcgttttttggggcgtccacagatgatggggtggacgccccccgacggca

SEQ ID NO: 38663 - DNA, 50 bp, unidentified
  source 1..50: mol_type = unassigned DNA; note = donor_d4af53a
  misc_feature 1..24: note = RE
  misc_feature 25: note = Core
  misc_feature 26..50: note = LE
cagcttcttgacacagaggggtgcctgcttgttccattgacccaggaccg

SEQ ID NO: 38664 - DNA, 50 bp, unidentified; identical to SEQ ID NO: 30706
  source 1..50: mol_type = unassigned DNA; note = donor_d4b3cf9
  misc_feature 1..24: note = RE
  misc_feature 25: note = Core
  misc_feature 26..50: note = LE

SEQ ID NO: 38665 - DNA, 50 bp, unidentified
  source 1..50: mol_type = unassigned DNA; note = donor_d4b5a54
  misc_feature 1..21: note = RE
  misc_feature 22..25: note = Core
  misc_feature 26..50: note = LE
ggcttgacatctaatagttggtcacgtataattaaaaccatctcgaaagg

SEQ ID NO: 38666 - DNA, 50 bp, unidentified
  source 1..50: mol_type = unassigned DNA; note = donor_d4bc75f
  misc_feature 1..23: note = RE
  misc_feature 24..25: note = Core
  misc_feature 26..50: note = LE
aacgaccttgaccaatacggatacttgtcttatgattttccagggttcct

SEQ ID NO: 38667 - DNA, 50 bp, unidentified
  source 1..50: mol_type = unassigned DNA; note = donor_d4bcdbd
  misc_feature 1..23: note = RE
  misc_feature 24..25: note = Core
  misc_feature 26..50: note = LE
gcatcacgggcggcaaccacacaagatggggtggttgccgccctccccag

SEQ ID NO: 38668 - DNA, 50 bp, unidentified
  source 1..50: mol_type = unassigned DNA; note = donor_d4c0efe
  misc_feature 1..24: note = RE
  misc_feature 25: note = Core
  misc_feature 26..50: note = LE
tatattgacaagtattagctggtttcgtattatgaggtcagccaattaat

SEQ ID NO: 38669 - DNA, 50 bp, unidentified
  source 1..50: mol_type = unassigned DNA; note = donor_d4c3533
  misc_feature 1..24: note = RE
  misc_feature 25: note = Core
  misc_feature 26..50: note = LE
ccagcggcgttgacatagaagcatctattggtgcacagtgttgatgccgg

SEQ ID NO: 38670 - DNA, 50 bp, unidentified
  source 1..50: mol_type = unassigned DNA; note = donor_d4e92fb
  misc_feature 1..24: note = RE
  misc_feature 25: note = Core
  misc_feature 26..50: note = LE
tgcaaaagcgggggagaccatagataatgagatggtctcccccacccatg

SEQ ID NO: 38671 - DNA, 50 bp, unidentified; identical to SEQ ID NO: 34834
  source 1..50: mol_type = unassigned DNA; note = donor_d50722e
  misc_feature 1..21: note = RE
  misc_feature 22..25: note = Core
  misc_feature 26..50: note = LE

SEQ ID NO: 38672 - DNA, 50 bp, unidentified
  source 1..50: mol_type = unassigned DNA; note = donor_d508af7
  misc_feature 1..23: note = RE
  misc_feature 24..25: note = Core
  misc_feature 26..50: note = LE
tgcaaatgggagccgtccacatatgttgaagtggacggctcccaacggca

SEQ ID NO: 38673 - DNA, 50 bp, unidentified
  source 1..50: mol_type = unassigned DNA; note = donor_d510288
  misc_feature 1..24: note = RE
  misc_feature 25: note = Core
  misc_feature 26..50: note = LE
acagcttgaccaaacccataggggcccattacctttttggtggtcccgca

SEQ ID NO: 38674 - DNA, 50 bp, unidentified
  source 1..50: mol_type = unassigned DNA; note = donor_d51cd95
  misc_feature 1..24: note = RE
  misc_feature 25: note = Core
  misc_feature 26..50: note = LE
tgcgacgcgcggccgggccatacataatgggatggcccggccgcgctcag

SEQ ID NO: 38675 - DNA, 50 bp, unidentified; identical to SEQ ID NO: 30383
  source 1..50: mol_type = unassigned DNA; note = donor_d524864
  misc_feature 1..23: note = RE
  misc_feature 24..25: note = Core
  misc_feature 26..50: note = LE

SEQ ID NO: 38676 - DNA, 50 bp, unidentified
  source 1..50: mol_type = unassigned DNA; note = donor_d526b78
  misc_feature 1..21: note = RE
  misc_feature 22..25: note = Core
  misc_feature 26..50: note = LE
ttgacgaagaacatagggacaccccgttacctttctggtggccccgatgg

SEQ ID NO: 38677 - DNA, 50 bp, unidentified
  source 1..50: mol_type = unassigned DNA; note = donor_d52e48d
  misc_feature 1..23: note = RE
  misc_feature 24..25: note = Core
  misc_feature 26..50: note = LE
ttgcttgatttttaatagttagtctcgtataattaaatagtagtagtttt

SEQ ID NO: 38678 - DNA, 50 bp, unidentified
  source 1..50: mol_type = unassigned DNA; note = donor_d5312e9
  misc_feature 1..23: note = RE
  misc_feature 24..25: note = Core
  misc_feature 26..50: note = LE
tgacatttaagctcctgggatgtctaatgagtgttagcgggtcggccatc

SEQ ID NO: 38679 - DNA, 50 bp, unidentified
  source 1..50: mol_type = unassigned DNA; note = donor_d53244e
  misc_feature 1..23: note = RE
  misc_feature 24..25: note = Core
  misc_feature 26..50: note = LE
taacatcagagccgtttctttctagccccgcacccgtgcgcggatccgct

SEQ ID NO: 38680 - DNA, 50 bp, unidentified
  source 1..50: mol_type = unassigned DNA; note = donor_d543779
  misc_feature 1..23: note = RE
  misc_feature 24..25: note = Core
  misc_feature 26..50: note = LE
agaccaaaccaacataacagttgccctgtgtcttggaagtctgtcaggat

SEQ ID NO: 38681 - DNA, 50 bp, unidentified; identical to SEQ ID NO: 30383
  source 1..50: mol_type = unassigned DNA; note = donor_d544a66
  misc_feature 1..23: note = RE
  misc_feature 24..25: note = Core
  misc_feature 26..50: note = LE

SEQ ID NO: 38682 - DNA, 50 bp, unidentified
  source 1..50: mol_type = unassigned DNA; note = donor_d546cbf
  misc_feature 1..23: note = RE
  misc_feature 24..25: note = Core
  misc_feature 26..50: note = LE
gccaatagggagccgtccacacatgatggggtggacggctcccgctcccg

SEQ ID NO: 38683 - DNA, 50 bp, unidentified
  source 1..50: mol_type = unassigned DNA; note = donor_d54b98e
  misc_feature 1..23: note = RE
  misc_feature 24..25: note = Core
  misc_feature 26..50: note = LE
agccgcctagcctttaatggttgcttgtaatagcgcgatcagttattctc

SEQ ID NO: 38684 - DNA, 50 bp, unidentified; identical to SEQ ID NO: 30451
  source 1..50: mol_type = unassigned DNA; note = donor_d558dae
  misc_feature 1..23: note = RE
  misc_feature 24..25: note = Core
  misc_feature 26..50: note = LE

SEQ ID NO: 38685 - DNA, 50 bp, unidentified
  source 1..50: mol_type = unassigned DNA; note = donor_d561c05
  misc_feature 1..19: note = RE
  misc_feature 20..25: note = Core
  misc_feature 26..50: note = LE
tttggaatttaaaacagtaccttttatttttactgagaatttagaaaagg

SEQ ID NO: 38686 - DNA, 50 bp, unidentified
  source 1..50: mol_type = unassigned DNA; note = donor_d5659e4
  misc_feature 1..24: note = RE
  misc_feature 25: note = Core
  misc_feature 26..50: note = LE
tgcaacaaggcggcggaccatacataatgggatggtccgccgccttttct

SEQ ID NO: 38687 - DNA, 50 bp, unidentified
  source 1..50: mol_type = unassigned DNA; note = donor_d569451
  misc_feature 1..23: note = RE
  misc_feature 24..25: note = Core
  misc_feature 26..50: note = LE
aagcttgattttcgagacagttgcttgtatctagatcctcagcagagttt

SEQ ID NO: 38688 - DNA, 50 bp, unidentified
  source 1..50: mol_type = unassigned DNA; note = donor_d56c257
  misc_feature 1..24: note = RE
  misc_feature 25: note = Core
  misc_feature 26..50: note = LE
tgcaaacgagggggagtccatatacaatgggatggactcctcctcaccta

SEQ ID NO: 38689 - DNA, 50 bp, unidentified
  source 1..50: mol_type = unassigned DNA; note = donor_d572118
  misc_feature 1..23: note = RE
  misc_feature 24..25: note = Core
  misc_feature 26..50: note = LE
gcagccccgggggcgtccatacacgtgatggtgtggacgccccctcacgg

SEQ ID NO: 38690 - DNA, 50 bp, unidentified
  source 1..50: mol_type = unassigned DNA; note = donor_d574801
  misc_feature 1..23: note = RE
  misc_feature 24..25: note = Core
  misc_feature 26..50: note = LE
gtacaccacgggacgtccatatatgatgtgatggacgtccctcctcaaca

SEQ ID NO: 38691 - DNA, 50 bp, unidentified; identical to SEQ ID NO: 36831
  source 1..50: mol_type = unassigned DNA; note = donor_d578bc0
  misc_feature 1..23: note = RE
  misc_feature 24..25: note = Core
  misc_feature 26..50: note = LE

SEQ ID NO: 38692 - DNA, 50 bp, unidentified
  source 1..50: mol_type = unassigned DNA; note = donor_d57a8ff
  misc_feature 1..24: note = RE
  misc_feature 25: note = Core
  misc_feature 26..50: note = LE
gaagtccttgacccaaagaggattctgcttgagactccgagcaggcgctg

SEQ ID NO: 38693 - DNA, 50 bp, unidentified; identical to SEQ ID NO: 34329
  source 1..50: mol_type = unassigned DNA; note = donor_d5a6709
  misc_feature 1..24: note = RE
  misc_feature 25: note = Core
  misc_feature 26..50: note = LE

SEQ ID NO: 38694 - DNA, 50 bp, unidentified
  source 1..50: mol_type = unassigned DNA; note = donor_d5ac63d
  misc_feature 1..24: note = RE
  misc_feature 25: note = Core
  misc_feature 26..50: note = LE
tgcagtcgtgcggcggaccatacataatgagatggtccgccgcttgatct

SEQ ID NO: 38695 - DNA, 50 bp, unidentified
  source 1..50: mol_type = unassigned DNA; note = donor_d5afd73
  misc_feature 1..24: note = RE
  misc_feature 25: note = Core
  misc_feature 26..50: note = LE
agtgcttgacgaactacataggggcgttactatgttcgcacctcgataat

SEQ ID NO: 38696 - DNA, 50 bp, unidentified
  source 1..50: mol_type = unassigned DNA; note = donor_d5b1927
  misc_feature 1..22: note = RE
  misc_feature 23..25: note = Core
  misc_feature 26..50: note = LE
gacgggagcgttgcgattagacaacatggggtaatcgcggcgcgatccgc

SEQ ID NO: 38697 - DNA, 50 bp, unidentified; identical to SEQ ID NO: 32471
  source 1..50: mol_type = unassigned DNA; note = donor_d5bf094
  misc_feature 1..24: note = RE
  misc_feature 25: note = Core
  misc_feature 26..50: note = LE

SEQ ID NO: 38698 - DNA, 50 bp, unidentified; identical to SEQ ID NO: 32575
  source 1..50: mol_type = unassigned DNA; note = donor_d5d296c
  misc_feature 1..23: note = RE
  misc_feature 24..25: note = Core
  misc_feature 26..50: note = LE

SEQ ID NO: 38699 - DNA, 50 bp, unidentified
  source 1..50: mol_type = unassigned DNA; note = donor_d5d778e
  misc_feature 1..24: note = RE
  misc_feature 25: note = Core
  misc_feature 26..50: note = LE
aatgttgacaactattagctggtatcgtattataaggtcagccagtcatt

SEQ ID NO: 38700 - DNA, 50 bp, unidentified
  source 1..50: mol_type = unassigned DNA; note = donor_d5dd374
  misc_feature 1..23: note = RE
  misc_feature 24..25: note = Core
  misc_feature 26..50: note = LE
gcaaggacgggggcgtccacacatgatggggtggacgccccctgctcccc

SEQ ID NO: 38701 - DNA, 50 bp, unidentified
  source 1..50: mol_type = unassigned DNA; note = donor_d5de197
  misc_feature 1..21: note = RE
  misc_feature 22..25: note = Core
  misc_feature 26..50: note = LE
acctcttgacacagagaggcgccaacttgttaaatctttgcaggtgatcg

SEQ ID NO: 38702 - DNA, 50 bp, unidentified
  source 1..50: mol_type = unassigned DNA; note = donor_d5f781e
  misc_feature 1..22: note = RE
  misc_feature 23..25: note = Core
  misc_feature 26..50: note = LE
caacgcgggcgtcgtccacacatgatgaggtggacggcgcccgcacccgg

SEQ ID NO: 38703 - DNA, 50 bp, unidentified
  source 1..50: mol_type = unassigned DNA; note = donor_d605496
  misc_feature 1..24: note = RE
  misc_feature 25: note = Core
  misc_feature 26..50: note = LE
cgcaaggttgggggcgtccatgtacaatgggatggacgcccccatcctcc

SEQ ID NO: 38704 - DNA, 50 bp, unidentified
  source 1..50: mol_type = unassigned DNA; note = donor_d607358
  misc_feature 1..23: note = RE
  misc_feature 24..25: note = Core
  misc_feature 26..50: note = LE
cagcgtgaccgccaagacggtatcttatatctcgattttgtgttcttcaa

SEQ ID NO: 38705 - DNA, 50 bp, unidentified
  source 1..50: mol_type = unassigned DNA; note = donor_d60840f
  misc_feature 1..21: note = RE
  misc_feature 22..25: note = Core
  misc_feature 26..50: note = LE
gcagcgacttgaccaagagagctcattggatgactatggccaggcgggcc

SEQ ID NO: 38706 - DNA, 50 bp, unidentified
  source 1..50: mol_type = unassigned DNA; note = donor_d613fab
  misc_feature 1..24: note = RE
  misc_feature 25: note = Core
  misc_feature 26..50: note = LE
aagtttgactatcaagacggtagcttgtatcttgttttctgtagtggtta

SEQ ID NO: 38707 - DNA, 50 bp, unidentified
  source 1..50: mol_type = unassigned DNA; note = donor_d61b1df
  misc_feature 1..24: note = RE
  misc_feature 25: note = Core
  misc_feature 26..50: note = LE
ccgcctcttgacacagaggggtgcctactagacgattcctctaggaccgg

SEQ ID NO: 38708 - DNA, 50 bp, unidentified
  source 1..50: mol_type = unassigned DNA; note = donor_d61f085
  misc_feature 1..23: note = RE
  misc_feature 24..25: note = Core
  misc_feature 26..50: note = LE
cccggtgaggttcaagacggtatcttgtatctcgactatcgctccgtcag

SEQ ID NO: 38709 - DNA, 50 bp, unidentified
  source 1..50: mol_type = unassigned DNA; note = donor_d629fb7
  misc_feature 1..23: note = RE
  misc_feature 24..25: note = Core
  misc_feature 26..50: note = LE
cggcttgacacgcacattaggcagccctacctttctgttcgtgctccggc

SEQ ID NO: 38710 - DNA, 50 bp, unidentified
  source 1..50: mol_type = unassigned DNA; note = donor_d62c74d
  misc_feature 1..24: note = RE
  misc_feature 25: note = Core
  misc_feature 26..50: note = LE
tgcacaggcggggcagaccatacataatgggatggtctgccccgccgaac

SEQ ID NO: 38711 - DNA, 50 bp, unidentified
  source 1..50: mol_type = unassigned DNA; note = donor_d62f203
  misc_feature 1..22: note = RE
  misc_feature 23..25: note = Core
  misc_feature 26..50: note = LE
attactttagggagtccatataagatgtatggactccctaccccgaaagg

SEQ ID NO: 38712 - DNA, 50 bp, unidentified
  source 1..50: mol_type = unassigned DNA; note = donor_d632b63
  misc_feature 1..23: note = RE
  misc_feature 24..25: note = Core
  misc_feature 26..50: note = LE
ggggtagccccgtaccatagaatcttgtatggtaggacttgaagggagga

SEQ ID NO: 38713 - DNA, 50 bp, unidentified
  source 1..50: mol_type = unassigned DNA; note = donor_d63bb23
  misc_feature 1..24: note = RE
  misc_feature 25: note = Core
  misc_feature 26..50: note = LE
tgcaaaaacgggggtgaccatagataatgagatggtcaccccctcctcgc

SEQ ID NO: 38714 - DNA, 50 bp, unidentified
  source 1..50: mol_type = unassigned DNA; note = donor_d63c97f
  misc_feature 1..21: note = RE
  misc_feature 22..25: note = Core
  misc_feature 26..50: note = LE
ttgacaaaacccatagggacaccccgttacctttttgatcgtccccagcc

SEQ ID NO: 38715 - DNA, 50 bp, unidentified
  source 1..50: mol_type = unassigned DNA; note = donor_d64493f
  misc_feature 1..22: note = RE
  misc_feature 23..25: note = Core
  misc_feature 26..50: note = LE
cgcttgactcccaatacggttgcttgtatattcccttctgtgacgtcgac

SEQ ID NO: 38716 - DNA, 50 bp, unidentified
  source 1..50: mol_type = unassigned DNA; note = donor_d644985
  misc_feature 1..24: note = RE
  misc_feature 25: note = Core
  misc_feature 26..50: note = LE
atgatttgcttttatcatagtaatcctttagatttgctaactgagaatat

SEQ ID NO: 38717 - DNA, 50 bp, unidentified
  source 1..50: mol_type = unassigned DNA; note = donor_d6507dd
  misc_feature 1..22: note = RE
  misc_feature 23..25: note = Core
  misc_feature 26..50: note = LE
catcctgggcggcaaccagagaagatgggatggttgccgccctccccaga

SEQ ID NO: 38718 - DNA, 50 bp, unidentified
  source 1..50: mol_type = unassigned DNA; note = donor_d65ee61
  misc_feature 1..21: note = RE
  misc_feature 22..25: note = Core
  misc_feature 26..50: note = LE
cgagaggttgacacagggggtgtcactagtgcaccctcttccgtgcgggc

SEQ ID NO: 38719 - DNA, 50 bp, unidentified
  source 1..50: mol_type = unassigned DNA; note = donor_d662f1f
  misc_feature 1..24: note = RE
  misc_feature 25: note = Core
  misc_feature 26..50: note = LE
tgcaagcccgggggagtccatatacaatgggatggactccccctccccct

SEQ ID NO: 38720 - DNA, 50 bp, unidentified
  source 1..50: mol_type = unassigned DNA; note = donor_d665eb2
  misc_feature 1..23: note = RE
  misc_feature 24..25: note = Core
  misc_feature 26..50: note = LE
acatttggtagttaacacagaatctcctatgtttgtctattgaagtaaag

SEQ ID NO: 38721 - DNA, 50 bp, unidentified
  source 1..50: mol_type = unassigned DNA; note = donor_d66b60e
  misc_feature 1..24: note = RE
  misc_feature 25: note = Core
  misc_feature 26..50: note = LE
ttgacaaccgggggagtccatatagaatgacatggactccccctcatcag

SEQ ID NO: 38722 - DNA, 50 bp, unidentified
  source 1..50: mol_type = unassigned DNA; note = donor_d675079
  misc_feature 1..23: note = RE
  misc_feature 24..25: note = Core
  misc_feature 26..50: note = LE
gctaaaacctgacaatacagttgcctgtgtattgcgtctgtgctagaatg

SEQ ID NO: 38723 - DNA, 50 bp, unidentified
  source 1..50: mol_type = unassigned DNA; note = donor_d677e14
  misc_feature 1..23: note = RE
  misc_feature 24..25: note = Core
  misc_feature 26..50: note = LE
caaaaagggagccatccacacaagatggtgtggatggctcctgcaccatc

SEQ ID NO: 38724 - DNA, 50 bp, unidentified
  source 1..50: mol_type = unassigned DNA; note = donor_d6792c0
  misc_feature 1..23: note = RE
  misc_feature 24..25: note = Core
  misc_feature 26..50: note = LE
ttcgcttgaactcaagacagttacttgtatcttggcaattgagcagctgt

SEQ ID NO: 38725 - DNA, 50 bp, unidentified
  source 1..50: mol_type = unassigned DNA; note = donor_d67d97e
  misc_feature 1..23: note = RE
  misc_feature 24..25: note = Core
  misc_feature 26..50: note = LE
cggcttgacatcgtcattgggaagtcctaccttccaagcgtgggtttgag

SEQ ID NO: 38726 - DNA, 50 bp, unidentified
  source 1..50: mol_type = unassigned DNA; note = donor_d68aacf
  misc_feature 1..23: note = RE
  misc_feature 24..25: note = Core
  misc_feature 26..50: note = LE
tgcttgacgagcgctattgggaagtcctaccgttcttgcacgggtccacg

SEQ ID NO: 38727 - DNA, 50 bp, unidentified; identical to SEQ ID NO: 30383
  source 1..50: mol_type = unassigned DNA; note = donor_d692b12
  misc_feature 1..23: note = RE
  misc_feature 24..25: note = Core
  misc_feature 26..50: note = LE

SEQ ID NO: 38728 - DNA, 50 bp, unidentified
  source 1..50: mol_type = unassigned DNA; note = donor_d698a88
  misc_feature 1..23: note = RE
  misc_feature 24..25: note = Core
  misc_feature 26..50: note = LE
gccacggtgatgattttccggtcagtccttttatccccgcgggtgacgtc

SEQ ID NO: 38729 - DNA, 50 bp, unidentified
  source 1..50: mol_type = unassigned DNA; note = donor_d6a3c31
  misc_feature 1..23: note = RE
  misc_feature 24..25: note = Core
  misc_feature 26..50: note = LE
gcacttgacattttatttgtaggcagttactatatatttggttagaggcg

SEQ ID NO: 38730 - DNA, 50 bp, unidentified
  source 1..50: mol_type = unassigned DNA; note = donor_d6ab413
  misc_feature 1..22: note = RE
  misc_feature 23..25: note = Core
  misc_feature 26..50: note = LE
catctaggacggcaaccacagaagatggggtggttgccgtcctccctcaa

SEQ ID NO: 38731 - DNA, 50 bp, unidentified
  source 1..50: mol_type = unassigned DNA; note = donor_d6ad3bb
  misc_feature 1..23: note = RE
  misc_feature 24..25: note = Core
  misc_feature 26..50: note = LE
tgcctggcgggccgttccacatatgatgaggtggaacggccctccaccac

SEQ ID NO: 38732 - DNA, 50 bp, unidentified
  source 1..50: mol_type = unassigned DNA; note = donor_d6b007e
  misc_feature 1..24: note = RE
  misc_feature 25: note = Core
  misc_feature 26..50: note = LE
tgacgaaagagataagggcacccccgttaccttcttcgtggccccgggcc

SEQ ID NO: 38733 - DNA, 50 bp, unidentified
  source 1..50: mol_type = unassigned DNA; note = donor_d6b061c
  misc_feature 1..23: note = RE
  misc_feature 24..25: note = Core
  misc_feature 26..50: note = LE
gttcttgacatttaaccgctggactcgtataataatttttgtaagcatct

SEQ ID NO: 38734 - DNA, 50 bp, unidentified
  source 1..50: mol_type = unassigned DNA; note = donor_d6c2a3c
  misc_feature 1..23: note = RE
  misc_feature 24..25: note = Core
  misc_feature 26..50: note = LE
tgggttgacacttaatagttaatcttgtattatagagtagtagttattaa

SEQ ID NO: 38735 - DNA, 50 bp, unidentified
  source 1..50: mol_type = unassigned DNA; note = donor_d6c5b66
  misc_feature 1..23: note = RE
  misc_feature 24..25: note = Core
  misc_feature 26..50: note = LE
acaggcacgcctgttttcatagaagatgtaatgaaaacggtcgtgcctcc

SEQ ID NO: 38736 - DNA, 50 bp, unidentified
  source 1..50: mol_type = unassigned DNA; note = donor_d6c9b77
  misc_feature 1..23: note = RE
  misc_feature 24..25: note = Core
  misc_feature 26..50: note = LE
ccgcttgacctgcaacacagtcgcttgtatctctcccttgcccgctgaca

SEQ ID NO: 38737 - DNA, 50 bp, unidentified
  source 1..50: mol_type = unassigned DNA; note = donor_d6ce14d
  misc_feature 1..23: note = RE
  misc_feature 24..25: note = Core
  misc_feature 26..50: note = LE
gcggggaggaggccgtccacatatgttggagtggacggcccccgaacggc

SEQ ID NO: 38738 - DNA, 50 bp, unidentified
  source 1..50: mol_type = unassigned DNA; note = donor_d6d0437
  misc_feature 1..21: note = RE
  misc_feature 22..25: note = Core
  misc_feature 26..50: note = LE
caaggggttgacatagagggtgtcactggtccacactcctcgtgtcgaga

SEQ ID NO: 38739 - DNA, 50 bp, unidentified
  source 1..50: mol_type = unassigned DNA; note = donor_d6e03be
  misc_feature 1..23: note = RE
  misc_feature 24..25: note = Core
  misc_feature 26..50: note = LE
agggttgactattcatagctggtcttgtatgatgtttatagaagctaaaa

SEQ ID NO: 38740 - DNA, 50 bp, unidentified
  source 1..50: mol_type = unassigned DNA; note = donor_d6e26b4
  misc_feature 1..22: note = RE
  misc_feature 23..25: note = Core
  misc_feature 26..50: note = LE
gacaaacgcgcccgatcagagaagcatcggtgatcgggcgggctcgtggc

SEQ ID NO: 38741 - DNA, 50 bp, unidentified
  source 1..50: mol_type = unassigned DNA; note = donor_d6e2861
  misc_feature 1..23: note = RE
  misc_feature 24..25: note = Core
  misc_feature 26..50: note = LE
gacttgacagctcaaaacatatcagacataatgatttgacctgcccttcc

SEQ ID NO: 38742 - DNA, 50 bp, unidentified
  source 1..50: mol_type = unassigned DNA; note = donor_d6e95dd
  misc_feature 1..23: note = RE
  misc_feature 24..25: note = Core
  misc_feature 26..50: note = LE
ctatgcgggagccatccacacaggatggggtggatggctcccgctcccgg

SEQ ID NO: 38743 - DNA, 50 bp, unidentified
  source 1..50: mol_type = unassigned DNA; note = donor_d6ed952
  misc_feature 1..23: note = RE
  misc_feature 24..25: note = Core
  misc_feature 26..50: note = LE
gacaccttcgggtcaaggggtgtctaatgggactggaaagtcttccgtag

SEQ ID NO: 38744 - DNA, 50 bp, unidentified
  source 1..50: mol_type = unassigned DNA; note = donor_d6f1f45
  misc_feature 1..22: note = RE
  misc_feature 23..25: note = Core
  misc_feature 26..50: note = LE
ttgccagggcgccgtccacacgtgatgctgcggacggcgccccctctgcg

SEQ ID NO: 38745 - DNA, 50 bp, unidentified
  source 1..50: mol_type = unassigned DNA; note = donor_d705a7a
  misc_feature 1..24: note = RE
  misc_feature 25: note = Core
  misc_feature 26..50: note = LE
ccatttcgttccgcgcttagggcgtagcacctacggaatgaaggagccgc

SEQ ID NO: 38746 - DNA, 50 bp, unidentified
  source 1..50: mol_type = unassigned DNA; note = donor_d706540
  misc_feature 1..22: note = RE
  misc_feature 23..25: note = Core
  misc_feature 26..50: note = LE
acctcaacacgccgaatagagaagatgggatattcggccggctgtcgtaa

SEQ ID NO: 38747 - DNA, 50 bp, unidentified
  source 1..50: mol_type = unassigned DNA; note = donor_d709275
  misc_feature 1..23: note = RE
  misc_feature 24..25: note = Core
  misc_feature 26..50: note = LE
ggatggcttgaccacaacggatacttgtcttatgacctttgcggttcctg

SEQ ID NO: 38748 - DNA, 50 bp, unidentified
  source 1..50: mol_type = unassigned DNA; note = donor_d709292
  misc_feature 1..23: note = RE
  misc_feature 24..25: note = Core
  misc_feature 26..50: note = LE
agtgttgcgctgcaccatagaatcttgtatggttttcctgcaggtccaaa

SEQ ID NO: 38749 - DNA, 50 bp, unidentified
  source 1..50: mol_type = unassigned DNA; note = donor_d7094aa
  misc_feature 1..23: note = RE
  misc_feature 24..25: note = Core
  misc_feature 26..50: note = LE
cattacgggcggcaaccacagaggatgggatggttgccgccctccccaga

SEQ ID NO: 38750 - DNA, 50 bp, unidentified
  source 1..50: mol_type = unassigned DNA; note = donor_d70c878
  misc_feature 1..23: note = RE
  misc_feature 24..25: note = Core
  misc_feature 26..50: note = LE
gaacttgacaccgtaattgggaatccatacctttcttcgtgggttggctc

SEQ ID NO: 38751 - DNA, 50 bp, unidentified
  source 1..50: mol_type = unassigned DNA; note = donor_d7143e7
  misc_feature 1..23: note = RE
  misc_feature 24..25: note = Core
  misc_feature 26..50: note = LE
gggcttgacttttaatagttagtcttgtattatagagtagtagtgattaa

SEQ ID NO: 38752 - DNA, 50 bp, unidentified
  source 1..50: mol_type = unassigned DNA; note = donor_d715f46
  misc_feature 1..23: note = RE
  misc_feature 24..25: note = Core
  misc_feature 26..50: note = LE
cccgatagtttatgtttcatagtaacccccatgcccgcgcacttggcacc

SEQ ID NO: 38753 - DNA, 50 bp, unidentified
  source 1..50: mol_type = unassigned DNA; note = donor_d71f61c
  misc_feature 1..21: note = RE
  misc_feature 22..25: note = Core
  misc_feature 26..50: note = LE
aaccagcttgacatagggctactcactggtccaccatggtcgccgatcgg

SEQ ID NO: 38754 - DNA, 50 bp, unidentified
  source 1..50: mol_type = unassigned DNA; note = donor_d7219a4
  misc_feature 1..22: note = RE
  misc_feature 23..25: note = Core
  misc_feature 26..50: note = LE
agcttgactttttatagctggtcttgtatattgatgtccgtcagggtcgt

SEQ ID NO: 38755 - DNA, 50 bp, unidentified
  source 1..50: mol_type = unassigned DNA; note = donor_d722943
  misc_feature 1..23: note = RE
  misc_feature 24..25: note = Core
  misc_feature 26..50: note = LE
ctgcttgacaccagcattgggaagctctacctttcttcgtgggtttggtc

SEQ ID NO: 38756 - DNA, 50 bp, unidentified
  source 1..50: mol_type = unassigned DNA; note = donor_d72386d
  misc_feature 1..23: note = RE
  misc_feature 24..25: note = Core
  misc_feature 26..50: note = LE
acacttgaaatttatatagttagctggtatattatagatgactcatttaa

SEQ ID NO: 38757 - DNA, 50 bp, unidentified
  source 1..50: mol_type = unassigned DNA; note = donor_d727d51
  misc_feature 1..23: note = RE
  misc_feature 24..25: note = Core
  misc_feature 26..50: note = LE
gcatcgaagggggcatccaaacatgatggtgtggatgcccccgcccgacg

SEQ ID NO: 38758 - DNA, 50 bp, unidentified
  source 1..50: mol_type = unassigned DNA; note = donor_d72d906
  misc_feature 1..21: note = RE
  misc_feature 22..25: note = Core
  misc_feature 26..50: note = LE
gcttgacacaccacaggggcaccccgttaccttgttggtggtccctggtg

SEQ ID NO: 38759 - DNA, 50 bp, unidentified
  source 1..50: mol_type = unassigned DNA; note = donor_d73d429
  misc_feature 1..24: note = RE
  misc_feature 25: note = Core
  misc_feature 26..50: note = LE
ttgcaatgaggaggagtccatatacaatgggatggactcctcctctcctt

SEQ ID NO: 38760 - DNA, 50 bp, unidentified
  source 1..50: mol_type = unassigned DNA; note = donor_d744c29
  misc_feature 1..23: note = RE
  misc_feature 24..25: note = Core
  misc_feature 26..50: note = LE
aatgttgacaaactattagctggttcgtattatatggttagccagatatt

SEQ ID NO: 38761 - DNA, 50 bp, unidentified; identical to SEQ ID NO: 37277
  source 1..50: mol_type = unassigned DNA; note = donor_d746b46
  misc_feature 1..21: note = RE
  misc_feature 22..25: note = Core
  misc_feature 26..50: note = LE

SEQ ID NO: 38762 - DNA, 50 bp, unidentified; identical to SEQ ID NO: 35332
  source 1..50: mol_type = unassigned DNA; note = donor_d74ea5d
  misc_feature 1..22: note = RE
  misc_feature 23..25: note = Core
  misc_feature 26..50: note = LE

SEQ ID NO: 38763 - DNA, 50 bp, unidentified
  source 1..50: mol_type = unassigned DNA; note = donor_d7526fc
  misc_feature 1..24: note = RE
  misc_feature 25: note = Core
  misc_feature 26..50: note = LE
attgcttgactttgaacataggggcgttatgttgttgacagcccctaaaa

SEQ ID NO: 38764 - DNA, 50 bp, unidentified
  source 1..50: mol_type = unassigned DNA; note = donor_d75ee77
  misc_feature 1..23: note = RE
  misc_feature 24..25: note = Core
  misc_feature 26..50: note = LE
aggcttgacttttaatagttagtctcgtattatataaagtagtagtattt

SEQ ID NO: 38765 - DNA, 50 bp, unidentified; identical to SEQ ID NO: 32497
  source 1..50: mol_type = unassigned DNA; note = donor_d766546
  misc_feature 1..24: note = RE
  misc_feature 25: note = Core
  misc_feature 26..50: note = LE

SEQ ID NO: 38766 - DNA, 50 bp, unidentified
  source 1..50: mol_type = unassigned DNA; note = donor_d7684cd
  misc_feature 1..22: note = RE
  misc_feature 23..25: note = Core
  misc_feature 26..50: note = LE
ctattgacatttcaccgtaggactcgtataatagattttagggtagtttc

SEQ ID NO: 38767 - DNA, 50 bp, unidentified; identical to SEQ ID NO: 30838
  source 1..50: mol_type = unassigned DNA; note = donor_d7696ad
  misc_feature 1..23: note = RE
  misc_feature 24..25: note = Core
  misc_feature 26..50: note = LE

SEQ ID NO: 38768 - DNA, 50 bp, unidentified
  source 1..50: mol_type = unassigned DNA; note = donor_d76bbbb
  misc_feature 1..22: note = RE
  misc_feature 23..25: note = Core
  misc_feature 26..50: note = LE
ttacttgcttttaaacacagttcatcctatgtttgtaggagttgaaagat

SEQ ID NO: 38769 - DNA, 50 bp, unidentified
  source 1..50: mol_type = unassigned DNA; note = donor_d76bc45
  misc_feature 1..23: note = RE
  misc_feature 24..25: note = Core
  misc_feature 26..50: note = LE
gggcttgacttctaatagttagtctcgtattatagagtagtagttcgtaa

SEQ ID NO: 38770 - DNA, 50 bp, unidentified
  source 1..50: mol_type = unassigned DNA; note = donor_d76ca57
  misc_feature 1..23: note = RE
  misc_feature 24..25: note = Core
  misc_feature 26..50: note = LE
gggttgacaggtcaaaacatatcagacataatgttttgacctgtcctgcc

SEQ ID NO: 38771 - DNA, 50 bp, unidentified
  source 1..50: mol_type = unassigned DNA; note = donor_d76dd83
  misc_feature 1..22: note = RE
  misc_feature 23..25: note = Core
  misc_feature 26..50: note = LE
ccttgacaagaacatggggacacccttaccttctttgtggggctagcgcg

SEQ ID NO: 38772 - DNA, 50 bp, unidentified
  source 1..50: mol_type = unassigned DNA; note = donor_d76e52e
  misc_feature 1..23: note = RE
  misc_feature 24..25: note = Core
  misc_feature 26..50: note = LE
caacgcaggagccatccacagaagatggtgtggatggctcctgctcacgg

SEQ ID NO: 38773 - DNA, 50 bp, unidentified
  source 1..50: mol_type = unassigned DNA; note = donor_d779e9e
  misc_feature 1..21: note = RE
  misc_feature 22..25: note = Core
  misc_feature 26..50: note = LE
cttgacaccaaaaaccccatacaagatgctatggggcgaacggcgagggt

SEQ ID NO: 38774 - DNA, 50 bp, unidentified
  source 1..50: mol_type = unassigned DNA; note = donor_d77ad87
  misc_feature 1..24: note = RE
  misc_feature 25: note = Core
  misc_feature 26..50: note = LE
tgacgccaagcggcggaccatacataatgggatggtccgccgcttttgag

SEQ ID NO: 38775 - DNA, 50 bp, unidentified
  source 1..50: mol_type = unassigned DNA; note = donor_d77bf82
  misc_feature 1..24: note = RE
  misc_feature 25: note = Core
  misc_feature 26..50: note = LE
tgcaaccgggtcggactccatatacaatgggatggagtccgacccacctt

SEQ ID NO: 38776 - DNA, 50 bp, unidentified
  source 1..50: mol_type = unassigned DNA; note = donor_d7880ef
  misc_feature 1..23: note = RE
  misc_feature 24..25: note = Core
  misc_feature 26..50: note = LE
taaattggaaatcaacacagaatctcctatgtttgcaaagtaatttataa

SEQ ID NO: 38777 - DNA, 50 bp, unidentified
  source 1..50: mol_type = unassigned DNA; note = donor_d78a93f
  misc_feature 1..24: note = RE
  misc_feature 25: note = Core
  misc_feature 26..50: note = LE
tgcaactggggaggactccatatacaatgggatggagtcctccccaccct

SEQ ID NO: 38778 - DNA, 50 bp, unidentified
  source 1..50: mol_type = unassigned DNA; note = donor_d7a8aa9
  misc_feature 1..22: note = RE
  misc_feature 23..25: note = Core
  misc_feature 26..50: note = LE
taggttgttgtggaagacagttgcttgtgtcttgaggttgaattagaatt

SEQ ID NO: 38779 - DNA, 50 bp, unidentified
  source 1..50: mol_type = unassigned DNA; note = donor_d7b13cb
  misc_feature 1..23: note = RE
  misc_feature 24..25: note = Core
  misc_feature 26..50: note = LE
tgacgccgcagaacctgggatgtctaatggcttctaccgggtcggttgat

SEQ ID NO: 38780 - DNA, 50 bp, unidentified
  source 1..50: mol_type = unassigned DNA; note = donor_d7b2342
  misc_feature 1..24: note = RE
  misc_feature 25: note = Core
  misc_feature 26..50: note = LE
cgccaaccgttgacagaggggagcctactagacacgatggcctcaggacc

SEQ ID NO: 38781 - DNA, 50 bp, unidentified
  source 1..50: mol_type = unassigned DNA; note = donor_d7b6826
  misc_feature 1..24: note = RE
  misc_feature 25: note = Core
  misc_feature 26..50: note = LE
tgcagcacggcggcggaccatacataatggcatggtccgccgcctcaagc

SEQ ID NO: 38782 - DNA, 50 bp, unidentified
  source 1..50: mol_type = unassigned DNA; note = donor_d7b7329
  misc_feature 1..24: note = RE
  misc_feature 25: note = Core
  misc_feature 26..50: note = LE
ccgtcccttgacataaaggggtgcctacttagagacttggcgcaggatcg

SEQ ID NO: 38783 - DNA, 50 bp, unidentified
  source 1..50: mol_type = unassigned DNA; note = donor_d7b79e9
  misc_feature 1..24: note = RE
  misc_feature 25: note = Core
  misc_feature 26..50: note = LE
gagacttgactttttatttgcaggcctgttactatatatttgccccttga

SEQ ID NO: 38784 - DNA, 50 bp, unidentified
  source 1..50: mol_type = unassigned DNA; note = donor_d7c3bf5
  misc_feature 1..23: note = RE
  misc_feature 24..25: note = Core
  misc_feature 26..50: note = LE
actggtctaactcaacacagttgcttgtgtctacaaaatctgccagaatg

SEQ ID NO: 38785 - DNA, 50 bp, unidentified
  source 1..50: mol_type = unassigned DNA; note = donor_d7c5001
  misc_feature 1..23: note = RE
  misc_feature 24..25: note = Core
  misc_feature 26..50: note = LE
gccaactcggagccgtccacacatgatgctgtggacggctcctccgccgg

SEQ ID NO: 38786 - DNA, 50 bp, unidentified
  source 1..50: mol_type = unassigned DNA; note = donor_d7ca775
  misc_feature 1..24: note = RE
  misc_feature 25: note = Core
  misc_feature 26..50: note = LE
ttgcaaacgggacgcgttcatatagaattgaaatgaacgcgtcccacccg

SEQ ID NO: 38787 - DNA, 50 bp, unidentified; identical to SEQ ID NO: 30885
  source 1..50: mol_type = unassigned DNA; note = donor_d7dc669
  misc_feature 1..23: note = RE
  misc_feature 24..25: note = Core
  misc_feature 26..50: note = LE

SEQ ID NO: 38788 - DNA, 50 bp, unidentified
  source 1..50: mol_type = unassigned DNA; note = donor_d7dfead
  misc_feature 1..22: note = RE
  misc_feature 23..25: note = Core
  misc_feature 26..50: note = LE
ctcttgacttttaatagttagtcttatataatgtatttaggttgttagag

SEQ ID NO: 38789 - DNA, 50 bp, unidentified
  source 1..50: mol_type = unassigned DNA; note = donor_d7e62a9
  misc_feature 1..22: note = RE
  misc_feature 23..25: note = Core
  misc_feature 26..50: note = LE
cgcctgcggggccgtctatacatgatggcgaagacggccccgctcctgac

SEQ ID NO: 38790 - DNA, 50 bp, unidentified
  source 1..50: mol_type = unassigned DNA; note = donor_d7e7f4f
  misc_feature 1..23: note = RE
  misc_feature 24..25: note = Core
  misc_feature 26..50: note = LE
atacttgacttttcatagctggtcttgtatgatgttattagaagcaaaaa

SEQ ID NO: 38791 - DNA, 50 bp, unidentified
  source 1..50: mol_type = unassigned DNA; note = donor_d7ebbbe
  misc_feature 1..24: note = RE
  misc_feature 25: note = Core
  misc_feature 26..50: note = LE
tgcaaacggacggcggaccatacataatgagatggtccgccgcccggatc

SEQ ID NO: 38792 - DNA, 50 bp, unidentified
  source 1..50: mol_type = unassigned DNA; note = donor_d7ebceb
  misc_feature 1..23: note = RE
  misc_feature 24..25: note = Core
  misc_feature 26..50: note = LE
gcattcgaagggccgtccacacatgttggggtggacggccccacggcatc

SEQ ID NO: 38793 - DNA, 50 bp, unidentified
  source 1..50: mol_type = unassigned DNA; note = donor_d7fe734
  misc_feature 1..23: note = RE
  misc_feature 24..25: note = Core
  misc_feature 26..50: note = LE
tgccggcagggagcgtccacatatgatggagtggacgctccctgctcacc

SEQ ID NO: 38794 - DNA, 50 bp, unidentified
  source 1..50: mol_type = unassigned DNA; note = donor_d8032d5
  misc_feature 1..22: note = RE
  misc_feature 23..25: note = Core
  misc_feature 26..50: note = LE
agttgacaaaaacataggaacacccattaccatgtttggtaggctccgat

SEQ ID NO: 38795 - DNA, 50 bp, unidentified
  source 1..50: mol_type = unassigned DNA; note = donor_d808722
  misc_feature 1..24: note = RE
  misc_feature 25: note = Core
  misc_feature 26..50: note = LE
cttgacaggaaccatagggacacccgttaccgtttaggtggtcctgaacc

SEQ ID NO: 38796 - DNA, 50 bp, unidentified
  source 1..50: mol_type = unassigned DNA; note = donor_d812913
  misc_feature 1..22: note = RE
  misc_feature 23..25: note = Core
  misc_feature 26..50: note = LE
cgggtcttttttattttcacactaacatcacattcctttcgctgtgctca

SEQ ID NO: 38797 - DNA, 50 bp, unidentified
  source 1..50: mol_type = unassigned DNA; note = donor_d821327
  misc_feature 1..22: note = RE
  misc_feature 23..25: note = Core
  misc_feature 26..50: note = LE
caaaacggacggcaaccacagaagatggggtggttgccgtcctccccgaa

SEQ ID NO: 38798 - DNA, 50 bp, unidentified; identical to SEQ ID NO: 31193
  source 1..50: mol_type = unassigned DNA; note = donor_d8213dc
  misc_feature 1..22: note = RE
  misc_feature 23..25: note = Core
  misc_feature 26..50: note = LE

SEQ ID NO: 38799 - DNA, 50 bp, unidentified
  source 1..50: mol_type = unassigned DNA; note = donor_d824e29
  misc_feature 1..23: note = RE
  misc_feature 24..25: note = Core
  misc_feature 26..50: note = LE
cctcttgacttcgtatagtcagtctcgtataataagttagttgttcaaga

SEQ ID NO: 38800 - DNA, 50 bp, unidentified
  source 1..50: mol_type = unassigned DNA; note = donor_d830a39
  misc_feature 1..24: note = RE
  misc_feature 25: note = Core
  misc_feature 26..50: note = LE
ggcttgacgaagaccatagggacacgttaccttcttcgtgaccccagaga

SEQ ID NO: 38801 - DNA, 50 bp, unidentified
  source 1..50: mol_type = unassigned DNA; note = donor_d8310c6
  misc_feature 1..23: note = RE
  misc_feature 24..25: note = Core
  misc_feature 26..50: note = LE
gcaacgagggggccgtccacatatgttgggatggacggcccccgaacggc

SEQ ID NO: 38802 - DNA, 50 bp, unidentified; identical to SEQ ID NO: 30885
  source 1..50: mol_type = unassigned DNA; note = donor_d83ae5f
  misc_feature 1..23: note = RE
  misc_feature 24..25: note = Core
  misc_feature 26..50: note = LE

SEQ ID NO: 38803 - DNA, 50 bp, unidentified
  source 1..50: mol_type = unassigned DNA; note = donor_d84295d
  misc_feature 1..23: note = RE
  misc_feature 24..25: note = Core
  misc_feature 26..50: note = LE
catcgcaggtgcatgacagttgacttgtgtcaaataagggtctatcgttg

SEQ ID NO: 38804 - DNA, 50 bp, unidentified
  source 1..50: mol_type = unassigned DNA; note = donor_d8444a7
  misc_feature 1..23: note = RE
  misc_feature 24..25: note = Core
  misc_feature 26..50: note = LE
gcgcttgacttcggagacggttacttgtatgttctagaccaggccagccc

SEQ ID NO: 38805 - DNA, 50 bp, unidentified
  source 1..50: mol_type = unassigned DNA; note = donor_d854556
  misc_feature 1..23: note = RE
  misc_feature 24..25: note = Core
  misc_feature 26..50: note = LE
aggcttgaccgcgaacataggatcttgtatgttcctcccggctcctacgc

SEQ ID NO: 38806 - DNA, 50 bp, unidentified; identical to SEQ ID NO: 34996
  source 1..50: mol_type = unassigned DNA; note = donor_d855e7f
  misc_feature 1..23: note = RE
  misc_feature 24..25: note = Core
  misc_feature 26..50: note = LE

SEQ ID NO: 38807 - DNA, 50 bp, unidentified
  source 1..50: mol_type = unassigned DNA; note = donor_d861d18
  misc_feature 1..21: note = RE
  misc_feature 22..25: note = Core
  misc_feature 26..50: note = LE
ctattgacttttcttagcaggtttggtacaatataagcgtagccctatac

SEQ ID NO: 38808 - DNA, 50 bp, unidentified
  source 1..50: mol_type = unassigned DNA; note = donor_d86962b
  misc_feature 1..22: note = RE
  misc_feature 23..25: note = Core
  misc_feature 26..50: note = LE
agtattgacttttcttagcaggtttggtacagtataagtgtagttgtata

SEQ ID NO: 38809 - DNA, 50 bp, unidentified
  source 1..50: mol_type = unassigned DNA; note = donor_d869ad1
  misc_feature 1..24: note = RE
  misc_feature 25: note = Core
  misc_feature 26..50: note = LE
tcaccttgaccaaactcataggggcccattaccgttgcggtcgcctcgca

SEQ ID NO: 38810 - DNA, 50 bp, unidentified
  source 1..50: mol_type = unassigned DNA; note = donor_d872f49
  misc_feature 1..20: note = RE
  misc_feature 21..25: note = Core
  misc_feature 26..50: note = LE
tgacgaaaaccatagggacacccccgttaccgtcttcgtggtcccgtttc

SEQ ID NO: 38811 - DNA, 50 bp, unidentified
  source 1..50: mol_type = unassigned DNA; note = donor_d883015
  misc_feature 1..23: note = RE
  misc_feature 24..25: note = Core
  misc_feature 26..50: note = LE
gcacgaaacgaggcatccatacatgatggtgtggatgcctctcccgccgg

SEQ ID NO: 38812 - DNA, 50 bp, unidentified
  source 1..50: mol_type = unassigned DNA; note = donor_d888c17
  misc_feature 1..23: note = RE
  misc_feature 24..25: note = Core
  misc_feature 26..50: note = LE
agagcgcttgatcaagacggatacttgtcttatgactatcccgcttcttt

SEQ ID NO: 38813 - DNA, 50 bp, unidentified
  source 1..50: mol_type = unassigned DNA; note = donor_d889734
  misc_feature 1..23: note = RE
  misc_feature 24..25: note = Core
  misc_feature 26..50: note = LE
gaccaaacctggcccgttacagaagatggggtaacgggccggccgccgga

SEQ ID NO: 38814 - DNA, 50 bp, unidentified
  source 1..50: mol_type = unassigned DNA; note = donor_d88cdd9
  misc_feature 1..23: note = RE
  misc_feature 24..25: note = Core
  misc_feature 26..50: note = LE
atcagccccagctttaatggttgcttgtattagcgcgaaggattacactg

SEQ ID NO: 38815 - DNA, 50 bp, unidentified
  source 1..50: mol_type = unassigned DNA; note = donor_d8968b9
  misc_feature 1..23: note = RE
  misc_feature 24..25: note = Core
  misc_feature 26..50: note = LE
gccaccaagggggcgtccacagatgatggggtggacgccccccgacggca

SEQ ID NO: 38816 - DNA, 50 bp, unidentified
  source 1..50: mol_type = unassigned DNA; note = donor_d8992b6
  misc_feature 1..23: note = RE
  misc_feature 24..25: note = Core
  misc_feature 26..50: note = LE
gacaacagggagtcgtccatacatgatgtgatggacgactcccgccaccc

SEQ ID NO: 38817 - DNA, 50 bp, unidentified
  source 1..50: mol_type = unassigned DNA; note = donor_d89d225
  misc_feature 1..21: note = RE
  misc_feature 22..25: note = Core
  misc_feature 26..50: note = LE
ctcttgacttttaatagttagtcacgtataattaaaactatctcgaaagg

SEQ ID NO: 38818 - DNA, 50 bp, unidentified
  source 1..50: mol_type = unassigned DNA; note = donor_d8a0764
  misc_feature 1..23: note = RE
  misc_feature 24..25: note = Core
  misc_feature 26..50: note = LE
cagaaatcaggctgatcatacatttaatgagatggtcagcctgaccgaaa

SEQ ID NO: 38819 - DNA, 50 bp, unidentified
  source 1..50: mol_type = unassigned DNA; note = donor_d8bf733
  misc_feature 1..23: note = RE
  misc_feature 24..25: note = Core
  misc_feature 26..50: note = LE
gacagacccagaacctgggatgtctaatgggttctaccgatcctctgaca

SEQ ID NO: 38820 - DNA, 50 bp, unidentified
  source 1..50: mol_type = unassigned DNA; note = donor_d8c51bc
  misc_feature 1..23: note = RE
  misc_feature 24..25: note = Core
  misc_feature 26..50: note = LE
acttgacaaccatcatagaaagtcttatattaggactgttgcgaataatc

SEQ ID NO: 38821 - DNA, 50 bp, unidentified
  source 1..50: mol_type = unassigned DNA; note = donor_d8cfa64
  misc_feature 1..23: note = RE
  misc_feature 24..25: note = Core
  misc_feature 26..50: note = LE
tgacattcaagctcctgggatgtctaataagagttaacgggtcggccgtg

SEQ ID NO: 38822 - DNA, 50 bp, unidentified; identical to SEQ ID NO: 31823
  source 1..50: mol_type = unassigned DNA; note = donor_d8d2fde
  misc_feature 1..23: note = RE
  misc_feature 24..25: note = Core
  misc_feature 26..50: note = LE

SEQ ID NO: 38823 - DNA, 50 bp, unidentified; identical to SEQ ID NO: 38742
  source 1..50: mol_type = unassigned DNA; note = donor_d8d6c9c
  misc_feature 1..23: note = RE
  misc_feature 24..25: note = Core
  misc_feature 26..50: note = LE

SEQ ID NO: 38824 - DNA, 50 bp, unidentified
  source 1..50: mol_type = unassigned DNA; note = donor_d8d8df3
  misc_feature 1..23: note = RE
  misc_feature 24..25: note = Core
  misc_feature 26..50: note = LE
gcgcagcggaggtcgtccacacatgatgtcgtggacgacctccgcaccag

SEQ ID NO: 38825 - DNA, 50 bp, unidentified
  source 1..50: mol_type = unassigned DNA; note = donor_d8dd484
  misc_feature 1..22: note = RE
  misc_feature 23..25: note = Core
  misc_feature 26..50: note = LE
ggggttgacaaacattagcaagattcgtaatatataagtagaggtttaat

SEQ ID NO: 38826 - DNA, 50 bp, unidentified
  source 1..50: mol_type = unassigned DNA; note = donor_d8e08ae
  misc_feature 1..23: note = RE
  misc_feature 24..25: note = Core
  misc_feature 26..50: note = LE
caccgatgggggcgtcccacacatgatggggtggacgccccctggcggca

SEQ ID NO: 38827 - DNA, 50 bp, unidentified
  source 1..50: mol_type = unassigned DNA; note = donor_d8f59ab
  misc_feature 1..23: note = RE
  misc_feature 24..25: note = Core
  misc_feature 26..50: note = LE
gcttcccagggggcatccacacacgatggagtggatgcccccgcccggcg

SEQ ID NO: 38828 - DNA, 50 bp, unidentified
  source 1..50: mol_type = unassigned DNA; note = donor_d911f90
  misc_feature 1..23: note = RE
  misc_feature 24..25: note = Core
  misc_feature 26..50: note = LE
ggcttgacaagaccctatgggatctgatatacccccttgtggtggtcgat

SEQ ID NO: 38829 - DNA, 50 bp, unidentified
  source 1..50: mol_type = unassigned DNA; note = donor_d912877
  misc_feature 1..23: note = RE
  misc_feature 24..25: note = Core
  misc_feature 26..50: note = LE
ttgcaaccggggcgggccatacgttatggatggcccgcccctcccgccgc

SEQ ID NO: 38830 - DNA, 50 bp, unidentified; identical to SEQ ID NO: 31856
  source 1..50: mol_type = unassigned DNA; note = donor_d919660
  misc_feature 1..23: note = RE
  misc_feature 24..25: note = Core
  misc_feature 26..50: note = LE

SEQ ID NO: 38831 - DNA, 50 bp, unidentified; identical to SEQ ID NO: 37420
  source 1..50: mol_type = unassigned DNA; note = donor_d91dee8
  misc_feature 1..21: note = RE
  misc_feature 22..25: note = Core
  misc_feature 26..50: note = LE

SEQ ID NO: 38832 - DNA, 50 bp, unidentified
  source 1..50: mol_type = unassigned DNA; note = donor_d942771
  misc_feature 1..23: note = RE
  misc_feature 24..25: note = Core
  misc_feature 26..50: note = LE
ggcttccgtttgaagcacggttgcttgtgtctctagaatcatgcatgatc

SEQ ID NO: 38833 - DNA, 50 bp, unidentified
  source 1..50: mol_type = unassigned DNA; note = donor_d956f7a
  misc_feature 1..24: note = RE
  misc_feature 25: note = Core
  misc_feature 26..50: note = LE
aatacttggtcaaaccatagaaaacctttagatttgcatttccaataaat

SEQ ID NO: 38834 - DNA, 50 bp, unidentified; identical to SEQ ID NO: 31751
  source 1..50: mol_type = unassigned DNA; note = donor_d95d191
  misc_feature 1..24: note = RE
  misc_feature 25: note = Core
  misc_feature 26..50: note = LE

SEQ ID NO: 38835 - DNA, 50 bp, unidentified
  source 1..50: mol_type = unassigned DNA; note = donor_d9630b3
  misc_feature 1..23: note = RE
  misc_feature 24..25: note = Core
  misc_feature 26..50: note = LE
aaggcgcttgatcacaacggatacttgtcttatgacttttgctgtcgctg

SEQ ID NO: 38836 - DNA, 50 bp, unidentified
  source 1..50: mol_type = unassigned DNA; note = donor_d9634be
  misc_feature 1..24: note = RE
  misc_feature 25: note = Core
  misc_feature 26..50: note = LE
gccgcttgacgaaagccataggggcgttaccttcttcgtggccccgcaat

SEQ ID NO: 38837 - DNA, 50 bp, unidentified
  source 1..50: mol_type = unassigned DNA; note = donor_d96d2de
  misc_feature 1..23: note = RE
  misc_feature 24..25: note = Core
  misc_feature 26..50: note = LE
aagccgaaccaacgtaacagttgccctgtgtcttggaagtctgtcaggat

SEQ ID NO: 38838 - DNA, 50 bp, unidentified
  source 1..50: mol_type = unassigned DNA; note = donor_d977bd8
  misc_feature 1..23: note = RE
  misc_feature 24..25: note = Core
  misc_feature 26..50: note = LE
tgacacctcagcccctggggtgtctaatgggagctaccgggtcagccgtt

SEQ ID NO: 38839 - DNA, 50 bp, unidentified
  source 1..50: mol_type = unassigned DNA; note = donor_d97f2dd
  misc_feature 1..23: note = RE
  misc_feature 24..25: note = Core
  misc_feature 26..50: note = LE
cgaggtgaaggttaagacggtatcttgtatctcgactacagcctttcagt

SEQ ID NO: 38840 - DNA, 50 bp, unidentified
  source 1..50: mol_type = unassigned DNA; note = donor_d987d15
  misc_feature 1..23: note = RE
  misc_feature 24..25: note = Core
  misc_feature 26..50: note = LE
agtcttgacttttaatagttagtctcgtattatagagtagtagttattaa

SEQ ID NO: 38841 - DNA, 50 bp, unidentified
  source 1..50: mol_type = unassigned DNA; note = donor_d990c89
  misc_feature 1..23: note = RE
  misc_feature 24..25: note = Core
  misc_feature 26..50: note = LE
gtgaggagggggccgtccacatatgatggggtggacggccctcgacggca

SEQ ID NO: 38842 - DNA, 50 bp, unidentified; identical to SEQ ID NO: 33254
  source 1..50: mol_type = unassigned DNA; note = donor_d991035
  misc_feature 1..23: note = RE
  misc_feature 24..25: note = Core
  misc_feature 26..50: note = LE

SEQ ID NO: 38843 - DNA, 50 bp, unidentified; identical to SEQ ID NO: 30604
  source 1..50: mol_type = unassigned DNA; note = donor_d9990c5
  misc_feature 1..23: note = RE
  misc_feature 24..25: note = Core
  misc_feature 26..50: note = LE

SEQ ID NO: 38844 - DNA, 50 bp, unidentified
  source 1..50: mol_type = unassigned DNA; note = donor_d99a6a2
  misc_feature 1..22: note = RE
  misc_feature 23..25: note = Core
  misc_feature 26..50: note = LE
caagtggggggccgtccacatctgctggtgtggacggcctctcatcccca

SEQ ID NO: 38845 - DNA, 50 bp, unidentified
  source 1..50: mol_type = unassigned DNA; note = donor_d99b599
  misc_feature 1..23: note = RE
  misc_feature 24..25: note = Core
  misc_feature 26..50: note = LE
aatgttgacaaactattagctggttcgtattatgaggtcagccagttttt

SEQ ID NO: 38846 - DNA, 50 bp, unidentified
  source 1..50: mol_type = unassigned DNA; note = donor_d99ea48
  misc_feature 1..24: note = RE
  misc_feature 25: note = Core
  misc_feature 26..50: note = LE
tgcagtcgcgcggcggaccatacataatgagatggtccgccgcttgcttc

SEQ ID NO: 38847 - DNA, 50 bp, unidentified
  source 1..50: mol_type = unassigned DNA; note = donor_d9a061e
  misc_feature 1..23: note = RE
  misc_feature 24..25: note = Core
  misc_feature 26..50: note = LE
gacctgaatacgccgaatagagaagataggatattcggcttgcgcccacc

SEQ ID NO: 38848 - DNA, 50 bp, unidentified
  source 1..50: mol_type = unassigned DNA; note = donor_d9a141d
  misc_feature 1..22: note = RE
  misc_feature 23..25: note = Core
  misc_feature 26..50: note = LE
agtcttgacttttaatagttagactcgtattatatagtagtagtgtttat

SEQ ID NO: 38849 - DNA, 50 bp, unidentified; identical to SEQ ID NO: 31537
  source 1..50: mol_type = unassigned DNA; note = donor_d9ad4ed
  misc_feature 1..23: note = RE
  misc_feature 24..25: note = Core
  misc_feature 26..50: note = LE

SEQ ID NO: 38850 - DNA, 50 bp, unidentified; identical to SEQ ID NO: 34852
  source 1..50: mol_type = unassigned DNA; note = donor_d9b0e8d
  misc_feature 1..23: note = RE
  misc_feature 24..25: note = Core
  misc_feature 26..50: note = LE

SEQ ID NO: 38851 - DNA, 50 bp, unidentified
  source 1..50: mol_type = unassigned DNA; note = donor_d9b4ca6
  misc_feature 1..24: note = RE
  misc_feature 25: note = Core
  misc_feature 26..50: note = LE
tgcaacacggcggcggaccatacataatgggatggtccgccgcctttact

SEQ ID NO: 38852 - DNA, 50 bp, unidentified
  source 1..50: mol_type = unassigned DNA; note = donor_d9bc340
  misc_feature 1..23: note = RE
  misc_feature 24..25: note = Core
  misc_feature 26..50: note = LE
caaaaatgggggtgaccatagatttaatgagatggtcacccccaccctac

SEQ ID NO: 38853 - DNA, 50 bp, unidentified; identical to SEQ ID NO: 34894
  source 1..50: mol_type = unassigned DNA; note = donor_d9c0647
  misc_feature 1..23: note = RE
  misc_feature 24..25: note = Core
  misc_feature 26..50: note = LE

SEQ ID NO: 38854 - DNA, 50 bp, unidentified
  source 1..50: mol_type = unassigned DNA; note = donor_d9c1473
  misc_feature 1..23: note = RE
  misc_feature 24..25: note = Core
  misc_feature 26..50: note = LE
aggcttgactgacaacacggttacttgtatcttgctcatgtcgtgattag

SEQ ID NO: 38855 - DNA, 50 bp, unidentified
  source 1..50: mol_type = unassigned DNA; note = donor_d9c5b18
  misc_feature 1..24: note = RE
  misc_feature 25: note = Core
  misc_feature 26..50: note = LE
tgcaacaaggcggcggaccatacataattggtatggtccgccgcttcttg

SEQ ID NO: 38856 - DNA, 50 bp, unidentified
  source 1..50: mol_type = unassigned DNA; note = donor_d9c62e1
  misc_feature 1..21: note = RE
  misc_feature 22..25: note = Core
  misc_feature 26..50: note = LE
gccttgacgtcctcattgagactccgtaagtttggtggtggcccgagggg

SEQ ID NO: 38857 - DNA, 50 bp, unidentified
  source 1..50: mol_type = unassigned DNA; note = donor_d9c6dbe
  misc_feature 1..23: note = RE
  misc_feature 24..25: note = Core
  misc_feature 26..50: note = LE
gacctcaaacggccgattagagaagatggggtaatcggccggccggcgtt

SEQ ID NO: 38858 - DNA, 50 bp, unidentified
  source 1..50: mol_type = unassigned DNA; note = donor_d9ca7cb
  misc_feature 1..24: note = RE
  misc_feature 25: note = Core
  misc_feature 26..50: note = LE
gcagcttgacacacaacataggggcgttaccttgttgacaggtcctgatt

SEQ ID NO: 38859 - DNA, 50 bp, unidentified
  source 1..50: mol_type = unassigned DNA; note = donor_d9d43bb
  misc_feature 1..24: note = RE
  misc_feature 25: note = Core
  misc_feature 26..50: note = LE
tgccaaaagggggccgtccacacatgaaggtgtggacggctcccgccttc

SEQ ID NO: 38860 - DNA, 50 bp, unidentified; identical to SEQ ID NO: 30383
  source 1..50: mol_type = unassigned DNA; note = donor_d9d4658
  misc_feature 1..23: note = RE
  misc_feature 24..25: note = Core
  misc_feature 26..50: note = LE

SEQ ID NO: 38861 - DNA, 50 bp, unidentified
  source 1..50: mol_type = unassigned DNA; note = donor_d9e0cd1
  misc_feature 1..24: note = RE
  misc_feature 25: note = Core
  misc_feature 26..50: note = LE
caccctcttgacacaaagaggcttctgatggaggatgtgggcggggcgtt

SEQ ID NO: 38862 - DNA, 50 bp, unidentified
  source 1..50: mol_type = unassigned DNA; note = donor_d9eced7
  misc_feature 1..23: note = RE
  misc_feature 24..25: note = Core
  misc_feature 26..50: note = LE
tctattgacttcatatagttagtcttgtataatgaactcgtagtcaagtt

SEQ ID NO: 38863 - DNA, 50 bp, unidentified
  source 1..50: mol_type = unassigned DNA; note = donor_d9f2213
  misc_feature 1..22: note = RE
  misc_feature 23..25: note = Core
  misc_feature 26..50: note = LE
aagcttgacaaacattagctggtttcgtattatcaggtcagccagagatt

SEQ ID NO: 38864 - DNA, 50 bp, unidentified
  source 1..50: mol_type = unassigned DNA; note = donor_d9f8e57
  misc_feature 1..24: note = RE
  misc_feature 25: note = Core
  misc_feature 26..50: note = LE
gaattgaatccaataagacagttgcgatagcggtgggtcagccaacatca

SEQ ID NO: 38865 - DNA, 50 bp, unidentified
  source 1..50: mol_type = unassigned DNA; note = donor_d9f981e
  misc_feature 1..23: note = RE
  misc_feature 24..25: note = Core
  misc_feature 26..50: note = LE
aggcttaacttttgtttgcaggactcctacaatatagttacggtgaaagg

SEQ ID NO: 38866 - DNA, 50 bp, unidentified
  source 1..50: mol_type = unassigned DNA; note = donor_da0717a
  misc_feature 1..23: note = RE
  misc_feature 24..25: note = Core
  misc_feature 26..50: note = LE
cgggttgacttttaatagttaatcttgtattatagagtagtagttattaa

SEQ ID NO: 38867 - DNA, 50 bp, unidentified; identical to SEQ ID NO: 31367
  source 1..50: mol_type = unassigned DNA; note = donor_da07195
  misc_feature 1..22: note = RE
  misc_feature 23..25: note = Core
  misc_feature 26..50: note = LE

SEQ ID NO: 38868 - DNA, 50 bp, unidentified
  source 1..50: mol_type = unassigned DNA; note = donor_da0ae40
  misc_feature 1..23: note = RE
  misc_feature 24..25: note = Core
  misc_feature 26..50: note = LE
gggcttcccctcaaccatagaatcttgtatgctgggacttgaagggagga

SEQ ID NO: 38869 - DNA, 50 bp, unidentified; identical to SEQ ID NO: 32744
  source 1..50: mol_type = unassigned DNA; note = donor_da0e9fe
  misc_feature 1..22: note = RE
  misc_feature 23..25: note = Core
  misc_feature 26..50: note = LE

SEQ ID NO: 38870 - DNA, 50 bp, unidentified
  source 1..50: mol_type = unassigned DNA; note = donor_da1c28d
  misc_feature 1..22: note = RE
  misc_feature 23..25: note = Core
  misc_feature 26..50: note = LE
tacttgacttttaatagttggtcttgtataatgtatttaggttgttcaag

SEQ ID NO: 38871 - DNA, 50 bp, unidentified
  source 1..50: mol_type = unassigned DNA; note = donor_da2a550
  misc_feature 1..23: note = RE
  misc_feature 24..25: note = Core
  misc_feature 26..50: note = LE
tctcttgacattcttaccggttgctcgtataatatttgtataagatcttt

SEQ ID NO: 38872 - DNA, 50 bp, unidentified; identical to SEQ ID NO: 33020
  source 1..50: mol_type = unassigned DNA; note = donor_da44df9
  misc_feature 1..21: note = RE
  misc_feature 22..25: note = Core
  misc_feature 26..50: note = LE

SEQ ID NO: 38873 - DNA, 50 bp, unidentified
  source 1..50: mol_type = unassigned DNA; note = donor_da488ac
  misc_feature 1..22: note = RE
  misc_feature 23..25: note = Core
  misc_feature 26..50: note = LE
gatattgacatcctattagctggttcgtattataaggttagacagtttat

SEQ ID NO: 38874 - DNA, 50 bp, unidentified
  source 1..50: mol_type = unassigned DNA; note = donor_da48cbe
  misc_feature 1..23: note = RE
  misc_feature 24..25: note = Core
  misc_feature 26..50: note = LE
ccaattgactttgaagacagttgcttgtatattcatagcgaagtgtttcc

SEQ ID NO: 38875 - DNA, 50 bp, unidentified
  source 1..50: mol_type = unassigned DNA; note = donor_da4af12
  misc_feature 1..23: note = RE
  misc_feature 24..25: note = Core
  misc_feature 26..50: note = LE
tgacatttccagccgtgggatgtctaatagcagcagagccgccaagatag

SEQ ID NO: 38876 - DNA, 50 bp, unidentified
  source 1..50: mol_type = unassigned DNA; note = donor_da51f71
  misc_feature 1..23: note = RE
  misc_feature 24..25: note = Core
  misc_feature 26..50: note = LE
tacttgacaagtcaggccatatcagacatcatggcctgacttggtggagt

SEQ ID NO: 38877 - DNA, 50 bp, unidentified
  source 1..50: mol_type = unassigned DNA; note = donor_da5923d
  misc_feature 1..24: note = RE
  misc_feature 25: note = Core
  misc_feature 26..50: note = LE
tacatttgcgtaaatcatagaaaacccttagatttgcgcaataaaaggaa

SEQ ID NO: 38878 - DNA, 50 bp, unidentified
  source 1..50: mol_type = unassigned DNA; note = donor_da5a485
  misc_feature 1..23: note = RE
  misc_feature 24..25: note = Core
  misc_feature 26..50: note = LE
tgacattcaagctcctgggatgtctaatgagtcgtgagtcggccgtccgg

SEQ ID NO: 38879 - DNA, 50 bp, unidentified; identical to SEQ ID NO: 38472
  source 1..50: mol_type = unassigned DNA; note = donor_da5b45a
  misc_feature 1..23: note = RE
  misc_feature 24..25: note = Core
  misc_feature 26..50: note = LE

SEQ ID NO: 38880 - DNA, 50 bp, unidentified
  source 1..50: mol_type = unassigned DNA; note = donor_da60a3e
  misc_feature 1..23: note = RE
  misc_feature 24..25: note = Core
  misc_feature 26..50: note = LE
atacttgactttttatttgcaggctactataataaatttatgggtaagtt

SEQ ID NO: 38881 - DNA, 50 bp, unidentified; identical to SEQ ID NO: 37839
  source 1..50: mol_type = unassigned DNA; note = donor_da65e0c
  misc_feature 1..23: note = RE
  misc_feature 24..25: note = Core
  misc_feature 26..50: note = LE

SEQ ID NO: 38882 - DNA, 50 bp, unidentified
  source 1..50: mol_type = unassigned DNA; note = donor_da675e0
  misc_feature 1..23: note = RE
  misc_feature 24..25: note = Core
  misc_feature 26..50: note = LE
aaacagcttgatcaagacggatacttgtcttatgctgatcccggctcttg

SEQ ID NO: 38883 - DNA, 50 bp, unidentified; identical to SEQ ID NO: 32391
  source 1..50: mol_type = unassigned DNA; note = donor_da681fb
  misc_feature 1..22: note = RE
  misc_feature 23..25: note = Core
  misc_feature 26..50: note = LE

SEQ ID NO: 38884 - DNA, 50 bp, unidentified
  source 1..50: mol_type = unassigned DNA; note = donor_da6e654
  misc_feature 1..21: note = RE
  misc_feature 22..25: note = Core
  misc_feature 26..50: note = LE
atattgacttttcttagcaggttttagtaccataaaagtgtagtagttag

SEQ ID NO: 38885 - DNA, 50 bp, unidentified
  source 1..50: mol_type = unassigned DNA; note = donor_da70a9a
  misc_feature 1..24: note = RE
  misc_feature 25: note = Core
  misc_feature 26..50: note = LE
agcccccttgacacagagaggattctgcttgagactgtcactggcgttgc

SEQ ID NO: 38886 - DNA, 50 bp, unidentified
  source 1..50: mol_type = unassigned DNA; note = donor_da7183a
  misc_feature 1..22: note = RE
  misc_feature 23..25: note = Core
  misc_feature 26..50: note = LE
tgacatttacgaccaaggggtgtctaatggtgcacgacatcgccactttt

SEQ ID NO: 38887 - DNA, 50 bp, unidentified
  source 1..50: mol_type = unassigned DNA; note = donor_da72ed3
  misc_feature 1..24: note = RE
  misc_feature 25: note = Core
  misc_feature 26..50: note = LE
tgcacatcgggaggcgtccatataatggtatggacgcctctcacttcgaa

SEQ ID NO: 38888 - DNA, 50 bp, unidentified
  source 1..50: mol_type = unassigned DNA; note = donor_da7e9dc
  misc_feature 1..23: note = RE
  misc_feature 24..25: note = Core
  misc_feature 26..50: note = LE
tggcttgacatgaaagaaggttgcttgtatctttaagtctgcggtttcgg

SEQ ID NO: 38889 - DNA, 50 bp, unidentified
  source 1..50: mol_type = unassigned DNA; note = donor_da7ebdc
  misc_feature 1..23: note = RE
  misc_feature 24..25: note = Core
  misc_feature 26..50: note = LE
tgacatttaagcgcctgggatgtctaatgagagttaccgagccggtcgtg

SEQ ID NO: 38890 - DNA, 50 bp, unidentified
  source 1..50: mol_type = unassigned DNA; note = donor_da84bf5
  misc_feature 1..24: note = RE
  misc_feature 25: note = Core
  misc_feature 26..50: note = LE
ttgcaatcgggcggggtccatatacaatggtatggaccccgcccgccatc

SEQ ID NO: 38891 - DNA, 50 bp, unidentified
  source 1..50: mol_type = unassigned DNA; note = donor_da88f47
  misc_feature 1..22: note = RE
  misc_feature 23..25: note = Core
  misc_feature 26..50: note = LE
gatgaaaaccatcaagacagttgcttgtgtcttgaaccagacttaaactg

SEQ ID NO: 38892 - DNA, 50 bp, unidentified
  source 1..50: mol_type = unassigned DNA; note = donor_da9767d
  misc_feature 1..23: note = RE
  misc_feature 24..25: note = Core
  misc_feature 26..50: note = LE
cacggtagggccgaagacggtatcttgtatctcgaccatcgcctctttgt

SEQ ID NO: 38893 - DNA, 50 bp, unidentified
  source 1..50: mol_type = unassigned DNA; note = donor_da9c8c9
  misc_feature 1..23: note = RE
  misc_feature 24..25: note = Core
  misc_feature 26..50: note = LE
gacccaaaacggccgattagagaagatggggtactcggccggcgttgttg

SEQ ID NO: 38894 - DNA, 50 bp, unidentified
  source 1..50: mol_type = unassigned DNA; note = donor_daa6b70
  misc_feature 1..22: note = RE
  misc_feature 23..25: note = Core
  misc_feature 26..50: note = LE
acaagttaggaccgtgggatatctaatggggatcgaccacctcgttcctt

SEQ ID NO: 38895 - DNA, 50 bp, unidentified; identical to SEQ ID NO: 31697
  source 1..50: mol_type = unassigned DNA; note = donor_daae8fd
  misc_feature 1..23: note = RE
  misc_feature 24..25: note = Core
  misc_feature 26..50: note = LE

SEQ ID NO: 38896 - DNA, 50 bp, unidentified
  source 1..50: mol_type = unassigned DNA; note = donor_dab0509
  misc_feature 1..24: note = RE
  misc_feature 25: note = Core
  misc_feature 26..50: note = LE
tgcaaccgagggggagtccatatacaatggtatggactcctcctccccta

SEQ ID NO: 38897 - DNA, 50 bp, unidentified
  source 1..50: mol_type = unassigned DNA; note = donor_dab142a
  misc_feature 1..23: note = RE
  misc_feature 24..25: note = Core
  misc_feature 26..50: note = LE
gcttgagatttccagcgggatgatctaccatcggaatttagcaggtagcg

SEQ ID NO: 38898 - DNA, 50 bp, unidentified
  source 1..50: mol_type = unassigned DNA; note = donor_dab24a9
  misc_feature 1..23: note = RE
  misc_feature 24..25: note = Core
  misc_feature 26..50: note = LE
atgcttgacttttcatagctggtcttgtatgatgcagtcagaagctaatg

SEQ ID NO: 38899 - DNA, 50 bp, unidentified; identical to SEQ ID NO: 30416
  source 1..50: mol_type = unassigned DNA; note = donor_dab66eb
  misc_feature 1..23: note = RE
  misc_feature 24..25: note = Core
  misc_feature 26..50: note = LE

SEQ ID NO: 38900 - DNA, 50 bp, unidentified
  source 1..50: mol_type = unassigned DNA; note = donor_dad1664
  misc_feature 1..23: note = RE
  misc_feature 24..25: note = Core
  misc_feature 26..50: note = LE
agggttgcatcgcaacatagaatcttgtatgttcgctctggcaggtttag

SEQ ID NO: 38901 - DNA, 50 bp, unidentified
  source 1..50: mol_type = unassigned DNA; note = donor_dad1f56
  misc_feature 1..23: note = RE
  misc_feature 24..25: note = Core
  misc_feature 26..50: note = LE
tgacaacgaaaaacatgggatgtctaataggtttcgtcagcctgtaggtg

SEQ ID NO: 38902 - DNA, 50 bp, unidentified
  source 1..50: mol_type = unassigned DNA; note = donor_dad3a18
  misc_feature 1..23: note = RE
  misc_feature 24..25: note = Core
  misc_feature 26..50: note = LE
cattttcgttttatagaggaaagatttatataaaattttcgaattataag

SEQ ID NO: 38903 - DNA, 50 bp, unidentified
  source 1..50: mol_type = unassigned DNA; note = donor_dad4a6c
  misc_feature 1..22: note = RE
  misc_feature 23..25: note = Core
  misc_feature 26..50: note = LE
cattaccgggggcatccacacatgatggggtggatgccccctcccggcgg

SEQ ID NO: 38904 - DNA, 50 bp, unidentified
  source 1..50: mol_type = unassigned DNA; note = donor_dad8d11
  misc_feature 1..23: note = RE
  misc_feature 24..25: note = Core
  misc_feature 26..50: note = LE
ttgcaaacggagtgggtccatatataatggtatggacccactccaacttt

SEQ ID NO: 38905 - DNA, 50 bp, unidentified
  source 1..50: mol_type = unassigned DNA; note = donor_dadf0c0
  misc_feature 1..23: note = RE
  misc_feature 24..25: note = Core
  misc_feature 26..50: note = LE
atccagcttgatcaacacggatacttgtcttatgactttccatgccgaac

SEQ ID NO: 38906 - DNA, 50 bp, unidentified
  source 1..50: mol_type = unassigned DNA; note = donor_dafd44e
  misc_feature 1..23: note = RE
  misc_feature 24..25: note = Core
  misc_feature 26..50: note = LE
ctgggacctgacagatacagttgcttctgtatctgcgctctgctaaactg

SEQ ID NO: 38907 - DNA, 50 bp, unidentified
  source 1..50: mol_type = unassigned DNA; note = donor_dafef18
  misc_feature 1..22: note = RE
  misc_feature 23..25: note = Core
  misc_feature 26..50: note = LE
cataacggacggcaaccacagaagatggggtggttgccgtcctccccgca

SEQ ID NO: 38908 - DNA, 50 bp, unidentified
  source 1..50: mol_type = unassigned DNA; note = donor_db13065
  misc_feature 1..21: note = RE
  misc_feature 22..25: note = Core
  misc_feature 26..50: note = LE
cccttgacttctaatagctagtcacgtataatccaattacctcattcgag

SEQ ID NO: 38909 - DNA, 50 bp, unidentified
  source 1..50: mol_type = unassigned DNA; note = donor_db23f22
  misc_feature 1..23: note = RE
  misc_feature 24..25: note = Core
  misc_feature 26..50: note = LE
aaaatttgtgcaggtcttagaattcctttagatttgcaccataaataata

SEQ ID NO: 38910 - DNA, 50 bp, unidentified
  source 1..50: mol_type = unassigned DNA; note = donor_db375af
  misc_feature 1..23: note = RE
  misc_feature 24..25: note = Core
  misc_feature 26..50: note = LE
ctatgcgggagccatccacacaagatggggtggatggctcccgctcccgg

SEQ ID NO: 38911 - DNA, 50 bp, unidentified
  source 1..50: mol_type = unassigned DNA; note = donor_db398ab
  misc_feature 1..23: note = RE
  misc_feature 24..25: note = Core
  misc_feature 26..50: note = LE
tgacatttcagctcctgggatgtctaatcagttctgggagtgatccatcc

SEQ ID NO: 38912 - DNA, 50 bp, unidentified
  source 1..50: mol_type = unassigned DNA; note = donor_db4407c
  misc_feature 1..23: note = RE
  misc_feature 24..25: note = Core
  misc_feature 26..50: note = LE
tgacaacgaaaaacctgagatgtctaatggcttctgtcggtctgcttcgg

SEQ ID NO: 38913 - DNA, 50 bp, unidentified; identical to SEQ ID NO: 32980
  source 1..50: mol_type = unassigned DNA; note = donor_db45a01
  misc_feature 1..22: note = RE
  misc_feature 23..25: note = Core
  misc_feature 26..50: note = LE

SEQ ID NO: 38914 - DNA, 50 bp, unidentified
  source 1..50: mol_type = unassigned DNA; note = donor_db46a02
  misc_feature 1..24: note = RE
  misc_feature 25: note = Core
  misc_feature 26..50: note = LE
ggggcttgactttttatttgcaggcctgttactataatatttgcctcgga

SEQ ID NO: 38915 - DNA, 50 bp, unidentified
  source 1..50: mol_type = unassigned DNA; note = donor_db48903
  misc_feature 1..21: note = RE
  misc_feature 22..25: note = Core
  misc_feature 26..50: note = LE
ctattgacttttcttagcaggttttagtaccataaaagtgtagttgttag

SEQ ID NO: 38916 - DNA, 50 bp, unidentified
  source 1..50: mol_type = unassigned DNA; note = donor_db4a8cc
  misc_feature 1..22: note = RE
  misc_feature 23..25: note = Core
  misc_feature 26..50: note = LE
aattattgacttctattagctggttcgtattataaggttaaccaaatttt

SEQ ID NO: 38917 - DNA, 50 bp, unidentified
  source 1..50: mol_type = unassigned DNA; note = donor_db501d9
  misc_feature 1..24: note = RE
  misc_feature 25: note = Core
  misc_feature 26..50: note = LE
ttgcaacgaggaggagtccatatacaatgggatggactcctcctcatctt

SEQ ID NO: 38918 - DNA, 50 bp, unidentified
  source 1..50: mol_type = unassigned DNA; note = donor_db51134
  misc_feature 1..22: note = RE
  misc_feature 23..25: note = Core
  misc_feature 26..50: note = LE
taagcgagaggccgtccacatctgctggtgtggacggcctctcaacccca

SEQ ID NO: 38919 - DNA, 50 bp, unidentified
  source 1..50: mol_type = unassigned DNA; note = donor_db536de
  misc_feature 1..22: note = RE
  misc_feature 23..25: note = Core
  misc_feature 26..50: note = LE
cggttgaaaattcgagcgggatgtttaccatcgaatttgcagggtgacgg

SEQ ID NO: 38920 - DNA, 50 bp, unidentified; identical to SEQ ID NO: 31033
  source 1..50: mol_type = unassigned DNA; note = donor_db5a70c
  misc_feature 1..24: note = RE
  misc_feature 25: note = Core
  misc_feature 26..50: note = LE

SEQ ID NO: 38921 - DNA, 50 bp, unidentified
  source 1..50: mol_type = unassigned DNA; note = donor_db5d6eb
  misc_feature 1..23: note = RE
  misc_feature 24..25: note = Core
  misc_feature 26..50: note = LE
gcgtcttttggggcgtccacagatgatggggtggacgccccccggcggca

SEQ ID NO: 38922 - DNA, 50 bp, unidentified
  source 1..50: mol_type = unassigned DNA; note = donor_db5ecd8
  misc_feature 1..24: note = RE
  misc_feature 25: note = Core
  misc_feature 26..50: note = LE
cttgcggacggggtgggccatacgtatgggatggcccacccctcgctttc

SEQ ID NO: 38923 - DNA, 50 bp, unidentified
  source 1..50: mol_type = unassigned DNA; note = donor_db5fbec
  misc_feature 1..21: note = RE
  misc_feature 22..25: note = Core
  misc_feature 26..50: note = LE
atggttgacattaagcacagttcatcctatgcttatagtcgctaggttac

SEQ ID NO: 38924 - DNA, 50 bp, unidentified
  source 1..50: mol_type = unassigned DNA; note = donor_db624f8
  misc_feature 1..23: note = RE
  misc_feature 24..25: note = Core
  misc_feature 26..50: note = LE
gacaaccaagggcccgttacagaagatggggtaacgggccggcgccgagt

SEQ ID NO: 38925 - DNA, 50 bp, unidentified
  source 1..50: mol_type = unassigned DNA; note = donor_db64b5d
  misc_feature 1..23: note = RE
  misc_feature 24..25: note = Core
  misc_feature 26..50: note = LE
gacctcaacacgccgaatagagaagatggggtattcggcttagcgcctct

SEQ ID NO: 38926 - DNA, 50 bp, unidentified
  source 1..50: mol_type = unassigned DNA; note = donor_db86798
  misc_feature 1..23: note = RE
  misc_feature 24..25: note = Core
  misc_feature 26..50: note = LE
gtacttgacttttcatagttggtcttgtatgataattacagaagcaaaat

SEQ ID NO: 38927 - DNA, 50 bp, unidentified
  source 1..50: mol_type = unassigned DNA; note = donor_db94466
  misc_feature 1..24: note = RE
  misc_feature 25: note = Core
  misc_feature 26..50: note = LE
cggcgtcttgacatagaggggagcctacttattcaatgggcggtaggacg

SEQ ID NO: 38928 - DNA, 50 bp, unidentified
  source 1..50: mol_type = unassigned DNA; note = donor_db963b0
  misc_feature 1..22: note = RE
  misc_feature 23..25: note = Core
  misc_feature 26..50: note = LE
tttagggcttgacatagagagtcttatacattaaactaagagcaggccct

SEQ ID NO: 38929 - DNA, 50 bp, unidentified
  source 1..50: mol_type = unassigned DNA; note = donor_db9a146
  misc_feature 1..24: note = RE
  misc_feature 25: note = Core
  misc_feature 26..50: note = LE
tttctattgacttttcatagttggtgtatgatatatatataacaacttaa

SEQ ID NO: 38930 - DNA, 50 bp, unidentified
  source 1..50: mol_type = unassigned DNA; note = donor_db9f47a
  misc_feature 1..23: note = RE
  misc_feature 24..25: note = Core
  misc_feature 26..50: note = LE
ttggcaaatgtgggcgtccatgtataatggaatggacgcccacttcctaa

SEQ ID NO: 38931 - DNA, 50 bp, unidentified
  source 1..50: mol_type = unassigned DNA; note = donor_dbab248
  misc_feature 1..23: note = RE
  misc_feature 24..25: note = Core
  misc_feature 26..50: note = LE
caacgcgggagccatccacacaggatggggtggatggctcccgctcacgg

SEQ ID NO: 38932 - DNA, 50 bp, unidentified
  source 1..50: mol_type = unassigned DNA; note = donor_dbaf7b6
  misc_feature 1..24: note = RE
  misc_feature 25: note = Core
  misc_feature 26..50: note = LE
tgatctccgggtggcgtccatataatggtatggacgccaccctcccgatg

SEQ ID NO: 38933 - DNA, 50 bp, unidentified
  source 1..50: mol_type = unassigned DNA; note = donor_dbb2771
  misc_feature 1..22: note = RE
  misc_feature 23..25: note = Core
  misc_feature 26..50: note = LE
gggcttgacttctattggcaggtttgctacaatataattacggtcagggc

SEQ ID NO: 38934 - DNA, 50 bp, unidentified; identical to SEQ ID NO: 31737
  source 1..50: mol_type = unassigned DNA; note = donor_dbb55f3
  misc_feature 1..23: note = RE
  misc_feature 24..25: note = Core
  misc_feature 26..50: note = LE

SEQ ID NO: 38935 - DNA, 50 bp, unidentified
  source 1..50: mol_type = unassigned DNA; note = donor_dbb980d
  misc_feature 1..23: note = RE
  misc_feature 24..25: note = Core
  misc_feature 26..50: note = LE
tgacatctaagctcctgggatgtctaataagagttgtcgggtccgccatc

SEQ ID NO: 38936 - DNA, 50 bp, unidentified
  source 1..50: mol_type = unassigned DNA; note = donor_dbc6093
  misc_feature 1..23: note = RE
  misc_feature 24..25: note = Core
  misc_feature 26..50: note = LE
ggtattgacttttatttgcaggtctgttacaatataattgacgggtaaaa

SEQ ID NO: 38937 - DNA, 50 bp, unidentified
  source 1..50: mol_type = unassigned DNA; note = donor_dbc9d86
  misc_feature 1..23: note = RE
  misc_feature 24..25: note = Core
  misc_feature 26..50: note = LE
gaccttgaacggccgattagagaagatggggtaatcggccggccagcttg

SEQ ID NO: 38938 - DNA, 50 bp, unidentified
  source 1..50: mol_type = unassigned DNA; note = donor_dbcf0b3
  misc_feature 1..24: note = RE
  misc_feature 25: note = Core
  misc_feature 26..50: note = LE
tgcaaaaatggggtggaccatagataatgggatggtccaccccgccccac

SEQ ID NO: 38939 - DNA, 50 bp, unidentified
  source 1..50: mol_type = unassigned DNA; note = donor_dbcf746
  misc_feature 1..23: note = RE
  misc_feature 24..25: note = Core
  misc_feature 26..50: note = LE
gggcttgacttttaatagttagtcttgtattatagagtagtagtttttaa

SEQ ID NO: 38940 - DNA, 50 bp, unidentified
  source 1..50: mol_type = unassigned DNA; note = donor_dbd7bdc
  misc_feature 1..23: note = RE
  misc_feature 24..25: note = Core
  misc_feature 26..50: note = LE
gacgaccaagggcccattacagaagatgccgtaatgggcctgcaccgggg

SEQ ID NO: 38941 - DNA, 50 bp, unidentified
  source 1..50: mol_type = unassigned DNA; note = donor_dbddacf
  misc_feature 1..23: note = RE
  misc_feature 24..25: note = Core
  misc_feature 26..50: note = LE
acacatcgggggccgtccacacatgatgaggtggacggcccctacccaag

SEQ ID NO: 38942 - DNA, 50 bp, unidentified
  source 1..50: mol_type = unassigned DNA; note = donor_dbe8f28
  misc_feature 1..23: note = RE
  misc_feature 24..25: note = Core
  misc_feature 26..50: note = LE
tgcaagcgggagccgtccacatatgttggtgtggacggctccctacggca

SEQ ID NO: 38943 - DNA, 50 bp, unidentified
  source 1..50: mol_type = unassigned DNA; note = donor_dbea7d4
  misc_feature 1..24: note = RE
  misc_feature 25: note = Core
  misc_feature 26..50: note = LE
tgcaaacgggggggtgtccatgtataatgatatggacgcccccccaccct

SEQ ID NO: 38944 - DNA, 50 bp, unidentified
  source 1..50: mol_type = unassigned DNA; note = donor_dbea998
  misc_feature 1..22: note = RE
  misc_feature 23..25: note = Core
  misc_feature 26..50: note = LE
caaagcaggagccatccacacaggatggtgtggatggttcctgcaccatc

SEQ ID NO: 38945 - DNA, 50 bp, unidentified
  source 1..50: mol_type = unassigned DNA; note = donor_dbeebb8
  misc_feature 1..21: note = RE
  misc_feature 22..25: note = Core
  misc_feature 26..50: note = LE
cgtgaggttgacacagagggtgtcactggtgcacccttctcttgacggag

SEQ ID NO: 38946 - DNA, 50 bp, unidentified
  source 1..50: mol_type = unassigned DNA; note = donor_dbf8011
  misc_feature 1..23: note = RE
  misc_feature 24..25: note = Core
  misc_feature 26..50: note = LE
gcgcttgacttcgaagacggttacttgtatctttaaaccagaccagcgcg

SEQ ID NO: 38947 - DNA, 50 bp, unidentified
  source 1..50: mol_type = unassigned DNA; note = donor_dbfa3a5
  misc_feature 1..24: note = RE
  misc_feature 25: note = Core
  misc_feature 26..50: note = LE
attttcggctcattgcttcacacttttaaacatgccgttgcggcatgccc

SEQ ID NO: 38948 - DNA, 50 bp, unidentified
  source 1..50: mol_type = unassigned DNA; note = donor_dbfacbf
  misc_feature 1..23: note = RE
  misc_feature 24..25: note = Core
  misc_feature 26..50: note = LE
tgacatttccagccgtgggatgtctaatagcggcagagccgccaagatgg

SEQ ID NO: 38949 - DNA, 50 bp, unidentified
  source 1..50: mol_type = unassigned DNA; note = donor_dc03ed0
  misc_feature 1..23: note = RE
  misc_feature 24..25: note = Core
  misc_feature 26..50: note = LE
gacttagtcattcaagatggttgcttatatctttcagatcattcaaactt

SEQ ID NO: 38950 - DNA, 50 bp, unidentified
  source 1..50: mol_type = unassigned DNA; note = donor_dc045b5
  misc_feature 1..23: note = RE
  misc_feature 24..25: note = Core
  misc_feature 26..50: note = LE
atacttgacttttcatagctggtcttgtatgatgtttatagaagctaaac

SEQ ID NO: 38951 - DNA, 50 bp, unidentified
  source 1..50: mol_type = unassigned DNA; note = donor_dc0bddf
  misc_feature 1..23: note = RE
  misc_feature 24..25: note = Core
  misc_feature 26..50: note = LE
cttgcacccgacgcgattagacgacatggggtaatcgcgggagcgagcta

SEQ ID NO: 38952 - DNA, 50 bp, unidentified
  source 1..50: mol_type = unassigned DNA; note = donor_dc0c76a
  misc_feature 1..23: note = RE
  misc_feature 24..25: note = Core
  misc_feature 26..50: note = LE
gaccaatcaaggcccgttacagaagatggggtaacgggccggccgatcca

SEQ ID NO: 38953 - DNA, 50 bp, unidentified
  source 1..50: mol_type = unassigned DNA; note = donor_dc199ea
  misc_feature 1..22: note = RE
  misc_feature 23..25: note = Core
  misc_feature 26..50: note = LE
attcatttttcttattatagttcattgtatattatttaatcgttatactt

SEQ ID NO: 38954 - DNA, 50 bp, unidentified
  source 1..50: mol_type = unassigned DNA; note = donor_dc1a206
  misc_feature 1..24: note = RE
  misc_feature 25: note = Core
  misc_feature 26..50: note = LE
cagcttgttttttaactcagttcttcttaagtttacaatctattaatttt

SEQ ID NO: 38955 - DNA, 50 bp, unidentified
  source 1..50: mol_type = unassigned DNA; note = donor_dc1ec2a
  misc_feature 1..23: note = RE
  misc_feature 24..25: note = Core
  misc_feature 26..50: note = LE
ccttgcctcttgacatagaggcgctgacttgtttatatgcgcccagcatc

SEQ ID NO: 38956 - DNA, 50 bp, unidentified
  source 1..50: mol_type = unassigned DNA; note = donor_dc36af7
  misc_feature 1..23: note = RE
  misc_feature 24..25: note = Core
  misc_feature 26..50: note = LE
tgcggacggggcgggccatacgtttatggaatggcccgccccttaaccta

SEQ ID NO: 38957 - DNA, 50 bp, unidentified
  source 1..50: mol_type = unassigned DNA; note = donor_dc397ae
  misc_feature 1..23: note = RE
  misc_feature 24..25: note = Core
  misc_feature 26..50: note = LE
caccggtctattcagcacagttgcttgtgtccgaaaaatttggcagaatg

SEQ ID NO: 38958 - DNA, 50 bp, unidentified
  source 1..50: mol_type = unassigned DNA; note = donor_dc3af94
  misc_feature 1..23: note = RE
  misc_feature 24..25: note = Core
  misc_feature 26..50: note = LE
tggacggttgggagagatggtatcttgtatctctccccgaatatctgatt

SEQ ID NO: 38959 - DNA, 50 bp, unidentified
  source 1..50: mol_type = unassigned DNA; note = donor_dc53461
  misc_feature 1..23: note = RE
  misc_feature 24..25: note = Core
  misc_feature 26..50: note = LE
gcaccaacgggggcatccatacatgatggcgtggatgccctctcccgacg

SEQ ID NO: 38960 - DNA, 50 bp, unidentified
  source 1..50: mol_type = unassigned DNA; note = donor_dc5e148
  misc_feature 1..23: note = RE
  misc_feature 24..25: note = Core
  misc_feature 26..50: note = LE
cttattgacttttaatagttagtctcgtattattagatttgtagttttta

SEQ ID NO: 38961 - DNA, 50 bp, unidentified
  source 1..50: mol_type = unassigned DNA; note = donor_dc63494
  misc_feature 1..23: note = RE
  misc_feature 24..25: note = Core
  misc_feature 26..50: note = LE
tgcctgcgggagccatccacatatgatgaggtggatggctcccgctcccg

SEQ ID NO: 38962 - DNA, 50 bp, unidentified
  source 1..50: mol_type = unassigned DNA; note = donor_dc663f7
  misc_feature 1..14: note = RE
  misc_feature 15..25: note = Core
  misc_feature 26..50: note = LE
ttttaatagttagtctcctattatcagatttgtagtttttatagaccctc

SEQ ID NO: 38963 - DNA, 50 bp, unidentified
  source 1..50: mol_type = unassigned DNA; note = donor_dc6675f
  misc_feature 1..23: note = RE
  misc_feature 24..25: note = Core
  misc_feature 26..50: note = LE
aagccgcttgatcaaaacggatacttgtcttatgacttctctcggctcct

SEQ ID NO: 38964 - DNA, 50 bp, unidentified
  source 1..50: mol_type = unassigned DNA; note = donor_dc6f28a
  misc_feature 1..23: note = RE
  misc_feature 24..25: note = Core
  misc_feature 26..50: note = LE
cctcttgacttcataccattagactcgtataatatgatttgcagaccgtt

SEQ ID NO: 38965 - DNA, 50 bp, unidentified
  source 1..50: mol_type = unassigned DNA; note = donor_dc790d4
  misc_feature 1..23: note = RE
  misc_feature 24..25: note = Core
  misc_feature 26..50: note = LE
aaatttgttttttaagatagtacctcatatctttgtttcctattcaaata

SEQ ID NO: 38966 - DNA, 50 bp, unidentified
  source 1..50: mol_type = unassigned DNA; note = donor_dc7c344
  misc_feature 1..23: note = RE
  misc_feature 24..25: note = Core
  misc_feature 26..50: note = LE
attgactttctctaatagttagtctactattatataaagtcatagtcttt

SEQ ID NO: 38967 - DNA, 50 bp, unidentified
  source 1..50: mol_type = unassigned DNA; note = donor_dc7d0f9
  misc_feature 1..22: note = RE
  misc_feature 23..25: note = Core
  misc_feature 26..50: note = LE
gagtggctgggggaagacagttgcttgtgtctagatctagggataaactc

SEQ ID NO: 38968 - DNA, 50 bp, unidentified
  source 1..50: mol_type = unassigned DNA; note = donor_dc801cd
  misc_feature 1..23: note = RE
  misc_feature 24..25: note = Core
  misc_feature 26..50: note = LE
ttgacagaagcggactacatatcagacggtatgagtggtccgagcggcat

SEQ ID NO: 38969 - DNA, 50 bp, unidentified
  source 1..50: mol_type = unassigned DNA; note = donor_dc84032
  misc_feature 1..24: note = RE
  misc_feature 25: note = Core
  misc_feature 26..50: note = LE
cgggcccttgacacagaggggtgcctacttgttgtatggacgtacggctc

SEQ ID NO: 38970 - DNA, 50 bp, unidentified
  source 1..50: mol_type = unassigned DNA; note = donor_dc8cbab
  misc_feature 1..23: note = RE
  misc_feature 24..25: note = Core
  misc_feature 26..50: note = LE
gcatcgcgggcggcaaccaaagaagatggtatggttgccgccctccccag

SEQ ID NO: 38971 - DNA, 50 bp, unidentified
  source 1..50: mol_type = unassigned DNA; note = donor_dc8f0b6
  misc_feature 1..24: note = RE
  misc_feature 25: note = Core
  misc_feature 26..50: note = LE
ttgcaatacgaggtggcccatatataatggaatggtccacctctcccata

SEQ ID NO: 38972 - DNA, 50 bp, unidentified
  source 1..50: mol_type = unassigned DNA; note = donor_dc8fcb4
  misc_feature 1..23: note = RE
  misc_feature 24..25: note = Core
  misc_feature 26..50: note = LE
gggcttgacttttatttgcaggactcctacaatataaattaaggtgatgg

SEQ ID NO: 38973 - DNA, 50 bp, unidentified; identical to SEQ ID NO: 34158
  source 1..50: mol_type = unassigned DNA; note = donor_dc92bc8
  misc_feature 1..24: note = RE
  misc_feature 25: note = Core
  misc_feature 26..50: note = LE

SEQ ID NO: 38974 - DNA, 50 bp, unidentified; identical to SEQ ID NO: 37391
  source 1..50: mol_type = unassigned DNA; note = donor_dc9d4f8
  misc_feature 1..21: note = RE
  misc_feature 22..25: note = Core
  misc_feature 26..50: note = LE

SEQ ID NO: 38975 - DNA, 50 bp, unidentified
  source 1..50: mol_type = unassigned DNA; note = donor_dc9eee4
  misc_feature 1..21: note = RE
  misc_feature 22..25: note = Core
  misc_feature 26..50: note = LE
ggcttgacaacaccattgagattccgtaagactgtggacggcctcagggg

SEQ ID NO: 38976 - DNA, 50 bp, unidentified; identical to SEQ ID NO: 33802
  source 1..50: mol_type = unassigned DNA; note = donor_dca3204
  misc_feature 1..23: note = RE
  misc_feature 24..25: note = Core
  misc_feature 26..50: note = LE

SEQ ID NO: 38977 - DNA, 50 bp, unidentified
  source 1..50: mol_type = unassigned DNA; note = donor_dca96ce
  misc_feature 1..23: note = RE
  misc_feature 24..25: note = Core
  misc_feature 26..50: note = LE
tacccttggtcaatccataagaataccttaggtttgaattattattttta

SEQ ID NO: 38978 - DNA, 50 bp, unidentified; identical to SEQ ID NO: 32049
  source 1..50: mol_type = unassigned DNA; note = donor_dcb39ee
  misc_feature 1..22: note = RE
  misc_feature 23..25: note = Core
  misc_feature 26..50: note = LE

SEQ ID NO: 38979 - DNA, 50 bp, unidentified; identical to SEQ ID NO: 36360
  source 1..50: mol_type = unassigned DNA; note = donor_dcba8b7
  misc_feature 1..23: note = RE
  misc_feature 24..25: note = Core
  misc_feature 26..50: note = LE

SEQ ID NO: 38980 - DNA, 50 bp, unidentified
  source 1..50: mol_type = unassigned DNA; note = donor_dcbcbbb
  misc_feature 1..23: note = RE
  misc_feature 24..25: note = Core
  misc_feature 26..50: note = LE
gcggcttgacaaatagagaggcaccgacttatcttcgtgtcatcggtccg

SEQ ID NO: 38981 - DNA, 50 bp, unidentified
  source 1..50: mol_type = unassigned DNA; note = donor_dccaeb5
  misc_feature 1..23: note = RE
  misc_feature 24..25: note = Core
  misc_feature 26..50: note = LE
ttgccgacggggcgggccatacgttatggatggcccgccccttacccaag

SEQ ID NO: 38982 - DNA, 50 bp, unidentified
  source 1..50: mol_type = unassigned DNA; note = donor_dcd294e
  misc_feature 1..24: note = RE
  misc_feature 25: note = Core
  misc_feature 26..50: note = LE
tgcaatctggcggcggaccatacatactggaatggtccgccgctagtccc

SEQ ID NO: 38983 - DNA, 50 bp, unidentified
  source 1..50: mol_type = unassigned DNA; note = donor_dcd62dc
  misc_feature 1..23: note = RE
  misc_feature 24..25: note = Core
  misc_feature 26..50: note = LE
agcaggtggttgacaaagggtgtctgatggctttaccctcctgagtcatg

SEQ ID NO: 38984 - DNA, 50 bp, unidentified
  source 1..50: mol_type = unassigned DNA; note = donor_dd00e55
  misc_feature 1..23: note = RE
  misc_feature 24..25: note = Core
  misc_feature 26..50: note = LE
gtatttcaggagccgtccatacatgatgggatggacgcctcctgttcggg

SEQ ID NO: 38985 - DNA, 50 bp, unidentified
  source 1..50: mol_type = unassigned DNA; note = donor_dd1615e
  misc_feature 1..24: note = RE
  misc_feature 25: note = Core
  misc_feature 26..50: note = LE
ttgcaatcggagaggatccatatataatggtatgaaccctctccacttca

SEQ ID NO: 38986 - DNA, 50 bp, unidentified
  source 1..50: mol_type = unassigned DNA; note = donor_dd17a09
  misc_feature 1..21: note = RE
  misc_feature 22..25: note = Core
  misc_feature 26..50: note = LE
ggcttgacatcttcattgagactccgtaagttgttagtcggcccgggtgg

SEQ ID NO: 38987 - DNA, 50 bp, unidentified; identical to SEQ ID NO: 37196
  source 1..50: mol_type = unassigned DNA; note = donor_dd229b8
  misc_feature 1..23: note = RE
  misc_feature 24..25: note = Core
  misc_feature 26..50: note = LE

SEQ ID NO: 38988 - DNA, 50 bp, unidentified; identical to SEQ ID NO: 30770
  source 1..50: mol_type = unassigned DNA; note = donor_dd25e7d
  misc_feature 1..24: note = RE
  misc_feature 25: note = Core
  misc_feature 26..50: note = LE

SEQ ID NO: 38989 - DNA, 50 bp, unidentified; identical to SEQ ID NO: 36805
  source 1..50: mol_type = unassigned DNA; note = donor_dd320ba
  misc_feature 1..24: note = RE
  misc_feature 25: note = Core
  misc_feature 26..50: note = LE

SEQ ID NO: 38990 - DNA, 50 bp, unidentified
  source 1..50: mol_type = unassigned DNA; note = donor_dd3766d
  misc_feature 1..23: note = RE
  misc_feature 24..25: note = Core
  misc_feature 26..50: note = LE
gacttcaatacgccgaatagagaagatggggtattcggctcggcacctca

SEQ ID NO: 38991 - DNA, 50 bp, unidentified
  source 1..50: mol_type = unassigned DNA; note = donor_dd3d237
  misc_feature 1..23: note = RE
  misc_feature 24..25: note = Core
  misc_feature 26..50: note = LE
gaccccgaacggccgattagagaagatggggtaatcggccggcgagcttg

SEQ ID NO: 38992 - DNA, 50 bp, unidentified
  source 1..50: mol_type = unassigned DNA; note = donor_dd47c95
  misc_feature 1..23: note = RE
  misc_feature 24..25: note = Core
  misc_feature 26..50: note = LE
taagcttgacttttgttagcaggttagtaccataaatagtgtaagaaagg

SEQ ID NO: 38993 - DNA, 50 bp, unidentified; identical to SEQ ID NO: 31537
  source 1..50: mol_type = unassigned DNA; note = donor_dd4826a
  misc_feature 1..23: note = RE
  misc_feature 24..25: note = Core
  misc_feature 26..50: note = LE

SEQ ID NO: 38994 - DNA, 50 bp, unidentified
  source 1..50: mol_type = unassigned DNA; note = donor_dd4b66a
  misc_feature 1..23: note = RE
  misc_feature 24..25: note = Core
  misc_feature 26..50: note = LE
tgacacgaaacggcatgggatgtctaatgagaccagccgggtttccctct

SEQ ID NO: 38995 - DNA, 50 bp, unidentified
  source 1..50: mol_type = unassigned DNA; note = donor_dd52d80
  misc_feature 1..24: note = RE
  misc_feature 25: note = Core
  misc_feature 26..50: note = LE
gccaaaccgggaggcgtccatataatgtaatggacgcctccctcccgccg

SEQ ID NO: 38996 - DNA, 50 bp, unidentified
  source 1..50: mol_type = unassigned DNA; note = donor_dd556c7
  misc_feature 1..22: note = RE
  misc_feature 23..25: note = Core
  misc_feature 26..50: note = LE
ggcttgacttcctatagttggtcacgtataataaaaaccatctcgaaagg

SEQ ID NO: 38997 - DNA, 50 bp, unidentified; identical to SEQ ID NO: 31106
  source 1..50: mol_type = unassigned DNA; note = donor_dd6282e
  misc_feature 1..23: note = RE
  misc_feature 24..25: note = Core
  misc_feature 26..50: note = LE

SEQ ID NO: 38998 - DNA, 50 bp, unidentified
  source 1..50: mol_type = unassigned DNA; note = donor_dd6c200
  misc_feature 1..23: note = RE
  misc_feature 24..25: note = Core
  misc_feature 26..50: note = LE
tgacaaaccaaaagctgggatgtctaatgagatgtagcgggtcggtagat

SEQ ID NO: 38999 - DNA, 50 bp, unidentified
  source 1..50: mol_type = unassigned DNA; note = donor_dd83b5c
  misc_feature 1..23: note = RE
  misc_feature 24..25: note = Core
  misc_feature 26..50: note = LE
ctgcttgacaaacacattaggcagccctacctttcaagtcaacctccggt

SEQ ID NO: 39000 - DNA, 50 bp, unidentified
  source 1..50: mol_type = unassigned DNA; note = donor_dd9090a
  misc_feature 1..24: note = RE
  misc_feature 25: note = Core
  misc_feature 26..50: note = LE
ccgccccttgacacagaggggagcctactaagagacttcacgcaggatcg

SEQ ID NO: 39001 - DNA, 50 bp, unidentified
  source 1..50: mol_type = unassigned DNA; note = donor_dd91dc0
  misc_feature 1..23: note = RE
  misc_feature 24..25: note = Core
  misc_feature 26..50: note = LE
ggggtttcccaaaaccatagaatcttgtatggtaggacttgaagggagga

SEQ ID NO: 39002 - DNA, 50 bp, unidentified
  source 1..50: mol_type = unassigned DNA; note = donor_dd96de3
  misc_feature 1..23: note = RE
  misc_feature 24..25: note = Core
  misc_feature 26..50: note = LE
gactttttacggacgtgggatgtctaataggagcagaacctcctcgagaa

SEQ ID NO: 39003 - DNA, 50 bp, unidentified
  source 1..50: mol_type = unassigned DNA; note = donor_dd99d6d
  misc_feature 1..24: note = RE
  misc_feature 25: note = Core
  misc_feature 26..50: note = LE
taagcttgactttttatttgcaggcctactacaatatatttatggttaat

SEQ ID NO: 39004 - DNA, 50 bp, unidentified; identical to SEQ ID NO: 33859
  source 1..50: mol_type = unassigned DNA; note = donor_dd9f202
  misc_feature 1..23: note = RE
  misc_feature 24..25: note = Core
  misc_feature 26..50: note = LE

SEQ ID NO: 39005 - DNA, 50 bp, unidentified
  source 1..50: mol_type = unassigned DNA; note = donor_dda75f4
  misc_feature 1..21: note = RE
  misc_feature 22..25: note = Core
  misc_feature 26..50: note = LE
ggcttgacttcgtcattgagactccgtaagttgttaggcggcccgggagg

SEQ ID NO: 39006 - DNA, 50 bp, unidentified
  source 1..50: mol_type = unassigned DNA; note = donor_dda9b6b
  misc_feature 1..24: note = RE
  misc_feature 25: note = Core
  misc_feature 26..50: note = LE
tgcaaatcggagggtgaccatagataatgggatggtcaccctccaccgaa

SEQ ID NO: 39007 - DNA, 50 bp, unidentified; identical to SEQ ID NO: 35507
  source 1..50: mol_type = unassigned DNA; note = donor_ddbd507
  misc_feature 1..23: note = RE
  misc_feature 24..25: note = Core
  misc_feature 26..50: note = LE

SEQ ID NO: 39008 - DNA, 50 bp, unidentified
  source 1..50: mol_type = unassigned DNA; note = donor_ddbd524
  misc_feature 1..20: note = RE
  misc_feature 21..25: note = Core
  misc_feature 26..50: note = LE
tcggggttgacacaggaagtctcattgggcaacctcacacctggcagtta

SEQ ID NO: 39009 - DNA, 50 bp, unidentified
  source 1..50: mol_type = unassigned DNA; note = donor_ddc1989
  misc_feature 1..23: note = RE
  misc_feature 24..25: note = Core
  misc_feature 26..50: note = LE
tcgcttgactcgagacacggttacttgtatgtttaaaccagaccagtacg

SEQ ID NO: 39010 - DNA, 50 bp, unidentified
  source 1..50: mol_type = unassigned DNA; note = donor_ddc8a6a
  misc_feature 1..22: note = RE
  misc_feature 23..25: note = Core
  misc_feature 26..50: note = LE
atagttggttttatcttagaatgctattagattagcaactttaaataagt

SEQ ID NO: 39011 - DNA, 50 bp, unidentified
  source 1..50: mol_type = unassigned DNA; note = donor_ddcf338
  misc_feature 1..22: note = RE
  misc_feature 23..25: note = Core
  misc_feature 26..50: note = LE
ctttgcaggcgccatccacacaggatggggtggatggcacctgcttcaac

SEQ ID NO: 39012 - DNA, 50 bp, unidentified; identical to SEQ ID NO: 38508
  source 1..50: mol_type = unassigned DNA; note = donor_ddd3523
  misc_feature 1..23: note = RE
  misc_feature 24..25: note = Core
  misc_feature 26..50: note = LE

SEQ ID NO: 39013 - DNA, 50 bp, unidentified
  source 1..50: mol_type = unassigned DNA; note = donor_ddd4b32
  misc_feature 1..23: note = RE
  misc_feature 24..25: note = Core
  misc_feature 26..50: note = LE
cttgacagaaaattccccatacaagaagctatgcgggtgagcggcgaggg

SEQ ID NO: 39014 - DNA, 50 bp, unidentified
  source 1..50: mol_type = unassigned DNA; note = donor_ddd98a8
  misc_feature 1..23: note = RE
  misc_feature 24..25: note = Core
  misc_feature 26..50: note = LE
gcaaaacgggtggagcccatagataatgaaatggactccaccctcctaac

SEQ ID NO: 39015 - DNA, 50 bp, unidentified
  source 1..50: mol_type = unassigned DNA; note = donor_dddc85d
  misc_feature 1..24: note = RE
  misc_feature 25: note = Core
  misc_feature 26..50: note = LE
ttacttgttttttagcacagtacttcttaagttagcatttaaataaaaaa

SEQ ID NO: 39016 - DNA, 50 bp, unidentified
  source 1..50: mol_type = unassigned DNA; note = donor_ddf3bd5
  misc_feature 1..23: note = RE
  misc_feature 24..25: note = Core
  misc_feature 26..50: note = LE
acaggtcctgacgaacacagttgcttgtgtgtctggaatcgtgcattgtt

SEQ ID NO: 39017 - DNA, 50 bp, unidentified
  source 1..50: mol_type = unassigned DNA; note = donor_ddf83e6
  misc_feature 1..21: note = RE
  misc_feature 22..25: note = Core
  misc_feature 26..50: note = LE
ccagcaataactccacggttgcttgtgtggacgatttgtggtttacttgg

SEQ ID NO: 39018 - DNA, 50 bp, unidentified
  source 1..50: mol_type = unassigned DNA; note = donor_ddf8e83
  misc_feature 1..24: note = RE
  misc_feature 25: note = Core
  misc_feature 26..50: note = LE
accacttgacttttactttgcaggcctcctgttactatagatttagggac

SEQ ID NO: 39019 - DNA, 50 bp, unidentified
  source 1..50: mol_type = unassigned DNA; note = donor_ddfd43e
  misc_feature 1..24: note = RE
  misc_feature 25: note = Core
  misc_feature 26..50: note = LE
tgccaacggggagccgtccagacatgatgccgtggacggctccccatccc

SEQ ID NO: 39020 - DNA, 50 bp, unidentified
  source 1..50: mol_type = unassigned DNA; note = donor_de018ba
  misc_feature 1..23: note = RE
  misc_feature 24..25: note = Core
  misc_feature 26..50: note = LE
ccgcttgacaacagcattaggaagctctaccttcttgatcgggttgatcg

SEQ ID NO: 39021 - DNA, 50 bp, unidentified
  source 1..50: mol_type = unassigned DNA; note = donor_de11ad3
  misc_feature 1..23: note = RE
  misc_feature 24..25: note = Core
  misc_feature 26..50: note = LE
gcgggagatgggctgaccatacattaatgagatggtcagcctgaccgaga

SEQ ID NO: 39022 - DNA, 50 bp, unidentified
  source 1..50: mol_type = unassigned DNA; note = donor_de219a2
  misc_feature 1..23: note = RE
  misc_feature 24..25: note = Core
  misc_feature 26..50: note = LE
caaaaattagtttaagacggtatcttatatcttgattctgaactccaaaa

SEQ ID NO: 39023 - DNA, 50 bp, unidentified
  source 1..50: mol_type = unassigned DNA; note = donor_de32267
  misc_feature 1..23: note = RE
  misc_feature 24..25: note = Core
  misc_feature 26..50: note = LE
aaacaatatagtcaagacagttgcttgtatcttaattctaatgtattata

SEQ ID NO: 39024 - DNA, 50 bp, unidentified
  source 1..50: mol_type = unassigned DNA; note = donor_de448ad
  misc_feature 1..22: note = RE
  misc_feature 23..25: note = Core
  misc_feature 26..50: note = LE
cgcccgcggggccgtctatacatgatgggggagacggtcccgctccaacc

SEQ ID NO: 39025 - DNA, 50 bp, unidentified
  source 1..50: mol_type = unassigned DNA; note = donor_de4e197
  misc_feature 1..23: note = RE
  misc_feature 24..25: note = Core
  misc_feature 26..50: note = LE
gactaatcgaggcccgttacagaagatggggtaacgggccagcgccccgg

SEQ ID NO: 39026 - DNA, 50 bp, unidentified
  source 1..50: mol_type = unassigned DNA; note = donor_de5da10
  misc_feature 1..23: note = RE
  misc_feature 24..25: note = Core
  misc_feature 26..50: note = LE
gccactcgggaggcgtccatataagatggtatggacgcctcccacctcga

SEQ ID NO: 39027 - DNA, 50 bp, unidentified
  source 1..50: mol_type = unassigned DNA; note = donor_de65188
  misc_feature 1..23: note = RE
  misc_feature 24..25: note = Core
  misc_feature 26..50: note = LE
ccgggctacttccagcacagttgcttgtgtccaggaaatctgtcagaatg

SEQ ID NO: 39028 - DNA, 50 bp, unidentified
  source 1..50: mol_type = unassigned DNA; note = donor_de67184
  misc_feature 1..23: note = RE
  misc_feature 24..25: note = Core
  misc_feature 26..50: note = LE
gacaaacaaacgccatggggtgtctaatgggggctaccgggctggcctgc

SEQ ID NO: 39029 - DNA, 50 bp, unidentified; identical to SEQ ID NO: 33397
  source 1..50: mol_type = unassigned DNA; note = donor_de671ca
  misc_feature 1..23: note = RE
  misc_feature 24..25: note = Core
  misc_feature 26..50: note = LE

SEQ ID NO: 39030 - DNA, 50 bp, unidentified
  source 1..50: mol_type = unassigned DNA; note = donor_de706e2
  misc_feature 1..24: note = RE
  misc_feature 25: note = Core
  misc_feature 26..50: note = LE
gaccggttgacaacagaagggagcctactagacgattgtcggtagggccg

SEQ ID NO: 39031 - DNA, 50 bp, unidentified
  source 1..50: mol_type = unassigned DNA; note = donor_de75dec
  misc_feature 1..18: note = RE
  misc_feature 19..25: note = Core
  misc_feature 26..50: note = LE
cttaaaacataggggcacccccccgttaccttttaagtagccccgccatc

SEQ ID NO: 39032 - DNA, 50 bp, unidentified
  source 1..50: mol_type = unassigned DNA; note = donor_de7b7f7
  misc_feature 1..23: note = RE
  misc_feature 24..25: note = Core
  misc_feature 26..50: note = LE
aagatttggttttatcatagaaatcctttagatttgctttttgaaattta

SEQ ID NO: 39033 - DNA, 50 bp, unidentified
  source 1..50: mol_type = unassigned DNA; note = donor_de81ccb
  misc_feature 1..23: note = RE
  misc_feature 24..25: note = Core
  misc_feature 26..50: note = LE
ggggttgacttttaatagttaatcttgtattatagagtagtagtcattaa

SEQ ID NO: 39034 - DNA, 50 bp, unidentified
  source 1..50: mol_type = unassigned DNA; note = donor_de82eae
  misc_feature 1..22: note = RE
  misc_feature 23..25: note = Core
  misc_feature 26..50: note = LE
ttacttgacttacattagcaagattcgtaatatatagagtgaagagtata

SEQ ID NO: 39035 - DNA, 50 bp, unidentified
  source 1..50: mol_type = unassigned DNA; note = donor_de83e8d
  misc_feature 1..24: note = RE
  misc_feature 25: note = Core
  misc_feature 26..50: note = LE
cgcaccttgacaacacaggagcatcagagagatgatggaggggtgctccg

SEQ ID NO: 39036 - DNA, 50 bp, unidentified
  source 1..50: mol_type = unassigned DNA; note = donor_de87e14
  misc_feature 1..23: note = RE
  misc_feature 24..25: note = Core
  misc_feature 26..50: note = LE
atgcttgacttcatatagttagtcttgtataatgaacatgcagttaagtc

SEQ ID NO: 39037 - DNA, 50 bp, unidentified
  source 1..50: mol_type = unassigned DNA; note = donor_de9178e
  misc_feature 1..23: note = RE
  misc_feature 24..25: note = Core
  misc_feature 26..50: note = LE
gcttgacaagtttcatagaaagtcttatattgggtctgttgcagattatc

SEQ ID NO: 39038 - DNA, 50 bp, unidentified
  source 1..50: mol_type = unassigned DNA; note = donor_de99482
  misc_feature 1..22: note = RE
  misc_feature 23..25: note = Core
  misc_feature 26..50: note = LE
gacacggggcgccgtccagacatgatggggtggacggcgccccgacggca

SEQ ID NO: 39039 - DNA, 50 bp, unidentified
  source 1..50: mol_type = unassigned DNA; note = donor_deb09e5
  misc_feature 1..24: note = RE
  misc_feature 25: note = Core
  misc_feature 26..50: note = LE
ttgcgatcggggggcgtccatataatggtatggacgcctcccacctagaa

SEQ ID NO: 39040 - DNA, 50 bp, unidentified
  source 1..50: mol_type = unassigned DNA; note = donor_debbe4b
  misc_feature 1..24: note = RE
  misc_feature 25: note = Core
  misc_feature 26..50: note = LE
accccttgacctttagaagggcgtcagtaagaatacgggtaccagatgtt

SEQ ID NO: 39041 - DNA, 50 bp, unidentified
  source 1..50: mol_type = unassigned DNA; note = donor_debe787
  misc_feature 1..23: note = RE
  misc_feature 24..25: note = Core
  misc_feature 26..50: note = LE
ttttaggggtacgttttcataacaacttcatgcagcatcacattcttgca

SEQ ID NO: 39042 - DNA, 50 bp, unidentified
  source 1..50: mol_type = unassigned DNA; note = donor_dec1331
  misc_feature 1..23: note = RE
  misc_feature 24..25: note = Core
  misc_feature 26..50: note = LE
gtgattgacaggcaagacggtatcttgtatcttgttccctgtagtggtta

SEQ ID NO: 39043 - DNA, 50 bp, unidentified
  source 1..50: mol_type = unassigned DNA; note = donor_dec4eee
  misc_feature 1..24: note = RE
  misc_feature 25: note = Core
  misc_feature 26..50: note = LE
ccgcgtcttgacacagaggggagcctacttgtttacttgcctcacggccc

SEQ ID NO: 39044 - DNA, 50 bp, unidentified
  source 1..50: mol_type = unassigned DNA; note = donor_dec66c9
  misc_feature 1..23: note = RE
  misc_feature 24..25: note = Core
  misc_feature 26..50: note = LE
acccttgacttttcatagttggtctcgtatgatgaagttaggtttttagg

SEQ ID NO: 39045 - DNA, 50 bp, unidentified
  source 1..50: mol_type = unassigned DNA; note = donor_decaff4
  misc_feature 1..24: note = RE
  misc_feature 25: note = Core
  misc_feature 26..50: note = LE
ggtcgcggcttgacataggagcaactcagtgtcagggtgggcggtgcagt

SEQ ID NO: 39046 - DNA, 50 bp, unidentified; identical to SEQ ID NO: 39005
  source 1..50: mol_type = unassigned DNA; note = donor_deccc27
  misc_feature 1..21: note = RE
  misc_feature 22..25: note = Core
  misc_feature 26..50: note = LE

SEQ ID NO: 39047 - DNA, 50 bp, unidentified; identical to SEQ ID NO: 37245
  source 1..50: mol_type = unassigned DNA; note = donor_decd46b
  misc_feature 1..23: note = RE
  misc_feature 24..25: note = Core
  misc_feature 26..50: note = LE

SEQ ID NO: 39048 - DNA, 50 bp, unidentified
  source 1..50: mol_type = unassigned DNA; note = donor_decfd27
  misc_feature 1..23: note = RE
  misc_feature 24..25: note = Core
  misc_feature 26..50: note = LE
gggcttcccctcaaccatagaatcttgtatgctggtacttgaagggagga

SEQ ID NO: 39049 - DNA, 50 bp, unidentified
  source 1..50: mol_type = unassigned DNA; note = donor_ded1906
  misc_feature 1..23: note = RE
  misc_feature 24..25: note = Core
  misc_feature 26..50: note = LE
gattaaaacgaggagtccatataagatgtatggactcctctccccccagg

SEQ ID NO: 39050 - DNA, 50 bp, unidentified
  source 1..50: mol_type = unassigned DNA; note = donor_ded28c5
  misc_feature 1..22: note = RE
  misc_feature 23..25: note = Core
  misc_feature 26..50: note = LE
aataggggactatcatacttgacttctatgatatttgatgatacaatata

SEQ ID NO: 39051 - DNA, 50 bp, unidentified
  source 1..50: mol_type = unassigned DNA; note = donor_ded61a7
  misc_feature 1..23: note = RE
  misc_feature 24..25: note = Core
  misc_feature 26..50: note = LE
gaccccaaacggccgattagagaagatggggtaatcggccgaccagcttg

SEQ ID NO: 39052 - DNA, 50 bp, unidentified
  source 1..50: mol_type = unassigned DNA; note = donor_deeafc8
  misc_feature 1..24: note = RE
  misc_feature 25: note = Core
  misc_feature 26..50: note = LE
ccgcttgacaatccataggagcgtctgtgagaatccagtccgcagtctgg

SEQ ID NO: 39053 - DNA, 50 bp, unidentified
  source 1..50: mol_type = unassigned DNA; note = donor_deed161
  misc_feature 1..23: note = RE
  misc_feature 24..25: note = Core
  misc_feature 26..50: note = LE
atcgtgcttgcgcataacggaaacttgtcttatgacatttccgcctgctg

SEQ ID NO: 39054 - DNA, 50 bp, unidentified
  source 1..50: mol_type = unassigned DNA; note = donor_def459e
  misc_feature 1..22: note = RE
  misc_feature 23..25: note = Core
  misc_feature 26..50: note = LE
tgccatagggggcgtccacatatgatgatgtggacgcccccgcacccgcg

SEQ ID NO: 39055 - DNA, 50 bp, unidentified
  source 1..50: mol_type = unassigned DNA; note = donor_def7f6c
  misc_feature 1..24: note = RE
  misc_feature 25: note = Core
  misc_feature 26..50: note = LE
tgcaaccgaggaggggtccatatacaatgggatggacccctcttcacccg

SEQ ID NO: 39056 - DNA, 50 bp, unidentified
  source 1..50: mol_type = unassigned DNA; note = donor_def8b95
  misc_feature 1..22: note = RE
  misc_feature 23..25: note = Core
  misc_feature 26..50: note = LE
aaataaatcgggcaagacagttgcttgtgtcttgattagagattagaatc

SEQ ID NO: 39057 - DNA, 50 bp, unidentified
  source 1..50: mol_type = unassigned DNA; note = donor_defa24d
  misc_feature 1..24: note = RE
  misc_feature 25: note = Core
  misc_feature 26..50: note = LE
atacttgtaaatatccataggaagctttaactttgcagcgtgaaaagagt

SEQ ID NO: 39058 - DNA, 50 bp, unidentified
  source 1..50: mol_type = unassigned DNA; note = donor_defbb3c
  misc_feature 1..24: note = RE
  misc_feature 25: note = Core
  misc_feature 26..50: note = LE
aacgcaaacgggggcgttcatataatggaatgaacgcccccaccctccga

SEQ ID NO: 39059 - DNA, 50 bp, unidentified
  source 1..50: mol_type = unassigned DNA; note = donor_df01c77
  misc_feature 1..23: note = RE
  misc_feature 24..25: note = Core
  misc_feature 26..50: note = LE
aaggcttgacttttgttagcaggttagtaccatataagtgtaagaggaaa

SEQ ID NO: 39060 - DNA, 50 bp, unidentified
  source 1..50: mol_type = unassigned DNA; note = donor_df062fa
  misc_feature 1..23: note = RE
  misc_feature 24..25: note = Core
  misc_feature 26..50: note = LE
cgcattgacaagaaccatagaatcttgtatggtaaagcttaagagaatcg

SEQ ID NO: 39061 - DNA, 50 bp, unidentified
  source 1..50: mol_type = unassigned DNA; note = donor_df0fedc
  misc_feature 1..24: note = RE
  misc_feature 25: note = Core
  misc_feature 26..50: note = LE
ttgcaatcaggcggggtccatatacaatggtatggaccccgccgccctcg

SEQ ID NO: 39062 - DNA, 50 bp, unidentified; identical to SEQ ID NO: 33909
  source 1..50: mol_type = unassigned DNA; note = donor_df10517
  misc_feature 1..24: note = RE
  misc_feature 25: note = Core
  misc_feature 26..50: note = LE

SEQ ID NO: 39063 - DNA, 50 bp, unidentified
  source 1..50: mol_type = unassigned DNA; note = donor_df11857
  misc_feature 1..22: note = RE
  misc_feature 23..25: note = Core
  misc_feature 26..50: note = LE
ctcttgacaattaagacggtatcttgtatattagagggggaaggatcagg

SEQ ID NO: 39064 - DNA, 50 bp, unidentified
  source 1..50: mol_type = unassigned DNA; note = donor_df12df8
  misc_feature 1..24: note = RE
  misc_feature 25: note = Core
  misc_feature 26..50: note = LE
aacccttgacaagcataggggcatcagggaggctgtggatagtgcttctg

SEQ ID NO: 39065 - DNA, 50 bp, unidentified
  source 1..50: mol_type = unassigned DNA; note = donor_df176d1
  misc_feature 1..23: note = RE
  misc_feature 24..25: note = Core
  misc_feature 26..50: note = LE
ggtacttgatttttcttagcaggttagtaccataaaagtgtagttgttag

SEQ ID NO: 39066 - DNA, 50 bp, unidentified
  source 1..50: mol_type = unassigned DNA; note = donor_df2b3ae
  misc_feature 1..23: note = RE
  misc_feature 24..25: note = Core
  misc_feature 26..50: note = LE
caaacagggagccatccacacaggatggggtggatggctcccactcccgg

SEQ ID NO: 39067 - DNA, 50 bp, unidentified
  source 1..50: mol_type = unassigned DNA; note = donor_df3635d
  misc_feature 1..24: note = RE
  misc_feature 25: note = Core
  misc_feature 26..50: note = LE
ccacttgacgatctatacgagcatcagtgaagatgtggctgtccctgatc

SEQ ID NO: 39068 - DNA, 50 bp, unidentified
  source 1..50: mol_type = unassigned DNA; note = donor_df3b170
  misc_feature 1..24: note = RE
  misc_feature 25: note = Core
  misc_feature 26..50: note = LE
ttgacaagtggggaagcccttgtagaatgaaagggacttccccgtcccga

SEQ ID NO: 39069 - DNA, 50 bp, unidentified
  source 1..50: mol_type = unassigned DNA; note = donor_df3c9a9
  misc_feature 1..21: note = RE
  misc_feature 22..25: note = Core
  misc_feature 26..50: note = LE
catgaggttgacacagggagtgtcactagtgcaccctctttctggtgagc

SEQ ID NO: 39070 - DNA, 50 bp, unidentified; identical to SEQ ID NO: 34482
  source 1..50: mol_type = unassigned DNA; note = donor_df3c9b3
  misc_feature 1..23: note = RE
  misc_feature 24..25: note = Core
  misc_feature 26..50: note = LE

SEQ ID NO: 39071 - DNA, 50 bp, unidentified
  source 1..50: mol_type = unassigned DNA; note = donor_df49d67
  misc_feature 1..24: note = RE
  misc_feature 25: note = Core
  misc_feature 26..50: note = LE
tgcgccgcaggggtcgtccacacatgatgtggtggacgacccctgcacga

SEQ ID NO: 39072 - DNA, 50 bp, unidentified
  source 1..50: mol_type = unassigned DNA; note = donor_df4dab8
  misc_feature 1..23: note = RE
  misc_feature 24..25: note = Core
  misc_feature 26..50: note = LE
ggcctgaggtagacagaaggtgtctgatagcagtaccttctttcatggcc

SEQ ID NO: 39073 - DNA, 50 bp, unidentified
  source 1..50: mol_type = unassigned DNA; note = donor_df5153f
  misc_feature 1..23: note = RE
  misc_feature 24..25: note = Core
  misc_feature 26..50: note = LE
gccgggcgcggccgttccacatatgatggtgtggaacggccccgctaccc

SEQ ID NO: 39074 - DNA, 50 bp, unidentified
  source 1..50: mol_type = unassigned DNA; note = donor_df56791
  misc_feature 1..23: note = RE
  misc_feature 24..25: note = Core
  misc_feature 26..50: note = LE
caccacggccttcataacagttgcctgtgtgtgcagggtctgtcatgatg

SEQ ID NO: 39075 - DNA, 50 bp, unidentified
  source 1..50: mol_type = unassigned DNA; note = donor_df5f6ea
  misc_feature 1..23: note = RE
  misc_feature 24..25: note = Core
  misc_feature 26..50: note = LE
agacttgacatttaatagttagtcttgtattatagagtagtagttattag

SEQ ID NO: 39076 - DNA, 50 bp, unidentified; identical to SEQ ID NO: 32196
  source 1..50: mol_type = unassigned DNA; note = donor_df676d1
  misc_feature 1..23: note = RE
  misc_feature 24..25: note = Core
  misc_feature 26..50: note = LE

SEQ ID NO: 39077 - DNA, 50 bp, unidentified; identical to SEQ ID NO: 34335
  source 1..50: mol_type = unassigned DNA; note = donor_df6efdf
  misc_feature 1..23: note = RE
  misc_feature 24..25: note = Core
  misc_feature 26..50: note = LE

SEQ ID NO: 39078 - DNA, 50 bp, unidentified
  source 1..50: mol_type = unassigned DNA; note = donor_df70ebb
  misc_feature 1..23: note = RE
  misc_feature 24..25: note = Core
  misc_feature 26..50: note = LE
gcaaaaaatggggtgaccatagattaatgagatggtcaccccggcaccct

SEQ ID NO: 39079 - DNA, 50 bp, unidentified
  source 1..50: mol_type = unassigned DNA; note = donor_df9027b
  misc_feature 1..23: note = RE
  misc_feature 24..25: note = Core
  misc_feature 26..50: note = LE
gactccttcgaggcgtgggatgtctaatgggtctcgacggcgtgcgtggg

SEQ ID NO: 39080 - DNA, 50 bp, unidentified
  source 1..50: mol_type = unassigned DNA; note = donor_df9709d
  misc_feature 1..24: note = RE
  misc_feature 25: note = Core
  misc_feature 26..50: note = LE
ctattgactttttatttgcagacttcctattacaataagatttacggtaa

SEQ ID NO: 39081 - DNA, 50 bp, unidentified; identical to SEQ ID NO: 31420
  source 1..50: mol_type = unassigned DNA; note = donor_dfa2b84
  misc_feature 1..20: note = RE
  misc_feature 21..25: note = Core
  misc_feature 26..50: note = LE

SEQ ID NO: 39082 - DNA, 50 bp, unidentified
  source 1..50: mol_type = unassigned DNA; note = donor_dfa7832
  misc_feature 1..18: note = RE
  misc_feature 19..25: note = Core
  misc_feature 26..50: note = LE
ctcaggtgggtttgcagcgtcgagcagcgcgaagggtaaattgttgcgga

SEQ ID NO: 39083 - DNA, 50 bp, unidentified
  source 1..50: mol_type = unassigned DNA; note = donor_dfae9c2
  misc_feature 1..23: note = RE
  misc_feature 24..25: note = Core
  misc_feature 26..50: note = LE
ttgacaaacggggagtccacataagataattggactcccctcccattagc

SEQ ID NO: 39084 - DNA, 50 bp, unidentified
  source 1..50: mol_type = unassigned DNA; note = donor_dfaf877
  misc_feature 1..23: note = RE
  misc_feature 24..25: note = Core
  misc_feature 26..50: note = LE
atgccgcttagctttaatggttgcttgtaatagcgcaatcagttatcgtc

SEQ ID NO: 39085 - DNA, 50 bp, unidentified; identical to SEQ ID NO: 30604
  source 1..50: mol_type = unassigned DNA; note = donor_dfb0df6
  misc_feature 1..23: note = RE
  misc_feature 24..25: note = Core
  misc_feature 26..50: note = LE

SEQ ID NO: 39086 - DNA, 50 bp, unidentified
  source 1..50: mol_type = unassigned DNA; note = donor_dfb6164
  misc_feature 1..24: note = RE
  misc_feature 25: note = Core
  misc_feature 26..50: note = LE
gccgcttgacaaagaacataggggccgttacctttttcgtagccccttct

SEQ ID NO: 39087 - DNA, 50 bp, unidentified
  source 1..50: mol_type = unassigned DNA; note = donor_dfb80e7
  misc_feature 1..24: note = RE
  misc_feature 25: note = Core
  misc_feature 26..50: note = LE
agcttgacgaagaacatagggacacgttacctttttcgtagcccgtttcc

SEQ ID NO: 39088 - DNA, 50 bp, unidentified
  source 1..50: mol_type = unassigned DNA; note = donor_dfc10f1
  misc_feature 1..23: note = RE
  misc_feature 24..25: note = Core
  misc_feature 26..50: note = LE
gggcttgacttttaatagttagtctcgtattatatagtagtagtttttag

SEQ ID NO: 39089 - DNA, 50 bp, unidentified
  source 1..50: mol_type = unassigned DNA; note = donor_dfd223a
  misc_feature 1..23: note = RE
  misc_feature 24..25: note = Core
  misc_feature 26..50: note = LE
gacttcaacacgccgaatagagaagatggggtattcggctttgccccacg

SEQ ID NO: 39090 - DNA, 50 bp, unidentified; identical to SEQ ID NO: 37310
  source 1..50: mol_type = unassigned DNA; note = donor_dfe7767
  misc_feature 1..24: note = RE
  misc_feature 25: note = Core
  misc_feature 26..50: note = LE

SEQ ID NO: 39091 - DNA, 50 bp, unidentified
  source 1..50: mol_type = unassigned DNA; note = donor_dfe9a91
  misc_feature 1..24: note = RE
  misc_feature 25: note = Core
  misc_feature 26..50: note = LE
cttgcagatggggcgggccatacgtatggaatggcccgcccctccacccg

SEQ ID NO: 39092 - DNA, 50 bp, unidentified; identical to SEQ ID NO: 32264
  source 1..50: mol_type = unassigned DNA; note = donor_dfeb33d
  misc_feature 1..24: note = RE
  misc_feature 25: note = Core
  misc_feature 26..50: note = LE

SEQ ID NO: 39093 - DNA, 50 bp, unidentified
  source 1..50: mol_type = unassigned DNA; note = donor_dff0621
  misc_feature 1..23: note = RE
  misc_feature 24..25: note = Core
  misc_feature 26..50: note = LE
ggatttgtgttttaagagagtatcttgtatattaaatccatccctaaaac

SEQ ID NO: 39094 - DNA, 50 bp, unidentified
  source 1..50: mol_type = unassigned DNA; note = donor_dffda3c
  misc_feature 1..24: note = RE
  misc_feature 25: note = Core
  misc_feature 26..50: note = LE
cttgcaaacacggcgggccatacgtatgggatggcccgtccttccgagga

SEQ ID NO: 39095 - DNA, 50 bp, unidentified
  source 1..50: mol_type = unassigned DNA; note = donor_e002188
  misc_feature 1..23: note = RE
  misc_feature 24..25: note = Core
  misc_feature 26..50: note = LE
gaccccaaccggccgattagagaagatggggtaatcggccggcgagcttg

SEQ ID NO: 39096 - DNA, 50 bp, unidentified
  source 1..50: mol_type = unassigned DNA; note = donor_e0050ce
  misc_feature 1..22: note = RE
  misc_feature 23..25: note = Core
  misc_feature 26..50: note = LE
aatgttgacaaactattagctggttcgtattataaggttaaccagataag

SEQ ID NO: 39097 - DNA, 50 bp, unidentified
  source 1..50: mol_type = unassigned DNA; note = donor_e005e5b
  misc_feature 1..24: note = RE
  misc_feature 25: note = Core
  misc_feature 26..50: note = LE
accacctgacaaacacagttgccagtgtgtcgaaactgtgcttatatggg

SEQ ID NO: 39098 - DNA, 50 bp, unidentified
  source 1..50: mol_type = unassigned DNA; note = donor_e00690a
  misc_feature 1..23: note = RE
  misc_feature 24..25: note = Core
  misc_feature 26..50: note = LE
agggttgacatctaatagttaatcttgtattatagagtagtagttattag

SEQ ID NO: 39099 - DNA, 50 bp, unidentified
  source 1..50: mol_type = unassigned DNA; note = donor_e008fa7
  misc_feature 1..23: note = RE
  misc_feature 24..25: note = Core
  misc_feature 26..50: note = LE
catcttgcaacgccggacatgagagaccacatgtccgtctgaggctggtg

SEQ ID NO: 39100 - DNA, 50 bp, unidentified
  source 1..50: mol_type = unassigned DNA; note = donor_e00977d
  misc_feature 1..23: note = RE
  misc_feature 24..25: note = Core
  misc_feature 26..50: note = LE
atgagggcggcatccacaagagaagatggggtggatgccgctctcaccct

SEQ ID NO: 39101 - DNA, 50 bp, unidentified; identical to SEQ ID NO: 33970
  source 1..50: mol_type = unassigned DNA; note = donor_e00c656
  misc_feature 1..23: note = RE
  misc_feature 24..25: note = Core
  misc_feature 26..50: note = LE

SEQ ID NO: 39102 - DNA, 50 bp, unidentified
  source 1..50: mol_type = unassigned DNA; note = donor_e010221
  misc_feature 1..23: note = RE
  misc_feature 24..25: note = Core
  misc_feature 26..50: note = LE
tgacacgactcgacatgggatgtctaatgagagcaatcgggtctcacatc

SEQ ID NO: 39103 - DNA, 50 bp, unidentified; identical to SEQ ID NO: 31698
  source 1..50: mol_type = unassigned DNA; note = donor_e0139a3
  misc_feature 1..24: note = RE
  misc_feature 25: note = Core
  misc_feature 26..50: note = LE

SEQ ID NO: 39104 - DNA, 50 bp, unidentified
  source 1..50: mol_type = unassigned DNA; note = donor_e015e41
  misc_feature 1..24: note = RE
  misc_feature 25: note = Core
  misc_feature 26..50: note = LE
tgcagttcgccggcggaccatacataatgagatggtccgccgccgagtag

SEQ ID NO: 39105 - DNA, 50 bp, unidentified; identical to SEQ ID NO: 30668
  source 1..50: mol_type = unassigned DNA; note = donor_e01d42c
  misc_feature 1..23: note = RE
  misc_feature 24..25: note = Core
  misc_feature 26..50: note = LE

SEQ ID NO: 39106 - DNA, 50 bp, unidentified
  source 1..50: mol_type = unassigned DNA; note = donor_e01d9f3
  misc_feature 1..24: note = RE
  misc_feature 25: note = Core
  misc_feature 26..50: note = LE
ttggcaaacgggggcgtccatgtacaatgggatggacgcccccacctttg

SEQ ID NO: 39107 - DNA, 50 bp, unidentified
  source 1..50: mol_type = unassigned DNA; note = donor_e025e14
  misc_feature 1..24: note = RE
  misc_feature 25: note = Core
  misc_feature 26..50: note = LE
tggcaaaccaggggcgtccatgtacaatgggatggacgcccctactctaa

SEQ ID NO: 39108 - DNA, 50 bp, unidentified
  source 1..50: mol_type = unassigned DNA; note = donor_e028faf
  misc_feature 1..23: note = RE
  misc_feature 24..25: note = Core
  misc_feature 26..50: note = LE
tttctttgagattaaaacagtatctcttacctttgcatccgattatagaa

SEQ ID NO: 39109 - DNA, 50 bp, unidentified
  source 1..50: mol_type = unassigned DNA; note = donor_e03d94f
  misc_feature 1..23: note = RE
  misc_feature 24..25: note = Core
  misc_feature 26..50: note = LE
actcttgacctttcacagagaatcttgtatgttgcattccaaggcgtgag

SEQ ID NO: 39110 - DNA, 50 bp, unidentified
  source 1..50: mol_type = unassigned DNA; note = donor_e040fde
  misc_feature 1..23: note = RE
  misc_feature 24..25: note = Core
  misc_feature 26..50: note = LE
gcaccgggagggccgtccacacatgatgtggtggacggccctcccacccg

SEQ ID NO: 39111 - DNA, 50 bp, unidentified
  source 1..50: mol_type = unassigned DNA; note = donor_e04ab21
  misc_feature 1..23: note = RE
  misc_feature 24..25: note = Core
  misc_feature 26..50: note = LE
gacttcaacacgtcgattagagaagatggtgtaatcgacttggcgcccca

SEQ ID NO: 39112 - DNA, 50 bp, unidentified
  source 1..50: mol_type = unassigned DNA; note = donor_e04bebb
  misc_feature 1..21: note = RE
  misc_feature 22..25: note = Core
  misc_feature 26..50: note = LE
ccgcggcttgacacagggctactcactggtgcaccatccttgtgtcggca

SEQ ID NO: 39113 - DNA, 50 bp, unidentified
  source 1..50: mol_type = unassigned DNA; note = donor_e04bf4c
  misc_feature 1..24: note = RE
  misc_feature 25: note = Core
  misc_feature 26..50: note = LE
gctgcttgacaaaatacataggggcgttatctttttgatagtccctagaa

SEQ ID NO: 39114 - DNA, 50 bp, unidentified; identical to SEQ ID NO: 34307
  source 1..50: mol_type = unassigned DNA; note = donor_e05192e
  misc_feature 1..24: note = RE
  misc_feature 25: note = Core
  misc_feature 26..50: note = LE

SEQ ID NO: 39115 - DNA, 50 bp, unidentified
  source 1..50: mol_type = unassigned DNA; note = donor_e0621ad
  misc_feature 1..24: note = RE
  misc_feature 25: note = Core
  misc_feature 26..50: note = LE
ttgcaatgaggaggagtccatatacaatgggatggactcctcctcaactt

SEQ ID NO: 39116 - DNA, 50 bp, unidentified
  source 1..50: mol_type = unassigned DNA; note = donor_e068131
  misc_feature 1..23: note = RE
  misc_feature 24..25: note = Core
  misc_feature 26..50: note = LE
ggacttgtgttttaagagagtatcttgtatattaaaaacatcttcaaaca

SEQ ID NO: 39117 - DNA, 50 bp, unidentified
  source 1..50: mol_type = unassigned DNA; note = donor_e06c9c4
  misc_feature 1..23: note = RE
  misc_feature 24..25: note = Core
  misc_feature 26..50: note = LE
cgacttgacttttaatagttagtctcgtattatatagtagtagtttttat

SEQ ID NO: 39118 - DNA, 50 bp, unidentified
  source 1..50: mol_type = unassigned DNA; note = donor_e072046
  misc_feature 1..22: note = RE
  misc_feature 23..25: note = Core
  misc_feature 26..50: note = LE
ccccttgactttttatttgcagactactacaatgtgtttagtggttgata

SEQ ID NO: 39119 - DNA, 50 bp, unidentified
  source 1..50: mol_type = unassigned DNA; note = donor_e07f105
  misc_feature 1..23: note = RE
  misc_feature 24..25: note = Core
  misc_feature 26..50: note = LE
gcaaaacgggatgcgttcatacagaatgtaatgaacgcatcccaccctat

SEQ ID NO: 39120 - DNA, 50 bp, unidentified
  source 1..50: mol_type = unassigned DNA; note = donor_e085336
  misc_feature 1..23: note = RE
  misc_feature 24..25: note = Core
  misc_feature 26..50: note = LE
ttacttgacttcatatagttagtcttgtataatgaagtagagctataaaa

SEQ ID NO: 39121 - DNA, 50 bp, unidentified
  source 1..50: mol_type = unassigned DNA; note = donor_e0865d9
  misc_feature 1..23: note = RE
  misc_feature 24..25: note = Core
  misc_feature 26..50: note = LE
tatacttgacttttcatagctggtcataatttacttgtatgatgttatta

SEQ ID NO: 39122 - DNA, 50 bp, unidentified
  source 1..50: mol_type = unassigned DNA; note = donor_e095c79
  misc_feature 1..21: note = RE
  misc_feature 22..25: note = Core
  misc_feature 26..50: note = LE
attggctgacctctactttctttcataaaaatctccattccgcgcgcctt

SEQ ID NO: 39123 - DNA, 50 bp, unidentified
  source 1..50: mol_type = unassigned DNA; note = donor_e09ce09
  misc_feature 1..22: note = RE
  misc_feature 23..25: note = Core
  misc_feature 26..50: note = LE
ctattgactttttatagttggtcttatataatatatttaggttaataaag

SEQ ID NO: 39124 - DNA, 50 bp, unidentified
  source 1..50: mol_type = unassigned DNA; note = donor_e0a72cb
  misc_feature 1..24: note = RE
  misc_feature 25: note = Core
  misc_feature 26..50: note = LE
ttacttgttttttagcacagtacttcttaagtttacaattcattaaattt

SEQ ID NO: 39125 - DNA, 50 bp, unidentified
  source 1..50: mol_type = unassigned DNA; note = donor_e0a7886
  misc_feature 1..23: note = RE
  misc_feature 24..25: note = Core
  misc_feature 26..50: note = LE
tcccttgacaaggaacatagtcactggtatgttgtctacatccactcgat

SEQ ID NO: 39126 - DNA, 50 bp, unidentified; identical to SEQ ID NO: 39044
  source 1..50: mol_type = unassigned DNA; note = donor_e0ab6db
  misc_feature 1..23: note = RE
  misc_feature 24..25: note = Core
  misc_feature 26..50: note = LE

SEQ ID NO: 39127 - DNA, 50 bp, unidentified
  source 1..50: mol_type = unassigned DNA; note = donor_e0b5764
  misc_feature 1..24: note = RE
  misc_feature 25: note = Core
  misc_feature 26..50: note = LE
cggtgtcttgacataaaggggtgcctacttagagacttcctgcaggatcg

SEQ ID NO: 39128 - DNA, 50 bp, unidentified
  source 1..50: mol_type = unassigned DNA; note = donor_e0c1107
  misc_feature 1..23: note = RE
  misc_feature 24..25: note = Core
  misc_feature 26..50: note = LE
aattttatcgttcaagacagttgcttgcatcttgaaaattggttaaaata

SEQ ID NO: 39129 - DNA, 50 bp, unidentified
  source 1..50: mol_type = unassigned DNA; note = donor_e0cabf5
  misc_feature 1..23: note = RE
  misc_feature 24..25: note = Core
  misc_feature 26..50: note = LE
gggctagccctgcaccatagaatcttgtatggtaggacttgaagggagga

SEQ ID NO: 39130 - DNA, 50 bp, unidentified
  source 1..50: mol_type = unassigned DNA; note = donor_e0caf22
  misc_feature 1..24: note = RE
  misc_feature 25: note = Core
  misc_feature 26..50: note = LE
tttaagctgttctttataggatggtcgtataatctaaataccaaccaaat

SEQ ID NO: 39131 - DNA, 50 bp, unidentified
  source 1..50: mol_type = unassigned DNA; note = donor_e0d03bc
  misc_feature 1..24: note = RE
  misc_feature 25: note = Core
  misc_feature 26..50: note = LE
ctccctcttgactcaaagaggattctggttgagacttcgtggcagatgct

SEQ ID NO: 39132 - DNA, 50 bp, unidentified
  source 1..50: mol_type = unassigned DNA; note = donor_e0d216d
  misc_feature 1..23: note = RE
  misc_feature 24..25: note = Core
  misc_feature 26..50: note = LE
ctacttgactttttatttgcagactactactatgtatttagtggttgata

SEQ ID NO: 39133 - DNA, 50 bp, unidentified; identical to SEQ ID NO: 35382
  source 1..50: mol_type = unassigned DNA; note = donor_e0d4df0
  misc_feature 1..23: note = RE
  misc_feature 24..25: note = Core
  misc_feature 26..50: note = LE

SEQ ID NO: 39134 - DNA, 50 bp, unidentified
  source 1..50: mol_type = unassigned DNA; note = donor_e0d72ce
  misc_feature 1..23: note = RE
  misc_feature 24..25: note = Core
  misc_feature 26..50: note = LE
ataacttgcagatgtcatagaaatcctttagatttgtaaaagaaatcaat

SEQ ID NO: 39135 - DNA, 50 bp, unidentified
  source 1..50: mol_type = unassigned DNA; note = donor_e0d9c0f
  misc_feature 1..24: note = RE
  misc_feature 25: note = Core
  misc_feature 26..50: note = LE
gcaaaacgggggcgtccatgcatgatgggatggacgcccccacctgcaac

SEQ ID NO: 39136 - DNA, 50 bp, unidentified
  source 1..50: mol_type = unassigned DNA; note = donor_e0efdac
  misc_feature 1..23: note = RE
  misc_feature 24..25: note = Core
  misc_feature 26..50: note = LE
gccccgcgggcgccatccatacatgatgggatggatggcgcccgcttccg

SEQ ID NO: 39137 - DNA, 50 bp, unidentified; identical to SEQ ID NO: 31948
  source 1..50: mol_type = unassigned DNA; note = donor_e0f1304
  misc_feature 1..23: note = RE
  misc_feature 24..25: note = Core
  misc_feature 26..50: note = LE

SEQ ID NO: 39138 - DNA, 50 bp, unidentified
  source 1..50: mol_type = unassigned DNA; note = donor_e0f4042
  misc_feature 1..23: note = RE
  misc_feature 24..25: note = Core
  misc_feature 26..50: note = LE
gcatctgaaggggcgtccacagatgatggggtggacgccccccgacggca

SEQ ID NO: 39139 - DNA, 50 bp, unidentified; identical to SEQ ID NO: 34498
  source 1..50: mol_type = unassigned DNA; note = donor_e0f826f
  misc_feature 1..22: note = RE
  misc_feature 23..25: note = Core
  misc_feature 26..50: note = LE

SEQ ID NO: 39140 - DNA, 50 bp, unidentified
  source 1..50: mol_type = unassigned DNA; note = donor_e0febc3
  misc_feature 1..23: note = RE
  misc_feature 24..25: note = Core
  misc_feature 26..50: note = LE
tctattgacttttaatagttagtctcgtataataaagtagtagttaatat

SEQ ID NO: 39141 - DNA, 50 bp, unidentified
  source 1..50: mol_type = unassigned DNA; note = donor_e100017
  misc_feature 1..23: note = RE
  misc_feature 24..25: note = Core
  misc_feature 26..50: note = LE
tttcttgacttttaacacggtatcttgtatctttaataccgatggcaagc

SEQ ID NO: 39142 - DNA, 50 bp, unidentified
  source 1..50: mol_type = unassigned DNA; note = donor_e101e6f
  misc_feature 1..21: note = RE
  misc_feature 22..25: note = Core
  misc_feature 26..50: note = LE
tggcagcttgacacagggcaactcactggtgcaccatccttgcgttgacg

SEQ ID NO: 39143 - DNA, 50 bp, unidentified
  source 1..50: mol_type = unassigned DNA; note = donor_e102003
  misc_feature 1..24: note = RE
  misc_feature 25: note = Core
  misc_feature 26..50: note = LE
ttgacagcaaccacaaagaggactctaatagttgctgaaggtgctgcggt

SEQ ID NO: 39144 - DNA, 50 bp, unidentified
  source 1..50: mol_type = unassigned DNA; note = donor_e110bec
  misc_feature 1..23: note = RE
  misc_feature 24..25: note = Core
  misc_feature 26..50: note = LE
gcttgactcggaacatagggacaccgttaccttgtgagcaccccgatgga

SEQ ID NO: 39145 - DNA, 50 bp, unidentified
  source 1..50: mol_type = unassigned DNA; note = donor_e113b64
  misc_feature 1..23: note = RE
  misc_feature 24..25: note = Core
  misc_feature 26..50: note = LE
gggcttgacttttatttgcaggtctgttacaataaatttagtcggtaaaa

SEQ ID NO: 39146 - DNA, 50 bp, unidentified
  source 1..50: mol_type = unassigned DNA; note = donor_e117762
  misc_feature 1..23: note = RE
  misc_feature 24..25: note = Core
  misc_feature 26..50: note = LE
tatcttgactttttatagttagtctcgtattatatagtagtagtgtttat

SEQ ID NO: 39147 - DNA, 50 bp, unidentified
  source 1..50: mol_type = unassigned DNA; note = donor_e119a66
  misc_feature 1..24: note = RE
  misc_feature 25: note = Core
  misc_feature 26..50: note = LE
tgcagtcagacggcgaaccatacataatgagatggtccgccgcttgatcc

SEQ ID NO: 39148 - DNA, 50 bp, unidentified
  source 1..50: mol_type = unassigned DNA; note = donor_e11a2ff
  misc_feature 1..24: note = RE
  misc_feature 25: note = Core
  misc_feature 26..50: note = LE
cgccctcttgacatagaggggtgcctacttgtttacttgccctacggctg

SEQ ID NO: 39149 - DNA, 50 bp, unidentified; identical to SEQ ID NO: 30847
  source 1..50: mol_type = unassigned DNA; note = donor_e11c40c
  misc_feature 1..24: note = RE
  misc_feature 25: note = Core
  misc_feature 26..50: note = LE

SEQ ID NO: 39150 - DNA, 50 bp, unidentified
  source 1..50: mol_type = unassigned DNA; note = donor_e11d59e
  misc_feature 1..24: note = RE
  misc_feature 25: note = Core
  misc_feature 26..50: note = LE
ttgcaaaaggggatggttcatatataatgtaatgaaccatccccatccac

SEQ ID NO: 39151 - DNA, 50 bp, unidentified
  source 1..50: mol_type = unassigned DNA; note = donor_e122c73
  misc_feature 1..24: note = RE
  misc_feature 25: note = Core
  misc_feature 26..50: note = LE
tgacttgttttttacctcagttcttcttaagtttgaaatctattaaatta

SEQ ID NO: 39152 - DNA, 50 bp, unidentified
  source 1..50: mol_type = unassigned DNA; note = donor_e126368
  misc_feature 1..22: note = RE
  misc_feature 23..25: note = Core
  misc_feature 26..50: note = LE
atccttgacaagtattagctggtttcgtattattaggtcagccagagatt

SEQ ID NO: 39153 - DNA, 50 bp, unidentified
  source 1..50: mol_type = unassigned DNA; note = donor_e12cd0b
  misc_feature 1..22: note = RE
  misc_feature 23..25: note = Core
  misc_feature 26..50: note = LE
cgcccgcggggccgtctatacatgatggggaagacggccccgcttctgag

SEQ ID NO: 39154 - DNA, 50 bp, unidentified
  source 1..50: mol_type = unassigned DNA; note = donor_e12f685
  misc_feature 1..23: note = RE
  misc_feature 24..25: note = Core
  misc_feature 26..50: note = LE
gacctgacacatcaacacagttgcctgtgtgtaggggatgtgtcaggatg

SEQ ID NO: 39155 - DNA, 50 bp, unidentified
  source 1..50: mol_type = unassigned DNA; note = donor_e131050
  misc_feature 1..22: note = RE
  misc_feature 23..25: note = Core
  misc_feature 26..50: note = LE
cttgaccaaacccatagggacacccgttacctttttcgtggctcttgatc

SEQ ID NO: 39156 - DNA, 50 bp, unidentified
  source 1..50: mol_type = unassigned DNA; note = donor_e1311c4
  misc_feature 1..23: note = RE
  misc_feature 24..25: note = Core
  misc_feature 26..50: note = LE
gcaaccgcctcctaacatggttgcttgtgtgatcgctgactgatagattg

SEQ ID NO: 39157 - DNA, 50 bp, unidentified
  source 1..50: mol_type = unassigned DNA; note = donor_e131ee8
  misc_feature 1..23: note = RE
  misc_feature 24..25: note = Core
  misc_feature 26..50: note = LE
tgcaatagggggccgtccacatatgatggggtggacggcccccgtacggc

SEQ ID NO: 39158 - DNA, 50 bp, unidentified; identical to SEQ ID NO: 35242
  source 1..50: mol_type = unassigned DNA; note = donor_e1393b4
  misc_feature 1..23: note = RE
  misc_feature 24..25: note = Core
  misc_feature 26..50: note = LE

SEQ ID NO: 39159 - DNA, 50 bp, unidentified
  source 1..50: mol_type = unassigned DNA; note = donor_e150f8e
  misc_feature 1..23: note = RE
  misc_feature 24..25: note = Core
  misc_feature 26..50: note = LE
tgacttttgccgacgtgggatgtctaatggggacggatcggccggaaaat

SEQ ID NO: 39160 - DNA, 50 bp, unidentified
  source 1..50: mol_type = unassigned DNA; note = donor_e155439
  misc_feature 1..24: note = RE
  misc_feature 25: note = Core
  misc_feature 26..50: note = LE
cttgccaacggggcgggccatacgtatgggatggcccgcccctcccgcca

SEQ ID NO: 39161 - DNA, 50 bp, unidentified
  source 1..50: mol_type = unassigned DNA; note = donor_e157cbf
  misc_feature 1..23: note = RE
  misc_feature 24..25: note = Core
  misc_feature 26..50: note = LE
gcaccgcgggcgccgtccatacatgatgtggtggacgacgcccgctcccg

SEQ ID NO: 39162 - DNA, 50 bp, unidentified
  source 1..50: mol_type = unassigned DNA; note = donor_e15840e
  misc_feature 1..22: note = RE
  misc_feature 23..25: note = Core
  misc_feature 26..50: note = LE
ccacttgacaacctgattgggaatccatacctttcttcatgggttgatcc

SEQ ID NO: 39163 - DNA, 50 bp, unidentified
  source 1..50: mol_type = unassigned DNA; note = donor_e15e00d
  misc_feature 1..23: note = RE
  misc_feature 24..25: note = Core
  misc_feature 26..50: note = LE
gacccaaaccggccgattagagaagatggggtaatcggccgacgtttttg

SEQ ID NO: 39164 - DNA, 50 bp, unidentified
  source 1..50: mol_type = unassigned DNA; note = donor_e1619de
  misc_feature 1..22: note = RE
  misc_feature 23..25: note = Core
  misc_feature 26..50: note = LE
aaacttgtttttgatcttggaatgcctttagtttgcacattaaataaata

SEQ ID NO: 39165 - DNA, 50 bp, unidentified
  source 1..50: mol_type = unassigned DNA; note = donor_e17420e
  misc_feature 1..23: note = RE
  misc_feature 24..25: note = Core
  misc_feature 26..50: note = LE
tgcagatggggcgggccatacgtttatgggatggcccgcccctccttcgg

SEQ ID NO: 39166 - DNA, 50 bp, unidentified; identical to SEQ ID NO: 31682
  source 1..50: mol_type = unassigned DNA; note = donor_e178af8
  misc_feature 1..24: note = RE
  misc_feature 25: note = Core
  misc_feature 26..50: note = LE

SEQ ID NO: 39167 - DNA, 50 bp, unidentified
  source 1..50: mol_type = unassigned DNA; note = donor_e17b547
  misc_feature 1..24: note = RE
  misc_feature 25: note = Core
  misc_feature 26..50: note = LE
acagatcccttcatagaagggagcctatttatgtcttccatgactgcccg

SEQ ID NO: 39168 - DNA, 50 bp, unidentified
  source 1..50: mol_type = unassigned DNA; note = donor_e1912de
  misc_feature 1..18: note = RE
  misc_feature 19..25: note = Core
  misc_feature 26..50: note = LE
cttgacaggatcattgagagtccttaagtttgtaggtgcagttacttcgt

SEQ ID NO: 39169 - DNA, 50 bp, unidentified
  source 1..50: mol_type = unassigned DNA; note = donor_e19570a
  misc_feature 1..23: note = RE
  misc_feature 24..25: note = Core
  misc_feature 26..50: note = LE
gggcttgactttttatttgcaggctgttacaatatatttgcctcggaaaa

SEQ ID NO: 39170 - DNA, 50 bp, unidentified
  source 1..50: mol_type = unassigned DNA; note = donor_e1a47f7
  misc_feature 1..23: note = RE
  misc_feature 24..25: note = Core
  misc_feature 26..50: note = LE
tgactaggtggtgagtccctgtaaaataagaagagactccccactttact

SEQ ID NO: 39171 - DNA, 50 bp, unidentified
  source 1..50: mol_type = unassigned DNA; note = donor_e1a4978
  misc_feature 1..24: note = RE
  misc_feature 25: note = Core
  misc_feature 26..50: note = LE
tggcaaaccgggagcgtccatgtacaatgggatggacgctcccacctaca

SEQ ID NO: 39172 - DNA, 50 bp, unidentified
  source 1..50: mol_type = unassigned DNA; note = donor_e1a5446
  misc_feature 1..24: note = RE
  misc_feature 25: note = Core
  misc_feature 26..50: note = LE
gcaaaaaatggggtgaccatagattaatgagatggtcaccccgaccccct

SEQ ID NO: 39173 - DNA, 50 bp, unidentified
  source 1..50: mol_type = unassigned DNA; note = donor_e1aaef5
  misc_feature 1..24: note = RE
  misc_feature 25: note = Core
  misc_feature 26..50: note = LE
gcactcaatggggaagcccttgtagaatgaaagggacttccccgtcccgc

SEQ ID NO: 39174 - DNA, 50 bp, unidentified
  source 1..50: mol_type = unassigned DNA; note = donor_e1b2dbe
  misc_feature 1..23: note = RE
  misc_feature 24..25: note = Core
  misc_feature 26..50: note = LE
cttgcgcgggaggcgtccatagattatgggatggacgtctcccgcaatcg

SEQ ID NO: 39175 - DNA, 50 bp, unidentified
  source 1..50: mol_type = unassigned DNA; note = donor_e1b9b3b
  misc_feature 1..21: note = RE
  misc_feature 22..25: note = Core
  misc_feature 26..50: note = LE
gacttgacaacatcattgagactccgtaagttggtaggcggtccgggagg

SEQ ID NO: 39176 - DNA, 50 bp, unidentified
  source 1..50: mol_type = unassigned DNA; note = donor_e1c0676
  misc_feature 1..24: note = RE
  misc_feature 25: note = Core
  misc_feature 26..50: note = LE
tgcaaaaggcgtcgggtccatacatactgagatggacccggcgccccctt

SEQ ID NO: 39177 - DNA, 50 bp, unidentified; identical to SEQ ID NO: 34338
  source 1..50: mol_type = unassigned DNA; note = donor_e1c3cfa
  misc_feature 1..23: note = RE
  misc_feature 24..25: note = Core
  misc_feature 26..50: note = LE

SEQ ID NO: 39178 - DNA, 50 bp, unidentified
  source 1..50: mol_type = unassigned DNA; note = donor_e1c510a
  misc_feature 1..23: note = RE
  misc_feature 24..25: note = Core
  misc_feature 26..50: note = LE
actgtttgagttaaacacggtatcttatatgttgaaaagtgttcttcagg

SEQ ID NO: 39179 - DNA, 50 bp, unidentified; identical to SEQ ID NO: 37138
  source 1..50: mol_type = unassigned DNA; note = donor_e1c5203
  misc_feature 1..23: note = RE
  misc_feature 24..25: note = Core
  misc_feature 26..50: note = LE

SEQ ID NO: 39180 - DNA, 50 bp, unidentified
  source 1..50: mol_type = unassigned DNA; note = donor_e1ca850
  misc_feature 1..22: note = RE
  misc_feature 23..25: note = Core
  misc_feature 26..50: note = LE
gacaaggggcgccgtccagacatgatggggtggacggcgccccgagcggc

SEQ ID NO: 39181 - DNA, 50 bp, unidentified; identical to SEQ ID NO: 30804
  source 1..50: mol_type = unassigned DNA; note = donor_e1cd43e
  misc_feature 1..24: note = RE
  misc_feature 25: note = Core
  misc_feature 26..50: note = LE

SEQ ID NO: 39182 - DNA, 50 bp, unidentified
  source 1..50: mol_type = unassigned DNA; note = donor_e1e1814
  misc_feature 1..22: note = RE
  misc_feature 23..25: note = Core
  misc_feature 26..50: note = LE
gactctaaaacccctggggtgtctaatgggagttgatcacgcttgagccg

SEQ ID NO: 39183 - DNA, 50 bp, unidentified
  source 1..50: mol_type = unassigned DNA; note = donor_e1e44c2
  misc_feature 1..22: note = RE
  misc_feature 23..25: note = Core
  misc_feature 26..50: note = LE
aagcttgacaaacattagctggtttcgtattattaggtcagccagagatt

SEQ ID NO: 39184 - DNA, 50 bp, unidentified
  source 1..50: mol_type = unassigned DNA; note = donor_e1e48be
  misc_feature 1..24: note = RE
  misc_feature 25: note = Core
  misc_feature 26..50: note = LE
tgcgacaaggcggcggaccatacataatgggatggtccgccgcttccgcc

SEQ ID NO: 39185 - DNA, 50 bp, unidentified; identical to SEQ ID NO: 31897
  source 1..50: mol_type = unassigned DNA; note = donor_e1ee260
  misc_feature 1..24: note = RE
  misc_feature 25: note = Core
  misc_feature 26..50: note = LE

SEQ ID NO: 39186 - DNA, 50 bp, unidentified
  source 1..50: mol_type = unassigned DNA; note = donor_e200d6f
  misc_feature 1..23: note = RE
  misc_feature 24..25: note = Core
  misc_feature 26..50: note = LE
tcgcttgactttcaagacagtcgcttgtatattaaaagaagtggtagacc

SEQ ID NO: 39187 - DNA, 50 bp, unidentified
  source 1..50: mol_type = unassigned DNA; note = donor_e210e6f
  misc_feature 1..23: note = RE
  misc_feature 24..25: note = Core
  misc_feature 26..50: note = LE
gcatcacccggggcgtccatatatgatgtgatggacgccctttcctgaag

SEQ ID NO: 39188 - DNA, 50 bp, unidentified
  source 1..50: mol_type = unassigned DNA; note = donor_e215672
  misc_feature 1..22: note = RE
  misc_feature 23..25: note = Core
  misc_feature 26..50: note = LE
attcagtttttatattatagttcattgtataataatttatcgttataact

SEQ ID NO: 39189 - DNA, 50 bp, unidentified
  source 1..50: mol_type = unassigned DNA; note = donor_e216fb1
  misc_feature 1..23: note = RE
  misc_feature 24..25: note = Core
  misc_feature 26..50: note = LE
cggcttgacatcttcattgagaatccttactttctttcgtagggtggtcg

SEQ ID NO: 39190 - DNA, 50 bp, unidentified
  source 1..50: mol_type = unassigned DNA; note = donor_e219712
  misc_feature 1..23: note = RE
  misc_feature 24..25: note = Core
  misc_feature 26..50: note = LE
acactttgactttaagagagaatcttgtatcttgtttgcgtctgcccgat

SEQ ID NO: 39191 - DNA, 50 bp, unidentified
  source 1..50: mol_type = unassigned DNA; note = donor_e21c707
  misc_feature 1..23: note = RE
  misc_feature 24..25: note = Core
  misc_feature 26..50: note = LE
atgggacttgaccaaaacggatacttgtcttatgtattccctattgatct

SEQ ID NO: 39192 - DNA, 50 bp, unidentified
  source 1..50: mol_type = unassigned DNA; note = donor_e21d7cf
  misc_feature 1..22: note = RE
  misc_feature 23..25: note = Core
  misc_feature 26..50: note = LE
ttacttgtttttatcttagaatgctattagatttgtatttagtaaattca

SEQ ID NO: 39193 - DNA, 50 bp, unidentified
  source 1..50: mol_type = unassigned DNA; note = donor_e221db1
  misc_feature 1..22: note = RE
  misc_feature 23..25: note = Core
  misc_feature 26..50: note = LE
tattgacattcatatagttagtctcgtataatgaacatataacattatac

SEQ ID NO: 39194 - DNA, 50 bp, unidentified; identical to SEQ ID NO: 33020
  source 1..50: mol_type = unassigned DNA; note = donor_e227609
  misc_feature 1..21: note = RE
  misc_feature 22..25: note = Core
  misc_feature 26..50: note = LE

SEQ ID NO: 39195 - DNA, 50 bp, unidentified
  source 1..50: mol_type = unassigned DNA; note = donor_e22962d
  misc_feature 1..22: note = RE
  misc_feature 23..25: note = Core
  misc_feature 26..50: note = LE
caaaaaaggagccatccacacaggatggggtggatggctcctgcatcaaa

SEQ ID NO: 39196 - DNA, 50 bp, unidentified
  source 1..50: mol_type = unassigned DNA; note = donor_e236ad9
  misc_feature 1..21: note = RE
  misc_feature 22..25: note = Core
  misc_feature 26..50: note = LE
cgtgaggttgacacagggggtgtcactagggcaccctctttcttgcgggc

SEQ ID NO: 39197 - DNA, 50 bp, unidentified; identical to SEQ ID NO: 38556
  source 1..50: mol_type = unassigned DNA; note = donor_e2377e2
  misc_feature 1..22: note = RE
  misc_feature 23..25: note = Core
  misc_feature 26..50: note = LE

SEQ ID NO: 39198 - DNA, 50 bp, unidentified
  source 1..50: mol_type = unassigned DNA; note = donor_e23d31b
  misc_feature 1..23: note = RE
  misc_feature 24..25: note = Core
  misc_feature 26..50: note = LE
gggcttgtattttaagagagtatcttgtatattaaacacatctctaaaac

SEQ ID NO: 39199 - DNA, 50 bp, unidentified; identical to SEQ ID NO: 31059
  source 1..50: mol_type = unassigned DNA; note = donor_e25778b
  misc_feature 1..23: note = RE
  misc_feature 24..25: note = Core
  misc_feature 26..50: note = LE

SEQ ID NO: 39200 - DNA, 50 bp, unidentified
  source 1..50: mol_type = unassigned DNA; note = donor_e257cb2
  misc_feature 1..20: note = RE
  misc_feature 21..25: note = Core
  misc_feature 26..50: note = LE
aaggaaaaagacttgactatataggagcttcttgtataattcaaatataa

SEQ ID NO: 39201 - DNA, 50 bp, unidentified
  source 1..50: mol_type = unassigned DNA; note = donor_e25c676
  misc_feature 1..22: note = RE
  misc_feature 23..25: note = Core
  misc_feature 26..50: note = LE
aaatattaaacattaaacattgaaaaaggcacttttcgatgaggaagcat

SEQ ID NO: 39202 - DNA, 50 bp, unidentified; identical to SEQ ID NO: 32680
  source 1..50: mol_type = unassigned DNA; note = donor_e263b10
  misc_feature 1..24: note = RE
  misc_feature 25: note = Core
  misc_feature 26..50: note = LE

SEQ ID NO: 39203 - DNA, 50 bp, unidentified
  source 1..50: mol_type = unassigned DNA; note = donor_e265955
  misc_feature 1..24: note = RE
  misc_feature 25: note = Core
  misc_feature 26..50: note = LE
acctattgactttttatttgcaggcctgttactatagatattggttgatg

SEQ ID NO: 39204 - DNA, 50 bp, unidentified
  source 1..50: mol_type = unassigned DNA; note = donor_e2683f5
  misc_feature 1..23: note = RE
  misc_feature 24..25: note = Core
  misc_feature 26..50: note = LE
aacccgcttgaccatcacggatacttgtcttatgcctgtcctgcccaacc

SEQ ID NO: 39205 - DNA, 50 bp, unidentified
  source 1..50: mol_type = unassigned DNA; note = donor_e2700d4
  misc_feature 1..24: note = RE
  misc_feature 25: note = Core
  misc_feature 26..50: note = LE
ccttgacacgcgggccgttccacatgatgtggtggaacggcccgctacga

SEQ ID NO: 39206 - DNA, 50 bp, unidentified
  source 1..50: mol_type = unassigned DNA; note = donor_e278d9e
  misc_feature 1..24: note = RE
  misc_feature 25: note = Core
  misc_feature 26..50: note = LE
tgcaaaacggaggtagtccatagataatgggatggactacctcttccctc

SEQ ID NO: 39207 - DNA, 50 bp, unidentified
  source 1..50: mol_type = unassigned DNA; note = donor_e28397c
  misc_feature 1..23: note = RE
  misc_feature 24..25: note = Core
  misc_feature 26..50: note = LE
cttgcaacgggatgtgttcatataaatgtaatgaacacatcccaccccat

SEQ ID NO: 39208 - DNA, 50 bp, unidentified; identical to SEQ ID NO: 31151
  source 1..50: mol_type = unassigned DNA; note = donor_e28e0a7
  misc_feature 1..22: note = RE
  misc_feature 23..25: note = Core
  misc_feature 26..50: note = LE

SEQ ID NO: 39209 - DNA, 50 bp, unidentified
  source 1..50: mol_type = unassigned DNA; note = donor_e29608c
  misc_feature 1..23: note = RE
  misc_feature 24..25: note = Core
  misc_feature 26..50: note = LE
gcatccgaaggggcgtccacacatgatgggatggacgcccccctgacggc

SEQ ID NO: 39210 - DNA, 50 bp, unidentified
  source 1..50: mol_type = unassigned DNA; note = donor_e296e2f
  misc_feature 1..23: note = RE
  misc_feature 24..25: note = Core
  misc_feature 26..50: note = LE
gcattacgggcggcagccaaagaagatgggatggttgccgccctctccgg

SEQ ID NO: 39211 - DNA, 50 bp, unidentified
  source 1..50: mol_type = unassigned DNA; note = donor_e2a00e8
  misc_feature 1..24: note = RE
  misc_feature 25: note = Core
  misc_feature 26..50: note = LE
aattggggcttgactttttagcaggattggtacaaaataagcatagcacc

SEQ ID NO: 39212 - DNA, 50 bp, unidentified
  source 1..50: mol_type = unassigned DNA; note = donor_e2a38f7
  misc_feature 1..23: note = RE
  misc_feature 24..25: note = Core
  misc_feature 26..50: note = LE
gaccaacaaaggcccgttacagaagatggggtaacgggcgttggccaccc

SEQ ID NO: 39213 - DNA, 50 bp, unidentified
  source 1..50: mol_type = unassigned DNA; note = donor_e2a48d9
  misc_feature 1..24: note = RE
  misc_feature 25: note = Core
  misc_feature 26..50: note = LE
ttgacattgggggaagcccttgtagaatgaaagggacttccccgtcccga

SEQ ID NO: 39214 - DNA, 50 bp, unidentified
  source 1..50: mol_type = unassigned DNA; note = donor_e2a849b
  misc_feature 1..23: note = RE
  misc_feature 24..25: note = Core
  misc_feature 26..50: note = LE
ataacttgcaaaaatcatagtagtaccttagatttgcatccgaggattac

SEQ ID NO: 39215 - DNA, 50 bp, unidentified
  source 1..50: mol_type = unassigned DNA; note = donor_e2ae596
  misc_feature 1..22: note = RE
  misc_feature 23..25: note = Core
  misc_feature 26..50: note = LE
ttgagcgaaagatttattactgaacacctatataggtttattagtcgagg

SEQ ID NO: 39216 - DNA, 50 bp, unidentified
  source 1..50: mol_type = unassigned DNA; note = donor_e2aec8a
  misc_feature 1..23: note = RE
  misc_feature 24..25: note = Core
  misc_feature 26..50: note = LE
ttgccgacggggcgggccatacgttatggatggcccgcccctctctctgc

SEQ ID NO: 39217 - DNA, 50 bp, unidentified
  source 1..50: mol_type = unassigned DNA; note = donor_e2b3f38
  misc_feature 1..23: note = RE
  misc_feature 24..25: note = Core
  misc_feature 26..50: note = LE
ccgccgcttgacacacagaggcgctgacttgtgtcattggtggtggggtg

SEQ ID NO: 39218 - DNA, 50 bp, unidentified
  source 1..50: mol_type = unassigned DNA; note = donor_e2b4eab
  misc_feature 1..24: note = RE
  misc_feature 25: note = Core
  misc_feature 26..50: note = LE
cttgaccggacccatagggacacccgttaccttcctcgcgtccccgctga

SEQ ID NO: 39219 - DNA, 50 bp, unidentified; identical to SEQ ID NO: 32363
  source 1..50: mol_type = unassigned DNA; note = donor_e2b96c8
  misc_feature 1..24: note = RE
  misc_feature 25: note = Core
  misc_feature 26..50: note = LE

SEQ ID NO: 39220 - DNA, 50 bp, unidentified
  source 1..50: mol_type = unassigned DNA; note = donor_e2bbe5b
  misc_feature 1..23: note = RE
  misc_feature 24..25: note = Core
  misc_feature 26..50: note = LE
gcgttctacggggcgtccacagatgatggggtggacgccccccgacggca

SEQ ID NO: 39221 - DNA, 50 bp, unidentified
  source 1..50: mol_type = unassigned DNA; note = donor_e2c7056
  misc_feature 1..24: note = RE
  misc_feature 25: note = Core
  misc_feature 26..50: note = LE
tgacacgccggggaagcccttatagaatggaagggacttcccctgattaa

SEQ ID NO: 39222 - DNA, 50 bp, unidentified; identical to SEQ ID NO: 32736
  source 1..50: mol_type = unassigned DNA; note = donor_e2c9d17
  misc_feature 1..23: note = RE
  misc_feature 24..25: note = Core
  misc_feature 26..50: note = LE

SEQ ID NO: 39223 - DNA, 50 bp, unidentified
  source 1..50: mol_type = unassigned DNA; note = donor_e2cefff
  misc_feature 1..24: note = RE
  misc_feature 25: note = Core
  misc_feature 26..50: note = LE
tgttattgactttgcttaattggtcggtacaatgtcatcgatgaaataaa

SEQ ID NO: 39224 - DNA, 50 bp, unidentified
  source 1..50: mol_type = unassigned DNA; note = donor_e2d4d5b
  misc_feature 1..23: note = RE
  misc_feature 24..25: note = Core
  misc_feature 26..50: note = LE
aagccgcttgatcaagacggatacttgtcttatgttgaactcggctcctg

SEQ ID NO: 39225 - DNA, 50 bp, unidentified
  source 1..50: mol_type = unassigned DNA; note = donor_e2db69c
  misc_feature 1..23: note = RE
  misc_feature 24..25: note = Core
  misc_feature 26..50: note = LE
aaatcggtttggagagatggtatcttgtatctctctagatagagtaataa

SEQ ID NO: 39226 - DNA, 50 bp, unidentified; identical to SEQ ID NO: 33082
  source 1..50: mol_type = unassigned DNA; note = donor_e2e383c
  misc_feature 1..22: note = RE
  misc_feature 23..25: note = Core
  misc_feature 26..50: note = LE

SEQ ID NO: 39227 - DNA, 50 bp, unidentified
  source 1..50: mol_type = unassigned DNA; note = donor_e2ea519
  misc_feature 1..22: note = RE
  misc_feature 23..25: note = Core
  misc_feature 26..50: note = LE
caaaaccggggccgtccacacatgatggtgtggacggctccacccaaacg

SEQ ID NO: 39228 - DNA, 50 bp, unidentified
  source 1..50: mol_type = unassigned DNA; note = donor_e2fa167
  misc_feature 1..23: note = RE
  misc_feature 24..25: note = Core
  misc_feature 26..50: note = LE
tatgcttgaactcaaggcagttacttgtattttctttaagggggtcctga

SEQ ID NO: 39229 - DNA, 50 bp, unidentified
  source 1..50: mol_type = unassigned DNA; note = donor_e2fa4ac
  misc_feature 1..24: note = RE
  misc_feature 25: note = Core
  misc_feature 26..50: note = LE
atatgcttgacaacttaataggggcgttaccttattcttaccccttataa

SEQ ID NO: 39230 - DNA, 50 bp, unidentified
  source 1..50: mol_type = unassigned DNA; note = donor_e30ddc5
  misc_feature 1..23: note = RE
  misc_feature 24..25: note = Core
  misc_feature 26..50: note = LE
gcgcaacggacggcaaccacacaagatggggtggttgccgtcctccctca

SEQ ID NO: 39231 - DNA, 50 bp, unidentified
  source 1..50: mol_type = unassigned DNA; note = donor_e312e1d
  misc_feature 1..23: note = RE
  misc_feature 24..25: note = Core
  misc_feature 26..50: note = LE
tgggttgacacttaatagttaatcttgtattatagagtagtagttattag

SEQ ID NO: 39232 - DNA, 50 bp, unidentified
  source 1..50: mol_type = unassigned DNA; note = donor_e3262c7
  misc_feature 1..23: note = RE
  misc_feature 24..25: note = Core
  misc_feature 26..50: note = LE
gtccggcaacttgctaatggttgcttgtattaaaccgatctgctattttg

SEQ ID NO: 39233 - DNA, 50 bp, unidentified; identical to SEQ ID NO: 31584
  source 1..50: mol_type = unassigned DNA; note = donor_e32e67f
  misc_feature 1..24: note = RE
  misc_feature 25: note = Core
  misc_feature 26..50: note = LE

SEQ ID NO: 39234 - DNA, 50 bp, unidentified
  source 1..50: mol_type = unassigned DNA; note = donor_e330018
  misc_feature 1..22: note = RE
  misc_feature 23..25: note = Core
  misc_feature 26..50: note = LE
catccgcggggccgtctatacatgatggggatgacggccccgctccctcg

SEQ ID NO: 39235 - DNA, 50 bp, unidentified
  source 1..50: mol_type = unassigned DNA; note = donor_e331ed7
  misc_feature 1..22: note = RE
  misc_feature 23..25: note = Core
  misc_feature 26..50: note = LE
gggtggcagaggtaagacagttgcttgtgtctgagtaagggaataaactc

SEQ ID NO: 39236 - DNA, 50 bp, unidentified
  source 1..50: mol_type = unassigned DNA; note = donor_e3327b1
  misc_feature 1..24: note = RE
  misc_feature 25: note = Core
  misc_feature 26..50: note = LE
gcacaaacgggaggcgttcatatagaatgaaatgaacgcctccctccttg

SEQ ID NO: 39237 - DNA, 50 bp, unidentified
  source 1..50: mol_type = unassigned DNA; note = donor_e341d90
  misc_feature 1..23: note = RE
  misc_feature 24..25: note = Core
  misc_feature 26..50: note = LE
tgacatctaaattcctgggatgtctaatgagagttaacgggtccgctgtc

SEQ ID NO: 39238 - DNA, 50 bp, unidentified
  source 1..50: mol_type = unassigned DNA; note = donor_e3454ac
  misc_feature 1..22: note = RE
  misc_feature 23..25: note = Core
  misc_feature 26..50: note = LE
cgcttgacaacgaccatagaatcttgtatggtgcggcggggtgagtcgtg

SEQ ID NO: 39239 - DNA, 50 bp, unidentified; identical to SEQ ID NO: 31537
  source 1..50: mol_type = unassigned DNA; note = donor_e345631
  misc_feature 1..23: note = RE
  misc_feature 24..25: note = Core
  misc_feature 26..50: note = LE

SEQ ID NO: 39240 - DNA, 50 bp, unidentified
  source 1..50: mol_type = unassigned DNA; note = donor_e34c116
  misc_feature 1..23: note = RE
  misc_feature 24..25: note = Core
  misc_feature 26..50: note = LE
ctcaaacgggacgcgttcatatagaatgaaatgaacgcgtcccacccagg

SEQ ID NO: 39241 - DNA, 50 bp, unidentified
  source 1..50: mol_type = unassigned DNA; note = donor_e351581
  misc_feature 1..22: note = RE
  misc_feature 23..25: note = Core
  misc_feature 26..50: note = LE
cactacggacggcaaccacagaagatggggtggttgccgtcctccccgaa

SEQ ID NO: 39242 - DNA, 50 bp, unidentified
  source 1..50: mol_type = unassigned DNA; note = donor_e35ea05
  misc_feature 1..20: note = RE
  misc_feature 21..25: note = Core
  misc_feature 26..50: note = LE
ttgacaaaaacataggaacacccccattaccatgttttgtaggcctcgtt

SEQ ID NO: 39243 - DNA, 50 bp, unidentified; identical to SEQ ID NO: 31915
  source 1..50: mol_type = unassigned DNA; note = donor_e360b3c
  misc_feature 1..23: note = RE
  misc_feature 24..25: note = Core
  misc_feature 26..50: note = LE

SEQ ID NO: 39244 - DNA, 50 bp, unidentified
  source 1..50: mol_type = unassigned DNA; note = donor_e363231
  misc_feature 1..23: note = RE
  misc_feature 24..25: note = Core
  misc_feature 26..50: note = LE
ttgccaacggggcgggccatacgttatgggatggcccgcccctcccgcca

SEQ ID NO: 39245 - DNA, 50 bp, unidentified
  source 1..50: mol_type = unassigned DNA; note = donor_e363fbd
  misc_feature 1..24: note = RE
  misc_feature 25: note = Core
  misc_feature 26..50: note = LE
aatagcttgacttttacataggggcgttatgttgttgacagcccctaaaa

SEQ ID NO: 39246 - DNA, 50 bp, unidentified; identical to SEQ ID NO: 31530
  source 1..50: mol_type = unassigned DNA; note = donor_e369444
  misc_feature 1..24: note = RE
  misc_feature 25: note = Core
  misc_feature 26..50: note = LE

SEQ ID NO: 39247 - DNA, 50 bp, unidentified
  source 1..50: mol_type = unassigned DNA; note = donor_e36a434
  misc_feature 1..23: note = RE
  misc_feature 24..25: note = Core
  misc_feature 26..50: note = LE
gcctcttgacaaatagagaggcaccgacttgtatgagtgtcacgggacgg

SEQ ID NO: 39248 - DNA, 50 bp, unidentified
  source 1..50: mol_type = unassigned DNA; note = donor_e36b6d3
  misc_feature 1..23: note = RE
  misc_feature 24..25: note = Core
  misc_feature 26..50: note = LE
tctcttgacttttaatagttagtctcgtattatatagtagtagtgtttag

SEQ ID NO: 39249 - DNA, 50 bp, unidentified
  source 1..50: mol_type = unassigned DNA; note = donor_e37128e
  misc_feature 1..22: note = RE
  misc_feature 23..25: note = Core
  misc_feature 26..50: note = LE
ttctacttatttgtttcaaacttataatccgcctttctgcgaaaggcacc

SEQ ID NO: 39250 - DNA, 50 bp, unidentified; identical to SEQ ID NO: 33798
  source 1..50: mol_type = unassigned DNA; note = donor_e378723
  misc_feature 1..23: note = RE
  misc_feature 24..25: note = Core
  misc_feature 26..50: note = LE

SEQ ID NO: 39251 - DNA, 50 bp, unidentified
  source 1..50: mol_type = unassigned DNA; note = donor_e37c3bf
  misc_feature 1..23: note = RE
  misc_feature 24..25: note = Core
  misc_feature 26..50: note = LE
aactttgccctcaaccatagaatcttgtatggtaggactcgaaggggtgg

SEQ ID NO: 39252 - DNA, 50 bp, unidentified; identical to SEQ ID NO: 31005
  source 1..50: mol_type = unassigned DNA; note = donor_e37f2e9
  misc_feature 1..23: note = RE
  misc_feature 24..25: note = Core
  misc_feature 26..50: note = LE

SEQ ID NO: 39253 - DNA, 50 bp, unidentified
  source 1..50: mol_type = unassigned DNA; note = donor_e381e03
  misc_feature 1..23: note = RE
  misc_feature 24..25: note = Core
  misc_feature 26..50: note = LE
acgggcttgacacaaagaggtcctctgactgagacttgtcgcgggctctg

SEQ ID NO: 39254 - DNA, 50 bp, unidentified; identical to SEQ ID NO: 32390
  source 1..50: mol_type = unassigned DNA; note = donor_e38420e
  misc_feature 1..24: note = RE
  misc_feature 25: note = Core
  misc_feature 26..50: note = LE

SEQ ID NO: 39255 - DNA, 50 bp, unidentified
  source 1..50: mol_type = unassigned DNA; note = donor_e393d0d
  misc_feature 1..24: note = RE
  misc_feature 25: note = Core
  misc_feature 26..50: note = LE
atcttgacatgctattagctggtatcgtattatgagatcaaccagttctt

SEQ ID NO: 39256 - DNA, 50 bp, unidentified
  source 1..50: mol_type = unassigned DNA; note = donor_e398b0c
  misc_feature 1..23: note = RE
  misc_feature 24..25: note = Core
  misc_feature 26..50: note = LE
tcgcttgacttttaagacagtcgcttgtatcttagaaatagtagtagacc

SEQ ID NO: 39257 - DNA, 50 bp, unidentified
  source 1..50: mol_type = unassigned DNA; note = donor_e398c2c
  misc_feature 1..23: note = RE
  misc_feature 24..25: note = Core
  misc_feature 26..50: note = LE
cccgttgactttgaacacagctgcttgtatgtttaaagtcacttcagtta

SEQ ID NO: 39258 - DNA, 50 bp, unidentified
  source 1..50: mol_type = unassigned DNA; note = donor_e39b0e2
  misc_feature 1..22: note = RE
  misc_feature 23..25: note = Core
  misc_feature 26..50: note = LE
catcgacgggggcatccacacatgatggggtggatgccccctcccgacgg

SEQ ID NO: 39259 - DNA, 50 bp, unidentified
  source 1..50: mol_type = unassigned DNA; note = donor_e39b825
  misc_feature 1..22: note = RE
  misc_feature 23..25: note = Core
  misc_feature 26..50: note = LE
ctcttgacttaatatagtttgtcttgtatatttagtttactcaattaatc

SEQ ID NO: 39260 - DNA, 50 bp, unidentified
  source 1..50: mol_type = unassigned DNA; note = donor_e3e76a8
  misc_feature 1..23: note = RE
  misc_feature 24..25: note = Core
  misc_feature 26..50: note = LE
gactaaccaaggcccgttacagaagatggggtaacgggccggccgatcca

SEQ ID NO: 39261 - DNA, 50 bp, unidentified
  source 1..50: mol_type = unassigned DNA; note = donor_e3e8376
  misc_feature 1..24: note = RE
  misc_feature 25: note = Core
  misc_feature 26..50: note = LE
ccccctcttgacacagaggggagcctacttgttgacttgtgccaggaccg

SEQ ID NO: 39262 - DNA, 50 bp, unidentified
  source 1..50: mol_type = unassigned DNA; note = donor_e3e9c23
  misc_feature 1..23: note = RE
  misc_feature 24..25: note = Core
  misc_feature 26..50: note = LE
ggtccttgacaaacatagaagcgtctgtgagtgtgtcgttaaggcagttc

SEQ ID NO: 39263 - DNA, 50 bp, unidentified
  source 1..50: mol_type = unassigned DNA; note = donor_e3ec5e1
  misc_feature 1..22: note = RE
  misc_feature 23..25: note = Core
  misc_feature 26..50: note = LE
cagcgcgggggccatccacagatgatggggtggatggcccctgtgtccgg

SEQ ID NO: 39264 - DNA, 50 bp, unidentified
  source 1..50: mol_type = unassigned DNA; note = donor_e3ed8b3
  misc_feature 1..23: note = RE
  misc_feature 24..25: note = Core
  misc_feature 26..50: note = LE
gacattgacggagagtccatataagatgtatggactcccacttccctcag

SEQ ID NO: 39265 - DNA, 50 bp, unidentified
  source 1..50: mol_type = unassigned DNA; note = donor_e401896
  misc_feature 1..23: note = RE
  misc_feature 24..25: note = Core
  misc_feature 26..50: note = LE
gcaaggagggggccgtccacatatgttggtgtggacggcccccggcggca

SEQ ID NO: 39266 - DNA, 50 bp, unidentified
  source 1..50: mol_type = unassigned DNA; note = donor_e4020d4
  misc_feature 1..24: note = RE
  misc_feature 25: note = Core
  misc_feature 26..50: note = LE
gcttggcataggggcgtccatgtacaatggtatggacgccccacctcttt

SEQ ID NO: 39267 - DNA, 50 bp, unidentified; identical to SEQ ID NO: 30811
  source 1..50: mol_type = unassigned DNA; note = donor_e402d67
  misc_feature 1..23: note = RE
  misc_feature 24..25: note = Core
  misc_feature 26..50: note = LE

SEQ ID NO: 39268 - DNA, 50 bp, unidentified
  source 1..50: mol_type = unassigned DNA; note = donor_e4057d2
  misc_feature 1..23: note = RE
  misc_feature 24..25: note = Core
  misc_feature 26..50: note = LE
aatgttgacaaactattagctggttcgtattataaaggtcagccagttat

SEQ ID NO: 39269 - DNA, 50 bp, unidentified
  source 1..50: mol_type = unassigned DNA; note = donor_e40bb4a
  misc_feature 1..23: note = RE
  misc_feature 24..25: note = Core
  misc_feature 26..50: note = LE
gagcccctccaacaacacagttgcttatctgatcggaatgtggcagcgta

SEQ ID NO: 39270 - DNA, 50 bp, unidentified
  source 1..50: mol_type = unassigned DNA; note = donor_e40caf6
  misc_feature 1..22: note = RE
  misc_feature 23..25: note = Core
  misc_feature 26..50: note = LE
ttggcaaacaggagcgaccatgtataatggaatggtcgctccttccctga

SEQ ID NO: 39271 - DNA, 50 bp, unidentified
  source 1..50: mol_type = unassigned DNA; note = donor_e411f56
  misc_feature 1..21: note = RE
  misc_feature 22..25: note = Core
  misc_feature 26..50: note = LE
acagaggttgacacagggcaactcactggattaccttcctcgcgtcggca

SEQ ID NO: 39272 - DNA, 50 bp, unidentified
  source 1..50: mol_type = unassigned DNA; note = donor_e4130f6
  misc_feature 1..22: note = RE
  misc_feature 23..25: note = Core
  misc_feature 26..50: note = LE
gacgaaaaccatagggacaccccccgttaccttcttcgtgatcccgctac

SEQ ID NO: 39273 - DNA, 50 bp, unidentified
  source 1..50: mol_type = unassigned DNA; note = donor_e422c4d
  misc_feature 1..23: note = RE
  misc_feature 24..25: note = Core
  misc_feature 26..50: note = LE
tgacatctacgctcctgggatgtctaatcagttctgggagcgagccgtgc

SEQ ID NO: 39274 - DNA, 50 bp, unidentified
  source 1..50: mol_type = unassigned DNA; note = donor_e428330
  misc_feature 1..23: note = RE
  misc_feature 24..25: note = Core
  misc_feature 26..50: note = LE
cttgcgcccgacgcgattagacgacatggggtaatcgcgggagcgagcta

SEQ ID NO: 39275 - DNA, 50 bp, unidentified
  source 1..50: mol_type = unassigned DNA; note = donor_e429fae
  misc_feature 1..23: note = RE
  misc_feature 24..25: note = Core
  misc_feature 26..50: note = LE
cggcttgacgtgcaagacggtagcttgtatcttgaatcttgcagtaggtg

SEQ ID NO: 39276 - DNA, 50 bp, unidentified
  source 1..50: mol_type = unassigned DNA; note = donor_e42aeb5
  misc_feature 1..23: note = RE
  misc_feature 24..25: note = Core
  misc_feature 26..50: note = LE
tcggggcgtcgctttaatggttgcttgtattagcgcactgggttaggatg

SEQ ID NO: 39277 - DNA, 50 bp, unidentified
  source 1..50: mol_type = unassigned DNA; note = donor_e42ce26
  misc_feature 1..23: note = RE
  misc_feature 24..25: note = Core
  misc_feature 26..50: note = LE
agacttgactttttatagttagtctcgtataataaagtagtagtttttag

SEQ ID NO: 39278 - DNA, 50 bp, unidentified; identical to SEQ ID NO: 34524
  source 1..50: mol_type = unassigned DNA; note = donor_e42ec2c
  misc_feature 1..23: note = RE
  misc_feature 24..25: note = Core
  misc_feature 26..50: note = LE

SEQ ID NO: 39279 - DNA, 50 bp, unidentified
  source 1..50: mol_type = unassigned DNA; note = donor_e432eb4
  misc_feature 1..22: note = RE
  misc_feature 23..25: note = Core
  misc_feature 26..50: note = LE
acttgacttttcatagctggtctccttgtatgatgtttatagaagcaaaa

SEQ ID NO: 39280 - DNA, 50 bp, unidentified
  source 1..50: mol_type = unassigned DNA; note = donor_e43a538
  misc_feature 1..21: note = RE
  misc_feature 22..25: note = Core
  misc_feature 26..50: note = LE
cttgacaaacgcgattagagaacatagcgtcaatcgcgggtgggcttccc

SEQ ID NO: 39281 - DNA, 50 bp, unidentified
  source 1..50: mol_type = unassigned DNA; note = donor_e43b727
  misc_feature 1..23: note = RE
  misc_feature 24..25: note = Core
  misc_feature 26..50: note = LE
ccgcttgactttcaagacagttgcttgtatctcgtgctgtgcggattttg

SEQ ID NO: 39282 - DNA, 50 bp, unidentified
  source 1..50: mol_type = unassigned DNA; note = donor_e43e2ba
  misc_feature 1..23: note = RE
  misc_feature 24..25: note = Core
  misc_feature 26..50: note = LE
gggcttgacgggcaagacggtatcttgtatcttgttctcattgatggtta

SEQ ID NO: 39283 - DNA, 50 bp, unidentified
  source 1..50: mol_type = unassigned DNA; note = donor_e43fe83
  misc_feature 1..24: note = RE
  misc_feature 25: note = Core
  misc_feature 26..50: note = LE
cttgcagacggggcgggccatacgtatgggatggcccgcccctcactgaa

SEQ ID NO: 39284 - DNA, 50 bp, unidentified
  source 1..50: mol_type = unassigned DNA; note = donor_e444671
  misc_feature 1..23: note = RE
  misc_feature 24..25: note = Core
  misc_feature 26..50: note = LE
atgcttgaccaccaacagagtatcttgtatgttgcttccatcgtcaaggc

SEQ ID NO: 39285 - DNA, 50 bp, unidentified
  source 1..50: mol_type = unassigned DNA; note = donor_e44d8aa
  misc_feature 1..24: note = RE
  misc_feature 25: note = Core
  misc_feature 26..50: note = LE
cttgccgacggggcgggccatacgtatggatggcccgccccttaaccgaa

SEQ ID NO: 39286 - DNA, 50 bp, unidentified
  source 1..50: mol_type = unassigned DNA; note = donor_e456802
  misc_feature 1..23: note = RE
  misc_feature 24..25: note = Core
  misc_feature 26..50: note = LE
acttgacaagcgtcatagaaagtcttatattaactcggttgcagattttc

SEQ ID NO: 39287 - DNA, 50 bp, unidentified; identical to SEQ ID NO: 31549
  source 1..50: mol_type = unassigned DNA; note = donor_e457148
  misc_feature 1..22: note = RE
  misc_feature 23..25: note = Core
  misc_feature 26..50: note = LE

SEQ ID NO: 39288 - DNA, 50 bp, unidentified; identical to SEQ ID NO: 37323
  source 1..50: mol_type = unassigned DNA; note = donor_e4604bf
  misc_feature 1..24: note = RE
  misc_feature 25: note = Core
  misc_feature 26..50: note = LE

SEQ ID NO: 39289 - DNA, 50 bp, unidentified
  source 1..50: mol_type = unassigned DNA; note = donor_e46cb8b
  misc_feature 1..20: note = RE
  misc_feature 21..25: note = Core
  misc_feature 26..50: note = LE
ttgacagatccatagggacacccccgttaccttcttgaagtccccggcaa

SEQ ID NO: 39290 - DNA, 50 bp, unidentified; identical to SEQ ID NO: 33254
  source 1..50: mol_type = unassigned DNA; note = donor_e474780
  misc_feature 1..23: note = RE
  misc_feature 24..25: note = Core
  misc_feature 26..50: note = LE

SEQ ID NO: 39291 - DNA, 50 bp, unidentified
  source 1..50: mol_type = unassigned DNA; note = donor_e476a25
  misc_feature 1..24: note = RE
  misc_feature 25: note = Core
  misc_feature 26..50: note = LE
tgcaacgcacggccgcaccatacataatgggatggtgcggccgtgctcct

SEQ ID NO: 39292 - DNA, 50 bp, unidentified
  source 1..50: mol_type = unassigned DNA; note = donor_e476a59
  misc_feature 1..24: note = RE
  misc_feature 25: note = Core
  misc_feature 26..50: note = LE
cacccgcttgacacagaggggagcctactagacgattcccgtaggaccga

SEQ ID NO: 39293 - DNA, 50 bp, unidentified; identical to SEQ ID NO: 34654
  source 1..50: mol_type = unassigned DNA; note = donor_e477358
  misc_feature 1..23: note = RE
  misc_feature 24..25: note = Core
  misc_feature 26..50: note = LE

SEQ ID NO: 39294 - DNA, 50 bp, unidentified; identical to SEQ ID NO: 37115
  source 1..50: mol_type = unassigned DNA; note = donor_e47b1b0
  misc_feature 1..21: note = RE
  misc_feature 22..25: note = Core
  misc_feature 26..50: note = LE

SEQ ID NO: 39295 - DNA, 50 bp, unidentified
  source 1..50: mol_type = unassigned DNA; note = donor_e47be09
  misc_feature 1..23: note = RE
  misc_feature 24..25: note = Core
  misc_feature 26..50: note = LE
cctcttgactttcaagactgttgcttgtatcttcattctgatgtgtgtgt

SEQ ID NO: 39296 - DNA, 50 bp, unidentified
  source 1..50: mol_type = unassigned DNA; note = donor_e47e7fc
  misc_feature 1..23: note = RE
  misc_feature 24..25: note = Core
  misc_feature 26..50: note = LE
tctcttgacattcaagacaatcgcttgtatcttaaaaattaggtaacccg

SEQ ID NO: 39297 - DNA, 50 bp, unidentified
  source 1..50: mol_type = unassigned DNA; note = donor_e4811c2
  misc_feature 1..24: note = RE
  misc_feature 25: note = Core
  misc_feature 26..50: note = LE
tggcaaacagggggtgttcatgtacaatgggatgaacacccccgccttta

SEQ ID NO: 39298 - DNA, 50 bp, unidentified
  source 1..50: mol_type = unassigned DNA; note = donor_e486d92
  misc_feature 1..21: note = RE
  misc_feature 22..25: note = Core
  misc_feature 26..50: note = LE
tcttgacttttttatcacagttcatcatatgttaaaaaagaggttttctt

SEQ ID NO: 39299 - DNA, 50 bp, unidentified
  source 1..50: mol_type = unassigned DNA; note = donor_e4896c5
  misc_feature 1..23: note = RE
  misc_feature 24..25: note = Core
  misc_feature 26..50: note = LE
ttctgagggaaggttttcataacaacttcatgccgcatgagatgcttgca

SEQ ID NO: 39300 - DNA, 50 bp, unidentified
  source 1..50: mol_type = unassigned DNA; note = donor_e4899e3
  misc_feature 1..21: note = RE
  misc_feature 22..25: note = Core
  misc_feature 26..50: note = LE
ccgagggttgacacagggtgtctcactggtgcacctttctgtccgggcgc

SEQ ID NO: 39301 - DNA, 50 bp, unidentified; identical to SEQ ID NO: 34007
  source 1..50: mol_type = unassigned DNA; note = donor_e490a32
  misc_feature 1..24: note = RE
  misc_feature 25: note = Core
  misc_feature 26..50: note = LE

SEQ ID NO: 39302 - DNA, 50 bp, unidentified
  source 1..50: mol_type = unassigned DNA; note = donor_e4a9a3a
  misc_feature 1..23: note = RE
  misc_feature 24..25: note = Core
  misc_feature 26..50: note = LE
gacctttaccagccgaatagagaagatggggtatccggcttgagcctcac

SEQ ID NO: 39303 - DNA, 50 bp, unidentified
  source 1..50: mol_type = unassigned DNA; note = donor_e4ac96a
  misc_feature 1..23: note = RE
  misc_feature 24..25: note = Core
  misc_feature 26..50: note = LE
gatcttcgagctgcgattagacgacatggggtaatcgcgggagcgcggcg

SEQ ID NO: 39304 - DNA, 50 bp, unidentified; identical to SEQ ID NO: 30818
  source 1..50: mol_type = unassigned DNA; note = donor_e4b0599
  misc_feature 1..24: note = RE
  misc_feature 25: note = Core
  misc_feature 26..50: note = LE

SEQ ID NO: 39305 - DNA, 50 bp, unidentified
  source 1..50: mol_type = unassigned DNA; note = donor_e4bb1f9
  misc_feature 1..21: note = RE
  misc_feature 22..25: note = Core
  misc_feature 26..50: note = LE
gggcggcttgacacagggctactcactggtccaccctggtctgatcggtg

SEQ ID NO: 39306 - DNA, 50 bp, unidentified
  source 1..50: mol_type = unassigned DNA; note = donor_e4be37b
  misc_feature 1..21: note = RE
  misc_feature 22..25: note = Core
  misc_feature 26..50: note = LE
gaatttgacaaaacttagataatcatgtataatgttaaacataaagattt

SEQ ID NO: 39307 - DNA, 50 bp, unidentified; identical to SEQ ID NO: 38469
  source 1..50: mol_type = unassigned DNA; note = donor_e4cc053
  misc_feature 1..22: note = RE
  misc_feature 23..25: note = Core
  misc_feature 26..50: note = LE

SEQ ID NO: 39308 - DNA, 50 bp, unidentified
  source 1..50: mol_type = unassigned DNA; note = donor_e4d1ee0
  misc_feature 1..24: note = RE
  misc_feature 25: note = Core
  misc_feature 26..50: note = LE
catccccttgacacaaagaggcttctgattgatacttgtgtcgggtgttg

SEQ ID NO: 39309 - DNA, 50 bp, unidentified
  source 1..50: mol_type = unassigned DNA; note = donor_e4d4342
  misc_feature 1..20: note = RE
  misc_feature 21..25: note = Core
  misc_feature 26..50: note = LE
ttgacaaccccatagggacacccccgttacctttttcgtggctcctgagc

SEQ ID NO: 39310 - DNA, 50 bp, unidentified; identical to SEQ ID NO: 30885
  source 1..50: mol_type = unassigned DNA; note = donor_e4d5358
  misc_feature 1..23: note = RE
  misc_feature 24..25: note = Core
  misc_feature 26..50: note = LE

SEQ ID NO: 39311 - DNA, 50 bp, unidentified; identical to SEQ ID NO: 32578
  source 1..50: mol_type = unassigned DNA; note = donor_e4d5649
  misc_feature 1..23: note = RE
  misc_feature 24..25: note = Core
  misc_feature 26..50: note = LE

SEQ ID NO: 39312 - DNA, 50 bp, unidentified
  source 1..50: mol_type = unassigned DNA; note = donor_e4e55d6
  misc_feature 1..22: note = RE
  misc_feature 23..25: note = Core
  misc_feature 26..50: note = LE
cccaacgggagccgtccacacatgatggggtggacggctcccgattccac

SEQ ID NO: 39313 - DNA, 50 bp, unidentified
  source 1..50: mol_type = unassigned DNA; note = donor_e4f367d
  misc_feature 1..23: note = RE
  misc_feature 24..25: note = Core
  misc_feature 26..50: note = LE
cttgacccgaagctccccatgtgagatcccatggggaggtggatagcgac

SEQ ID NO: 39314 - DNA, 50 bp, unidentified; identical to SEQ ID NO: 30609
  source 1..50: mol_type = unassigned DNA; note = donor_e4f7ac7
  misc_feature 1..22: note = RE
  misc_feature 23..25: note = Core
  misc_feature 26..50: note = LE

SEQ ID NO: 39315 - DNA, 50 bp, unidentified
  source 1..50: mol_type = unassigned DNA; note = donor_e4ffc66
  misc_feature 1..22: note = RE
  misc_feature 23..25: note = Core
  misc_feature 26..50: note = LE
acaagtgggggccgtccacatctgctggtgtggacggcttcttaacccac

SEQ ID NO: 39316 - DNA, 50 bp, unidentified; identical to SEQ ID NO: 30466
  source 1..50: mol_type = unassigned DNA; note = donor_e50d749
  misc_feature 1..23: note = RE
  misc_feature 24..25: note = Core
  misc_feature 26..50: note = LE

SEQ ID NO: 39317 - DNA, 50 bp, unidentified; identical to SEQ ID NO: 37701
  source 1..50: mol_type = unassigned DNA; note = donor_e514a45
  misc_feature 1..23: note = RE
  misc_feature 24..25: note = Core
  misc_feature 26..50: note = LE

SEQ ID NO: 39318 - DNA, 50 bp, unidentified
  source 1..50: mol_type = unassigned DNA; note = donor_e516c8e
  misc_feature 1..24: note = RE
  misc_feature 25: note = Core
  misc_feature 26..50: note = LE
ttggcaaacgggggcgtccatgtacaatgggatggacgcccccacccgca

SEQ ID NO: 39319 - DNA, 50 bp, unidentified; identical to SEQ ID NO: 36535
  source 1..50: mol_type = unassigned DNA; note = donor_e5203d5
  misc_feature 1..22: note = RE
  misc_feature 23..25: note = Core
  misc_feature 26..50: note = LE

SEQ ID NO: 39320 - DNA, 50 bp, unidentified
  source 1..50: mol_type = unassigned DNA; note = donor_e522617
  misc_feature 1..24: note = RE
  misc_feature 25: note = Core
  misc_feature 26..50: note = LE
ggcaaaacaggagacgtccatatacaatggaatggacgtcgccttcctcc

SEQ ID NO: 39321 - DNA, 50 bp, unidentified
  source 1..50: mol_type = unassigned DNA; note = donor_e525180
  misc_feature 1..23: note = RE
  misc_feature 24..25: note = Core
  misc_feature 26..50: note = LE
cgtacaaggatgagagatggtatcttgtatgttgaagctttgggtgatta

SEQ ID NO: 39322 - DNA, 50 bp, unidentified
  source 1..50: mol_type = unassigned DNA; note = donor_e526e82
  misc_feature 1..24: note = RE
  misc_feature 25: note = Core
  misc_feature 26..50: note = LE
tgcagtcggacggcggaccatacataataagatggtccgccggcttgatc

SEQ ID NO: 39323 - DNA, 50 bp, unidentified; identical to SEQ ID NO: 33096
  source 1..50: mol_type = unassigned DNA; note = donor_e52ca73
  misc_feature 1..23: note = RE
  misc_feature 24..25: note = Core
  misc_feature 26..50: note = LE

SEQ ID NO: 39324 - DNA, 50 bp, unidentified
  source 1..50: mol_type = unassigned DNA; note = donor_e53b93d
  misc_feature 1..23: note = RE
  misc_feature 24..25: note = Core
  misc_feature 26..50: note = LE
ctgctacttgacacacagaggcgctgacttgttcaatggaaaccaggaca

SEQ ID NO: 39325 - DNA, 50 bp, unidentified
  source 1..50: mol_type = unassigned DNA; note = donor_e5408f9
  misc_feature 1..24: note = RE
  misc_feature 25: note = Core
  misc_feature 26..50: note = LE
tgcaaaactggaggcgcccatataatggaatgggcgcctcccccgaaagg

SEQ ID NO: 39326 - DNA, 50 bp, unidentified
  source 1..50: mol_type = unassigned DNA; note = donor_e548371
  misc_feature 1..24: note = RE
  misc_feature 25: note = Core
  misc_feature 26..50: note = LE
ttgcaatgaggaggagtccatatacaatgggatggactcctcctcaacct

SEQ ID NO: 39327 - DNA, 50 bp, unidentified; identical to SEQ ID NO: 35849
  source 1..50: mol_type = unassigned DNA; note = donor_e553c78
  misc_feature 1..23: note = RE
  misc_feature 24..25: note = Core
  misc_feature 26..50: note = LE

SEQ ID NO: 39328 - DNA, 50 bp, unidentified
  source 1..50: mol_type = unassigned DNA; note = donor_e5565ec
  misc_feature 1..24: note = RE
  misc_feature 25: note = Core
  misc_feature 26..50: note = LE
gggacttgactttttatttgcaggcctgttacaatataattgccccatgt

SEQ ID NO: 39329 - DNA, 50 bp, unidentified
  source 1..50: mol_type = unassigned DNA; note = donor_e557059
  misc_feature 1..23: note = RE
  misc_feature 24..25: note = Core
  misc_feature 26..50: note = LE
tctcttgacttttatttgcaggtcagttacaatatataaggcgggtgaaa

SEQ ID NO: 39330 - DNA, 50 bp, unidentified
  source 1..50: mol_type = unassigned DNA; note = donor_e5605a2
  misc_feature 1..23: note = RE
  misc_feature 24..25: note = Core
  misc_feature 26..50: note = LE
gcatcacgggaggtgtccatatacgatgtgatggacacctcccaccttac

SEQ ID NO: 39331 - DNA, 50 bp, unidentified
  source 1..50: mol_type = unassigned DNA; note = donor_e57367d
  misc_feature 1..23: note = RE
  misc_feature 24..25: note = Core
  misc_feature 26..50: note = LE
gacaacaatagggagtccatataagatgtatggactccctatctccctcg

SEQ ID NO: 39332 - DNA, 50 bp, unidentified
  source 1..50: mol_type = unassigned DNA; note = donor_e581a9f
  misc_feature 1..22: note = RE
  misc_feature 23..25: note = Core
  misc_feature 26..50: note = LE
gcactatacttttctacatagcagtaattatgtaagaaaagcatagtgca

SEQ ID NO: 39333 - DNA, 50 bp, unidentified
  source 1..50: mol_type = unassigned DNA; note = donor_e58fe3f
  misc_feature 1..23: note = RE
  misc_feature 24..25: note = Core
  misc_feature 26..50: note = LE
caacgcgggggccatccacagaagatgaggtggatggctcccgctcacgg

SEQ ID NO: 39334 - DNA, 50 bp, unidentified
  source 1..50: mol_type = unassigned DNA; note = donor_e590412
  misc_feature 1..21: note = RE
  misc_feature 22..25: note = Core
  misc_feature 26..50: note = LE
gtattgacttctaatagttagtcacgtataatcaatcttatagaaatatt

SEQ ID NO: 39335 - DNA, 50 bp, unidentified
  source 1..50: mol_type = unassigned DNA; note = donor_e594217
  misc_feature 1..23: note = RE
  misc_feature 24..25: note = Core
  misc_feature 26..50: note = LE
tgacatctaagctcctgggatgtctaatgagagttatcgggtcgccatac

SEQ ID NO: 39336 - DNA, 50 bp, unidentified
  source 1..50: mol_type = unassigned DNA; note = donor_e594d6c
  misc_feature 1..23: note = RE
  misc_feature 24..25: note = Core
  misc_feature 26..50: note = LE
gccaacccggagccgtccacacatgatgctgtggacggctcctcgaccgg

SEQ ID NO: 39337 - DNA, 50 bp, unidentified
  source 1..50: mol_type = unassigned DNA; note = donor_e595d04
  misc_feature 1..24: note = RE
  misc_feature 25: note = Core
  misc_feature 26..50: note = LE
atgtttgctcatttccataggaagctttaactttgcagtttgaatagaga

SEQ ID NO: 39338 - DNA, 50 bp, unidentified
  source 1..50: mol_type = unassigned DNA; note = donor_e59841e
  misc_feature 1..22: note = RE
  misc_feature 23..25: note = Core
  misc_feature 26..50: note = LE
attcaatttctttattacagttcattgtatattcaaattaatttcttata

SEQ ID NO: 39339 - DNA, 50 bp, unidentified; identical to SEQ ID NO: 30820
  source 1..50: mol_type = unassigned DNA; note = donor_e59a96f
  misc_feature 1..23: note = RE
  misc_feature 24..25: note = Core
  misc_feature 26..50: note = LE

SEQ ID NO: 39340 - DNA, 50 bp, unidentified
  source 1..50: mol_type = unassigned DNA; note = donor_e59c04b
  misc_feature 1..23: note = RE
  misc_feature 24..25: note = Core
  misc_feature 26..50: note = LE
actggtctacgtcagcacagttgcttgtgtccgaaaaatctggcagaatg

SEQ ID NO: 39341 - DNA, 50 bp, unidentified; identical to SEQ ID NO: 30373
  source 1..50: mol_type = unassigned DNA; note = donor_e5a200d
  misc_feature 1..23: note = RE
  misc_feature 24..25: note = Core
  misc_feature 26..50: note = LE

SEQ ID NO: 39342 - DNA, 50 bp, unidentified
  source 1..50: mol_type = unassigned DNA; note = donor_e5a5417
  misc_feature 1..24: note = RE
  misc_feature 25: note = Core
  misc_feature 26..50: note = LE
tggcaaatcgagggcgtccatgtacaatgggatggacgcccccgatcaaa

SEQ ID NO: 39343 - DNA, 50 bp, unidentified
  source 1..50: mol_type = unassigned DNA; note = donor_e5b5d24
  misc_feature 1..22: note = RE
  misc_feature 23..25: note = Core
  misc_feature 26..50: note = LE
ccgcctcctgaaaaagacagttgcttgtgtctttgcaggggattaggctt

SEQ ID NO: 39344 - DNA, 50 bp, unidentified
  source 1..50: mol_type = unassigned DNA; note = donor_e5ba69b
  misc_feature 1..22: note = RE
  misc_feature 23..25: note = Core
  misc_feature 26..50: note = LE
ctcaccgggggccgtccacacatgatggggtggacggcccccgacccagc

SEQ ID NO: 39345 - DNA, 50 bp, unidentified
  source 1..50: mol_type = unassigned DNA; note = donor_e5bde1e
  misc_feature 1..22: note = RE
  misc_feature 23..25: note = Core
  misc_feature 26..50: note = LE
gacccagacggccgattagagaagatggggtaatcggcctgccagcttgt

SEQ ID NO: 39346 - DNA, 50 bp, unidentified
  source 1..50: mol_type = unassigned DNA; note = donor_e5c7fa2
  misc_feature 1..19: note = RE
  misc_feature 20..25: note = Core
  misc_feature 26..50: note = LE
cttgacaggaacattgagagtccttaagttcgtaggtgcagttacttcgt

SEQ ID NO: 39347 - DNA, 50 bp, unidentified
  source 1..50: mol_type = unassigned DNA; note = donor_e5d889c
  misc_feature 1..23: note = RE
  misc_feature 24..25: note = Core
  misc_feature 26..50: note = LE
ttgacacatggccccattacagaagataccgtaatgggccgcgcctccag

SEQ ID NO: 39348 - DNA, 50 bp, unidentified
  source 1..50: mol_type = unassigned DNA; note = donor_e5d9379
  misc_feature 1..23: note = RE
  misc_feature 24..25: note = Core
  misc_feature 26..50: note = LE
tcacttgacatcacaccgctggactcgtataatattttttagatacataa

SEQ ID NO: 39349 - DNA, 50 bp, unidentified
  source 1..50: mol_type = unassigned DNA; note = donor_e5df65e
  misc_feature 1..22: note = RE
  misc_feature 23..25: note = Core
  misc_feature 26..50: note = LE
gagcttgacaaacattagctggtttcgtattatgaggtcagccagaaact

SEQ ID NO: 39350 - DNA, 50 bp, unidentified
  source 1..50: mol_type = unassigned DNA; note = donor_e5e6d6a
  misc_feature 1..22: note = RE
  misc_feature 23..25: note = Core
  misc_feature 26..50: note = LE
cttgacccttgacatagagagtcttatacgttaatatagaaccaagcccc

SEQ ID NO: 39351 - DNA, 50 bp, unidentified
  source 1..50: mol_type = unassigned DNA; note = donor_e5ead70
  misc_feature 1..22: note = RE
  misc_feature 23..25: note = Core
  misc_feature 26..50: note = LE
ctcttgacttagcatagtttgtcacgtataatccaatcatcgaggatgat

SEQ ID NO: 39352 - DNA, 50 bp, unidentified
  source 1..50: mol_type = unassigned DNA; note = donor_e5ee6bf
  misc_feature 1..23: note = RE
  misc_feature 24..25: note = Core
  misc_feature 26..50: note = LE
gcgcttgacttttaatagttaatcttgtattataaagtagtagttattaa

SEQ ID NO: 39353 - DNA, 50 bp, unidentified
  source 1..50: mol_type = unassigned DNA; note = donor_e5f29a3
  misc_feature 1..24: note = RE
  misc_feature 25: note = Core
  misc_feature 26..50: note = LE
tagatttgttttaaccatagaatactttaggtttgcaaaagaagagttaa

SEQ ID NO: 39354 - DNA, 50 bp, unidentified
  source 1..50: mol_type = unassigned DNA; note = donor_e5f5ecb
  misc_feature 1..24: note = RE
  misc_feature 25: note = Core
  misc_feature 26..50: note = LE
accgcttgacaaaccatataggggcgttactttcttcccggtgcctcggc

SEQ ID NO: 39355 - DNA, 50 bp, unidentified
  source 1..50: mol_type = unassigned DNA; note = donor_e600280
  misc_feature 1..23: note = RE
  misc_feature 24..25: note = Core
  misc_feature 26..50: note = LE
gacatcgaagaaccatgggatgtctaataggttccgtcagcctgctggtg

SEQ ID NO: 39356 - DNA, 50 bp, unidentified
  source 1..50: mol_type = unassigned DNA; note = donor_e60a315
  misc_feature 1..23: note = RE
  misc_feature 24..25: note = Core
  misc_feature 26..50: note = LE
aacgggcttgatcaagacggatacttgtcttatgacttttcgtgccgttt

SEQ ID NO: 39357 - DNA, 50 bp, unidentified
  source 1..50: mol_type = unassigned DNA; note = donor_e613b30
  misc_feature 1..23: note = RE
  misc_feature 24..25: note = Core
  misc_feature 26..50: note = LE
aaaatttttaaaaaacatagttgattgtaagttaaaaatgtgatataaaa

SEQ ID NO: 39358 - DNA, 50 bp, unidentified
  source 1..50: mol_type = unassigned DNA; note = donor_e619e25
  misc_feature 1..21: note = RE
  misc_feature 22..25: note = Core
  misc_feature 26..50: note = LE
ccgaaggttgacacagagggtgtcactggtccaccctcctgttgacgagg

SEQ ID NO: 39359 - DNA, 50 bp, unidentified
  source 1..50: mol_type = unassigned DNA; note = donor_e61afa0
  misc_feature 1..23: note = RE
  misc_feature 24..25: note = Core
  misc_feature 26..50: note = LE
tcgcttgacctggaacacggttgcttgtatgtttcgtattgctagacttg

SEQ ID NO: 39360 - DNA, 50 bp, unidentified
  source 1..50: mol_type = unassigned DNA; note = donor_e620a9f
  misc_feature 1..23: note = RE
  misc_feature 24..25: note = Core
  misc_feature 26..50: note = LE
taggttgattttgaacagagtatcttgtatgatgaaattaaataaaaata

SEQ ID NO: 39361 - DNA, 50 bp, unidentified
  source 1..50: mol_type = unassigned DNA; note = donor_e625e30
  misc_feature 1..20: note = RE
  misc_feature 21..25: note = Core
  misc_feature 26..50: note = LE
acggctagaatcattttcgtaggaaaaaacattaaactttgtttcacaag

SEQ ID NO: 39362 - DNA, 50 bp, unidentified; identical to SEQ ID NO: 30761
  source 1..50: mol_type = unassigned DNA; note = donor_e6295c9
  misc_feature 1..24: note = RE
  misc_feature 25: note = Core
  misc_feature 26..50: note = LE

SEQ ID NO: 39363 - DNA, 50 bp, unidentified
  source 1..50: mol_type = unassigned DNA; note = donor_e63e1cc
  misc_feature 1..24: note = RE
  misc_feature 25: note = Core
  misc_feature 26..50: note = LE
ttgcaatggggaggagtccatatacaatgggatggactcctcctcaccta

SEQ ID NO: 39364 - DNA, 50 bp, unidentified
  source 1..50: mol_type = unassigned DNA; note = donor_e64ae98
  misc_feature 1..23: note = RE
  misc_feature 24..25: note = Core
  misc_feature 26..50: note = LE
aatttttacgttcaagacagttgcttgtatcttgaaaacgatttacaata

SEQ ID NO: 39365 - DNA, 50 bp, unidentified; identical to SEQ ID NO: 32496
  source 1..50: mol_type = unassigned DNA; note = donor_e64c3da
  misc_feature 1..23: note = RE
  misc_feature 24..25: note = Core
  misc_feature 26..50: note = LE

SEQ ID NO: 39366 - DNA, 50 bp, unidentified; identical to SEQ ID NO: 35410
  source 1..50: mol_type = unassigned DNA; note = donor_e64dfe0
  misc_feature 1..22: note = RE
  misc_feature 23..25: note = Core
  misc_feature 26..50: note = LE

SEQ ID NO: 39367 - DNA, 50 bp, unidentified; identical to SEQ ID NO: 33775
  source 1..50: mol_type = unassigned DNA; note = donor_e64fb9b
  misc_feature 1..23: note = RE
  misc_feature 24..25: note = Core
  misc_feature 26..50: note = LE

SEQ ID NO: 39368 - DNA, 50 bp, unidentified
  source 1..50: mol_type = unassigned DNA; note = donor_e6514a5
  misc_feature 1..22: note = RE
  misc_feature 23..25: note = Core
  misc_feature 26..50: note = LE
cagcgcaggggccatccacagatgatggggtggatggcccctgtgtccgg

SEQ ID NO: 39369 - DNA, 50 bp, unidentified
  source 1..50: mol_type = unassigned DNA; note = donor_e658f5f
  misc_feature 1..23: note = RE
  misc_feature 24..25: note = Core
  misc_feature 26..50: note = LE
tgataactcgagtcttttcatagaacaatcatgactttacagttccaccc

SEQ ID NO: 39370 - DNA, 50 bp, unidentified
  source 1..50: mol_type = unassigned DNA; note = donor_e65bc3c
  misc_feature 1..21: note = RE
  misc_feature 22..25: note = Core
  misc_feature 26..50: note = LE
gtgaaggttgacacagggtgtctcactggactaccctccccgagagatgt

SEQ ID NO: 39371 - DNA, 50 bp, unidentified; identical to SEQ ID NO: 30581
  source 1..50: mol_type = unassigned DNA; note = donor_e65cd97
  misc_feature 1..23: note = RE
  misc_feature 24..25: note = Core
  misc_feature 26..50: note = LE

SEQ ID NO: 39372 - DNA, 50 bp, unidentified
  source 1..50: mol_type = unassigned DNA; note = donor_e661598
  misc_feature 1..23: note = RE
  misc_feature 24..25: note = Core
  misc_feature 26..50: note = LE
gcaaagttcaggctgaccatagattaatgtgatggtcagcctgacttacc

SEQ ID NO: 39373 - DNA, 50 bp, unidentified
  source 1..50: mol_type = unassigned DNA; note = donor_e663e9d
  misc_feature 1..24: note = RE
  misc_feature 25: note = Core
  misc_feature 26..50: note = LE
tgcaaaaatgggggtgaccatagataatgagatggtcacccccacaccct

SEQ ID NO: 39374 - DNA, 50 bp, unidentified
  source 1..50: mol_type = unassigned DNA; note = donor_e67d7d9
  misc_feature 1..24: note = RE
  misc_feature 25: note = Core
  misc_feature 26..50: note = LE
tgcagtcctgcggcggaccatacataatgagatggtccgccgcttgattc

SEQ ID NO: 39375 - DNA, 50 bp, unidentified
  source 1..50: mol_type = unassigned DNA; note = donor_e67e164
  misc_feature 1..23: note = RE
  misc_feature 24..25: note = Core
  misc_feature 26..50: note = LE
cccttgacaactccttatgggacctgatatagctcgttgctggggtcaaa

SEQ ID NO: 39376 - DNA, 50 bp, unidentified
  source 1..50: mol_type = unassigned DNA; note = donor_e67e225
  misc_feature 1..24: note = RE
  misc_feature 25: note = Core
  misc_feature 26..50: note = LE
tggcataccgggggcgtccatgtacaatgggatggacgcccccacctaaa

SEQ ID NO: 39377 - DNA, 50 bp, unidentified
  source 1..50: mol_type = unassigned DNA; note = donor_e67f2db
  misc_feature 1..24: note = RE
  misc_feature 25: note = Core
  misc_feature 26..50: note = LE
ttgcacggacgggcggaccgtacataatgggatggtccgccccgtcctcc

SEQ ID NO: 39378 - DNA, 50 bp, unidentified
  source 1..50: mol_type = unassigned DNA; note = donor_e681f01
  misc_feature 1..23: note = RE
  misc_feature 24..25: note = Core
  misc_feature 26..50: note = LE
gcgagccgggggccatccacacatgatggggtggatggcccccttacggc

SEQ ID NO: 39379 - DNA, 50 bp, unidentified; identical to SEQ ID NO: 30451
  source 1..50: mol_type = unassigned DNA; note = donor_e682f6f
  misc_feature 1..23: note = RE
  misc_feature 24..25: note = Core
  misc_feature 26..50: note = LE

SEQ ID NO: 39380 - DNA, 50 bp, unidentified
  source 1..50: mol_type = unassigned DNA; note = donor_e692c8f
  misc_feature 1..23: note = RE
  misc_feature 24..25: note = Core
  misc_feature 26..50: note = LE
cagcttgaaaaaaaccatagaatcttgtatggtaaagcttaagagaatcg

SEQ ID NO: 39381 - DNA, 50 bp, unidentified
  source 1..50: mol_type = unassigned DNA; note = donor_e695362
  misc_feature 1..23: note = RE
  misc_feature 24..25: note = Core
  misc_feature 26..50: note = LE
gcaaaaaagagggtgaccatagattaatgagatggtcaccctcaccctat

SEQ ID NO: 39382 - DNA, 50 bp, unidentified
  source 1..50: mol_type = unassigned DNA; note = donor_e6a1ff8
  misc_feature 1..23: note = RE
  misc_feature 24..25: note = Core
  misc_feature 26..50: note = LE
tcgcttgacgtcgaacacggttacttgtatgttcaggccagaccagcgcg

SEQ ID NO: 39383 - DNA, 50 bp, unidentified
  source 1..50: mol_type = unassigned DNA; note = donor_e6a2386
  misc_feature 1..23: note = RE
  misc_feature 24..25: note = Core
  misc_feature 26..50: note = LE
ataatttgcttttgtcatagaaatcctttagattagcaagatgaaaaaaa

SEQ ID NO: 39384 - DNA, 50 bp, unidentified
  source 1..50: mol_type = unassigned DNA; note = donor_e6a9778
  misc_feature 1..22: note = RE
  misc_feature 23..25: note = Core
  misc_feature 26..50: note = LE
tgcaaacgggatgcgttcatataaatgtaatgaacgcatcccactcatta

SEQ ID NO: 39385 - DNA, 50 bp, unidentified
  source 1..50: mol_type = unassigned DNA; note = donor_e6ab8bf
  misc_feature 1..23: note = RE
  misc_feature 24..25: note = Core
  misc_feature 26..50: note = LE
agtgcttgaaaaagtcataatattccattagacttatagtgtaactttat

SEQ ID NO: 39386 - DNA, 50 bp, unidentified
  source 1..50: mol_type = unassigned DNA; note = donor_e6addf0
  misc_feature 1..24: note = RE
  misc_feature 25: note = Core
  misc_feature 26..50: note = LE
acggcttgaccaaatccatagaggcgttaccgtcttcgtggcctcgcgat

SEQ ID NO: 39387 - DNA, 50 bp, unidentified
  source 1..50: mol_type = unassigned DNA; note = donor_e6af5db
  misc_feature 1..23: note = RE
  misc_feature 24..25: note = Core
  misc_feature 26..50: note = LE
cttcttgacttttgcattacgcagccttaccttcttgaagcgtgttgcat

SEQ ID NO: 39388 - DNA, 50 bp, unidentified
  source 1..50: mol_type = unassigned DNA; note = donor_e6b27a0
  misc_feature 1..23: note = RE
  misc_feature 24..25: note = Core
  misc_feature 26..50: note = LE
gcatcaaagggggcatccaaacatgatggagtggatgcccccacccgacg

SEQ ID NO: 39389 - DNA, 50 bp, unidentified
  source 1..50: mol_type = unassigned DNA; note = donor_e6ba37f
  misc_feature 1..23: note = RE
  misc_feature 24..25: note = Core
  misc_feature 26..50: note = LE
caatgcgggagccatccacagaagatgaggtggatggctcccgctcacgg

SEQ ID NO: 39390 - DNA, 50 bp, unidentified
  source 1..50: mol_type = unassigned DNA; note = donor_e6c16e2
  misc_feature 1..24: note = RE
  misc_feature 25: note = Core
  misc_feature 26..50: note = LE
cttgcaaacagggcgggccatacgtatgggatggcccgcccttttcccag

SEQ ID NO: 39391 - DNA, 50 bp, unidentified; identical to SEQ ID NO: 30631
  source 1..50: mol_type = unassigned DNA; note = donor_e6c1e1f
  misc_feature 1..23: note = RE
  misc_feature 24..25: note = Core
  misc_feature 26..50: note = LE

SEQ ID NO: 39392 - DNA, 50 bp, unidentified; identical to SEQ ID NO: 33675
  source 1..50: mol_type = unassigned DNA; note = donor_e6c6c0f
  misc_feature 1..23: note = RE
  misc_feature 24..25: note = Core
  misc_feature 26..50: note = LE

SEQ ID NO: 39393 - DNA, 50 bp, unidentified
  source 1..50: mol_type = unassigned DNA; note = donor_e6c79d1
  misc_feature 1..24: note = RE
  misc_feature 25: note = Core
  misc_feature 26..50: note = LE
gccgcttgacatccataggagcatcagtgatgatgtgtgtagtggttctt

SEQ ID NO: 39394 - DNA, 50 bp, unidentified; identical to SEQ ID NO: 38790
  source 1..50: mol_type = unassigned DNA; note = donor_e6cc105
  misc_feature 1..23: note = RE
  misc_feature 24..25: note = Core
  misc_feature 26..50: note = LE

SEQ ID NO: 39395 - DNA, 50 bp, unidentified
  source 1..50: mol_type = unassigned DNA; note = donor_e6cd036
  misc_feature 1..24: note = RE
  misc_feature 25: note = Core
  misc_feature 26..50: note = LE
acaaccgccgccatagaagggagcctacttatgtcttccaagactgcctg

SEQ ID NO: 39396 - DNA, 50 bp, unidentified; identical to SEQ ID NO: 32264
  source 1..50: mol_type = unassigned DNA; note = donor_e6d80d0
  misc_feature 1..24: note = RE
  misc_feature 25: note = Core
  misc_feature 26..50: note = LE

SEQ ID NO: 39397 - DNA, 50 bp, unidentified
  source 1..50: mol_type = unassigned DNA; note = donor_e6da401
  misc_feature 1..23: note = RE
  misc_feature 24..25: note = Core
  misc_feature 26..50: note = LE
cttgccaagggggcgtccacatatgatgatgtggacgcccccgcaccgac

SEQ ID NO: 39398 - DNA, 50 bp, unidentified
  source 1..50: mol_type = unassigned DNA; note = donor_e6e2f0a
  misc_feature 1..23: note = RE
  misc_feature 24..25: note = Core
  misc_feature 26..50: note = LE
gggcggggacccagtttcgtgtcagaaatgcatgcgccacttcgtggctc

SEQ ID NO: 39399 - DNA, 50 bp, unidentified
  source 1..50: mol_type = unassigned DNA; note = donor_e6e43c6
  misc_feature 1..21: note = RE
  misc_feature 22..25: note = Core
  misc_feature 26..50: note = LE
catctcgcggggcgtccacagatgatggggtggacgccccgccgacggcg

SEQ ID NO: 39400 - DNA, 50 bp, unidentified
  source 1..50: mol_type = unassigned DNA; note = donor_e6e7f79
  misc_feature 1..23: note = RE
  misc_feature 24..25: note = Core
  misc_feature 26..50: note = LE
gcccttgactttacatagctggtctagtatatttaagttacagaagaaac

SEQ ID NO: 39401 - DNA, 50 bp, unidentified
  source 1..50: mol_type = unassigned DNA; note = donor_e6ea255
  misc_feature 1..24: note = RE
  misc_feature 25: note = Core
  misc_feature 26..50: note = LE
ggcatctgcttgacagaggggtgcctacttgtttagaactgacgtcgaga

SEQ ID NO: 39402 - DNA, 50 bp, unidentified
  source 1..50: mol_type = unassigned DNA; note = donor_e6eba25
  misc_feature 1..21: note = RE
  misc_feature 22..25: note = Core
  misc_feature 26..50: note = LE
gggcggcttgacacagggcaactcactggtgcaccatccttgtgtcggtg

SEQ ID NO: 39403 - DNA, 50 bp, unidentified
  source 1..50: mol_type = unassigned DNA; note = donor_e6ee7dd
  misc_feature 1..23: note = RE
  misc_feature 24..25: note = Core
  misc_feature 26..50: note = LE
tgacatccagcgtcatgggatgtctaatggggctcatcgggtcatgagtg

SEQ ID NO: 39404 - DNA, 50 bp, unidentified
  source 1..50: mol_type = unassigned DNA; note = donor_e6f4430
  misc_feature 1..22: note = RE
  misc_feature 23..25: note = Core
  misc_feature 26..50: note = LE
atatttgtttttgaccttggaatgccttaagtttgtattttcataaaact

SEQ ID NO: 39405 - DNA, 50 bp, unidentified
  source 1..50: mol_type = unassigned DNA; note = donor_e6fef17
  misc_feature 1..23: note = RE
  misc_feature 24..25: note = Core
  misc_feature 26..50: note = LE
gcccttgactcccaagacggttgcttgtatctttactgttcggaccggcc

SEQ ID NO: 39406 - DNA, 50 bp, unidentified
  source 1..50: mol_type = unassigned DNA; note = donor_e6ffb15
  misc_feature 1..24: note = RE
  misc_feature 25: note = Core
  misc_feature 26..50: note = LE
ttggcaaaaaggggcgtccatgtataatggcatggacgcccctgcttttg

SEQ ID NO: 39407 - DNA, 50 bp, unidentified
  source 1..50: mol_type = unassigned DNA; note = donor_e7108f4
  misc_feature 1..23: note = RE
  misc_feature 24..25: note = Core
  misc_feature 26..50: note = LE
gacgaaacacggcccattacagaagatgccgtaatgggccgggcatcgcg

SEQ ID NO: 39408 - DNA, 50 bp, unidentified
  source 1..50: mol_type = unassigned DNA; note = donor_e71744d
  misc_feature 1..22: note = RE
  misc_feature 23..25: note = Core
  misc_feature 26..50: note = LE
cggcttgacaacgtcattgagaatccttacctttcttggagggtgatcgg

SEQ ID NO: 39409 - DNA, 50 bp, unidentified
  source 1..50: mol_type = unassigned DNA; note = donor_e717801
  misc_feature 1..23: note = RE
  misc_feature 24..25: note = Core
  misc_feature 26..50: note = LE
ttacttgacttttatttgcaggtctgatacaatatatttgaccgagaaag

SEQ ID NO: 39410 - DNA, 50 bp, unidentified
  source 1..50: mol_type = unassigned DNA; note = donor_e71aca7
  misc_feature 1..23: note = RE
  misc_feature 24..25: note = Core
  misc_feature 26..50: note = LE
cgtttgatttggagagatggtatcttgtatctctccaaaccatgatacat

SEQ ID NO: 39411 - DNA, 50 bp, unidentified
  source 1..50: mol_type = unassigned DNA; note = donor_e72051b
  misc_feature 1..23: note = RE
  misc_feature 24..25: note = Core
  misc_feature 26..50: note = LE
cccttccttgaccaacacggatacttgtcttatgacatttgctgccgaac

SEQ ID NO: 39412 - DNA, 50 bp, unidentified
  source 1..50: mol_type = unassigned DNA; note = donor_e720854
  misc_feature 1..23: note = RE
  misc_feature 24..25: note = Core
  misc_feature 26..50: note = LE
agcccgaggttgacagagggtgtctgatggctctaccttcctttcgcacg

SEQ ID NO: 39413 - DNA, 50 bp, unidentified
  source 1..50: mol_type = unassigned DNA; note = donor_e7251e2
  misc_feature 1..22: note = RE
  misc_feature 23..25: note = Core
  misc_feature 26..50: note = LE
ttacttgacttgtcaatagttatcttgtatactcaatacatgattatagt

SEQ ID NO: 39414 - DNA, 50 bp, unidentified
  source 1..50: mol_type = unassigned DNA; note = donor_e726aab
  misc_feature 1..23: note = RE
  misc_feature 24..25: note = Core
  misc_feature 26..50: note = LE
cagcttgacagcatcattgggaatccatacctttcttcgtagggatgttc

SEQ ID NO: 39415 - DNA, 50 bp, unidentified
  source 1..50: mol_type = unassigned DNA; note = donor_e72fa8a
  misc_feature 1..24: note = RE
  misc_feature 25: note = Core
  misc_feature 26..50: note = LE
cgcaaaacgggaggcgttcatatagaatgatatgaacgcctcccacccat

SEQ ID NO: 39416 - DNA, 50 bp, unidentified
  source 1..50: mol_type = unassigned DNA; note = donor_e738be4
  misc_feature 1..23: note = RE
  misc_feature 24..25: note = Core
  misc_feature 26..50: note = LE
gcgtaaaggggggcgtccacagatgatggggtggacgccccccgacggca

SEQ ID NO: 39417 - DNA, 50 bp, unidentified
  source 1..50: mol_type = unassigned DNA; note = donor_e7462a3
  misc_feature 1..23: note = RE
  misc_feature 24..25: note = Core
  misc_feature 26..50: note = LE
tcaatttggttttgtcatagaaatcctttagacttgtgctaactttagaa

SEQ ID NO: 39418 - DNA, 50 bp, unidentified
  source 1..50: mol_type = unassigned DNA; note = donor_e74793d
  misc_feature 1..24: note = RE
  misc_feature 25: note = Core
  misc_feature 26..50: note = LE
cgacaccccttgacagaggggtgcctacttatagagaattgatgtacgac

SEQ ID NO: 39419 - DNA, 50 bp, unidentified
  source 1..50: mol_type = unassigned DNA; note = donor_e747bad
  misc_feature 1..22: note = RE
  misc_feature 23..25: note = Core
  misc_feature 26..50: note = LE
cttgcagcggggcgggccataggttatgggatggcccgcccctcctaccc

SEQ ID NO: 39420 - DNA, 50 bp, unidentified
  source 1..50: mol_type = unassigned DNA; note = donor_e74ca01
  misc_feature 1..24: note = RE
  misc_feature 25: note = Core
  misc_feature 26..50: note = LE
ttgcaatcggagagggtccatatataatggtatggaccctctccactcca

SEQ ID NO: 39421 - DNA, 50 bp, unidentified
  source 1..50: mol_type = unassigned DNA; note = donor_e753e87
  misc_feature 1..23: note = RE
  misc_feature 24..25: note = Core
  misc_feature 26..50: note = LE
gggcttccccgcaaccatagaatcttgtatggtaggacttgaagggagga

SEQ ID NO: 39422 - DNA, 50 bp, unidentified
  source 1..50: mol_type = unassigned DNA; note = donor_e7604b3
  misc_feature 1..22: note = RE
  misc_feature 23..25: note = Core
  misc_feature 26..50: note = LE
caccaacgggggcatccacacatgatggcgtggatgccccctcccgtcag

SEQ ID NO: 39423 - DNA, 50 bp, unidentified
  source 1..50: mol_type = unassigned DNA; note = donor_e76917e
  misc_feature 1..23: note = RE
  misc_feature 24..25: note = Core
  misc_feature 26..50: note = LE
gactaatcgaagcccgttacagaagatggggtaacgggcccggtccgcct

SEQ ID NO: 39424 - DNA, 50 bp, unidentified
  source 1..50: mol_type = unassigned DNA; note = donor_e773139
  misc_feature 1..24: note = RE
  misc_feature 25: note = Core
  misc_feature 26..50: note = LE
ttgacaccaacagcaaagaggactctaattgaagtcatgggcgctgcggt

SEQ ID NO: 39425 - DNA, 50 bp, unidentified
  source 1..50: mol_type = unassigned DNA; note = donor_e777e8b
  misc_feature 1..23: note = RE
  misc_feature 24..25: note = Core
  misc_feature 26..50: note = LE
cccactgatgggcaagacggtatcttgtatctcgactcctcctcgaaaga

SEQ ID NO: 39426 - DNA, 50 bp, unidentified
  source 1..50: mol_type = unassigned DNA; note = donor_e77d8e8
  misc_feature 1..23: note = RE
  misc_feature 24..25: note = Core
  misc_feature 26..50: note = LE
gactttgtcattcaagatggttgcttatatctttcagatcattcaaactt

SEQ ID NO: 39427 - DNA, 50 bp, unidentified
  source 1..50: mol_type = unassigned DNA; note = donor_e78529a
  misc_feature 1..23: note = RE
  misc_feature 24..25: note = Core
  misc_feature 26..50: note = LE
tgacattcaagctcctgggatgtctaatgagatttgggagtgagccatcc

SEQ ID NO: 39428 - DNA, 50 bp, unidentified
  source 1..50: mol_type = unassigned DNA; note = donor_e78d960
  misc_feature 1..24: note = RE
  misc_feature 25: note = Core
  misc_feature 26..50: note = LE
tggcaaatcgggggcgtccatgtataatggaatggacgcccccgtccgaa

SEQ ID NO: 39429 - DNA, 50 bp, unidentified; identical to SEQ ID NO: 35789
  source 1..50: mol_type = unassigned DNA; note = donor_e796191
  misc_feature 1..23: note = RE
  misc_feature 24..25: note = Core
  misc_feature 26..50: note = LE

SEQ ID NO: 39430 - DNA, 50 bp, unidentified
  source 1..50: mol_type = unassigned DNA; note = donor_e79a0d1
  misc_feature 1..24: note = RE
  misc_feature 25: note = Core
  misc_feature 26..50: note = LE
aaattcacgcttaaactgacttggttgtctctcaaatttatggtttactg

SEQ ID NO: 39431 - DNA, 50 bp, unidentified
  source 1..50: mol_type = unassigned DNA; note = donor_e79a2a0
  misc_feature 1..23: note = RE
  misc_feature 24..25: note = Core
  misc_feature 26..50: note = LE
ccaagaccccgatctaatggttgcttgtatcagcgagctcggttatagtg

SEQ ID NO: 39432 - DNA, 50 bp, unidentified
  source 1..50: mol_type = unassigned DNA; note = donor_e79c17a
  misc_feature 1..23: note = RE
  misc_feature 24..25: note = Core
  misc_feature 26..50: note = LE
tgacgtcaaaggttcagggatgtctaatgggagataccaggtccagccga

SEQ ID NO: 39433 - DNA, 50 bp, unidentified
  source 1..50: mol_type = unassigned DNA; note = donor_e7a052a
  misc_feature 1..22: note = RE
  misc_feature 23..25: note = Core
  misc_feature 26..50: note = LE
tatcagttttctaattacagttcattgtatattcatattttattattacc

SEQ ID NO: 39434 - DNA, 50 bp, unidentified
  source 1..50: mol_type = unassigned DNA; note = donor_e7aab40
  misc_feature 1..24: note = RE
  misc_feature 25: note = Core
  misc_feature 26..50: note = LE
tggaaatatgataaacctagaatacctttggtctaacaaaaagagtttta

SEQ ID NO: 39435 - DNA, 50 bp, unidentified
  source 1..50: mol_type = unassigned DNA; note = donor_e7ae38a
  misc_feature 1..23: note = RE
  misc_feature 24..25: note = Core
  misc_feature 26..50: note = LE
gtgcttgacaaccaagacagttgcttgtatcttgaaaccgcttcggtgag

SEQ ID NO: 39436 - DNA, 50 bp, unidentified
  source 1..50: mol_type = unassigned DNA; note = donor_e7af965
  misc_feature 1..24: note = RE
  misc_feature 25: note = Core
  misc_feature 26..50: note = LE
cttgcagacggggcgagccatacgtatggaatggctcgcccctccttcct

SEQ ID NO: 39437 - DNA, 50 bp, unidentified
  source 1..50: mol_type = unassigned DNA; note = donor_e7b5323
  misc_feature 1..23: note = RE
  misc_feature 24..25: note = Core
  misc_feature 26..50: note = LE
agggttgacttttattagttaatcttgcattataaagtagtagttattag

SEQ ID NO: 39438 - DNA, 50 bp, unidentified
  source 1..50: mol_type = unassigned DNA; note = donor_e7b8092
  misc_feature 1..22: note = RE
  misc_feature 23..25: note = Core
  misc_feature 26..50: note = LE
atccgcgggcgccgtccagacatgatggtgtggacggcgcccacaccggc

SEQ ID NO: 39439 - DNA, 50 bp, unidentified
  source 1..50: mol_type = unassigned DNA; note = donor_e7b8861
  misc_feature 1..21: note = RE
  misc_feature 22..25: note = Core
  misc_feature 26..50: note = LE
ggcttgacaacaccattgagattccgtaagactgacgccggccccagggg

SEQ ID NO: 39440 - DNA, 50 bp, unidentified
  source 1..50: mol_type = unassigned DNA; note = donor_e7bba2f
  misc_feature 1..23: note = RE
  misc_feature 24..25: note = Core
  misc_feature 26..50: note = LE
gacggacaaaggcccattacagaagatgccgtaatgggccggcgtctcac

SEQ ID NO: 39441 - DNA, 50 bp, unidentified
  source 1..50: mol_type = unassigned DNA; note = donor_e7bfec1
  misc_feature 1..24: note = RE
  misc_feature 25: note = Core
  misc_feature 26..50: note = LE
tgcgttttagaggccgtccacacatgatggtgtggacggcctcgttccaa

SEQ ID NO: 39442 - DNA, 50 bp, unidentified; identical to SEQ ID NO: 39180
  source 1..50: mol_type = unassigned DNA; note = donor_e7c75f1
  misc_feature 1..22: note = RE
  misc_feature 23..25: note = Core
  misc_feature 26..50: note = LE

SEQ ID NO: 39443 - DNA, 50 bp, unidentified
  source 1..50: mol_type = unassigned DNA; note = donor_e7e61b0
  misc_feature 1..20: note = RE
  misc_feature 21..25: note = Core
  misc_feature 26..50: note = LE
ttgacaaccacatagggacacccccgttacctttttcgtggctcctggtc

SEQ ID NO: 39444 - DNA, 50 bp, unidentified; identical to SEQ ID NO: 31844
  source 1..50: mol_type = unassigned DNA; note = donor_e7f4fb0
  misc_feature 1..22: note = RE
  misc_feature 23..25: note = Core
  misc_feature 26..50: note = LE

SEQ ID NO: 39445 - DNA, 50 bp, unidentified
  source 1..50: mol_type = unassigned DNA; note = donor_e7f5875
  misc_feature 1..24: note = RE
  misc_feature 25: note = Core
  misc_feature 26..50: note = LE
gaccggttgacaacagaagggagcctactagagactcgctgcaggaccgg

SEQ ID NO: 39446 - DNA, 50 bp, unidentified
  source 1..50: mol_type = unassigned DNA; note = donor_e804e99
  misc_feature 1..23: note = RE
  misc_feature 24..25: note = Core
  misc_feature 26..50: note = LE
cggctgtatcggagagatggtatcttgtatctctctgcgacaagtgatta

SEQ ID NO: 39447 - DNA, 50 bp, unidentified
  source 1..50: mol_type = unassigned DNA; note = donor_e805e40
  misc_feature 1..23: note = RE
  misc_feature 24..25: note = Core
  misc_feature 26..50: note = LE
gtggctcgggggccgtccacatatgatggggtggacggcccccgacggca

SEQ ID NO: 39448 - DNA, 50 bp, unidentified
  source 1..50: mol_type = unassigned DNA; note = donor_e81c0c5
  misc_feature 1..23: note = RE
  misc_feature 24..25: note = Core
  misc_feature 26..50: note = LE
gtacttgacttcatatagttagtcttgtataatgaagtcataaggaaatc

SEQ ID NO: 39449 - DNA, 50 bp, unidentified
  source 1..50: mol_type = unassigned DNA; note = donor_e822ec3
  misc_feature 1..23: note = RE
  misc_feature 24..25: note = Core
  misc_feature 26..50: note = LE
agtattgacaaaacttagaatgtcacgtataatgtagatatgtaaattat

SEQ ID NO: 39450 - DNA, 50 bp, unidentified
  source 1..50: mol_type = unassigned DNA; note = donor_e823fec
  misc_feature 1..24: note = RE
  misc_feature 25: note = Core
  misc_feature 26..50: note = LE
ccgcgtcttgacacagaagggagcctacttgttccattgacgtcacggcc

SEQ ID NO: 39451 - DNA, 50 bp, unidentified; identical to SEQ ID NO: 30409
  source 1..50: mol_type = unassigned DNA; note = donor_e825b2e
  misc_feature 1..24: note = RE
  misc_feature 25: note = Core
  misc_feature 26..50: note = LE

SEQ ID NO: 39452 - DNA, 50 bp, unidentified
  source 1..50: mol_type = unassigned DNA; note = donor_e82c7f4
  misc_feature 1..24: note = RE
  misc_feature 25: note = Core
  misc_feature 26..50: note = LE
ttgcaatgaggaggagttcatatacaatggtatggactcctcctcccctc

SEQ ID NO: 39453 - DNA, 50 bp, unidentified
  source 1..50: mol_type = unassigned DNA; note = donor_e82ce17
  misc_feature 1..24: note = RE
  misc_feature 25: note = Core
  misc_feature 26..50: note = LE
atctttggattttaccttaggaagctttatctttgcagtgaaagaaaaag

SEQ ID NO: 39454 - DNA, 50 bp, unidentified
  source 1..50: mol_type = unassigned DNA; note = donor_e831723
  misc_feature 1..23: note = RE
  misc_feature 24..25: note = Core
  misc_feature 26..50: note = LE
gtatccgaaggggcgtccacacacgttggggtggacgccccctgacggca

SEQ ID NO: 39455 - DNA, 50 bp, unidentified
  source 1..50: mol_type = unassigned DNA; note = donor_e832431
  misc_feature 1..24: note = RE
  misc_feature 25: note = Core
  misc_feature 26..50: note = LE
tgacaaaagtaatagggccactcccgttgctttgttcgtagcccagcatc

SEQ ID NO: 39456 - DNA, 50 bp, unidentified
  source 1..50: mol_type = unassigned DNA; note = donor_e838732
  misc_feature 1..23: note = RE
  misc_feature 24..25: note = Core
  misc_feature 26..50: note = LE
cgtcttgacaatgaagatggttgcttgtatattcgaggtggaacccagca

SEQ ID NO: 39457 - DNA, 50 bp, unidentified
  source 1..50: mol_type = unassigned DNA; note = donor_e839f16
  misc_feature 1..23: note = RE
  misc_feature 24..25: note = Core
  misc_feature 26..50: note = LE
gcaaccagggggccgtccacatatgttggagtggacggcccccgaacggc

SEQ ID NO: 39458 - DNA, 50 bp, unidentified
  source 1..50: mol_type = unassigned DNA; note = donor_e849268
  misc_feature 1..24: note = RE
  misc_feature 25: note = Core
  misc_feature 26..50: note = LE
ctcttgacttcataccattagacttcgtataataagatttgcagacagtt

SEQ ID NO: 39459 - DNA, 50 bp, unidentified
  source 1..50: mol_type = unassigned DNA; note = donor_e84aab2
  misc_feature 1..23: note = RE
  misc_feature 24..25: note = Core
  misc_feature 26..50: note = LE
gcaaccgccgcctaacatggttgcttgtctgttgattggctgttatattg

SEQ ID NO: 39460 - DNA, 50 bp, unidentified
  source 1..50: mol_type = unassigned DNA; note = donor_e850189
  misc_feature 1..24: note = RE
  misc_feature 25: note = Core
  misc_feature 26..50: note = LE
gccgcttgacatccataggagcatcagagatgatgttcatgagcacctcc

SEQ ID NO: 39461 - DNA, 50 bp, unidentified
  source 1..50: mol_type = unassigned DNA; note = donor_e85c0c4
  misc_feature 1..23: note = RE
  misc_feature 24..25: note = Core
  misc_feature 26..50: note = LE
atgcttgacttttatttgcaggactcctacaataaagttacggtttaagg

SEQ ID NO: 39462 - DNA, 50 bp, unidentified
  source 1..50: mol_type = unassigned DNA; note = donor_e85c89a
  misc_feature 1..23: note = RE
  misc_feature 24..25: note = Core
  misc_feature 26..50: note = LE
tgacaaggggcgccgtccagacatgatggggtgggcggcgccccaatcgg

SEQ ID NO: 39463 - DNA, 50 bp, unidentified
  source 1..50: mol_type = unassigned DNA; note = donor_e864836
  misc_feature 1..24: note = RE
  misc_feature 25: note = Core
  misc_feature 26..50: note = LE
acttgcagacgggcgagccatacgtatggaatggctcgcccacccagcct

SEQ ID NO: 39464 - DNA, 50 bp, unidentified
  source 1..50: mol_type = unassigned DNA; note = donor_e86a0af
  misc_feature 1..23: note = RE
  misc_feature 24..25: note = Core
  misc_feature 26..50: note = LE
gacggtgggggcgagtccatacataatcgatggactcgccctcgccgagg

SEQ ID NO: 39465 - DNA, 50 bp, unidentified; identical to SEQ ID NO: 37578
  source 1..50: mol_type = unassigned DNA; note = donor_e86c3c2
  misc_feature 1..23: note = RE
  misc_feature 24..25: note = Core
  misc_feature 26..50: note = LE

SEQ ID NO: 39466 - DNA, 50 bp, unidentified
  source 1..50: mol_type = unassigned DNA; note = donor_e86d371
  misc_feature 1..21: note = RE
  misc_feature 22..25: note = Core
  misc_feature 26..50: note = LE
aggcggcttgacatagggcttctcactggtccaccattctcgtgtcggcg

SEQ ID NO: 39467 - DNA, 50 bp, unidentified
  source 1..50: mol_type = unassigned DNA; note = donor_e87016f
  misc_feature 1..23: note = RE
  misc_feature 24..25: note = Core
  misc_feature 26..50: note = LE
tcgcttgacttcacatagttagtcttgtatattgaactcatagggaagtt

SEQ ID NO: 39468 - DNA, 50 bp, unidentified; identical to SEQ ID NO: 30451
  source 1..50: mol_type = unassigned DNA; note = donor_e87c27a
  misc_feature 1..23: note = RE
  misc_feature 24..25: note = Core
  misc_feature 26..50: note = LE

SEQ ID NO: 39469 - DNA, 50 bp, unidentified
  source 1..50: mol_type = unassigned DNA; note = donor_e87d6f1
  misc_feature 1..24: note = RE
  misc_feature 25: note = Core
  misc_feature 26..50: note = LE
tggcaaaacaggggcgtccatgtacaatgggatggacgcccctacccgca

SEQ ID NO: 39470 - DNA, 50 bp, unidentified
  source 1..50: mol_type = unassigned DNA; note = donor_e886430
  misc_feature 1..23: note = RE
  misc_feature 24..25: note = Core
  misc_feature 26..50: note = LE
gcaaaaacggggcggaccatacattaataatatggtccgcccaacctcac

SEQ ID NO: 39471 - DNA, 50 bp, unidentified
  source 1..50: mol_type = unassigned DNA; note = donor_e88b4d7
  misc_feature 1..22: note = RE
  misc_feature 23..25: note = Core
  misc_feature 26..50: note = LE
aaaaacgggaggggaccatatatgatgagatggtcccctccctcttacgg

SEQ ID NO: 39472 - DNA, 50 bp, unidentified
  source 1..50: mol_type = unassigned DNA; note = donor_e88d15a
  misc_feature 1..22: note = RE
  misc_feature 23..25: note = Core
  misc_feature 26..50: note = LE
cgcttgactttttatagctggtcttgtatattgatgttcgtcaaggtcgt

SEQ ID NO: 39473 - DNA, 50 bp, unidentified
  source 1..50: mol_type = unassigned DNA; note = donor_e89513e
  misc_feature 1..23: note = RE
  misc_feature 24..25: note = Core
  misc_feature 26..50: note = LE
atatttggaattcaacacagaatctcctatgtttgaaatcaaatataaag

SEQ ID NO: 39474 - DNA, 50 bp, unidentified
  source 1..50: mol_type = unassigned DNA; note = donor_e8963f2
  misc_feature 1..23: note = RE
  misc_feature 24..25: note = Core
  misc_feature 26..50: note = LE
ttagttggaaatcaacacagaatctcctatgtttgcaaaagagaaaatag

SEQ ID NO: 39475 - DNA, 50 bp, unidentified
  source 1..50: mol_type = unassigned DNA; note = donor_e897c9d
  misc_feature 1..23: note = RE
  misc_feature 24..25: note = Core
  misc_feature 26..50: note = LE
agacccttgctttacaacatagaaggccctatgtttgtaaaaatggcata

SEQ ID NO: 39476 - DNA, 50 bp, unidentified
  source 1..50: mol_type = unassigned DNA; note = donor_e89c3cb
  misc_feature 1..23: note = RE
  misc_feature 24..25: note = Core
  misc_feature 26..50: note = LE
ttgcttgacttattatagtaagtcttgtatactcaaaactgtaataatag

SEQ ID NO: 39477 - DNA, 50 bp, unidentified
  source 1..50: mol_type = unassigned DNA; note = donor_e8a0253
  misc_feature 1..24: note = RE
  misc_feature 25: note = Core
  misc_feature 26..50: note = LE
acacttgacaatgtataggagcatcgttgataatggttatgccggtttag

SEQ ID NO: 39478 - DNA, 50 bp, unidentified
  source 1..50: mol_type = unassigned DNA; note = donor_e8a6d51
  misc_feature 1..23: note = RE
  misc_feature 24..25: note = Core
  misc_feature 26..50: note = LE
aacccgcttgatcacaacggatacttgtcttatgcattgggtgtcgctgc

SEQ ID NO: 39479 - DNA, 50 bp, unidentified
  source 1..50: mol_type = unassigned DNA; note = donor_e8aad63
  misc_feature 1..23: note = RE
  misc_feature 24..25: note = Core
  misc_feature 26..50: note = LE
gacaccttacgaacgtgggatgtctaatgggagtgcaccgggtggttttg

SEQ ID NO: 39480 - DNA, 50 bp, unidentified
  source 1..50: mol_type = unassigned DNA; note = donor_e8ab40d
  misc_feature 1..24: note = RE
  misc_feature 25: note = Core
  misc_feature 26..50: note = LE
tgcaacgcacggccggaccatacataatggaatggtccggccgtgctcca

SEQ ID NO: 39481 - DNA, 50 bp, unidentified
  source 1..50: mol_type = unassigned DNA; note = donor_e8b099c
  misc_feature 1..23: note = RE
  misc_feature 24..25: note = Core
  misc_feature 26..50: note = LE
tgcagacggggcgggccatacgtttatgggatggcccgcccctcaacgac

SEQ ID NO: 39482 - DNA, 50 bp, unidentified
  source 1..50: mol_type = unassigned DNA; note = donor_e8b35c7
  misc_feature 1..24: note = RE
  misc_feature 25: note = Core
  misc_feature 26..50: note = LE
tgcaaaacaaggggcgtccatgtacaatgggatggacgccccacctctaa

SEQ ID NO: 39483 - DNA, 50 bp, unidentified
  source 1..50: mol_type = unassigned DNA; note = donor_e8c0cb5
  misc_feature 1..23: note = RE
  misc_feature 24..25: note = Core
  misc_feature 26..50: note = LE
gcacaacgggcggcaaccacagaagatgggatggttgccgccctccccaa

SEQ ID NO: 39484 - DNA, 50 bp, unidentified
  source 1..50: mol_type = unassigned DNA; note = donor_e8c63b4
  misc_feature 1..23: note = RE
  misc_feature 24..25: note = Core
  misc_feature 26..50: note = LE
tcgccccatcgacataacagttgccctgtgtgtggaaagtctgtcatgat

SEQ ID NO: 39485 - DNA, 50 bp, unidentified
  source 1..50: mol_type = unassigned DNA; note = donor_e8c72c4
  misc_feature 1..24: note = RE
  misc_feature 25: note = Core
  misc_feature 26..50: note = LE
accccttgacatcagatagctggtcctcgtatattctttctgccacttct

SEQ ID NO: 39486 - DNA, 50 bp, unidentified
  source 1..50: mol_type = unassigned DNA; note = donor_e8ca18e
  misc_feature 1..23: note = RE
  misc_feature 24..25: note = Core
  misc_feature 26..50: note = LE
gcaataattgaggagtccatatatgatgatatggactcctctctccctgt

SEQ ID NO: 39487 - DNA, 50 bp, unidentified
  source 1..50: mol_type = unassigned DNA; note = donor_e8cb9b8
  misc_feature 1..23: note = RE
  misc_feature 24..25: note = Core
  misc_feature 26..50: note = LE
gcatccaacggcgcgattagacgacatggggtaatcgcgggaagcgagtc

SEQ ID NO: 39488 - DNA, 50 bp, unidentified; identical to SEQ ID NO: 32736
  source 1..50: mol_type = unassigned DNA; note = donor_e8de034
  misc_feature 1..23: note = RE
  misc_feature 24..25: note = Core
  misc_feature 26..50: note = LE

SEQ ID NO: 39489 - DNA, 50 bp, unidentified
  source 1..50: mol_type = unassigned DNA; note = donor_e8e2af5
  misc_feature 1..23: note = RE
  misc_feature 24..25: note = Core
  misc_feature 26..50: note = LE
gactttagctcgccgaatagagaagatggggtattccgcttgagccccac

SEQ ID NO: 39490 - DNA, 50 bp, unidentified
  source 1..50: mol_type = unassigned DNA; note = donor_e8e3af6
  misc_feature 1..23: note = RE
  misc_feature 24..25: note = Core
  misc_feature 26..50: note = LE
tggcttgattcgcaacatagaatcttgtatgttctctcccggtaggtcag

SEQ ID NO: 39491 - DNA, 50 bp, unidentified
  source 1..50: mol_type = unassigned DNA; note = donor_e8e6de8
  misc_feature 1..21: note = RE
  misc_feature 22..25: note = Core
  misc_feature 26..50: note = LE
tgcttgacgcataacaccgttgcttatacattgcgaggccggtgcatcag

SEQ ID NO: 39492 - DNA, 50 bp, unidentified
  source 1..50: mol_type = unassigned DNA; note = donor_e8f3121
  misc_feature 1..23: note = RE
  misc_feature 24..25: note = Core
  misc_feature 26..50: note = LE
tatcttgaccctttataggatgtctggtattatcttcacccgatatacga

SEQ ID NO: 39493 - DNA, 50 bp, unidentified
  source 1..50: mol_type = unassigned DNA; note = donor_e8f7625
  misc_feature 1..23: note = RE
  misc_feature 24..25: note = Core
  misc_feature 26..50: note = LE
aagcatgaattgatgatagttgactcctaccatcaattcaggtatagggt

SEQ ID NO: 39494 - DNA, 50 bp, unidentified
  source 1..50: mol_type = unassigned DNA; note = donor_e8f98ea
  misc_feature 1..22: note = RE
  misc_feature 23..25: note = Core
  misc_feature 26..50: note = LE
ttatttgcttttatcttagaatgctattagatttgtaaaagagatttata

SEQ ID NO: 39495 - DNA, 50 bp, unidentified
  source 1..50: mol_type = unassigned DNA; note = donor_e9013d5
  misc_feature 1..23: note = RE
  misc_feature 24..25: note = Core
  misc_feature 26..50: note = LE
tctattgactttttatttgcaggctactacaataatattaggctacggta

SEQ ID NO: 39496 - DNA, 50 bp, unidentified
  source 1..50: mol_type = unassigned DNA; note = donor_e90f9fe
  misc_feature 1..22: note = RE
  misc_feature 23..25: note = Core
  misc_feature 26..50: note = LE
gggcttgacttttcttagcaggtctattacaataaaattggttggaaccc

SEQ ID NO: 39497 - DNA, 50 bp, unidentified
  source 1..50: mol_type = unassigned DNA; note = donor_e91a5d1
  misc_feature 1..24: note = RE
  misc_feature 25: note = Core
  misc_feature 26..50: note = LE
tcatttgttttttaccacagttcttcttaagtttacaatctcttatattt

SEQ ID NO: 39498 - DNA, 50 bp, unidentified
  source 1..50: mol_type = unassigned DNA; note = donor_e91dbdc
  misc_feature 1..22: note = RE
  misc_feature 23..25: note = Core
  misc_feature 26..50: note = LE
caacattgagggagtccatataagatgtatggactccctccccctagggg

SEQ ID NO: 39499 - DNA, 50 bp, unidentified
  source 1..50: mol_type = unassigned DNA; note = donor_e92a11e
  misc_feature 1..24: note = RE
  misc_feature 25: note = Core
  misc_feature 26..50: note = LE
tgcggcaaggcggcggaccatacataatgggatggtccgccgcctttaag

SEQ ID NO: 39500 - DNA, 50 bp, unidentified
  source 1..50: mol_type = unassigned DNA; note = donor_e92e3dd
  misc_feature 1..24: note = RE
  misc_feature 25: note = Core
  misc_feature 26..50: note = LE
ttggcaaccgggggcgtccatgtacaatgggatggacgcccccacccgat

SEQ ID NO: 39501 - DNA, 50 bp, unidentified
  source 1..50: mol_type = unassigned DNA; note = donor_e932fb6
  misc_feature 1..23: note = RE
  misc_feature 24..25: note = Core
  misc_feature 26..50: note = LE
atgcttgactttcaagagagaatcttgtatcttgcgatttgaggcgtaac

SEQ ID NO: 39502 - DNA, 50 bp, unidentified
  source 1..50: mol_type = unassigned DNA; note = donor_e934ec8
  misc_feature 1..24: note = RE
  misc_feature 25: note = Core
  misc_feature 26..50: note = LE
ttgcaatgagggggagtccatatacaatgggatggactccccctcacctt

SEQ ID NO: 39503 - DNA, 50 bp, unidentified
  source 1..50: mol_type = unassigned DNA; note = donor_e937ef8
  misc_feature 1..23: note = RE
  misc_feature 24..25: note = Core
  misc_feature 26..50: note = LE
aaaaattttaaaaaacatagttgattgtaagttaaaaacgtgatataaaa

SEQ ID NO: 39504 - DNA, 50 bp, unidentified
  source 1..50: mol_type = unassigned DNA; note = donor_e93c3af
  misc_feature 1..23: note = RE
  misc_feature 24..25: note = Core
  misc_feature 26..50: note = LE
aggtattgactttgcttagcaggttggtacgttataagtgtagccaataa

SEQ ID NO: 39505 - DNA, 50 bp, unidentified; identical to SEQ ID NO: 37601
  source 1..50: mol_type = unassigned DNA; note = donor_e94a28f
  misc_feature 1..23: note = RE
  misc_feature 24..25: note = Core
  misc_feature 26..50: note = LE

SEQ ID NO: 39506 - DNA, 50 bp, unidentified; identical to SEQ ID NO: 30869
  source 1..50: mol_type = unassigned DNA; note = donor_e94af9a
  misc_feature 1..24: note = RE
  misc_feature 25: note = Core
  misc_feature 26..50: note = LE

SEQ ID NO: 39507 - DNA, 50 bp, unidentified
  source 1..50: mol_type = unassigned DNA; note = donor_e954b0d
  misc_feature 1..24: note = RE
  misc_feature 25: note = Core
  misc_feature 26..50: note = LE
acagccgccgtcatagaagggagcctacttatgtcttccaagaccgctcg

SEQ ID NO: 39508 - DNA, 50 bp, unidentified; identical to SEQ ID NO: 32972
  source 1..50: mol_type = unassigned DNA; note = donor_e95b6f4
  misc_feature 1..23: note = RE
  misc_feature 24..25: note = Core
  misc_feature 26..50: note = LE

SEQ ID NO: 39509 - DNA, 50 bp, unidentified
  source 1..50: mol_type = unassigned DNA; note = donor_e95dc4b
  misc_feature 1..23: note = RE
  misc_feature 24..25: note = Core
  misc_feature 26..50: note = LE
acgtttgactggcaagacagtcgcttgtaacttagattttgccgtttctg

SEQ ID NO: 39510 - DNA, 50 bp, unidentified
  source 1..50: mol_type = unassigned DNA; note = donor_e960af1
  misc_feature 1..23: note = RE
  misc_feature 24..25: note = Core
  misc_feature 26..50: note = LE
cggcttgacagaagcattagacagccctaccttctttgggtgcctccggt

SEQ ID NO: 39511 - DNA, 50 bp, unidentified
  source 1..50: mol_type = unassigned DNA; note = donor_e96aa36
  misc_feature 1..24: note = RE
  misc_feature 25: note = Core
  misc_feature 26..50: note = LE
ttgcataatgagggagtccatatacaatggtatggactccctcaacttta

SEQ ID NO: 39512 - DNA, 50 bp, unidentified
  source 1..50: mol_type = unassigned DNA; note = donor_e96bcf3
  misc_feature 1..22: note = RE
  misc_feature 23..25: note = Core
  misc_feature 26..50: note = LE
cgcccgcggggtcgtctatacatgatggggaagacggccccgcttccgat

SEQ ID NO: 39513 - DNA, 50 bp, unidentified
  source 1..50: mol_type = unassigned DNA; note = donor_e96fc80
  misc_feature 1..24: note = RE
  misc_feature 25: note = Core
  misc_feature 26..50: note = LE
tagacttgcatgtatcataagaataccttagatttgcatttgtataatac

SEQ ID NO: 39514 - DNA, 50 bp, unidentified
  source 1..50: mol_type = unassigned DNA; note = donor_e970dbb
  misc_feature 1..23: note = RE
  misc_feature 24..25: note = Core
  misc_feature 26..50: note = LE
gacaacaaatccacatgggatgtctaataagagcaaccgggtagggcggc

SEQ ID NO: 39515 - DNA, 50 bp, unidentified
  source 1..50: mol_type = unassigned DNA; note = donor_e9774a4
  misc_feature 1..24: note = RE
  misc_feature 25: note = Core
  misc_feature 26..50: note = LE
gcaaaatagggggtgaccatagattaatgggatggtcaccccctgcccat

SEQ ID NO: 39516 - DNA, 50 bp, unidentified; identical to SEQ ID NO: 32390
  source 1..50: mol_type = unassigned DNA; note = donor_e9774b2
  misc_feature 1..24: note = RE
  misc_feature 25: note = Core
  misc_feature 26..50: note = LE

SEQ ID NO: 39517 - DNA, 50 bp, unidentified
  source 1..50: mol_type = unassigned DNA; note = donor_e9798d2
  misc_feature 1..22: note = RE
  misc_feature 23..25: note = Core
  misc_feature 26..50: note = LE
actttgtttggattttaaatggaaagttcctatgtttaaaatcggaagtg

SEQ ID NO: 39518 - DNA, 50 bp, unidentified
  source 1..50: mol_type = unassigned DNA; note = donor_e97aae9
  misc_feature 1..23: note = RE
  misc_feature 24..25: note = Core
  misc_feature 26..50: note = LE
gcatccaggggggcgtccacacacgatggggtggacgccccccggcggca

SEQ ID NO: 39519 - DNA, 50 bp, unidentified
  source 1..50: mol_type = unassigned DNA; note = donor_e97e17a
  misc_feature 1..23: note = RE
  misc_feature 24..25: note = Core
  misc_feature 26..50: note = LE
ccaaacgggcgccatccagacaggatgtggtggatggcgccctccgacgg

SEQ ID NO: 39520 - DNA, 50 bp, unidentified
  source 1..50: mol_type = unassigned DNA; note = donor_e98e8e6
  misc_feature 1..23: note = RE
  misc_feature 24..25: note = Core
  misc_feature 26..50: note = LE
tgacaacgaaaaacctgggatgtctaatgggttctgccgggtctctggga

SEQ ID NO: 39521 - DNA, 50 bp, unidentified
  source 1..50: mol_type = unassigned DNA; note = donor_e99035c
  misc_feature 1..24: note = RE
  misc_feature 25: note = Core
  misc_feature 26..50: note = LE
tgcaaaacagcggcggaccatacatactggtatggtccgccgcttattcc

SEQ ID NO: 39522 - DNA, 50 bp, unidentified
  source 1..50: mol_type = unassigned DNA; note = donor_e99e151
  misc_feature 1..23: note = RE
  misc_feature 24..25: note = Core
  misc_feature 26..50: note = LE
tgggttgatttttaacagagtatcttgtatgatcaaatttaaagaaccca

SEQ ID NO: 39523 - DNA, 50 bp, unidentified
  source 1..50: mol_type = unassigned DNA; note = donor_e9a0dde
  misc_feature 1..23: note = RE
  misc_feature 24..25: note = Core
  misc_feature 26..50: note = LE
gcgcttgactttgaacagagtatcttgtatgattaaaatcaataaaatat

SEQ ID NO: 39524 - DNA, 50 bp, unidentified; identical to SEQ ID NO: 34178
  source 1..50: mol_type = unassigned DNA; note = donor_e9a2ac2
  misc_feature 1..24: note = RE
  misc_feature 25: note = Core
  misc_feature 26..50: note = LE

SEQ ID NO: 39525 - DNA, 50 bp, unidentified
  source 1..50: mol_type = unassigned DNA; note = donor_e9a6edb
  misc_feature 1..23: note = RE
  misc_feature 24..25: note = Core
  misc_feature 26..50: note = LE
cctgttgactttttatttgcagactattacaatatgtttacggtttaagg

SEQ ID NO: 39526 - DNA, 50 bp, unidentified
  source 1..50: mol_type = unassigned DNA; note = donor_e9b23e8
  misc_feature 1..23: note = RE
  misc_feature 24..25: note = Core
  misc_feature 26..50: note = LE
tgcattatcgcgtaggtccatacataatggtatggacctaccctagtata

SEQ ID NO: 39527 - DNA, 50 bp, unidentified
  source 1..50: mol_type = unassigned DNA; note = donor_e9c31f6
  misc_feature 1..23: note = RE
  misc_feature 24..25: note = Core
  misc_feature 26..50: note = LE
ctacttgactttcgagacagttgcttgtatctagctctttccagagtttg

SEQ ID NO: 39528 - DNA, 50 bp, unidentified
  source 1..50: mol_type = unassigned DNA; note = donor_e9c475e
  misc_feature 1..23: note = RE
  misc_feature 24..25: note = Core
  misc_feature 26..50: note = LE
acttgaaaatccaagagggatgttctaccatcggattttgtacggagacg

SEQ ID NO: 39529 - DNA, 50 bp, unidentified
  source 1..50: mol_type = unassigned DNA; note = donor_e9d154f
  misc_feature 1..24: note = RE
  misc_feature 25: note = Core
  misc_feature 26..50: note = LE
tgcaaacgaggaggagcccatatacaatgggatggactcctcctcaccta

SEQ ID NO: 39530 - DNA, 50 bp, unidentified
  source 1..50: mol_type = unassigned DNA; note = donor_e9db980
  misc_feature 1..23: note = RE
  misc_feature 24..25: note = Core
  misc_feature 26..50: note = LE
tagcttgactttttatttgcaggctactacaatagatttatggttagtat

SEQ ID NO: 39531 - DNA, 50 bp, unidentified
  source 1..50: mol_type = unassigned DNA; note = donor_e9dea53
  misc_feature 1..23: note = RE
  misc_feature 24..25: note = Core
  misc_feature 26..50: note = LE
cttgcaaatgccgctattagacgacatggggtaatcgcgggagcgagtta

SEQ ID NO: 39532 - DNA, 50 bp, unidentified
  source 1..50: mol_type = unassigned DNA; note = donor_e9dfc95
  misc_feature 1..24: note = RE
  misc_feature 25: note = Core
  misc_feature 26..50: note = LE
gcgcttgacagcaaagacagtcgctgtaacttgccatcatgtgcatggga

SEQ ID NO: 39533 - DNA, 50 bp, unidentified
  source 1..50: mol_type = unassigned DNA; note = donor_e9e611e
  misc_feature 1..23: note = RE
  misc_feature 24..25: note = Core
  misc_feature 26..50: note = LE
gcttgaaaatttaagcgggatgttctaccatcgaatttgcgtatgacttg

SEQ ID NO: 39534 - DNA, 50 bp, unidentified
  source 1..50: mol_type = unassigned DNA; note = donor_e9ea0f8
  misc_feature 1..22: note = RE
  misc_feature 23..25: note = Core
  misc_feature 26..50: note = LE
aatttggtattgacaaagcatgtcctgttactgtaaactagacaaagaga

SEQ ID NO: 39535 - DNA, 50 bp, unidentified
  source 1..50: mol_type = unassigned DNA; note = donor_ea008f8
  misc_feature 1..23: note = RE
  misc_feature 24..25: note = Core
  misc_feature 26..50: note = LE
attgactatttctaatagttagtctactattatataaagtcatagtcttt

SEQ ID NO: 39536 - DNA, 50 bp, unidentified
  source 1..50: mol_type = unassigned DNA; note = donor_ea04e0b
  misc_feature 1..21: note = RE
  misc_feature 22..25: note = Core
  misc_feature 26..50: note = LE
cttgaggttgacacaagaggtgtcactagtgcaccctcttccgtgcagac

SEQ ID NO: 39537 - DNA, 50 bp, unidentified
  source 1..50: mol_type = unassigned DNA; note = donor_ea19107
  misc_feature 1..20: note = RE
  misc_feature 21..25: note = Core
  misc_feature 26..50: note = LE
tgacaaagatcatagagacacccccgttacctttttcgcagccccaaccg

SEQ ID NO: 39538 - DNA, 50 bp, unidentified
  source 1..50: mol_type = unassigned DNA; note = donor_ea22cc3
  misc_feature 1..24: note = RE
  misc_feature 25: note = Core
  misc_feature 26..50: note = LE
ttgtttgttttttacctcagttcttcttaagtttgattctctataaattg

SEQ ID NO: 39539 - DNA, 50 bp, unidentified
  source 1..50: mol_type = unassigned DNA; note = donor_ea25000
  misc_feature 1..23: note = RE
  misc_feature 24..25: note = Core
  misc_feature 26..50: note = LE
atagtcccgagggagtccatataagatgtatggactccctcttccccaga

SEQ ID NO: 39540 - DNA, 50 bp, unidentified
  source 1..50: mol_type = unassigned DNA; note = donor_ea25a3b
  misc_feature 1..21: note = RE
  misc_feature 22..25: note = Core
  misc_feature 26..50: note = LE
ctcttgacttttaatagttagtcacgtataatctatttatcttcttaaag

SEQ ID NO: 39541 - DNA, 50 bp, unidentified; identical to SEQ ID NO: 32496
  source 1..50: mol_type = unassigned DNA; note = donor_ea2823f
  misc_feature 1..23: note = RE
  misc_feature 24..25: note = Core
  misc_feature 26..50: note = LE

SEQ ID NO: 39542 - DNA, 50 bp, unidentified; identical to SEQ ID NO: 35471
  source 1..50: mol_type = unassigned DNA; note = donor_ea299fa
  misc_feature 1..22: note = RE
  misc_feature 23..25: note = Core
  misc_feature 26..50: note = LE

SEQ ID NO: 39543 - DNA, 50 bp, unidentified
  source 1..50: mol_type = unassigned DNA; note = donor_ea2e304
  misc_feature 1..23: note = RE
  misc_feature 24..25: note = Core
  misc_feature 26..50: note = LE
ctgcttgactttttatttgcagactactactatatatttatggttaatat

SEQ ID NO: 39544 - DNA, 50 bp, unidentified
  source 1..50: mol_type = unassigned DNA; note = donor_ea3ead9
  misc_feature 1..24: note = RE
  misc_feature 25: note = Core
  misc_feature 26..50: note = LE
ttgaattaagtcggtgtccatatataatgaaatgaacccctccccaaaac

SEQ ID NO: 39545 - DNA, 50 bp, unidentified
  source 1..50: mol_type = unassigned DNA; note = donor_ea4cac6
  misc_feature 1..23: note = RE
  misc_feature 24..25: note = Core
  misc_feature 26..50: note = LE
gcatccgagggggcgtccacacacgatggggtggacgccccccgacggca

SEQ ID NO: 39546 - DNA, 50 bp, unidentified
  source 1..50: mol_type = unassigned DNA; note = donor_ea5da4b
  misc_feature 1..23: note = RE
  misc_feature 24..25: note = Core
  misc_feature 26..50: note = LE
acacttgacatatcaccgctggactcgtataatatcttttagatacatta

SEQ ID NO: 39547 - DNA, 50 bp, unidentified; identical to SEQ ID NO: 33292
  source 1..50: mol_type = unassigned DNA; note = donor_ea649d0
  misc_feature 1..23: note = RE
  misc_feature 24..25: note = Core
  misc_feature 26..50: note = LE

SEQ ID NO: 39548 - DNA, 50 bp, unidentified
  source 1..50: mol_type = unassigned DNA; note = donor_ea6d8e5
  misc_feature 1..23: note = RE
  misc_feature 24..25: note = Core
  misc_feature 26..50: note = LE
aaaccaacccaacataacagttgccctgtgtcttggaagtctgtcatgat

SEQ ID NO: 39549 - DNA, 50 bp, unidentified
  source 1..50: mol_type = unassigned DNA; note = donor_ea7fd1d
  misc_feature 1..22: note = RE
  misc_feature 23..25: note = Core
  misc_feature 26..50: note = LE
tgtcgcatttttaatatagttcgttgtatatttaaaatattatttgtatc

SEQ ID NO: 39550 - DNA, 50 bp, unidentified
  source 1..50: mol_type = unassigned DNA; note = donor_ea835ff
  misc_feature 1..23: note = RE
  misc_feature 24..25: note = Core
  misc_feature 26..50: note = LE
gcattatgcggagcgattagacgacatggggtaatcgcgggatcgagcgc

SEQ ID NO: 39551 - DNA, 50 bp, unidentified
  source 1..50: mol_type = unassigned DNA; note = donor_ea861a5
  misc_feature 1..24: note = RE
  misc_feature 25: note = Core
  misc_feature 26..50: note = LE
cgcaacgcgggagccatccacacgcgatggagtggatggctcccgctcac

SEQ ID NO: 39552 - DNA, 50 bp, unidentified
  source 1..50: mol_type = unassigned DNA; note = donor_ea9373f
  misc_feature 1..23: note = RE
  misc_feature 24..25: note = Core
  misc_feature 26..50: note = LE
gcgacacggcggcggaccatacataatgggatggtccgccgccttttacc

SEQ ID NO: 39553 - DNA, 50 bp, unidentified
  source 1..50: mol_type = unassigned DNA; note = donor_eabc465
  misc_feature 1..23: note = RE
  misc_feature 24..25: note = Core
  misc_feature 26..50: note = LE
cacaaccggggggcgtccatatatgatgtgatggacgccccctttttcaa

SEQ ID NO: 39554 - DNA, 50 bp, unidentified
  source 1..50: mol_type = unassigned DNA; note = donor_eac1571
  misc_feature 1..23: note = RE
  misc_feature 24..25: note = Core
  misc_feature 26..50: note = LE
acttgacaagtctcatagaaagtcttatattagaaccgttgcagtttgtc

SEQ ID NO: 39555 - DNA, 50 bp, unidentified
  source 1..50: mol_type = unassigned DNA; note = donor_eac1723
  misc_feature 1..23: note = RE
  misc_feature 24..25: note = Core
  misc_feature 26..50: note = LE
cggatggttcggagagatggtatcttgtatctctcctggagctgaggtta

SEQ ID NO: 39556 - DNA, 50 bp, unidentified
  source 1..50: mol_type = unassigned DNA; note = donor_eac3260
  misc_feature 1..23: note = RE
  misc_feature 24..25: note = Core
  misc_feature 26..50: note = LE
gcaaggaggaggccgtccacatatgttggtgtggacggcccccgacggca

SEQ ID NO: 39557 - DNA, 50 bp, unidentified
  source 1..50: mol_type = unassigned DNA; note = donor_eac6323
  misc_feature 1..24: note = RE
  misc_feature 25: note = Core
  misc_feature 26..50: note = LE
aggcttcttgacacaaaagggagcctacttgtttcattgacgcaggaccg

SEQ ID NO: 39558 - DNA, 50 bp, unidentified
  source 1..50: mol_type = unassigned DNA; note = donor_eac7be3
  misc_feature 1..23: note = RE
  misc_feature 24..25: note = Core
  misc_feature 26..50: note = LE
gcttgacaacaagatagggacacccgttaccttgttctcggccaccgggt

SEQ ID NO: 39559 - DNA, 50 bp, unidentified
  source 1..50: mol_type = unassigned DNA; note = donor_eacac90
  misc_feature 1..22: note = RE
  misc_feature 23..25: note = Core
  misc_feature 26..50: note = LE
acccgtgggtgccgtccacacatgatgtggtggacggcacccactccgcg

SEQ ID NO: 39560 - DNA, 50 bp, unidentified
  source 1..50: mol_type = unassigned DNA; note = donor_ead24f4
  misc_feature 1..23: note = RE
  misc_feature 24..25: note = Core
  misc_feature 26..50: note = LE
gagttccgggaggcgtccatataagatggtatggacgcctccccccggca

SEQ ID NO: 39561 - DNA, 50 bp, unidentified
  source 1..50: mol_type = unassigned DNA; note = donor_ead92f0
  misc_feature 1..23: note = RE
  misc_feature 24..25: note = Core
  misc_feature 26..50: note = LE
tccattgactttaaacacagctgcttgtatgtttaaagtcatattagtta

SEQ ID NO: 39562 - DNA, 50 bp, unidentified
  source 1..50: mol_type = unassigned DNA; note = donor_eae1c2a
  misc_feature 1..23: note = RE
  misc_feature 24..25: note = Core
  misc_feature 26..50: note = LE
tttggtggtgctcaagacagttgcttgtatcttgaaaattggttaaaata

SEQ ID NO: 39563 - DNA, 50 bp, unidentified
  source 1..50: mol_type = unassigned DNA; note = donor_eae503f
  misc_feature 1..23: note = RE
  misc_feature 24..25: note = Core
  misc_feature 26..50: note = LE
gcatcacgggcggcaaccaaagaagatggtatggttgccgcccttccccg

SEQ ID NO: 39564 - DNA, 50 bp, unidentified; identical to SEQ ID NO: 37988
  source 1..50: mol_type = unassigned DNA; note = donor_eaf760b
  misc_feature 1..24: note = RE
  misc_feature 25: note = Core
  misc_feature 26..50: note = LE

SEQ ID NO: 39565 - DNA, 50 bp, unidentified
  source 1..50: mol_type = unassigned DNA; note = donor_eaf8e12
  misc_feature 1..23: note = RE
  misc_feature 24..25: note = Core
  misc_feature 26..50: note = LE
accgtttggtattgtcatagaaatcctttagacttgcataattatattta

SEQ ID NO: 39566 - DNA, 50 bp, unidentified
  source 1..50: mol_type = unassigned DNA; note = donor_eaf9b0f
  misc_feature 1..23: note = RE
  misc_feature 24..25: note = Core
  misc_feature 26..50: note = LE
ttgcaaacggggcgggccatacgttatggaatggcccgcccctatcccca

SEQ ID NO: 39567 - DNA, 50 bp, unidentified
  source 1..50: mol_type = unassigned DNA; note = donor_eb02028
  misc_feature 1..24: note = RE
  misc_feature 25: note = Core
  misc_feature 26..50: note = LE
gagataaatccttaatactgagggaacattcctgtatagcctaagaaatg

SEQ ID NO: 39568 - DNA, 50 bp, unidentified
  source 1..50: mol_type = unassigned DNA; note = donor_eb044d2
  misc_feature 1..21: note = RE
  misc_feature 22..25: note = Core
  misc_feature 26..50: note = LE
caacgcgggcgtcgtccacacatgatgtggtggacgacgcccgctcccgg

SEQ ID NO: 39569 - DNA, 50 bp, unidentified; identical to SEQ ID NO: 33868
  source 1..50: mol_type = unassigned DNA; note = donor_eb0b937
  misc_feature 1..24: note = RE
  misc_feature 25: note = Core
  misc_feature 26..50: note = LE

SEQ ID NO: 39570 - DNA, 50 bp, unidentified
  source 1..50: mol_type = unassigned DNA; note = donor_eb0e8b8
  misc_feature 1..24: note = RE
  misc_feature 25: note = Core
  misc_feature 26..50: note = LE
tgcactcaggcggcggaccatacataatgagatggtccgccgcctggatc

SEQ ID NO: 39571 - DNA, 50 bp, unidentified
  source 1..50: mol_type = unassigned DNA; note = donor_eb19d64
  misc_feature 1..24: note = RE
  misc_feature 25: note = Core
  misc_feature 26..50: note = LE
attatttgcttttatcatagtaatcctttagatttgttgaataagaaaat

SEQ ID NO: 39572 - DNA, 50 bp, unidentified; identical to SEQ ID NO: 32586
  source 1..50: mol_type = unassigned DNA; note = donor_eb2a05e
  misc_feature 1..23: note = RE
  misc_feature 24..25: note = Core
  misc_feature 26..50: note = LE

SEQ ID NO: 39573 - DNA, 50 bp, unidentified
  source 1..50: mol_type = unassigned DNA; note = donor_eb2fae5
  misc_feature 1..23: note = RE
  misc_feature 24..25: note = Core
  misc_feature 26..50: note = LE
cggcagcctaaaagatacagttgcttctgtatccgggttctgctaggctg

SEQ ID NO: 39574 - DNA, 50 bp, unidentified
  source 1..50: mol_type = unassigned DNA; note = donor_eb3914d
  misc_feature 1..24: note = RE
  misc_feature 25: note = Core
  misc_feature 26..50: note = LE
tgacaatgtgggggcgtccatgtacaatgggatggacgcccccaccccgt

SEQ ID NO: 39575 - DNA, 50 bp, unidentified; identical to SEQ ID NO: 31193
  source 1..50: mol_type = unassigned DNA; note = donor_eb39f0f
  misc_feature 1..22: note = RE
  misc_feature 23..25: note = Core
  misc_feature 26..50: note = LE

SEQ ID NO: 39576 - DNA, 50 bp, unidentified
  source 1..50: mol_type = unassigned DNA; note = donor_eb452ac
  misc_feature 1..23: note = RE
  misc_feature 24..25: note = Core
  misc_feature 26..50: note = LE
ttgacacagggggagtccacataagataattggactcccccacctcctct

SEQ ID NO: 39577 - DNA, 50 bp, unidentified
  source 1..50: mol_type = unassigned DNA; note = donor_eb47fdc
  misc_feature 1..24: note = RE
  misc_feature 25: note = Core
  misc_feature 26..50: note = LE
tgcaaaaaagggggtgaccatagataatgagatggtcacccccacaccct

SEQ ID NO: 39578 - DNA, 50 bp, unidentified
  source 1..50: mol_type = unassigned DNA; note = donor_eb54d86
  misc_feature 1..22: note = RE
  misc_feature 23..25: note = Core
  misc_feature 26..50: note = LE
aaacttgtttttgatcttggaatgcctttagtttgcatcaagaaaaaaac

SEQ ID NO: 39579 - DNA, 50 bp, unidentified
  source 1..50: mol_type = unassigned DNA; note = donor_eb54fea
  misc_feature 1..23: note = RE
  misc_feature 24..25: note = Core
  misc_feature 26..50: note = LE
gaacttgcaagcgaagagagaatcttgtatcttgcgttctgaagcgtgac

SEQ ID NO: 39580 - DNA, 50 bp, unidentified
  source 1..50: mol_type = unassigned DNA; note = donor_eb58022
  misc_feature 1..22: note = RE
  misc_feature 23..25: note = Core
  misc_feature 26..50: note = LE
atgttgactaactattagctggtttcgtattataaagtcagccagttatt

SEQ ID NO: 39581 - DNA, 50 bp, unidentified
  source 1..50: mol_type = unassigned DNA; note = donor_eb5e886
  misc_feature 1..23: note = RE
  misc_feature 24..25: note = Core
  misc_feature 26..50: note = LE
cggcttgacaaagtcattgagaatccttacctttcttctcgggtgctgga

SEQ ID NO: 39582 - DNA, 50 bp, unidentified
  source 1..50: mol_type = unassigned DNA; note = donor_eb75fa1
  misc_feature 1..23: note = RE
  misc_feature 24..25: note = Core
  misc_feature 26..50: note = LE
gacgaacaaaggcccattacagaagatgccgtaatgggccggcgcttccg

SEQ ID NO: 39583 - DNA, 50 bp, unidentified
  source 1..50: mol_type = unassigned DNA; note = donor_eb790af
  misc_feature 1..22: note = RE
  misc_feature 23..25: note = Core
  misc_feature 26..50: note = LE
cgtccgaaggggcgtccacagatgatggggtggacgccccccgacggcat

SEQ ID NO: 39584 - DNA, 50 bp, unidentified
  source 1..50: mol_type = unassigned DNA; note = donor_eb7ed07
  misc_feature 1..22: note = RE
  misc_feature 23..25: note = Core
  misc_feature 26..50: note = LE
gcttgacaaattatagccggtctgttatattatcgaacagggatacttcc

SEQ ID NO: 39585 - DNA, 50 bp, unidentified; identical to SEQ ID NO: 39089
  source 1..50: mol_type = unassigned DNA; note = donor_eb84ca2
  misc_feature 1..23: note = RE
  misc_feature 24..25: note = Core
  misc_feature 26..50: note = LE

SEQ ID NO: 39586 - DNA, 50 bp, unidentified
  source 1..50: mol_type = unassigned DNA; note = donor_eb87eac
  misc_feature 1..22: note = RE
  misc_feature 23..25: note = Core
  misc_feature 26..50: note = LE
ccattcctattttttattcagattaaccatacattcctttccgcctgcgg

SEQ ID NO: 39587 - DNA, 50 bp, unidentified
  source 1..50: mol_type = unassigned DNA; note = donor_eb891e1
  misc_feature 1..23: note = RE
  misc_feature 24..25: note = Core
  misc_feature 26..50: note = LE
cctcttgacaaacaacaccgtatctcatataatatggatagcgttccaga

SEQ ID NO: 39588 - DNA, 50 bp, unidentified
  source 1..50: mol_type = unassigned DNA; note = donor_eb946bc
  misc_feature 1..24: note = RE
  misc_feature 25: note = Core
  misc_feature 26..50: note = LE
gcaaaaacgggggtgaccatagattaatgggatggtcaccccctcccgcg

SEQ ID NO: 39589 - DNA, 50 bp, unidentified
  source 1..50: mol_type = unassigned DNA; note = donor_eb98c2e
  misc_feature 1..21: note = RE
  misc_feature 22..25: note = Core
  misc_feature 26..50: note = LE
ggcttgacaaactcattgagactccgtaagttgttgggcggtccgggagg

SEQ ID NO: 39590 - DNA, 50 bp, unidentified
  source 1..50: mol_type = unassigned DNA; note = donor_eb9acaa
  misc_feature 1..21: note = RE
  misc_feature 22..25: note = Core
  misc_feature 26..50: note = LE
ggcttgacaacatcattgagactccgtaagttgtcaggtggcccgggagg

SEQ ID NO: 39591 - DNA, 50 bp, unidentified
  source 1..50: mol_type = unassigned DNA; note = donor_eba00e2
  misc_feature 1..23: note = RE
  misc_feature 24..25: note = Core
  misc_feature 26..50: note = LE
gcaatatcgaggggaaccatacattaatgagatggttcccctcccttcag

SEQ ID NO: 39592 - DNA, 50 bp, unidentified
  source 1..50: mol_type = unassigned DNA; note = donor_eba1267
  misc_feature 1..24: note = RE
  misc_feature 25: note = Core
  misc_feature 26..50: note = LE
tgcagttcggcggcggaccatacataatgagatggtccgccgcctagtga

SEQ ID NO: 39593 - DNA, 50 bp, unidentified
  source 1..50: mol_type = unassigned DNA; note = donor_ebaf85d
  misc_feature 1..24: note = RE
  misc_feature 25: note = Core
  misc_feature 26..50: note = LE
ggcaaggttgggggcgtccatgtacaatgggatggacgcccccacccata

SEQ ID NO: 39594 - DNA, 50 bp, unidentified
  source 1..50: mol_type = unassigned DNA; note = donor_ebaf98b
  misc_feature 1..23: note = RE
  misc_feature 24..25: note = Core
  misc_feature 26..50: note = LE
gcgacaaagcggcggaccatacataatggtatggtccgccgccgacccga

SEQ ID NO: 39595 - DNA, 50 bp, unidentified
  source 1..50: mol_type = unassigned DNA; note = donor_ebb59b8
  misc_feature 1..23: note = RE
  misc_feature 24..25: note = Core
  misc_feature 26..50: note = LE
ttgacagcgataggccccatacaagaagctatggggcaggcggtcgtaga

SEQ ID NO: 39596 - DNA, 50 bp, unidentified
  source 1..50: mol_type = unassigned DNA; note = donor_ebb9625
  misc_feature 1..24: note = RE
  misc_feature 25: note = Core
  misc_feature 26..50: note = LE
gcaataacgggacgtaccatatattaatgagatggtacgtacctcttcac

SEQ ID NO: 39597 - DNA, 50 bp, unidentified
  source 1..50: mol_type = unassigned DNA; note = donor_ebc66bc
  misc_feature 1..22: note = RE
  misc_feature 23..25: note = Core
  misc_feature 26..50: note = LE
atgcttgacttttgttagcaggtttagtaccatagaagtgtagttgacag

SEQ ID NO: 39598 - DNA, 50 bp, unidentified
  source 1..50: mol_type = unassigned DNA; note = donor_ebd328a
  misc_feature 1..23: note = RE
  misc_feature 24..25: note = Core
  misc_feature 26..50: note = LE
ttacttgatttttatatagttagctggtatattggaaatgactcatctaa

SEQ ID NO: 39599 - DNA, 50 bp, unidentified
  source 1..50: mol_type = unassigned DNA; note = donor_ebd3c20
  misc_feature 1..23: note = RE
  misc_feature 24..25: note = Core
  misc_feature 26..50: note = LE
ccaaaccgggaggcgtccatataagatggaatggacgcctccctctcgcc

SEQ ID NO: 39600 - DNA, 50 bp, unidentified; identical to SEQ ID NO: 34712
  source 1..50: mol_type = unassigned DNA; note = donor_ebe2315
  misc_feature 1..23: note = RE
  misc_feature 24..25: note = Core
  misc_feature 26..50: note = LE

SEQ ID NO: 39601 - DNA, 50 bp, unidentified
  source 1..50: mol_type = unassigned DNA; note = donor_ec002f9
  misc_feature 1..23: note = RE
  misc_feature 24..25: note = Core
  misc_feature 26..50: note = LE
gcgtctcgcggggcgtccacacatgatgaggtggacgccccccaacggcc

SEQ ID NO: 39602 - DNA, 50 bp, unidentified
  source 1..50: mol_type = unassigned DNA; note = donor_ec008f5
  misc_feature 1..23: note = RE
  misc_feature 24..25: note = Core
  misc_feature 26..50: note = LE
agggttgctgagcaacatagaatcttgtatgtttagacttgaaggggtgg

SEQ ID NO: 39603 - DNA, 50 bp, unidentified
  source 1..50: mol_type = unassigned DNA; note = donor_ec0132e
  misc_feature 1..23: note = RE
  misc_feature 24..25: note = Core
  misc_feature 26..50: note = LE
aaatttggaaatatgcacagaatctcttacctttgcaccagattatagat

SEQ ID NO: 39604 - DNA, 50 bp, unidentified
  source 1..50: mol_type = unassigned DNA; note = donor_ec08e72
  misc_feature 1..23: note = RE
  misc_feature 24..25: note = Core
  misc_feature 26..50: note = LE
tgacatctaagctcctgggatgtctaataagtgttatcgggtcggccgtg

SEQ ID NO: 39605 - DNA, 50 bp, unidentified
  source 1..50: mol_type = unassigned DNA; note = donor_ec0c178
  misc_feature 1..22: note = RE
  misc_feature 23..25: note = Core
  misc_feature 26..50: note = LE
actcttgacttttaatagttagtcacgtataatataattatccgaatttt

SEQ ID NO: 39606 - DNA, 50 bp, unidentified
  source 1..50: mol_type = unassigned DNA; note = donor_ec0cce3
  misc_feature 1..22: note = RE
  misc_feature 23..25: note = Core
  misc_feature 26..50: note = LE
ccgattgatttttcttagcaggtttggtacaatataagcatagtctcaaa

SEQ ID NO: 39607 - DNA, 50 bp, unidentified
  source 1..50: mol_type = unassigned DNA; note = donor_ec13376
  misc_feature 1..23: note = RE
  misc_feature 24..25: note = Core
  misc_feature 26..50: note = LE
atgcttgaccattaatagttagtctcgtattattaatttgtagcttttct

SEQ ID NO: 39608 - DNA, 50 bp, unidentified
  source 1..50: mol_type = unassigned DNA; note = donor_ec17c13
  misc_feature 1..21: note = RE
  misc_feature 22..25: note = Core
  misc_feature 26..50: note = LE
gcggcgacttgaccaagagagctcattggatgacaatggccttgcgggcc

SEQ ID NO: 39609 - DNA, 50 bp, unidentified
  source 1..50: mol_type = unassigned DNA; note = donor_ec1d47b
  misc_feature 1..23: note = RE
  misc_feature 24..25: note = Core
  misc_feature 26..50: note = LE
tcgcaaacgggggcgttcatgtagaatggaatgaacgcccccactgcggc

SEQ ID NO: 39610 - DNA, 50 bp, unidentified
  source 1..50: mol_type = unassigned DNA; note = donor_ec2ed69
  misc_feature 1..22: note = RE
  misc_feature 23..25: note = Core
  misc_feature 26..50: note = LE
cttgacagaagacataggggcacccgttacttttttgaggagccctagtt

SEQ ID NO: 39611 - DNA, 50 bp, unidentified
  source 1..50: mol_type = unassigned DNA; note = donor_ec3c328
  misc_feature 1..23: note = RE
  misc_feature 24..25: note = Core
  misc_feature 26..50: note = LE
cagtgcttgacttaatagttagtcttgtattataattgaaatagtagttt

SEQ ID NO: 39612 - DNA, 50 bp, unidentified
  source 1..50: mol_type = unassigned DNA; note = donor_ec4220e
  misc_feature 1..23: note = RE
  misc_feature 24..25: note = Core
  misc_feature 26..50: note = LE
atcacgccactgcataatggttgcttgtattagcacagaccgctagaatg

SEQ ID NO: 39613 - DNA, 50 bp, unidentified
  source 1..50: mol_type = unassigned DNA; note = donor_ec42693
  misc_feature 1..24: note = RE
  misc_feature 25: note = Core
  misc_feature 26..50: note = LE
cttgcggatggggcgggccatacgtatgggatggcccgcccctctctccg

SEQ ID NO: 39614 - DNA, 50 bp, unidentified
  source 1..50: mol_type = unassigned DNA; note = donor_ec485bc
  misc_feature 1..21: note = RE
  misc_feature 22..25: note = Core
  misc_feature 26..50: note = LE
agccggcttgacatagggcttctcactggtgcaccatcctctggtcggcg

SEQ ID NO: 39615 - DNA, 50 bp, unidentified
  source 1..50: mol_type = unassigned DNA; note = donor_ec4cd4e
  misc_feature 1..22: note = RE
  misc_feature 23..25: note = Core
  misc_feature 26..50: note = LE
atacttgactattcaatagttatcttgtatactctatttaatgattatag

SEQ ID NO: 39616 - DNA, 50 bp, unidentified
  source 1..50: mol_type = unassigned DNA; note = donor_ec4ef67
  misc_feature 1..23: note = RE
  misc_feature 24..25: note = Core
  misc_feature 26..50: note = LE
taatttggatatcaacacagaatctatgtttgttgtgaaatttaaaaata

SEQ ID NO: 39617 - DNA, 50 bp, unidentified
  source 1..50: mol_type = unassigned DNA; note = donor_ec57995
  misc_feature 1..23: note = RE
  misc_feature 24..25: note = Core
  misc_feature 26..50: note = LE
gaaccgcggccacttaatggttgcttgttatagcgggatcgattattgtc

SEQ ID NO: 39618 - DNA, 50 bp, unidentified
  source 1..50: mol_type = unassigned DNA; note = donor_ec660e5
  misc_feature 1..23: note = RE
  misc_feature 24..25: note = Core
  misc_feature 26..50: note = LE
gcaaacggggaggagaccatatacgatgtgatggtctcctccccacctaa

SEQ ID NO: 39619 - DNA, 50 bp, unidentified
  source 1..50: mol_type = unassigned DNA; note = donor_ec6b16d
  misc_feature 1..23: note = RE
  misc_feature 24..25: note = Core
  misc_feature 26..50: note = LE
tgacaaaaaacatcatgggatgtctaataagaactaccgggtggacgaga

SEQ ID NO: 39620 - DNA, 50 bp, unidentified
  source 1..50: mol_type = unassigned DNA; note = donor_ec7157d
  misc_feature 1..23: note = RE
  misc_feature 24..25: note = Core
  misc_feature 26..50: note = LE
aaggagggtcgttgacatagaatcttgtatgttctaggctaggtacctgt

SEQ ID NO: 39621 - DNA, 50 bp, unidentified
  source 1..50: mol_type = unassigned DNA; note = donor_ec78661
  misc_feature 1..22: note = RE
  misc_feature 23..25: note = Core
  misc_feature 26..50: note = LE
ctcaagggcggccgtccacacatgatgatgtggacggccccacccaccgg

SEQ ID NO: 39622 - DNA, 50 bp, unidentified; identical to SEQ ID NO: 32138
  source 1..50: mol_type = unassigned DNA; note = donor_ec79357
  misc_feature 1..22: note = RE
  misc_feature 23..25: note = Core
  misc_feature 26..50: note = LE

SEQ ID NO: 39623 - DNA, 50 bp, unidentified
  source 1..50: mol_type = unassigned DNA; note = donor_ec806fa
  misc_feature 1..23: note = RE
  misc_feature 24..25: note = Core
  misc_feature 26..50: note = LE
gacaagctaatcccctgggatgtctaataagagttatcgggtcgccgatg

SEQ ID NO: 39624 - DNA, 50 bp, unidentified
  source 1..50: mol_type = unassigned DNA; note = donor_ec881c7
  misc_feature 1..23: note = RE
  misc_feature 24..25: note = Core
  misc_feature 26..50: note = LE
gcgaccacggggccgtccacatatgttgggttggacggcccctacggcat

SEQ ID NO: 39625 - DNA, 50 bp, unidentified
  source 1..50: mol_type = unassigned DNA; note = donor_ec8c29b
  misc_feature 1..24: note = RE
  misc_feature 25: note = Core
  misc_feature 26..50: note = LE
tgcggcgaagcggcggaccatacataatgggatggtccgccgcttcagat

SEQ ID NO: 39626 - DNA, 50 bp, unidentified
  source 1..50: mol_type = unassigned DNA; note = donor_ec8e191
  misc_feature 1..23: note = RE
  misc_feature 24..25: note = Core
  misc_feature 26..50: note = LE
aaggttgacttttcatagctggtcttgtatgatattgaggaagatcaata

SEQ ID NO: 39627 - DNA, 50 bp, unidentified
  source 1..50: mol_type = unassigned DNA; note = donor_ec98cbb
  misc_feature 1..22: note = RE
  misc_feature 23..25: note = Core
  misc_feature 26..50: note = LE
cactacggacggcaaccacagaagatggggtggttgccgcccctcccaga

SEQ ID NO: 39628 - DNA, 50 bp, unidentified; identical to SEQ ID NO: 33133
  source 1..50: mol_type = unassigned DNA; note = donor_eca1753
  misc_feature 1..23: note = RE
  misc_feature 24..25: note = Core
  misc_feature 26..50: note = LE

SEQ ID NO: 39629 - DNA, 50 bp, unidentified
  source 1..50: mol_type = unassigned DNA; note = donor_ecaf935
  misc_feature 1..20: note = RE
  misc_feature 21..25: note = Core
  misc_feature 26..50: note = LE
tttacttgactaatcgtaggaaaaacatactaagattagaggggaacatc

SEQ ID NO: 39630 - DNA, 50 bp, unidentified
  source 1..50: mol_type = unassigned DNA; note = donor_ecc13d8
  misc_feature 1..24: note = RE
  misc_feature 25: note = Core
  misc_feature 26..50: note = LE
ttgcaaaatgggatggttcatatataatgtaatgaaccatctcacccact

SEQ ID NO: 39631 - DNA, 50 bp, unidentified; identical to SEQ ID NO: 30429
  source 1..50: mol_type = unassigned DNA; note = donor_ecc5efb
  misc_feature 1..20: note = RE
  misc_feature 21..25: note = Core
  misc_feature 26..50: note = LE

SEQ ID NO: 39632 - DNA, 50 bp, unidentified; identical to SEQ ID NO: 31800
  source 1..50: mol_type = unassigned DNA; note = donor_ecc8cd7
  misc_feature 1..23: note = RE
  misc_feature 24..25: note = Core
  misc_feature 26..50: note = LE

SEQ ID NO: 39633 - DNA, 50 bp, unidentified
  source 1..50: mol_type = unassigned DNA; note = donor_ece3ac3
  misc_feature 1..24: note = RE
  misc_feature 25: note = Core
  misc_feature 26..50: note = LE
cgcttgacaccaacaatagggacacgttaccgttttcgcggctccttgat

SEQ ID NO: 39634 - DNA, 50 bp, unidentified
  source 1..50: mol_type = unassigned DNA; note = donor_ece5a79
  misc_feature 1..21: note = RE
  misc_feature 22..25: note = Core
  misc_feature 26..50: note = LE
cacttgacttttgttagcaggttttagtaccataaaagtgtagttgttag

SEQ ID NO: 39635 - DNA, 50 bp, unidentified
  source 1..50: mol_type = unassigned DNA; note = donor_ecf6d0e
  misc_feature 1..24: note = RE
  misc_feature 25: note = Core
  misc_feature 26..50: note = LE
atagttgttttttaactcagatcttcttaagtttactttttattaatttt

SEQ ID NO: 39636 - DNA, 50 bp, unidentified
  source 1..50: mol_type = unassigned DNA; note = donor_ecf82b3
  misc_feature 1..22: note = RE
  misc_feature 23..25: note = Core
  misc_feature 26..50: note = LE
ctgattgactaccaagacggtatcttgtatcttgattgatatagtgatta

SEQ ID NO: 39637 - DNA, 50 bp, unidentified; identical to SEQ ID NO: 36251
  source 1..50: mol_type = unassigned DNA; note = donor_ecfb0c6
  misc_feature 1..22: note = RE
  misc_feature 23..25: note = Core
  misc_feature 26..50: note = LE

SEQ ID NO: 39638 - DNA, 50 bp, unidentified
  source 1..50: mol_type = unassigned DNA; note = donor_ed0ea29
  misc_feature 1..23: note = RE
  misc_feature 24..25: note = Core
  misc_feature 26..50: note = LE
gactcgcaggagccatccatacatgatgttgtggatggctcctgcttcag

SEQ ID NO: 39639 - DNA, 50 bp, unidentified
  source 1..50: mol_type = unassigned DNA; note = donor_ed23088
  misc_feature 1..24: note = RE
  misc_feature 25: note = Core
  misc_feature 26..50: note = LE
tggcaaaccaggggcgaccatctataatgggatggtcgcccctacccgaa

SEQ ID NO: 39640 - DNA, 50 bp, unidentified
  source 1..50: mol_type = unassigned DNA; note = donor_ed35449
  misc_feature 1..23: note = RE
  misc_feature 24..25: note = Core
  misc_feature 26..50: note = LE
gccaacggagggccgtccacacatgatggcgtggacggctctccaaccct

SEQ ID NO: 39641 - DNA, 50 bp, unidentified; identical to SEQ ID NO: 33722
  source 1..50: mol_type = unassigned DNA; note = donor_ed3c105
  misc_feature 1..24: note = RE
  misc_feature 25: note = Core
  misc_feature 26..50: note = LE

SEQ ID NO: 39642 - DNA, 50 bp, unidentified; identical to SEQ ID NO: 35390
  source 1..50: mol_type = unassigned DNA; note = donor_ed4d8b5
  misc_feature 1..23: note = RE
  misc_feature 24..25: note = Core
  misc_feature 26..50: note = LE

SEQ ID NO: 39643 - DNA, 50 bp, unidentified
  source 1..50: mol_type = unassigned DNA; note = donor_ed4eeed
  misc_feature 1..23: note = RE
  misc_feature 24..25: note = Core
  misc_feature 26..50: note = LE
aaaggtgagctgatgatagttgactcctaccatcagcttatgttataaac

SEQ ID NO: 39644 - DNA, 50 bp, unidentified
  source 1..50: mol_type = unassigned DNA; note = donor_ed50e5b
  misc_feature 1..24: note = RE
  misc_feature 25: note = Core
  misc_feature 26..50: note = LE
tttatttggttttatcttagaattcatgtagatttgcagcgtgatgtaat

SEQ ID NO: 39645 - DNA, 50 bp, unidentified
  source 1..50: mol_type = unassigned DNA; note = donor_ed54019
  misc_feature 1..23: note = RE
  misc_feature 24..25: note = Core
  misc_feature 26..50: note = LE
taacttgaccctttataggatgtctggtattatcctcacttgatacacct

SEQ ID NO: 39646 - DNA, 50 bp, unidentified
  source 1..50: mol_type = unassigned DNA; note = donor_ed543dc
  misc_feature 1..23: note = RE
  misc_feature 24..25: note = Core
  misc_feature 26..50: note = LE
gacaagctaaggccctgggatgtctaatagggattaccgggtcgtcatac

SEQ ID NO: 39647 - DNA, 50 bp, unidentified
  source 1..50: mol_type = unassigned DNA; note = donor_ed5b900
  misc_feature 1..23: note = RE
  misc_feature 24..25: note = Core
  misc_feature 26..50: note = LE
cgattgatttggagagatggtatcttgtatctctccaaaacgtgatatat

SEQ ID NO: 39648 - DNA, 50 bp, unidentified
  source 1..50: mol_type = unassigned DNA; note = donor_ed609dc
  misc_feature 1..23: note = RE
  misc_feature 24..25: note = Core
  misc_feature 26..50: note = LE
agacttggcttttaatagttcgtctcgtattatatagtagtagtttttag

SEQ ID NO: 39649 - DNA, 50 bp, unidentified
  source 1..50: mol_type = unassigned DNA; note = donor_ed6b749
  misc_feature 1..23: note = RE
  misc_feature 24..25: note = Core
  misc_feature 26..50: note = LE
tgcagcacccgggcgtccatatatgatgtgatggacgcccctccctaagg

SEQ ID NO: 39650 - DNA, 50 bp, unidentified
  source 1..50: mol_type = unassigned DNA; note = donor_ed75d82
  misc_feature 1..23: note = RE
  misc_feature 24..25: note = Core
  misc_feature 26..50: note = LE
gcaaaaatgggagtgaccatagattaatgagatggtcactcccaccctac

SEQ ID NO: 39651 - DNA, 50 bp, unidentified
  source 1..50: mol_type = unassigned DNA; note = donor_ed7862b
  misc_feature 1..23: note = RE
  misc_feature 24..25: note = Core
  misc_feature 26..50: note = LE
gcaataaccgaggagtccatatatgatgatatggactcctctttcaccag

SEQ ID NO: 39652 - DNA, 50 bp, unidentified
  source 1..50: mol_type = unassigned DNA; note = donor_ed81963
  misc_feature 1..23: note = RE
  misc_feature 24..25: note = Core
  misc_feature 26..50: note = LE
agtcttgacttttcatagctggtcttgtatgatccatttagaagctaagg

SEQ ID NO: 39653 - DNA, 50 bp, unidentified
  source 1..50: mol_type = unassigned DNA; note = donor_ed8456f
  misc_feature 1..23: note = RE
  misc_feature 24..25: note = Core
  misc_feature 26..50: note = LE
ggtcttgactttttatagttagtctcgtataataaagtagtagttattaa

SEQ ID NO: 39654 - DNA, 50 bp, unidentified
  source 1..50: mol_type = unassigned DNA; note = donor_ed88cae
  misc_feature 1..23: note = RE
  misc_feature 24..25: note = Core
  misc_feature 26..50: note = LE
cacctcacctaactcttcggattagtatctgcggcctggcggccgtcgtg

SEQ ID NO: 39655 - DNA, 50 bp, unidentified
  source 1..50: mol_type = unassigned DNA; note = donor_ed8b621
  misc_feature 1..23: note = RE
  misc_feature 24..25: note = Core
  misc_feature 26..50: note = LE
agacttgacatatgaccagaatactcgtataggtgtagggcatgaagtca

SEQ ID NO: 39656 - DNA, 50 bp, unidentified
  source 1..50: mol_type = unassigned DNA; note = donor_ed949f9
  misc_feature 1..23: note = RE
  misc_feature 24..25: note = Core
  misc_feature 26..50: note = LE
gcatcaaacggggtatccacacatgatggtgtggatacctcacccatgaa

SEQ ID NO: 39657 - DNA, 50 bp, unidentified
  source 1..50: mol_type = unassigned DNA; note = donor_ed9adb8
  misc_feature 1..22: note = RE
  misc_feature 23..25: note = Core
  misc_feature 26..50: note = LE
acctcaacacgccgaatagagaagatggggtattcggctttggcgccctg

SEQ ID NO: 39658 - DNA, 50 bp, unidentified
  source 1..50: mol_type = unassigned DNA; note = donor_eda62de
  misc_feature 1..24: note = RE
  misc_feature 25: note = Core
  misc_feature 26..50: note = LE
ttgcaaatcggaggagtccatatataatggtatggactcctcccctccct

SEQ ID NO: 39659 - DNA, 50 bp, unidentified
  source 1..50: mol_type = unassigned DNA; note = donor_edab886
  misc_feature 1..23: note = RE
  misc_feature 24..25: note = Core
  misc_feature 26..50: note = LE
gacaggtagggcccgtgggatgtctaatggcttccgagcagccagcaggt

SEQ ID NO: 39660 - DNA, 50 bp, unidentified; identical to SEQ ID NO: 33835
  source 1..50: mol_type = unassigned DNA; note = donor_edafa22
  misc_feature 1..23: note = RE
  misc_feature 24..25: note = Core
  misc_feature 26..50: note = LE

SEQ ID NO: 39661 - DNA, 50 bp, unidentified
  source 1..50: mol_type = unassigned DNA; note = donor_edb1c7d
  misc_feature 1..23: note = RE
  misc_feature 24..25: note = Core
  misc_feature 26..50: note = LE
gccaagcggaggtcgtccatacatgatgaggtggacggcccccgcaccca

SEQ ID NO: 39662 - DNA, 50 bp, unidentified
  source 1..50: mol_type = unassigned DNA; note = donor_edc2b3a
  misc_feature 1..24: note = RE
  misc_feature 25: note = Core
  misc_feature 26..50: note = LE
cttgcagacgggccgggccatacgtatggaatggcccgcccctccctccg

SEQ ID NO: 39663 - DNA, 50 bp, unidentified
  source 1..50: mol_type = unassigned DNA; note = donor_edc3d97
  misc_feature 1..24: note = RE
  misc_feature 25: note = Core
  misc_feature 26..50: note = LE
tgcacggacggggcggaccatacataatgagatggtccgccccgtcctcc

SEQ ID NO: 39664 - DNA, 50 bp, unidentified
  source 1..50: mol_type = unassigned DNA; note = donor_edc4197
  misc_feature 1..22: note = RE
  misc_feature 23..25: note = Core
  misc_feature 26..50: note = LE
aaatttgcttttaaacacagttcatcctatgtttgtaataaaaaaggatt

SEQ ID NO: 39665 - DNA, 50 bp, unidentified
  source 1..50: mol_type = unassigned DNA; note = donor_edcb35f
  misc_feature 1..22: note = RE
  misc_feature 23..25: note = Core
  misc_feature 26..50: note = LE
cggcttgacttttctttgcaggtctactacaataatttatggataggata

SEQ ID NO: 39666 - DNA, 50 bp, unidentified; identical to SEQ ID NO: 33802
  source 1..50: mol_type = unassigned DNA; note = donor_edce7b9
  misc_feature 1..23: note = RE
  misc_feature 24..25: note = Core
  misc_feature 26..50: note = LE

SEQ ID NO: 39667 - DNA, 50 bp, unidentified
  source 1..50: mol_type = unassigned DNA; note = donor_edd7b03
  misc_feature 1..24: note = RE
  misc_feature 25: note = Core
  misc_feature 26..50: note = LE
tgcacggacggagtggaccatacataatgggatggtccactccgtcctcc

SEQ ID NO: 39668 - DNA, 50 bp, unidentified
  source 1..50: mol_type = unassigned DNA; note = donor_ede30ce
  misc_feature 1..23: note = RE
  misc_feature 24..25: note = Core
  misc_feature 26..50: note = LE
gaccaacaagggcccgtaacagaagatggggtcacgggccggcaaccgac

SEQ ID NO: 39669 - DNA, 50 bp, unidentified
  source 1..50: mol_type = unassigned DNA; note = donor_ede4bf5
  misc_feature 1..23: note = RE
  misc_feature 24..25: note = Core
  misc_feature 26..50: note = LE
gacacaacggggaagtccttagagaatgtaagggacttccccgtcccgag

SEQ ID NO: 39670 - DNA, 50 bp, unidentified
  source 1..50: mol_type = unassigned DNA; note = donor_ede7a06
  misc_feature 1..24: note = RE
  misc_feature 25: note = Core
  misc_feature 26..50: note = LE
tgcaaaaatcgggctgaccatagataatgagatggtcagcccgatcccca

SEQ ID NO: 39671 - DNA, 50 bp, unidentified
  source 1..50: mol_type = unassigned DNA; note = donor_edec787
  misc_feature 1..23: note = RE
  misc_feature 24..25: note = Core
  misc_feature 26..50: note = LE
ttctgttgtttaatccataagaataccttagatttgatcagttgtattaa

SEQ ID NO: 39672 - DNA, 50 bp, unidentified
  source 1..50: mol_type = unassigned DNA; note = donor_edf014a
  misc_feature 1..23: note = RE
  misc_feature 24..25: note = Core
  misc_feature 26..50: note = LE
aagccgcttgacacacagaggcgctgacttgttgaatcgagcccagatgc

SEQ ID NO: 39673 - DNA, 50 bp, unidentified
  source 1..50: mol_type = unassigned DNA; note = donor_edf0310
  misc_feature 1..24: note = RE
  misc_feature 25: note = Core
  misc_feature 26..50: note = LE
tgcctgcgacaaggtgacagttgcttgtatgacgcgaaaagagcattgtc

SEQ ID NO: 39674 - DNA, 50 bp, unidentified
  source 1..50: mol_type = unassigned DNA; note = donor_edfd375
  misc_feature 1..23: note = RE
  misc_feature 24..25: note = Core
  misc_feature 26..50: note = LE
tgacttgacttttaatagttagtctcgtataataaagtagtagttattaa

SEQ ID NO: 39675 - DNA, 50 bp, unidentified
  source 1..50: mol_type = unassigned DNA; note = donor_edff2c6
  misc_feature 1..23: note = RE
  misc_feature 24..25: note = Core
  misc_feature 26..50: note = LE
caatgcaggagccatccacacaggatggagtggatggctcctgctccccg

SEQ ID NO: 39676 - DNA, 50 bp, unidentified
  source 1..50: mol_type = unassigned DNA; note = donor_ee0c5f4
  misc_feature 1..20: note = RE
  misc_feature 21..25: note = Core
  misc_feature 26..50: note = LE
cttgacaaacccatagccgactgctataaataagatgtgttgaatctctc

SEQ ID NO: 39677 - DNA, 50 bp, unidentified
  source 1..50: mol_type = unassigned DNA; note = donor_ee0cc80
  misc_feature 1..23: note = RE
  misc_feature 24..25: note = Core
  misc_feature 26..50: note = LE
cttgcgcatggggcggttatacatgatggtgtgaccgccgcccgacggca

SEQ ID NO: 39678 - DNA, 50 bp, unidentified
  source 1..50: mol_type = unassigned DNA; note = donor_ee0f916
  misc_feature 1..24: note = RE
  misc_feature 25: note = Core
  misc_feature 26..50: note = LE
cggcgttttgacacaaaggggtgcctacttagagacttggcgcaggatcg

SEQ ID NO: 39679 - DNA, 50 bp, unidentified; identical to SEQ ID NO: 30966
  source 1..50: mol_type = unassigned DNA; note = donor_ee1108b
  misc_feature 1..23: note = RE
  misc_feature 24..25: note = Core
  misc_feature 26..50: note = LE

SEQ ID NO: 39680 - DNA, 50 bp, unidentified
  source 1..50: mol_type = unassigned DNA; note = donor_ee17c62
  misc_feature 1..21: note = RE
  misc_feature 22..25: note = Core
  misc_feature 26..50: note = LE
gacttgactcggtcattgagactccgtaagttgtttggcggcccgggagg

SEQ ID NO: 39681 - DNA, 50 bp, unidentified
  source 1..50: mol_type = unassigned DNA; note = donor_ee18e8a
  misc_feature 1..24: note = RE
  misc_feature 25: note = Core
  misc_feature 26..50: note = LE
tgcaaaaacgggggtgaccatagataatgggatggtcaccccctccccgc

SEQ ID NO: 39682 - DNA, 50 bp, unidentified
  source 1..50: mol_type = unassigned DNA; note = donor_ee27b5d
  misc_feature 1..24: note = RE
  misc_feature 25: note = Core
  misc_feature 26..50: note = LE
tgcatccaggaggtcgtccatacatgatggtgtggacgacctccacctaa

SEQ ID NO: 39683 - DNA, 50 bp, unidentified
  source 1..50: mol_type = unassigned DNA; note = donor_ee2b582
  misc_feature 1..23: note = RE
  misc_feature 24..25: note = Core
  misc_feature 26..50: note = LE
gcaaaagcgggggtgaccatagattaatgagatggtcacccccgcaccct

SEQ ID NO: 39684 - DNA, 50 bp, unidentified
  source 1..50: mol_type = unassigned DNA; note = donor_ee3213b
  misc_feature 1..23: note = RE
  misc_feature 24..25: note = Core
  misc_feature 26..50: note = LE
ccgcttgacatcagcattgggaagtcctacctttcaggcgtgggtctgac

SEQ ID NO: 39685 - DNA, 50 bp, unidentified
  source 1..50: mol_type = unassigned DNA; note = donor_ee3397c
  misc_feature 1..23: note = RE
  misc_feature 24..25: note = Core
  misc_feature 26..50: note = LE
ttgcggacggggcgggccatacgttatggaatggcccgccccacctctcc

SEQ ID NO: 39686 - DNA, 50 bp, unidentified
  source 1..50: mol_type = unassigned DNA; note = donor_ee39ab2
  misc_feature 1..24: note = RE
  misc_feature 25: note = Core
  misc_feature 26..50: note = LE
cccacttgacacccatagaagcatctgtgagagtgcgggtggttccgtct

SEQ ID NO: 39687 - DNA, 50 bp, unidentified
  source 1..50: mol_type = unassigned DNA; note = donor_ee3d81c
  misc_feature 1..22: note = RE
  misc_feature 23..25: note = Core
  misc_feature 26..50: note = LE
aatattgacaaactattagctggttcgtattataaggtcatccagatatg

SEQ ID NO: 39688 - DNA, 50 bp, unidentified
  source 1..50: mol_type = unassigned DNA; note = donor_ee408aa
  misc_feature 1..23: note = RE
  misc_feature 24..25: note = Core
  misc_feature 26..50: note = LE
gcgctcctccagcaacacagttgcttatctgattggaatctggcaccgta

SEQ ID NO: 39689 - DNA, 50 bp, unidentified
  source 1..50: mol_type = unassigned DNA; note = donor_ee42ea6
  misc_feature 1..23: note = RE
  misc_feature 24..25: note = Core
  misc_feature 26..50: note = LE
ccgcttgcgagctaagacggtatctcgtatgatgatcacgtcgaactttg

SEQ ID NO: 39690 - DNA, 50 bp, unidentified; identical to SEQ ID NO: 33995
  source 1..50: mol_type = unassigned DNA; note = donor_ee4799f
  misc_feature 1..23: note = RE
  misc_feature 24..25: note = Core
  misc_feature 26..50: note = LE

SEQ ID NO: 39691 - DNA, 50 bp, unidentified
  source 1..50: mol_type = unassigned DNA; note = donor_ee54db2
  misc_feature 1..23: note = RE
  misc_feature 24..25: note = Core
  misc_feature 26..50: note = LE
aaattaggtattaaagatagtacctcatatctttgacatagtttaaaatg

SEQ ID NO: 39692 - DNA, 50 bp, unidentified
  source 1..50: mol_type = unassigned DNA; note = donor_ee61864
  misc_feature 1..23: note = RE
  misc_feature 24..25: note = Core
  misc_feature 26..50: note = LE
gcattttggtctgcgattagacgacatggggtaatcgcgggagcgagtcg

SEQ ID NO: 39693 - DNA, 50 bp, unidentified
  source 1..50: mol_type = unassigned DNA; note = donor_ee63b73
  misc_feature 1..23: note = RE
  misc_feature 24..25: note = Core
  misc_feature 26..50: note = LE
agtcggcttgaccaagacggatacttgtctcatgatcccggcgctcatcg

SEQ ID NO: 39694 - DNA, 50 bp, unidentified; identical to SEQ ID NO: 35849
  source 1..50: mol_type = unassigned DNA; note = donor_ee63e30
  misc_feature 1..23: note = RE
  misc_feature 24..25: note = Core
  misc_feature 26..50: note = LE

SEQ ID NO: 39695 - DNA, 50 bp, unidentified
  source 1..50: mol_type = unassigned DNA; note = donor_ee69b30
  misc_feature 1..23: note = RE
  misc_feature 24..25: note = Core
  misc_feature 26..50: note = LE
atcgagagcgcttgacacggttgcttgtatgtagcaaagtagaccctggc

SEQ ID NO: 39696 - DNA, 50 bp, unidentified
  source 1..50: mol_type = unassigned DNA; note = donor_ee69c5b
  misc_feature 1..23: note = RE
  misc_feature 24..25: note = Core
  misc_feature 26..50: note = LE
gcatccacgggggcgtccacacacgatggggtggacgcccccgacggcat

SEQ ID NO: 39697 - DNA, 50 bp, unidentified
  source 1..50: mol_type = unassigned DNA; note = donor_ee6b95f
  misc_feature 1..23: note = RE
  misc_feature 24..25: note = Core
  misc_feature 26..50: note = LE
cttgcaacggggcaggccatacgttatggaatggtggcctgcccctttcc

SEQ ID NO: 39698 - DNA, 50 bp, unidentified
  source 1..50: mol_type = unassigned DNA; note = donor_ee6dc4f
  misc_feature 1..22: note = RE
  misc_feature 23..25: note = Core
  misc_feature 26..50: note = LE
aatgttgacaaactattagctggttcgtaatataaggttagccagataag

SEQ ID NO: 39699 - DNA, 50 bp, unidentified
  source 1..50: mol_type = unassigned DNA; note = donor_ee6f13e
  misc_feature 1..24: note = RE
  misc_feature 25: note = Core
  misc_feature 26..50: note = LE
ttgcaaaagggaggcgtccatatagaatgaaatggacgcctcccacctgg

SEQ ID NO: 39700 - DNA, 50 bp, unidentified; identical to SEQ ID NO: 35714
  source 1..50: mol_type = unassigned DNA; note = donor_ee72847
  misc_feature 1..20: note = RE
  misc_feature 21..25: note = Core
  misc_feature 26..50: note = LE

SEQ ID NO: 39701 - DNA, 50 bp, unidentified; identical to SEQ ID NO: 31263
  source 1..50: mol_type = unassigned DNA; note = donor_ee7e924
  misc_feature 1..23: note = RE
  misc_feature 24..25: note = Core
  misc_feature 26..50: note = LE

SEQ ID NO: 39702 - DNA, 50 bp, unidentified
  source 1..50: mol_type = unassigned DNA; note = donor_ee80c4e
  misc_feature 1..23: note = RE
  misc_feature 24..25: note = Core
  misc_feature 26..50: note = LE
gcaccgaccgaggtatccacacatgatggtgtggatacctcaccccgcaa

SEQ ID NO: 39703 - DNA, 50 bp, unidentified
  source 1..50: mol_type = unassigned DNA; note = donor_ee84766
  misc_feature 1..24: note = RE
  misc_feature 25: note = Core
  misc_feature 26..50: note = LE
tagcactctgcttttctacatagcagtaattatgtaagaaaagcatagtg

SEQ ID NO: 39704 - DNA, 50 bp, unidentified
  source 1..50: mol_type = unassigned DNA; note = donor_ee88c12
  misc_feature 1..23: note = RE
  misc_feature 24..25: note = Core
  misc_feature 26..50: note = LE
tcacttgacttcatatagttagtcttgtataatgtaaaccatagggagga

SEQ ID NO: 39705 - DNA, 50 bp, unidentified
  source 1..50: mol_type = unassigned DNA; note = donor_ee89b09
  misc_feature 1..23: note = RE
  misc_feature 24..25: note = Core
  misc_feature 26..50: note = LE
acgcttgacttttaagacagtcgcttgtatattaacaatagtgcttttta

SEQ ID NO: 39706 - DNA, 50 bp, unidentified; identical to SEQ ID NO: 35748
  source 1..50: mol_type = unassigned DNA; note = donor_ee8c044
  misc_feature 1..23: note = RE
  misc_feature 24..25: note = Core
  misc_feature 26..50: note = LE

SEQ ID NO: 39707 - DNA, 50 bp, unidentified
  source 1..50: mol_type = unassigned DNA; note = donor_ee9c911
  misc_feature 1..24: note = RE
  misc_feature 25: note = Core
  misc_feature 26..50: note = LE
tttactttttacacagttactgcgatgataataaagaggacacggcaggc

SEQ ID NO: 39708 - DNA, 50 bp, unidentified
  source 1..50: mol_type = unassigned DNA; note = donor_ee9f636
  misc_feature 1..23: note = RE
  misc_feature 24..25: note = Core
  misc_feature 26..50: note = LE
gcggcttgacaaacagagaggcaccgacttgtatgagtgtcagcggtccg

SEQ ID NO: 39709 - DNA, 50 bp, unidentified
  source 1..50: mol_type = unassigned DNA; note = donor_eeab081
  misc_feature 1..21: note = RE
  misc_feature 22..25: note = Core
  misc_feature 26..50: note = LE
ttgacgaggaacatagggacaccccgttaccttgctggtgaccccgtaag

SEQ ID NO: 39710 - DNA, 50 bp, unidentified
  source 1..50: mol_type = unassigned DNA; note = donor_eeb39ec
  misc_feature 1..22: note = RE
  misc_feature 23..25: note = Core
  misc_feature 26..50: note = LE
caaaaagggagccatccacacaggatggggtggatggctcctgcatcaat

SEQ ID NO: 39711 - DNA, 50 bp, unidentified
  source 1..50: mol_type = unassigned DNA; note = donor_eeb93d2
  misc_feature 1..24: note = RE
  misc_feature 25: note = Core
  misc_feature 26..50: note = LE
tgcattcacgcggcggatcatacatactgggatgatccgccgcttgatca

SEQ ID NO: 39712 - DNA, 50 bp, unidentified; identical to SEQ ID NO: 36450
  source 1..50: mol_type = unassigned DNA; note = donor_eec1cf2
  misc_feature 1..23: note = RE
  misc_feature 24..25: note = Core
  misc_feature 26..50: note = LE

SEQ ID NO: 39713 - DNA, 50 bp, unidentified
  source 1..50: mol_type = unassigned DNA; note = donor_eec513a
  misc_feature 1..24: note = RE
  misc_feature 25: note = Core
  misc_feature 26..50: note = LE
atgttgacagggtcacaccatatcagtcattatggtgtgaccggctcgat

SEQ ID NO: 39714 - DNA, 50 bp, unidentified; identical to SEQ ID NO: 31029
  source 1..50: mol_type = unassigned DNA; note = donor_eed1f28
  misc_feature 1..23: note = RE
  misc_feature 24..25: note = Core
  misc_feature 26..50: note = LE

SEQ ID NO: 39715 - DNA, 50 bp, unidentified; identical to SEQ ID NO: 32296
  source 1..50: mol_type = unassigned DNA; note = donor_eed87e9
  misc_feature 1..23: note = RE
  misc_feature 24..25: note = Core
  misc_feature 26..50: note = LE

SEQ ID NO: 39716 - DNA, 50 bp, unidentified
  source 1..50: mol_type = unassigned DNA; note = donor_eedbb47
  misc_feature 1..23: note = RE
  misc_feature 24..25: note = Core
  misc_feature 26..50: note = LE
tcttttaacttttaataactggtctcgtataataaagtcatagtttaaaa

SEQ ID NO: 39717 - DNA, 50 bp, unidentified
  source 1..50: mol_type = unassigned DNA; note = donor_eedffe3
  misc_feature 1..24: note = RE
  misc_feature 25: note = Core
  misc_feature 26..50: note = LE
tgcagggaaacgccggaccatacataatgggatggtccgccgcttgatta

SEQ ID NO: 39718 - DNA, 50 bp, unidentified
  source 1..50: mol_type = unassigned DNA; note = donor_eef58fc
  misc_feature 1..23: note = RE
  misc_feature 24..25: note = Core
  misc_feature 26..50: note = LE
tcatttgacttttttatagctagctcgtataatattagtagttcattaat

SEQ ID NO: 39719 - DNA, 50 bp, unidentified
  source 1..50: mol_type = unassigned DNA; note = donor_eef7ed0
  misc_feature 1..24: note = RE
  misc_feature 25: note = Core
  misc_feature 26..50: note = LE
tgcaaacggggaggagtccctatacaatgaaagggactcctcccctccta

SEQ ID NO: 39720 - DNA, 50 bp, unidentified
  source 1..50: mol_type = unassigned DNA; note = donor_ef03ac5
  misc_feature 1..23: note = RE
  misc_feature 24..25: note = Core
  misc_feature 26..50: note = LE
actcttgacaaaacttagcaggtctattacaataagttttggttggaagc

SEQ ID NO: 39721 - DNA, 50 bp, unidentified
  source 1..50: mol_type = unassigned DNA; note = donor_ef05db9
  misc_feature 1..23: note = RE
  misc_feature 24..25: note = Core
  misc_feature 26..50: note = LE
ctcgggggtagatgacacggtatcttgtatgtcgacgccccgccagattg

SEQ ID NO: 39722 - DNA, 50 bp, unidentified
  source 1..50: mol_type = unassigned DNA; note = donor_ef05f18
  misc_feature 1..24: note = RE
  misc_feature 25: note = Core
  misc_feature 26..50: note = LE
tgcaaaaaggagggggaccatagataatgagatggtccccctccacccta

SEQ ID NO: 39723 - DNA, 50 bp, unidentified
  source 1..50: mol_type = unassigned DNA; note = donor_ef087ef
  misc_feature 1..23: note = RE
  misc_feature 24..25: note = Core
  misc_feature 26..50: note = LE
gacccaaaccggccgattagagaagatggggtaatcggcctagcgttctt

SEQ ID NO: 39724 - DNA, 50 bp, unidentified
  source 1..50: mol_type = unassigned DNA; note = donor_ef0c2f5
  misc_feature 1..21: note = RE
  misc_feature 22..25: note = Core
  misc_feature 26..50: note = LE
ctgcttgacatactccaagacagtcctagtatcttggatacgagcactgt

SEQ ID NO: 39725 - DNA, 50 bp, unidentified
  source 1..50: mol_type = unassigned DNA; note = donor_ef1d9b1
  misc_feature 1..24: note = RE
  misc_feature 25: note = Core
  misc_feature 26..50: note = LE
ttgcaatcaggcggggtccatatacaatggtatggaccccgccgcccaag

SEQ ID NO: 39726 - DNA, 50 bp, unidentified
  source 1..50: mol_type = unassigned DNA; note = donor_ef2052b
  misc_feature 1..23: note = RE
  misc_feature 24..25: note = Core
  misc_feature 26..50: note = LE
gactcgtcgaggcccgttacagaagatggggtaacgggcctcgcccgagc

SEQ ID NO: 39727 - DNA, 50 bp, unidentified
  source 1..50: mol_type = unassigned DNA; note = donor_ef2501a
  misc_feature 1..23: note = RE
  misc_feature 24..25: note = Core
  misc_feature 26..50: note = LE
taaacgggcgctaaagacagttgcttgtatctcgaaagtggattactatg

SEQ ID NO: 39728 - DNA, 50 bp, unidentified
  source 1..50: mol_type = unassigned DNA; note = donor_ef2e00d
  misc_feature 1..24: note = RE
  misc_feature 25: note = Core
  misc_feature 26..50: note = LE
ttatttggtgggaaacatagaatgctctaagtttgcaatatgaattgcaa

SEQ ID NO: 39729 - DNA, 50 bp, unidentified; identical to SEQ ID NO: 30869
  source 1..50: mol_type = unassigned DNA; note = donor_ef31afd
  misc_feature 1..24: note = RE
  misc_feature 25: note = Core
  misc_feature 26..50: note = LE

SEQ ID NO: 39730 - DNA, 50 bp, unidentified
  source 1..50: mol_type = unassigned DNA; note = donor_ef36ce2
  misc_feature 1..23: note = RE
  misc_feature 24..25: note = Core
  misc_feature 26..50: note = LE
cacttacttgaccaacacggatacttgtcttatgactttcgttgccgaac

SEQ ID NO: 39731 - DNA, 50 bp, unidentified; identical to SEQ ID NO: 39333
  source 1..50: mol_type = unassigned DNA; note = donor_ef3cadc
  misc_feature 1..23: note = RE
  misc_feature 24..25: note = Core
  misc_feature 26..50: note = LE

SEQ ID NO: 39732 - DNA, 50 bp, unidentified
  source 1..50: mol_type = unassigned DNA; note = donor_ef41e0e
  misc_feature 1..23: note = RE
  misc_feature 24..25: note = Core
  misc_feature 26..50: note = LE
gagattgacaagaatcatagaatcttgtatggtttttcctggctcctctc

SEQ ID NO: 39733 - DNA, 50 bp, unidentified
  source 1..50: mol_type = unassigned DNA; note = donor_ef42674
  misc_feature 1..23: note = RE
  misc_feature 24..25: note = Core
  misc_feature 26..50: note = LE
gatttaccgagggggtccatataagatgtatggactccctctccttgagg

SEQ ID NO: 39734 - DNA, 50 bp, unidentified
  source 1..50: mol_type = unassigned DNA; note = donor_ef447d7
  misc_feature 1..24: note = RE
  misc_feature 25: note = Core
  misc_feature 26..50: note = LE
tgcaccgcacggccggaccatacataatgggatggtccggccgtgctcca

SEQ ID NO: 39735 - DNA, 50 bp, unidentified
  source 1..50: mol_type = unassigned DNA; note = donor_ef45347
  misc_feature 1..24: note = RE
  misc_feature 25: note = Core
  misc_feature 26..50: note = LE
cggcaccttgacacagaggggagcctacttgttgacttgcggtaggaccg

SEQ ID NO: 39736 - DNA, 50 bp, unidentified
  source 1..50: mol_type = unassigned DNA; note = donor_ef4de79
  misc_feature 1..24: note = RE
  misc_feature 25: note = Core
  misc_feature 26..50: note = LE
tgccaaatgggaggcgtccatacataatggaatggacgcctcccgtccta

SEQ ID NO: 39737 - DNA, 50 bp, unidentified
  source 1..50: mol_type = unassigned DNA; note = donor_ef52a3e
  misc_feature 1..23: note = RE
  misc_feature 24..25: note = Core
  misc_feature 26..50: note = LE
gactaactggatgcgattagacaacatggggtaatcgcggcgcggttcac

SEQ ID NO: 39738 - DNA, 50 bp, unidentified
  source 1..50: mol_type = unassigned DNA; note = donor_ef553ce
  misc_feature 1..23: note = RE
  misc_feature 24..25: note = Core
  misc_feature 26..50: note = LE
ctctggcttgaccaacacggatacttgtcttatgacttttgctgtcgaag

SEQ ID NO: 39739 - DNA, 50 bp, unidentified
  source 1..50: mol_type = unassigned DNA; note = donor_ef5b71d
  misc_feature 1..23: note = RE
  misc_feature 24..25: note = Core
  misc_feature 26..50: note = LE
tcacttgaattttatatagttagctggtatattgtaattgacccatctaa

SEQ ID NO: 39740 - DNA, 50 bp, unidentified
  source 1..50: mol_type = unassigned DNA; note = donor_ef5bf53
  misc_feature 1..23: note = RE
  misc_feature 24..25: note = Core
  misc_feature 26..50: note = LE
gcattgaagggggcatccaaacatgatggagtggatgcccccacccgacg

SEQ ID NO: 39741 - DNA, 50 bp, unidentified
  source 1..50: mol_type = unassigned DNA; note = donor_ef5d2ed
  misc_feature 1..22: note = RE
  misc_feature 23..25: note = Core
  misc_feature 26..50: note = LE
tgccataggcggcgtccacatatgatgatgtggacgccgctgcgggcgaa

SEQ ID NO: 39742 - DNA, 50 bp, unidentified
  source 1..50: mol_type = unassigned DNA; note = donor_ef5d909
  misc_feature 1..22: note = RE
  misc_feature 23..25: note = Core
  misc_feature 26..50: note = LE
aagcttgacaaacattagctggtttcgtattatcaggtcagcaagtgatt

SEQ ID NO: 39743 - DNA, 50 bp, unidentified
  source 1..50: mol_type = unassigned DNA; note = donor_ef69efb
  misc_feature 1..24: note = RE
  misc_feature 25: note = Core
  misc_feature 26..50: note = LE
cttggcatagggggcgtccatgtataatggtatggacgcccccactctgc

SEQ ID NO: 39744 - DNA, 50 bp, unidentified; identical to SEQ ID NO: 33672
  source 1..50: mol_type = unassigned DNA; note = donor_ef760bf
  misc_feature 1..23: note = RE
  misc_feature 24..25: note = Core
  misc_feature 26..50: note = LE

SEQ ID NO: 39745 - DNA, 50 bp, unidentified
  source 1..50: mol_type = unassigned DNA; note = donor_ef7c37c
  misc_feature 1..22: note = RE
  misc_feature 23..25: note = Core
  misc_feature 26..50: note = LE
caatacgggaggagaccatatatgatgtgatggtctcctcccaaattcgg

SEQ ID NO: 39746 - DNA, 50 bp, unidentified
  source 1..50: mol_type = unassigned DNA; note = donor_ef8ba2d
  misc_feature 1..23: note = RE
  misc_feature 24..25: note = Core
  misc_feature 26..50: note = LE
tgacatccaaactcctgggatgtctaatgagagttagcgggtctgcggcg

SEQ ID NO: 39747 - DNA, 50 bp, unidentified; identical to SEQ ID NO: 30451
  source 1..50: mol_type = unassigned DNA; note = donor_ef8c15a
  misc_feature 1..23: note = RE
  misc_feature 24..25: note = Core
  misc_feature 26..50: note = LE

SEQ ID NO: 39748 - DNA, 50 bp, unidentified
  source 1..50: mol_type = unassigned DNA; note = donor_ef9a553
  misc_feature 1..24: note = RE
  misc_feature 25: note = Core
  misc_feature 26..50: note = LE
tgcagaaatcaggctgaccatacataatgagatggtcagcctgaccgaaa

SEQ ID NO: 39749 - DNA, 50 bp, unidentified
  source 1..50: mol_type = unassigned DNA; note = donor_ef9d5e7
  misc_feature 1..23: note = RE
  misc_feature 24..25: note = Core
  misc_feature 26..50: note = LE
gcatcacgggcggcaaccacagaagatggggcggttgccgcccccccgga

SEQ ID NO: 39750 - DNA, 50 bp, unidentified
  source 1..50: mol_type = unassigned DNA; note = donor_efa15d6
  misc_feature 1..22: note = RE
  misc_feature 23..25: note = Core
  misc_feature 26..50: note = LE
attgacttttcttatagtttgtcttatattatatttagtgcagttagcta

SEQ ID NO: 39751 - DNA, 50 bp, unidentified
  source 1..50: mol_type = unassigned DNA; note = donor_efabd76
  misc_feature 1..23: note = RE
  misc_feature 24..25: note = Core
  misc_feature 26..50: note = LE
cttgacccgaacttccccatgtgagattccatggggaggtggatagcgac

SEQ ID NO: 39752 - DNA, 50 bp, unidentified
  source 1..50: mol_type = unassigned DNA; note = donor_efafc15
  misc_feature 1..24: note = RE
  misc_feature 25: note = Core
  misc_feature 26..50: note = LE
tgcagtccggcggcggaccatacataatgagatggtccgccgccgaatag

SEQ ID NO: 39753 - DNA, 50 bp, unidentified
  source 1..50: mol_type = unassigned DNA; note = donor_efbaba7
  misc_feature 1..23: note = RE
  misc_feature 24..25: note = Core
  misc_feature 26..50: note = LE
gcaagccgggggccgtccacatatgttggggtggacggccccctacggca

SEQ ID NO: 39754 - DNA, 50 bp, unidentified; identical to SEQ ID NO: 31737
  source 1..50: mol_type = unassigned DNA; note = donor_efbc462
  misc_feature 1..23: note = RE
  misc_feature 24..25: note = Core
  misc_feature 26..50: note = LE

SEQ ID NO: 39755 - DNA, 50 bp, unidentified
  source 1..50: mol_type = unassigned DNA; note = donor_efbe2e2
  misc_feature 1..24: note = RE
  misc_feature 25: note = Core
  misc_feature 26..50: note = LE
tgcgacaaagcggcggaccatacataatgggatggtccgccgcttttacc

SEQ ID NO: 39756 - DNA, 50 bp, unidentified
  source 1..50: mol_type = unassigned DNA; note = donor_efca7b4
  misc_feature 1..24: note = RE
  misc_feature 25: note = Core
  misc_feature 26..50: note = LE
gacgcccttgacacagaggggagcctacttgttgtatggaggtacggctc

SEQ ID NO: 39757 - DNA, 50 bp, unidentified
  source 1..50: mol_type = unassigned DNA; note = donor_efd0c4e
  misc_feature 1..23: note = RE
  misc_feature 24..25: note = Core
  misc_feature 26..50: note = LE
gacgagatcgacccctgggatgtctaatgggggtcgaccatctcgttcgc

SEQ ID NO: 39758 - DNA, 50 bp, unidentified
  source 1..50: mol_type = unassigned DNA; note = donor_efd2047
  misc_feature 1..24: note = RE
  misc_feature 25: note = Core
  misc_feature 26..50: note = LE
tgcaaaagtgggggtgaccatagataatgagatggtcacccccacaccca

SEQ ID NO: 39759 - DNA, 50 bp, unidentified
  source 1..50: mol_type = unassigned DNA; note = donor_efd2955
  misc_feature 1..23: note = RE
  misc_feature 24..25: note = Core
  misc_feature 26..50: note = LE
gactaatcgaggcccgttacagaagatggagtaacgggcccggtctgccc

SEQ ID NO: 39760 - DNA, 50 bp, unidentified
  source 1..50: mol_type = unassigned DNA; note = donor_efd64e0
  misc_feature 1..23: note = RE
  misc_feature 24..25: note = Core
  misc_feature 26..50: note = LE
tgtaaatacgtggattccatatacatgatgtatggaatccactccctcct

SEQ ID NO: 39761 - DNA, 50 bp, unidentified
  source 1..50: mol_type = unassigned DNA; note = donor_efdb680
  misc_feature 1..23: note = RE
  misc_feature 24..25: note = Core
  misc_feature 26..50: note = LE
acccttgacacatgagacagtcgcctgtatctgcgaggtgctggtgcata

SEQ ID NO: 39762 - DNA, 50 bp, unidentified
  source 1..50: mol_type = unassigned DNA; note = donor_efe2eab
  misc_feature 1..24: note = RE
  misc_feature 25: note = Core
  misc_feature 26..50: note = LE
cgggcttgactttttatttgcaggcctgttactatatatttgccccttga

SEQ ID NO: 39763 - DNA, 50 bp, unidentified; identical to SEQ ID NO: 30783
  source 1..50: mol_type = unassigned DNA; note = donor_efeae75
  misc_feature 1..21: note = RE
  misc_feature 22..25: note = Core
  misc_feature 26..50: note = LE

SEQ ID NO: 39764 - DNA, 50 bp, unidentified
  source 1..50: mol_type = unassigned DNA; note = donor_eff4ef5
  misc_feature 1..24: note = RE
  misc_feature 25: note = Core
  misc_feature 26..50: note = LE
tgcaacgcacggccggaccatacataatgggatggtccggccgtgctcca

SEQ ID NO: 39765 - DNA, 50 bp, unidentified
  source 1..50: mol_type = unassigned DNA; note = donor_eff7310
  misc_feature 1..24: note = RE
  misc_feature 25: note = Core
  misc_feature 26..50: note = LE
gagttgacaacctatataggaacacattacgttgttagcagttccacccc

SEQ ID NO: 39766 - DNA, 50 bp, unidentified
  source 1..50: mol_type = unassigned DNA; note = donor_eff9974
  misc_feature 1..24: note = RE
  misc_feature 25: note = Core
  misc_feature 26..50: note = LE
tcagcttgaccaaacccataggggccccattaccgtcttgttggccccgc

SEQ ID NO: 39767 - DNA, 50 bp, unidentified
  source 1..50: mol_type = unassigned DNA; note = donor_effeb0b
  misc_feature 1..23: note = RE
  misc_feature 24..25: note = Core
  misc_feature 26..50: note = LE
gcatcaacgggggcatccatacatgatggcgtggatgccccctcccgacg

SEQ ID NO: 39768 - DNA, 50 bp, unidentified; identical to SEQ ID NO: 30713
  source 1..50: mol_type = unassigned DNA; note = donor_f00384c
  misc_feature 1..22: note = RE
  misc_feature 23..25: note = Core
  misc_feature 26..50: note = LE

SEQ ID NO: 39769 - DNA, 50 bp, unidentified
  source 1..50: mol_type = unassigned DNA; note = donor_f006039
  misc_feature 1..23: note = RE
  misc_feature 24..25: note = Core
  misc_feature 26..50: note = LE
cggcttgacgaaaaccatagaaccttgtatggttgaggggttggggtgga

SEQ ID NO: 39770 - DNA, 50 bp, unidentified
  source 1..50: mol_type = unassigned DNA; note = donor_f017d2f
  misc_feature 1..23: note = RE
  misc_feature 24..25: note = Core
  misc_feature 26..50: note = LE
cgacgccttgacacagagaggtgccaacttgtttgattggtggcggtgat

SEQ ID NO: 39771 - DNA, 50 bp, unidentified; identical to SEQ ID NO: 32736
  source 1..50: mol_type = unassigned DNA; note = donor_f0194ec
  misc_feature 1..23: note = RE
  misc_feature 24..25: note = Core
  misc_feature 26..50: note = LE

SEQ ID NO: 39772 - DNA, 50 bp, unidentified
  source 1..50: mol_type = unassigned DNA; note = donor_f026421
  misc_feature 1..23: note = RE
  misc_feature 24..25: note = Core
  misc_feature 26..50: note = LE
gcaaccgcgggccgttccacatatgatgtggtggaacggcccgctccttc

SEQ ID NO: 39773 - DNA, 50 bp, unidentified
  source 1..50: mol_type = unassigned DNA; note = donor_f02d1d4
  misc_feature 1..24: note = RE
  misc_feature 25: note = Core
  misc_feature 26..50: note = LE
tgcgcaatgggacgcgttcatacataatggaatgaacgcgtcccaccccg

SEQ ID NO: 39774 - DNA, 50 bp, unidentified
  source 1..50: mol_type = unassigned DNA; note = donor_f034bdb
  misc_feature 1..24: note = RE
  misc_feature 25: note = Core
  misc_feature 26..50: note = LE
tgcaaaccgggaggtgtccatatacaatgggatggacacctcccacctat

SEQ ID NO: 39775 - DNA, 50 bp, unidentified
  source 1..50: mol_type = unassigned DNA; note = donor_f0398ad
  misc_feature 1..23: note = RE
  misc_feature 24..25: note = Core
  misc_feature 26..50: note = LE
gacttgacaagaccctatgggatctgatataccccgttgtggaggccgat

SEQ ID NO: 39776 - DNA, 50 bp, unidentified
  source 1..50: mol_type = unassigned DNA; note = donor_f03f721
  misc_feature 1..24: note = RE
  misc_feature 25: note = Core
  misc_feature 26..50: note = LE
tgcaaaaacggggcggaccatacataatgatatggtccgccccaacctca

SEQ ID NO: 39777 - DNA, 50 bp, unidentified
  source 1..50: mol_type = unassigned DNA; note = donor_f04740e
  misc_feature 1..22: note = RE
  misc_feature 23..25: note = Core
  misc_feature 26..50: note = LE
cggcttgacagcatcattgggaatccatacctttctacgtgggtccgttc

SEQ ID NO: 39778 - DNA, 50 bp, unidentified
  source 1..50: mol_type = unassigned DNA; note = donor_f04895f
  misc_feature 1..21: note = RE
  misc_feature 22..25: note = Core
  misc_feature 26..50: note = LE
cacgaggttgacacagggggtgtcactagggcaccatctttctcatgggc

SEQ ID NO: 39779 - DNA, 50 bp, unidentified
  source 1..50: mol_type = unassigned DNA; note = donor_f04be0a
  misc_feature 1..22: note = RE
  misc_feature 23..25: note = Core
  misc_feature 26..50: note = LE
accccgaacggccgattagagaagatggggtaatcggccggcggcttgtg

SEQ ID NO: 39780 - DNA, 50 bp, unidentified
  source 1..50: mol_type = unassigned DNA; note = donor_f04c798
  misc_feature 1..23: note = RE
  misc_feature 24..25: note = Core
  misc_feature 26..50: note = LE
agggaggaattaaatatagttgactcctaccattaattcctgtataaata

SEQ ID NO: 39781 - DNA, 50 bp, unidentified
  source 1..50: mol_type = unassigned DNA; note = donor_f058212
  misc_feature 1..23: note = RE
  misc_feature 24..25: note = Core
  misc_feature 26..50: note = LE
ggacttgacaagcgataccgtatctcgtatatttggagtgtccgattcct

SEQ ID NO: 39782 - DNA, 50 bp, unidentified
  source 1..50: mol_type = unassigned DNA; note = donor_f05af25
  misc_feature 1..23: note = RE
  misc_feature 24..25: note = Core
  misc_feature 26..50: note = LE
gctttcaatggggcgtccacacacgatggggtggacgcccctcgacggta

SEQ ID NO: 39783 - DNA, 50 bp, unidentified
  source 1..50: mol_type = unassigned DNA; note = donor_f05ffb6
  misc_feature 1..23: note = RE
  misc_feature 24..25: note = Core
  misc_feature 26..50: note = LE
gacaccctaagcacctgggatgtctaatcagtcttggcgagtctgcggac

SEQ ID NO: 39784 - DNA, 50 bp, unidentified; identical to SEQ ID NO: 32970
  source 1..50: mol_type = unassigned DNA; note = donor_f060b17
  misc_feature 1..24: note = RE
  misc_feature 25: note = Core
  misc_feature 26..50: note = LE

SEQ ID NO: 39785 - DNA, 50 bp, unidentified
  source 1..50: mol_type = unassigned DNA; note = donor_f06254c
  misc_feature 1..23: note = RE
  misc_feature 24..25: note = Core
  misc_feature 26..50: note = LE
gcaaaatgggaggagaccatatacgatgagatggtctcctcccccctttt

SEQ ID NO: 39786 - DNA, 50 bp, unidentified
  source 1..50: mol_type = unassigned DNA; note = donor_f0670b8
  misc_feature 1..23: note = RE
  misc_feature 24..25: note = Core
  misc_feature 26..50: note = LE
cctcttgactttttatttgcaggctactacaatgtatatatggttagtaa

SEQ ID NO: 39787 - DNA, 50 bp, unidentified
  source 1..50: mol_type = unassigned DNA; note = donor_f07af12
  misc_feature 1..23: note = RE
  misc_feature 24..25: note = Core
  misc_feature 26..50: note = LE
tgacattcaagctcctgggatgtctaatgagagctagcgagtcggccatc

SEQ ID NO: 39788 - DNA, 50 bp, unidentified
  source 1..50: mol_type = unassigned DNA; note = donor_f07dac0
  misc_feature 1..23: note = RE
  misc_feature 24..25: note = Core
  misc_feature 26..50: note = LE
tgacatctaagcccctgggatgtctaatgagagctaccgggtcgccatcc

SEQ ID NO: 39789 - DNA, 50 bp, unidentified; identical to SEQ ID NO: 33714
  source 1..50: mol_type = unassigned DNA; note = donor_f07e8f3
  misc_feature 1..24: note = RE
  misc_feature 25: note = Core
  misc_feature 26..50: note = LE

SEQ ID NO: 39790 - DNA, 50 bp, unidentified
  source 1..50: mol_type = unassigned DNA; note = donor_f097097
  misc_feature 1..20: note = RE
  misc_feature 21..25: note = Core
  misc_feature 26..50: note = LE
gcttgacaaccactgggacacccccgttacctttttcgtagttcctgttc

SEQ ID NO: 39791 - DNA, 50 bp, unidentified
  source 1..50: mol_type = unassigned DNA; note = donor_f0a3f7e
  misc_feature 1..23: note = RE
  misc_feature 24..25: note = Core
  misc_feature 26..50: note = LE
gcaaaaaagggggggaccatagattaatgagatggtcacccccaccctgt

SEQ ID NO: 39792 - DNA, 50 bp, unidentified; identical to SEQ ID NO: 37867
  source 1..50: mol_type = unassigned DNA; note = donor_f0bd37c
  misc_feature 1..23: note = RE
  misc_feature 24..25: note = Core
  misc_feature 26..50: note = LE

SEQ ID NO: 39793 - DNA, 50 bp, unidentified
  source 1..50: mol_type = unassigned DNA; note = donor_f0c4df0
  misc_feature 1..23: note = RE
  misc_feature 24..25: note = Core
  misc_feature 26..50: note = LE
ttacttgactttttatttacaggctactacaatatatttataggttataa

SEQ ID NO: 39794 - DNA, 50 bp, unidentified; identical to SEQ ID NO: 37844
  source 1..50: mol_type = unassigned DNA; note = donor_f0c8f36
  misc_feature 1..24: note = RE
  misc_feature 25: note = Core
  misc_feature 26..50: note = LE

SEQ ID NO: 39795 - DNA, 50 bp, unidentified
  source 1..50: mol_type = unassigned DNA; note = donor_f0d3679
  misc_feature 1..23: note = RE
  misc_feature 24..25: note = Core
  misc_feature 26..50: note = LE
gaccagttggagacaaggggtgtctaatgggggtggatgactcgcccgtt

SEQ ID NO: 39796 - DNA, 50 bp, unidentified
  source 1..50: mol_type = unassigned DNA; note = donor_f0d6025
  misc_feature 1..19: note = RE
  misc_feature 20..25: note = Core
  misc_feature 26..50: note = LE
acgttctgaaaagtaacttcagggcccgccctgaagttacttttcagaac

SEQ ID NO: 39797 - DNA, 50 bp, unidentified
  source 1..50: mol_type = unassigned DNA; note = donor_f113f15
  misc_feature 1..22: note = RE
  misc_feature 23..25: note = Core
  misc_feature 26..50: note = LE
acctcaccacgccgaatagagaagatgggatattcggctttgcgtctcag

SEQ ID NO: 39798 - DNA, 50 bp, unidentified
  source 1..50: mol_type = unassigned DNA; note = donor_f114870
  misc_feature 1..23: note = RE
  misc_feature 24..25: note = Core
  misc_feature 26..50: note = LE
gactaacccaggcccgtgacagaagatggggtcacgggccgacggatgga

SEQ ID NO: 39799 - DNA, 50 bp, unidentified
  source 1..50: mol_type = unassigned DNA; note = donor_f118c2b
  misc_feature 1..23: note = RE
  misc_feature 24..25: note = Core
  misc_feature 26..50: note = LE
tgctacgcgggccgttccacatatgatgacgtggaacggcccgcacacgg

SEQ ID NO: 39800 - DNA, 50 bp, unidentified
  source 1..50: mol_type = unassigned DNA; note = donor_f120d18
  misc_feature 1..23: note = RE
  misc_feature 24..25: note = Core
  misc_feature 26..50: note = LE
tgacatccaacctccagggatgtctaatgggaggtaccgggtcagccgcg

SEQ ID NO: 39801 - DNA, 50 bp, unidentified
  source 1..50: mol_type = unassigned DNA; note = donor_f123640
  misc_feature 1..23: note = RE
  misc_feature 24..25: note = Core
  misc_feature 26..50: note = LE
ttgccgacggggcgggccatacgttatggaatggcccgccccaactcccc

SEQ ID NO: 39802 - DNA, 50 bp, unidentified
  source 1..50: mol_type = unassigned DNA; note = donor_f12ba84
  misc_feature 1..23: note = RE
  misc_feature 24..25: note = Core
  misc_feature 26..50: note = LE
gacgaccaagggcccattacagaagatgccgtaatgggcttgcacccggg

SEQ ID NO: 39803 - DNA, 50 bp, unidentified
  source 1..50: mol_type = unassigned DNA; note = donor_f12bf51
  misc_feature 1..22: note = RE
  misc_feature 23..25: note = Core
  misc_feature 26..50: note = LE
acaacaaccacccgtgggatgtctaatgggggccgagtgggccgtttcgt

SEQ ID NO: 39804 - DNA, 50 bp, unidentified
  source 1..50: mol_type = unassigned DNA; note = donor_f12d786
  misc_feature 1..23: note = RE
  misc_feature 24..25: note = Core
  misc_feature 26..50: note = LE
cctcgttgacaaaaccccatacaagatgctatggggcgggcggcggcgag

SEQ ID NO: 39805 - DNA, 50 bp, unidentified; identical to SEQ ID NO: 34994
  source 1..50: mol_type = unassigned DNA; note = donor_f134eac
  misc_feature 1..24: note = RE
  misc_feature 25: note = Core
  misc_feature 26..50: note = LE

SEQ ID NO: 39806 - DNA, 50 bp, unidentified
  source 1..50: mol_type = unassigned DNA; note = donor_f139bd0
  misc_feature 1..23: note = RE
  misc_feature 24..25: note = Core
  misc_feature 26..50: note = LE
acgcttgcggcggaacatagaatcttgtatgttctgccgtggcaagcgta

SEQ ID NO: 39807 - DNA, 50 bp, unidentified
  source 1..50: mol_type = unassigned DNA; note = donor_f14477d
  misc_feature 1..23: note = RE
  misc_feature 24..25: note = Core
  misc_feature 26..50: note = LE
gacgtccccaccgcgattagacaacatggggtaatcgcgggagcgagtcg

SEQ ID NO: 39808 - DNA, 50 bp, unidentified; identical to SEQ ID NO: 36966
  source 1..50: mol_type = unassigned DNA; note = donor_f148aab
  misc_feature 1..24: note = RE
  misc_feature 25: note = Core
  misc_feature 26..50: note = LE

SEQ ID NO: 39809 - DNA, 50 bp, unidentified
  source 1..50: mol_type = unassigned DNA; note = donor_f14a408
  misc_feature 1..22: note = RE
  misc_feature 23..25: note = Core
  misc_feature 26..50: note = LE
cgcccgcggggccgtctatacatgatggggaagacggccccgctccgaac

SEQ ID NO: 39810 - DNA, 50 bp, unidentified
  source 1..50: mol_type = unassigned DNA; note = donor_f14c517
  misc_feature 1..24: note = RE
  misc_feature 25: note = Core
  misc_feature 26..50: note = LE
ccaccccttgacataaaggggagcctacttaagactgggcggcaggaccg

SEQ ID NO: 39811 - DNA, 50 bp, unidentified
  source 1..50: mol_type = unassigned DNA; note = donor_f151ea7
  misc_feature 1..24: note = RE
  misc_feature 25: note = Core
  misc_feature 26..50: note = LE
tgcaaaaacgggggtgaccatagataatgggatggtcacccccacctcgc

SEQ ID NO: 39812 - DNA, 50 bp, unidentified
  source 1..50: mol_type = unassigned DNA; note = donor_f1586ee
  misc_feature 1..23: note = RE
  misc_feature 24..25: note = Core
  misc_feature 26..50: note = LE
gtacttgacatttattagcaaggttcgtacaatataagagtagggattac

SEQ ID NO: 39813 - DNA, 50 bp, unidentified
  source 1..50: mol_type = unassigned DNA; note = donor_f15bd80
  misc_feature 1..23: note = RE
  misc_feature 24..25: note = Core
  misc_feature 26..50: note = LE
aaaccttggccgtgtcctagatttcatttagatttgcaccagtcaaaaat

SEQ ID NO: 39814 - DNA, 50 bp, unidentified
  source 1..50: mol_type = unassigned DNA; note = donor_f166b2e
  misc_feature 1..24: note = RE
  misc_feature 25: note = Core
  misc_feature 26..50: note = LE
tcctattgacttcttatttgcaggcctgttacaatatatttgcttgatgg

SEQ ID NO: 39815 - DNA, 50 bp, unidentified
  source 1..50: mol_type = unassigned DNA; note = donor_f174fbb
  misc_feature 1..21: note = RE
  misc_feature 22..25: note = Core
  misc_feature 26..50: note = LE
cttgaggttttgggacaagttcttagacaaaatggcgccccttctgggct

SEQ ID NO: 39816 - DNA, 50 bp, unidentified
  source 1..50: mol_type = unassigned DNA; note = donor_f176ab6
  misc_feature 1..24: note = RE
  misc_feature 25: note = Core
  misc_feature 26..50: note = LE
gcttgacaaaggggagtccatgtagaatgatatggactcccctaccaaac

SEQ ID NO: 39817 - DNA, 50 bp, unidentified
  source 1..50: mol_type = unassigned DNA; note = donor_f1771e0
  misc_feature 1..24: note = RE
  misc_feature 25: note = Core
  misc_feature 26..50: note = LE
tgcagtcgtgcggcggaccatacataatgagatggtccgccgcgcagtca

SEQ ID NO: 39818 - DNA, 50 bp, unidentified
  source 1..50: mol_type = unassigned DNA; note = donor_f180ad8
  misc_feature 1..24: note = RE
  misc_feature 25: note = Core
  misc_feature 26..50: note = LE
tgcaacgcgcggccggaccatacataatgggatggtccggccgtgctccg

SEQ ID NO: 39819 - DNA, 50 bp, unidentified
  source 1..50: mol_type = unassigned DNA; note = donor_f18ad75
  misc_feature 1..23: note = RE
  misc_feature 24..25: note = Core
  misc_feature 26..50: note = LE
agcattgcccacaaccatagaatcttgtatggtgatactcgaaggggtgg

SEQ ID NO: 39820 - DNA, 50 bp, unidentified; identical to SEQ ID NO: 31434
  source 1..50: mol_type = unassigned DNA; note = donor_f18e2b2
  misc_feature 1..24: note = RE
  misc_feature 25: note = Core
  misc_feature 26..50: note = LE

SEQ ID NO: 39821 - DNA, 50 bp, unidentified
  source 1..50: mol_type = unassigned DNA; note = donor_f18f713
  misc_feature 1..23: note = RE
  misc_feature 24..25: note = Core
  misc_feature 26..50: note = LE
atgcttgaccggaaagagagaatcttgtatgttgctttctgaggcgtgag

SEQ ID NO: 39822 - DNA, 50 bp, unidentified; identical to SEQ ID NO: 30383
  source 1..50: mol_type = unassigned DNA; note = donor_f192aab
  misc_feature 1..23: note = RE
  misc_feature 24..25: note = Core
  misc_feature 26..50: note = LE

SEQ ID NO: 39823 - DNA, 50 bp, unidentified
  source 1..50: mol_type = unassigned DNA; note = donor_f19955c
  misc_feature 1..23: note = RE
  misc_feature 24..25: note = Core
  misc_feature 26..50: note = LE
tgacatttcagctcctgggatgtctaatcagttctgggagtggccatccg

SEQ ID NO: 39824 - DNA, 50 bp, unidentified
  source 1..50: mol_type = unassigned DNA; note = donor_f19a0fc
  misc_feature 1..22: note = RE
  misc_feature 23..25: note = Core
  misc_feature 26..50: note = LE
tgcaaacgggacgcgttcatatagaattgaaatgaacgcgtcccacccgt

SEQ ID NO: 39825 - DNA, 50 bp, unidentified
  source 1..50: mol_type = unassigned DNA; note = donor_f1aecba
  misc_feature 1..23: note = RE
  misc_feature 24..25: note = Core
  misc_feature 26..50: note = LE
caaagcgggcgccatccacacaggatggggtggatggctcccgctcccgg

SEQ ID NO: 39826 - DNA, 50 bp, unidentified
  source 1..50: mol_type = unassigned DNA; note = donor_f1b3abf
  misc_feature 1..24: note = RE
  misc_feature 25: note = Core
  misc_feature 26..50: note = LE
tgcaaacgaggaggagtccatatacaatgggatggacccctcctcaccta

SEQ ID NO: 39827 - DNA, 50 bp, unidentified; identical to SEQ ID NO: 37861
  source 1..50: mol_type = unassigned DNA; note = donor_f1b754d
  misc_feature 1..23: note = RE
  misc_feature 24..25: note = Core
  misc_feature 26..50: note = LE

SEQ ID NO: 39828 - DNA, 50 bp, unidentified
  source 1..50: mol_type = unassigned DNA; note = donor_f1d50e5
  misc_feature 1..23: note = RE
  misc_feature 24..25: note = Core
  misc_feature 26..50: note = LE
tgggggtaagggagagatggtatcttgtatctctccagatgagctgctta

SEQ ID NO: 39829 - DNA, 50 bp, unidentified
  source 1..50: mol_type = unassigned DNA; note = donor_f1d8455
  misc_feature 1..23: note = RE
  misc_feature 24..25: note = Core
  misc_feature 26..50: note = LE
tacattgacttcatatagttagtcttgtataatgaacttgtagtcaaact

SEQ ID NO: 39830 - DNA, 50 bp, unidentified
  source 1..50: mol_type = unassigned DNA; note = donor_f1dfd00
  misc_feature 1..23: note = RE
  misc_feature 24..25: note = Core
  misc_feature 26..50: note = LE
gcaaaaggtgggctgaccatacattaatgagatggtcagcccggcgagaa

SEQ ID NO: 39831 - DNA, 50 bp, unidentified
  source 1..50: mol_type = unassigned DNA; note = donor_f1e4359
  misc_feature 1..24: note = RE
  misc_feature 25: note = Core
  misc_feature 26..50: note = LE
actccccttgacacaaagaggcttctgatggaggatctgggcgggcgttg

SEQ ID NO: 39832 - DNA, 50 bp, unidentified
  source 1..50: mol_type = unassigned DNA; note = donor_f1e8b8a
  misc_feature 1..22: note = RE
  misc_feature 23..25: note = Core
  misc_feature 26..50: note = LE
tgccataggtggcgtccacatatgatgatgtggacgcccctgcaccgacg

SEQ ID NO: 39833 - DNA, 50 bp, unidentified
  source 1..50: mol_type = unassigned DNA; note = donor_f1eab2e
  misc_feature 1..23: note = RE
  misc_feature 24..25: note = Core
  misc_feature 26..50: note = LE
ttgccaacggggcgggccatacgttatgggatggcccgcccctcccgccg

SEQ ID NO: 39834 - DNA, 50 bp, unidentified
  source 1..50: mol_type = unassigned DNA; note = donor_f1eea47
  misc_feature 1..23: note = RE
  misc_feature 24..25: note = Core
  misc_feature 26..50: note = LE
cctattgactttttatttgcaggctactacaatatatttatggttaatat

SEQ ID NO: 39835 - DNA, 50 bp, unidentified
  source 1..50: mol_type = unassigned DNA; note = donor_f1f06b8
  misc_feature 1..23: note = RE
  misc_feature 24..25: note = Core
  misc_feature 26..50: note = LE
cctcttgactttttaccactggactcgtataatagtttttggagggttta

SEQ ID NO: 39836 - DNA, 50 bp, unidentified
  source 1..50: mol_type = unassigned DNA; note = donor_f1f882d
  misc_feature 1..23: note = RE
  misc_feature 24..25: note = Core
  misc_feature 26..50: note = LE
attcagtttttttattatagctcattgtatattaattaataattataatt

SEQ ID NO: 39837 - DNA, 50 bp, unidentified
  source 1..50: mol_type = unassigned DNA; note = donor_f204321
  misc_feature 1..23: note = RE
  misc_feature 24..25: note = Core
  misc_feature 26..50: note = LE
aaattttggaatataacatagaatgataagtttgctttttaataatagtt

SEQ ID NO: 39838 - DNA, 50 bp, unidentified
  source 1..50: mol_type = unassigned DNA; note = donor_f204c53
  misc_feature 1..23: note = RE
  misc_feature 24..25: note = Core
  misc_feature 26..50: note = LE
cttacttctactttctttcacactaatctccattccgccgcctttcagtc

SEQ ID NO: 39839 - DNA, 50 bp, unidentified
  source 1..50: mol_type = unassigned DNA; note = donor_f20ed05
  misc_feature 1..23: note = RE
  misc_feature 24..25: note = Core
  misc_feature 26..50: note = LE
aagctcctcctgcaacacagttgcttatctgattggaatctggcaccgta

SEQ ID NO: 39840 - DNA, 50 bp, unidentified; identical to SEQ ID NO: 32462
  source 1..50: mol_type = unassigned DNA; note = donor_f21225e
  misc_feature 1..23: note = RE
  misc_feature 24..25: note = Core
  misc_feature 26..50: note = LE

SEQ ID NO: 39841 - DNA, 50 bp, unidentified
  source 1..50: mol_type = unassigned DNA; note = donor_f21bd6d
  misc_feature 1..24: note = RE
  misc_feature 25: note = Core
  misc_feature 26..50: note = LE
ccgcctcttgacacagaggggtgcctacgtgtttcattgacgtcaggatc

SEQ ID NO: 39842 - DNA, 50 bp, unidentified
  source 1..50: mol_type = unassigned DNA; note = donor_f21d940
  misc_feature 1..23: note = RE
  misc_feature 24..25: note = Core
  misc_feature 26..50: note = LE
tgctaaccgggccgttccacatatgatggtgtggaacggcccttcgaagc

SEQ ID NO: 39843 - DNA, 50 bp, unidentified
  source 1..50: mol_type = unassigned DNA; note = donor_f221eaa
  misc_feature 1..24: note = RE
  misc_feature 25: note = Core
  misc_feature 26..50: note = LE
tgcaaaatagggggcgaccatagataatgggatggtcgcccccgcctccg

SEQ ID NO: 39844 - DNA, 50 bp, unidentified
  source 1..50: mol_type = unassigned DNA; note = donor_f22619b
  misc_feature 1..20: note = RE
  misc_feature 21..25: note = Core
  misc_feature 26..50: note = LE
tacaggtggacacaggatgtctcactggactacctttcggcacatgggat

SEQ ID NO: 39845 - DNA, 50 bp, unidentified
  source 1..50: mol_type = unassigned DNA; note = donor_f22b086
  misc_feature 1..21: note = RE
  misc_feature 22..25: note = Core
  misc_feature 26..50: note = LE
aaatttgacaaaacttagataatcatgtataatcttaaacataaagattg

SEQ ID NO: 39846 - DNA, 50 bp, unidentified
  source 1..50: mol_type = unassigned DNA; note = donor_f22fac2
  misc_feature 1..23: note = RE
  misc_feature 24..25: note = Core
  misc_feature 26..50: note = LE
gattgacaaaggtcatagaaagtcttatattaggtctgttgcatgtaagt

SEQ ID NO: 39847 - DNA, 50 bp, unidentified
  source 1..50: mol_type = unassigned DNA; note = donor_f23c3ec
  misc_feature 1..24: note = RE
  misc_feature 25: note = Core
  misc_feature 26..50: note = LE
cttgacgaaccgatagggacaccccgttaccttcttcgtagctccgatgg

SEQ ID NO: 39848 - DNA, 50 bp, unidentified
  source 1..50: mol_type = unassigned DNA; note = donor_f240c13
  misc_feature 1..23: note = RE
  misc_feature 24..25: note = Core
  misc_feature 26..50: note = LE
tgacatctaggctcctgggatgtctaatgagtcttagcgagtcggccatc

SEQ ID NO: 39849 - DNA, 50 bp, unidentified; identical to SEQ ID NO: 32453
  source 1..50: mol_type = unassigned DNA; note = donor_f24179f
  misc_feature 1..24: note = RE
  misc_feature 25: note = Core
  misc_feature 26..50: note = LE

SEQ ID NO: 39850 - DNA, 50 bp, unidentified
  source 1..50: mol_type = unassigned DNA; note = donor_f241b76
  misc_feature 1..23: note = RE
  misc_feature 24..25: note = Core
  misc_feature 26..50: note = LE
gcagacagggcgccgtccacatatgatggggtggacggcgcccgacggca

SEQ ID NO: 39851 - DNA, 50 bp, unidentified
  source 1..50: mol_type = unassigned DNA; note = donor_f2435ba
  misc_feature 1..23: note = RE
  misc_feature 24..25: note = Core
  misc_feature 26..50: note = LE
agatcacatgatcaacacagttgcctgtctgttggtgatgtgcgaaagtg

SEQ ID NO: 39852 - DNA, 50 bp, unidentified
  source 1..50: mol_type = unassigned DNA; note = donor_f24e8ee
  misc_feature 1..23: note = RE
  misc_feature 24..25: note = Core
  misc_feature 26..50: note = LE
gtgattggtgggagagatggtatcttgtatctctcctgggtaatgagatt

SEQ ID NO: 39853 - DNA, 50 bp, unidentified; identical to SEQ ID NO: 32113
  source 1..50: mol_type = unassigned DNA; note = donor_f253f4e
  misc_feature 1..23: note = RE
  misc_feature 24..25: note = Core
  misc_feature 26..50: note = LE

SEQ ID NO: 39854 - DNA, 50 bp, unidentified
  source 1..50: mol_type = unassigned DNA; note = donor_f2550c7
  misc_feature 1..22: note = RE
  misc_feature 23..25: note = Core
  misc_feature 26..50: note = LE
actattgatttatattagcaagtttggtattataaacctgtaattattat

SEQ ID NO: 39855 - DNA, 50 bp, unidentified
  source 1..50: mol_type = unassigned DNA; note = donor_f2579b2
  misc_feature 1..24: note = RE
  misc_feature 25: note = Core
  misc_feature 26..50: note = LE
ttacttgttttttaccacagtacttcttaagtttacatttcattaaatta

SEQ ID NO: 39856 - DNA, 50 bp, unidentified
  source 1..50: mol_type = unassigned DNA; note = donor_f25807e
  misc_feature 1..23: note = RE
  misc_feature 24..25: note = Core
  misc_feature 26..50: note = LE
cctattgacaaacgttagcagatttagtaccatataagtgtagcaaagag

SEQ ID NO: 39857 - DNA, 50 bp, unidentified
  source 1..50: mol_type = unassigned DNA; note = donor_f25ee87
  misc_feature 1..24: note = RE
  misc_feature 25: note = Core
  misc_feature 26..50: note = LE
ttgacaacaaaagcaaagagggctctaattgaggccgtggtaaggcgctg

SEQ ID NO: 39858 - DNA, 50 bp, unidentified; identical to SEQ ID NO: 37644
  source 1..50: mol_type = unassigned DNA; note = donor_f265a87
  misc_feature 1..23: note = RE
  misc_feature 24..25: note = Core
  misc_feature 26..50: note = LE

SEQ ID NO: 39859 - DNA, 50 bp, unidentified
  source 1..50: mol_type = unassigned DNA; note = donor_f268f40
  misc_feature 1..23: note = RE
  misc_feature 24..25: note = Core
  misc_feature 26..50: note = LE
gacccaaaacggccgattagagaagatggggtaatcggccggcgatcttg

SEQ ID NO: 39860 - DNA, 50 bp, unidentified
  source 1..50: mol_type = unassigned DNA; note = donor_f27df07
  misc_feature 1..23: note = RE
  misc_feature 24..25: note = Core
  misc_feature 26..50: note = LE
taccaatcaagaagtttctggagagccctaactgcgtcttcgacgcgtcg

SEQ ID NO: 39861 - DNA, 50 bp, unidentified
  source 1..50: mol_type = unassigned DNA; note = donor_f283809
  misc_feature 1..23: note = RE
  misc_feature 24..25: note = Core
  misc_feature 26..50: note = LE
tcaggccttgcaaataacggatacttgtcttatgaagaggtgtcctttgg

SEQ ID NO: 39862 - DNA, 50 bp, unidentified
  source 1..50: mol_type = unassigned DNA; note = donor_f2866d6
  misc_feature 1..23: note = RE
  misc_feature 24..25: note = Core
  misc_feature 26..50: note = LE
aggcttgacgggcaacagagtatcttgtatgttggtcccggactcggaca

SEQ ID NO: 39863 - DNA, 50 bp, unidentified; identical to SEQ ID NO: 30422
  source 1..50: mol_type = unassigned DNA; note = donor_f288cb8
  misc_feature 1..24: note = RE
  misc_feature 25: note = Core
  misc_feature 26..50: note = LE

SEQ ID NO: 39864 - DNA, 50 bp, unidentified
  source 1..50: mol_type = unassigned DNA; note = donor_f28c32d
  misc_feature 1..22: note = RE
  misc_feature 23..25: note = Core
  misc_feature 26..50: note = LE
ttatttgttttttaccttggaatgcctttagtttgtatttacgtaaaaat

SEQ ID NO: 39865 - DNA, 50 bp, unidentified
  source 1..50: mol_type = unassigned DNA; note = donor_f28dbab
  misc_feature 1..23: note = RE
  misc_feature 24..25: note = Core
  misc_feature 26..50: note = LE
cttcttgattttttattagtagactcctaatataaaagtgtagtggttat

SEQ ID NO: 39866 - DNA, 50 bp, unidentified; identical to SEQ ID NO: 37216
  source 1..50: mol_type = unassigned DNA; note = donor_f2a0662
  misc_feature 1..21: note = RE
  misc_feature 22..25: note = Core
  misc_feature 26..50: note = LE

SEQ ID NO: 39867 - DNA, 50 bp, unidentified
  source 1..50: mol_type = unassigned DNA; note = donor_f2a2ace
  misc_feature 1..23: note = RE
  misc_feature 24..25: note = Core
  misc_feature 26..50: note = LE
attgcaaagaggcgggccatacgttatggaatggcccgcctcaaacgaag

SEQ ID NO: 39868 - DNA, 50 bp, unidentified
  source 1..50: mol_type = unassigned DNA; note = donor_f2a4d49
  misc_feature 1..23: note = RE
  misc_feature 24..25: note = Core
  misc_feature 26..50: note = LE
agacttgacttttattagcaggtctattacaataaatttggatctggagc

SEQ ID NO: 39869 - DNA, 50 bp, unidentified
  source 1..50: mol_type = unassigned DNA; note = donor_f2aa895
  misc_feature 1..23: note = RE
  misc_feature 24..25: note = Core
  misc_feature 26..50: note = LE
gcaccgcgggcgccgtccatacatgatgtggtggacggcgcccgctccca

SEQ ID NO: 39870 - DNA, 50 bp, unidentified
  source 1..50: mol_type = unassigned DNA; note = donor_f2b0945
  misc_feature 1..22: note = RE
  misc_feature 23..25: note = Core
  misc_feature 26..50: note = LE
tgacatttacgaacaaggggtgtctaatgggtttggacagcatcacgttt

SEQ ID NO: 39871 - DNA, 50 bp, unidentified; identical to SEQ ID NO: 31237
  source 1..50: mol_type = unassigned DNA; note = donor_f2b2148
  misc_feature 1..22: note = RE
  misc_feature 23..25: note = Core
  misc_feature 26..50: note = LE

SEQ ID NO: 39872 - DNA, 50 bp, unidentified
  source 1..50: mol_type = unassigned DNA; note = donor_f2b7bf2
  misc_feature 1..22: note = RE
  misc_feature 23..25: note = Core
  misc_feature 26..50: note = LE
tgactacttttaaatatagttcgttgtatattatttgtatattcaaaata

SEQ ID NO: 39873 - DNA, 50 bp, unidentified
  source 1..50: mol_type = unassigned DNA; note = donor_f2bd268
  misc_feature 1..23: note = RE
  misc_feature 24..25: note = Core
  misc_feature 26..50: note = LE
gttgacaacggggagtccacataagataattggactcccctccttactaa

SEQ ID NO: 39874 - DNA, 50 bp, unidentified
  source 1..50: mol_type = unassigned DNA; note = donor_f2c2b18
  misc_feature 1..24: note = RE
  misc_feature 25: note = Core
  misc_feature 26..50: note = LE
gcaagtcgagggggagtccatatacaatgggatggactcctcctcctatt

SEQ ID NO: 39875 - DNA, 50 bp, unidentified
  source 1..50: mol_type = unassigned DNA; note = donor_f2cedca
  misc_feature 1..23: note = RE
  misc_feature 24..25: note = Core
  misc_feature 26..50: note = LE
ttgcaagcggggcgggccatacgttatggaatggcccgcccctttcccca

SEQ ID NO: 39876 - DNA, 50 bp, unidentified; identical to SEQ ID NO: 37191
  source 1..50: mol_type = unassigned DNA; note = donor_f2e7d86
  misc_feature 1..24: note = RE
  misc_feature 25: note = Core
  misc_feature 26..50: note = LE

SEQ ID NO: 39877 - DNA, 50 bp, unidentified
  source 1..50: mol_type = unassigned DNA; note = donor_f2eebde
  misc_feature 1..21: note = RE
  misc_feature 22..25: note = Core
  misc_feature 26..50: note = LE
ttattgacttctaatagttagtcacgtataatcaatcttaagggaaatat

SEQ ID NO: 39878 - DNA, 50 bp, unidentified
  source 1..50: mol_type = unassigned DNA; note = donor_f2f6ee6
  misc_feature 1..23: note = RE
  misc_feature 24..25: note = Core
  misc_feature 26..50: note = LE
tgacaatcaaagtccaggggtgtctaatgggagataccgggccggccaca

SEQ ID NO: 39879 - DNA, 50 bp, unidentified
  source 1..50: mol_type = unassigned DNA; note = donor_f2f902c
  misc_feature 1..23: note = RE
  misc_feature 24..25: note = Core
  misc_feature 26..50: note = LE
acccccgcgcgatttaatggttgcttgtattagcgcgaatcagtatggtg

SEQ ID NO: 39880 - DNA, 50 bp, unidentified
  source 1..50: mol_type = unassigned DNA; note = donor_f2fbcf8
  misc_feature 1..22: note = RE
  misc_feature 23..25: note = Core
  misc_feature 26..50: note = LE
cacttgacaaagaccatagaatcttgtatggtgtagcggggtgaaccgtg

SEQ ID NO: 39881 - DNA, 50 bp, unidentified
  source 1..50: mol_type = unassigned DNA; note = donor_f2ffdce
  misc_feature 1..23: note = RE
  misc_feature 24..25: note = Core
  misc_feature 26..50: note = LE
aactggcttgatcaagacggatacttgtcttatgacgattacgtcgttca

SEQ ID NO: 39882 - DNA, 50 bp, unidentified
  source 1..50: mol_type = unassigned DNA; note = donor_f30137a
  misc_feature 1..24: note = RE
  misc_feature 25: note = Core
  misc_feature 26..50: note = LE
tgacgaaagagataggggcacccccgttaccttctagacggccccgatct

SEQ ID NO: 39883 - DNA, 50 bp, unidentified
  source 1..50: mol_type = unassigned DNA; note = donor_f301f9a
  misc_feature 1..23: note = RE
  misc_feature 24..25: note = Core
  misc_feature 26..50: note = LE
tacctattgactttttatagttggtataatgtatttaggctcatgaaggc

SEQ ID NO: 39884 - DNA, 50 bp, unidentified
  source 1..50: mol_type = unassigned DNA; note = donor_f308b3f
  misc_feature 1..24: note = RE
  misc_feature 25: note = Core
  misc_feature 26..50: note = LE
ctgcttgactttttattagcaggctcctacaataaggttgtgggtaacag

SEQ ID NO: 39885 - DNA, 50 bp, unidentified; identical to SEQ ID NO: 38855
  source 1..50: mol_type = unassigned DNA; note = donor_f314d84
  misc_feature 1..24: note = RE
  misc_feature 25: note = Core
  misc_feature 26..50: note = LE

SEQ ID NO: 39886 - DNA, 50 bp, unidentified
  source 1..50: mol_type = unassigned DNA; note = donor_f315cd2
  misc_feature 1..22: note = RE
  misc_feature 23..25: note = Core
  misc_feature 26..50: note = LE
aataaaggtcatcaagacagttgcttgtgtcttgggcaggaattagactg

SEQ ID NO: 39887 - DNA, 50 bp, unidentified; identical to SEQ ID NO: 30679
  source 1..50: mol_type = unassigned DNA; note = donor_f331988
  misc_feature 1..23: note = RE
  misc_feature 24..25: note = Core
  misc_feature 26..50: note = LE

SEQ ID NO: 39888 - DNA, 50 bp, unidentified; identical to SEQ ID NO: 30970
  source 1..50: mol_type = unassigned DNA; note = donor_f338bb7
  misc_feature 1..24: note = RE
  misc_feature 25: note = Core
  misc_feature 26..50: note = LE

SEQ ID NO: 39889 - DNA, 50 bp, unidentified
  source 1..50: mol_type = unassigned DNA; note = donor_f3451ce
  misc_feature 1..21: note = RE
  misc_feature 22..25: note = Core
  misc_feature 26..50: note = LE
tttcttgattttgccatagaaatccattaggtttgttttatatttaaaga

SEQ ID NO: 39890 - DNA, 50 bp, unidentified
  source 1..50: mol_type = unassigned DNA; note = donor_f352640
  misc_feature 1..24: note = RE
  misc_feature 25: note = Core
  misc_feature 26..50: note = LE
tgcacaaaaggaggcatccatataatgtaatggatgcctccccttacagg

SEQ ID NO: 39891 - DNA, 50 bp, unidentified
  source 1..50: mol_type = unassigned DNA; note = donor_f36a092
  misc_feature 1..22: note = RE
  misc_feature 23..25: note = Core
  misc_feature 26..50: note = LE
acctcaacccgccgaatagagaagatggggtattcagcttgagcctcatc

SEQ ID NO: 39892 - DNA, 50 bp, unidentified
  source 1..50: mol_type = unassigned DNA; note = donor_f36fabc
  misc_feature 1..24: note = RE
  misc_feature 25: note = Core
  misc_feature 26..50: note = LE
agcacttgactttttattagcaggcctcctaatatataagtgtagggttt

SEQ ID NO: 39893 - DNA, 50 bp, unidentified
  source 1..50: mol_type = unassigned DNA; note = donor_f376c9d
  misc_feature 1..21: note = RE
  misc_feature 22..25: note = Core
  misc_feature 26..50: note = LE
ctcttgactttttatagtttgtcacgtataatccaatcatattagaaagt

SEQ ID NO: 39894 - DNA, 50 bp, unidentified; identical to SEQ ID NO: 37221
  source 1..50: mol_type = unassigned DNA; note = donor_f387e1f
  misc_feature 1..24: note = RE
  misc_feature 25: note = Core
  misc_feature 26..50: note = LE

SEQ ID NO: 39895 - DNA, 50 bp, unidentified; identical to SEQ ID NO: 33970
  source 1..50: mol_type = unassigned DNA; note = donor_f38d132
  misc_feature 1..23: note = RE
  misc_feature 24..25: note = Core
  misc_feature 26..50: note = LE

SEQ ID NO: 39896 - DNA, 50 bp, unidentified
  source 1..50: mol_type = unassigned DNA; note = donor_f3925db
  misc_feature 1..24: note = RE
  misc_feature 25: note = Core
  misc_feature 26..50: note = LE
cacttgacttttaatagtttgtcacgtatattctaatcatcagatttagg

SEQ ID NO: 39897 - DNA, 50 bp, unidentified
  source 1..50: mol_type = unassigned DNA; note = donor_f395766
  misc_feature 1..23: note = RE
  misc_feature 24..25: note = Core
  misc_feature 26..50: note = LE
gtaagcagggggccgtccacatatgttggggtggacggcccccgaacatc

SEQ ID NO: 39898 - DNA, 50 bp, unidentified
  source 1..50: mol_type = unassigned DNA; note = donor_f3988b0
  misc_feature 1..21: note = RE
  misc_feature 22..25: note = Core
  misc_feature 26..50: note = LE
ctcttgactatttatagtttgtcacgtataatccaattgtcagttgatga

SEQ ID NO: 39899 - DNA, 50 bp, unidentified
  source 1..50: mol_type = unassigned DNA; note = donor_f3990fe
  misc_feature 1..23: note = RE
  misc_feature 24..25: note = Core
  misc_feature 26..50: note = LE
atgattgacttcaaacagagtatcttgtatgatcaaaattaataaaatac

SEQ ID NO: 39900 - DNA, 50 bp, unidentified
  source 1..50: mol_type = unassigned DNA; note = donor_f3a19d8
  misc_feature 1..23: note = RE
  misc_feature 24..25: note = Core
  misc_feature 26..50: note = LE
gcaagcagggggccgtccacatatgttggggtggacggcccccgaacggc

SEQ ID NO: 39901 - DNA, 50 bp, unidentified
  source 1..50: mol_type = unassigned DNA; note = donor_f3a3c46
  misc_feature 1..23: note = RE
  misc_feature 24..25: note = Core
  misc_feature 26..50: note = LE
ttacttgcatattaatatagttcgtcgtacatttgtacgttggttaataa

SEQ ID NO: 39902 - DNA, 50 bp, unidentified
  source 1..50: mol_type = unassigned DNA; note = donor_f3a497d
  misc_feature 1..24: note = RE
  misc_feature 25: note = Core
  misc_feature 26..50: note = LE
tggcttattcggggcgtccatatacaatgggatggacgcccccgccctaa

SEQ ID NO: 39903 - DNA, 50 bp, unidentified
  source 1..50: mol_type = unassigned DNA; note = donor_f3a4fc4
  misc_feature 1..23: note = RE
  misc_feature 24..25: note = Core
  misc_feature 26..50: note = LE
ttgcaaacggagtgggttcatatataatggtatgaacccactccacttcc

SEQ ID NO: 39904 - DNA, 50 bp, unidentified
  source 1..50: mol_type = unassigned DNA; note = donor_f3b1f94
  misc_feature 1..24: note = RE
  misc_feature 25: note = Core
  misc_feature 26..50: note = LE
tcaggtcttgacacaaagaggcttctgattgatgcttaagacggcgttgc

SEQ ID NO: 39905 - DNA, 50 bp, unidentified
  source 1..50: mol_type = unassigned DNA; note = donor_f3b661e
  misc_feature 1..23: note = RE
  misc_feature 24..25: note = Core
  misc_feature 26..50: note = LE
gcaataattgaggtgtccatatatgatgatatggacacctcttcctccca

SEQ ID NO: 39906 - DNA, 50 bp, unidentified
  source 1..50: mol_type = unassigned DNA; note = donor_f3be863
  misc_feature 1..23: note = RE
  misc_feature 24..25: note = Core
  misc_feature 26..50: note = LE
cctcttgactttttatagctggtctcgtataatagatttacggtttaggt

SEQ ID NO: 39907 - DNA, 50 bp, unidentified
  source 1..50: mol_type = unassigned DNA; note = donor_f3c2b9d
  misc_feature 1..23: note = RE
  misc_feature 24..25: note = Core
  misc_feature 26..50: note = LE
cacctcacctaactcttcggattagtatctgcggcctggcgcccgtcgtg

SEQ ID NO: 39908 - DNA, 50 bp, unidentified; identical to SEQ ID NO: 35512
  source 1..50: mol_type = unassigned DNA; note = donor_f3c4a69
  misc_feature 1..23: note = RE
  misc_feature 24..25: note = Core
  misc_feature 26..50: note = LE

SEQ ID NO: 39909 - DNA, 50 bp, unidentified
  source 1..50: mol_type = unassigned DNA; note = donor_f3cb623
  misc_feature 1..23: note = RE
  misc_feature 24..25: note = Core
  misc_feature 26..50: note = LE
ccgtgacttgaccaacacggatacttgtcttatgactttcttcgctgaac

SEQ ID NO: 39910 - DNA, 50 bp, unidentified; identical to SEQ ID NO: 30477
  source 1..50: mol_type = unassigned DNA; note = donor_f3cddb9
  misc_feature 1..24: note = RE
  misc_feature 25: note = Core
  misc_feature 26..50: note = LE

SEQ ID NO: 39911 - DNA, 50 bp, unidentified
  source 1..50: mol_type = unassigned DNA; note = donor_f3d4602
  misc_feature 1..23: note = RE
  misc_feature 24..25: note = Core
  misc_feature 26..50: note = LE
ggcttgacagaccgcattaggaatccctacgctttcctgcgggatgtggt

SEQ ID NO: 39912 - DNA, 50 bp, unidentified
  source 1..50: mol_type = unassigned DNA; note = donor_f3dd686
  misc_feature 1..22: note = RE
  misc_feature 23..25: note = Core
  misc_feature 26..50: note = LE
cacttgacttaatatagtttgtcttgtatatttagattactcaattaatc

SEQ ID NO: 39913 - DNA, 50 bp, unidentified
  source 1..50: mol_type = unassigned DNA; note = donor_f3df8d8
  misc_feature 1..23: note = RE
  misc_feature 24..25: note = Core
  misc_feature 26..50: note = LE
agctttgccctcaaccatagaatcttgtatggtgatactcgaaggggtgg

SEQ ID NO: 39914 - DNA, 50 bp, unidentified
  source 1..50: mol_type = unassigned DNA; note = donor_f3e1ac4
  misc_feature 1..24: note = RE
  misc_feature 25: note = Core
  misc_feature 26..50: note = LE
catcttgaccggtcactacatatcagtcattatgtagtgaccggcccgct

SEQ ID NO: 39915 - DNA, 50 bp, unidentified; identical to SEQ ID NO: 30919
  source 1..50: mol_type = unassigned DNA; note = donor_f3e96a0
  misc_feature 1..23: note = RE
  misc_feature 24..25: note = Core
  misc_feature 26..50: note = LE

SEQ ID NO: 39916 - DNA, 50 bp, unidentified
  source 1..50: mol_type = unassigned DNA; note = donor_f3eb5ff
  misc_feature 1..24: note = RE
  misc_feature 25: note = Core
  misc_feature 26..50: note = LE
gaacttgttttttaactcagttcttcttaagtttgattctgattagattg

SEQ ID NO: 39917 - DNA, 50 bp, unidentified
  source 1..50: mol_type = unassigned DNA; note = donor_f3ef28f
  misc_feature 1..23: note = RE
  misc_feature 24..25: note = Core
  misc_feature 26..50: note = LE
gacggtgggggcgagtccatacataattggatggactcgcccctcgccga

SEQ ID NO: 39918 - DNA, 50 bp, unidentified
  source 1..50: mol_type = unassigned DNA; note = donor_f3f9d9e
  misc_feature 1..23: note = RE
  misc_feature 24..25: note = Core
  misc_feature 26..50: note = LE
ttacttgcgtattaatatagttcgtcgtacatttgtacgtttgttaataa

SEQ ID NO: 39919 - DNA, 50 bp, unidentified
  source 1..50: mol_type = unassigned DNA; note = donor_f3fa0fb
  misc_feature 1..24: note = RE
  misc_feature 25: note = Core
  misc_feature 26..50: note = LE
cttgcagacggggcgggccatacgtatgggatggcccgcccctccttctc

SEQ ID NO: 39920 - DNA, 50 bp, unidentified; identical to SEQ ID NO: 32586
  source 1..50: mol_type = unassigned DNA; note = donor_f401054
  misc_feature 1..23: note = RE
  misc_feature 24..25: note = Core
  misc_feature 26..50: note = LE

SEQ ID NO: 39921 - DNA, 50 bp, unidentified
  source 1..50: mol_type = unassigned DNA; note = donor_f40bc8e
  misc_feature 1..24: note = RE
  misc_feature 25: note = Core
  misc_feature 26..50: note = LE
tgcaaaacggagggagtccatagataatgggatggactacctcctccctc

SEQ ID NO: 39922 - DNA, 50 bp, unidentified
  source 1..50: mol_type = unassigned DNA; note = donor_f4174f5
  misc_feature 1..22: note = RE
  misc_feature 23..25: note = Core
  misc_feature 26..50: note = LE
tattcaaaaatttattatagctcatcgtatattaatttaaatttgtaatt

SEQ ID NO: 39923 - DNA, 50 bp, unidentified; identical to SEQ ID NO: 32730
  source 1..50: mol_type = unassigned DNA; note = donor_f418739
  misc_feature 1..24: note = RE
  misc_feature 25: note = Core
  misc_feature 26..50: note = LE

SEQ ID NO: 39924 - DNA, 50 bp, unidentified
  source 1..50: mol_type = unassigned DNA; note = donor_f421217
  misc_feature 1..22: note = RE
  misc_feature 23..25: note = Core
  misc_feature 26..50: note = LE
atgcttgacaaacattagctggtttcgtattattaggtcagccagaaaaa

SEQ ID NO: 39925 - DNA, 50 bp, unidentified; identical to SEQ ID NO: 31428
  source 1..50: mol_type = unassigned DNA; note = donor_f43a6cf
  misc_feature 1..22: note = RE
  misc_feature 23..25: note = Core
  misc_feature 26..50: note = LE

SEQ ID NO: 39926 - DNA, 50 bp, unidentified
  source 1..50: mol_type = unassigned DNA; note = donor_f43f9ef
  misc_feature 1..23: note = RE
  misc_feature 24..25: note = Core
  misc_feature 26..50: note = LE
gcagatcaggggccgtccacagatgatggggtggacggcccctgtgtccg

SEQ ID NO: 39927 - DNA, 50 bp, unidentified; identical to SEQ ID NO: 36001
  source 1..50: mol_type = unassigned DNA; note = donor_f440047
  misc_feature 1..24: note = RE
  misc_feature 25: note = Core
  misc_feature 26..50: note = LE

SEQ ID NO: 39928 - DNA, 50 bp, unidentified
  source 1..50: mol_type = unassigned DNA; note = donor_f446894
  misc_feature 1..22: note = RE
  misc_feature 23..25: note = Core
  misc_feature 26..50: note = LE
gcctaacgggggccgtccatacatgctgggtggacggccccctgacggca

SEQ ID NO: 39929 - DNA, 50 bp, unidentified
  source 1..50: mol_type = unassigned DNA; note = donor_f446ab2
  misc_feature 1..24: note = RE
  misc_feature 25: note = Core
  misc_feature 26..50: note = LE
tgcaaaaatgggggtgaccatagataatgggatggtcacccccgcctctc

SEQ ID NO: 39930 - DNA, 50 bp, unidentified; identical to SEQ ID NO: 30869
  source 1..50: mol_type = unassigned DNA; note = donor_f44c8ba
  misc_feature 1..24: note = RE
  misc_feature 25: note = Core
  misc_feature 26..50: note = LE

SEQ ID NO: 39931 - DNA, 50 bp, unidentified
  source 1..50: mol_type = unassigned DNA; note = donor_f452e6f
  misc_feature 1..20: note = RE
  misc_feature 21..25: note = Core
  misc_feature 26..50: note = LE
tgacaacaagacagggacaccccccttaccttccttgtaggccgtgagca

SEQ ID NO: 39932 - DNA, 50 bp, unidentified
  source 1..50: mol_type = unassigned DNA; note = donor_f458bf7
  misc_feature 1..23: note = RE
  misc_feature 24..25: note = Core
  misc_feature 26..50: note = LE
agccttgactttttatttgcaggctactacaatatgtttatggttaatat

SEQ ID NO: 39933 - DNA, 50 bp, unidentified
  source 1..50: mol_type = unassigned DNA; note = donor_f45b2c8
  misc_feature 1..24: note = RE
  misc_feature 25: note = Core
  misc_feature 26..50: note = LE
cgactccttgacacaaacaggcttctgatagagggtgggccgcacggcgc

SEQ ID NO: 39934 - DNA, 50 bp, unidentified; identical to SEQ ID NO: 30420
  source 1..50: mol_type = unassigned DNA; note = donor_f466069
  misc_feature 1..23: note = RE
  misc_feature 24..25: note = Core
  misc_feature 26..50: note = LE

SEQ ID NO: 39935 - DNA, 50 bp, unidentified
  source 1..50: mol_type = unassigned DNA; note = donor_f474d7c
  misc_feature 1..22: note = RE
  misc_feature 23..25: note = Core
  misc_feature 26..50: note = LE
acaagcgggggccgtccacatctgctggtgtggacggcctctcatcccaa

SEQ ID NO: 39936 - DNA, 50 bp, unidentified
  source 1..50: mol_type = unassigned DNA; note = donor_f47629e
  misc_feature 1..24: note = RE
  misc_feature 25: note = Core
  misc_feature 26..50: note = LE
tgcaaagggcgtcgggtccatacatactgagatggacccgacgccctccc

SEQ ID NO: 39937 - DNA, 50 bp, unidentified
  source 1..50: mol_type = unassigned DNA; note = donor_f485f3d
  misc_feature 1..24: note = RE
  misc_feature 25: note = Core
  misc_feature 26..50: note = LE
gcgacttgactctcatagaagcatctgtgagactccggcgcagttccgtc

SEQ ID NO: 39938 - DNA, 50 bp, unidentified
  source 1..50: mol_type = unassigned DNA; note = donor_f49a165
  misc_feature 1..23: note = RE
  misc_feature 24..25: note = Core
  misc_feature 26..50: note = LE
ttgccatcggggccgtccacatatgatgatgtggacggcctctcctcaac

SEQ ID NO: 39939 - DNA, 50 bp, unidentified
  source 1..50: mol_type = unassigned DNA; note = donor_f49ec82
  misc_feature 1..22: note = RE
  misc_feature 23..25: note = Core
  misc_feature 26..50: note = LE
ccccttgactttcctttgcaggtttgctaatataagattacaggcaaggc

SEQ ID NO: 39940 - DNA, 50 bp, unidentified
  source 1..50: mol_type = unassigned DNA; note = donor_f4ac307
  misc_feature 1..21: note = RE
  misc_feature 22..25: note = Core
  misc_feature 26..50: note = LE
cttgacaaccacatagggacaccccgttacctttttcgtggctcctgagc

SEQ ID NO: 39941 - DNA, 50 bp, unidentified; identical to SEQ ID NO: 33593
  source 1..50: mol_type = unassigned DNA; note = donor_f4cb833
  misc_feature 1..23: note = RE
  misc_feature 24..25: note = Core
  misc_feature 26..50: note = LE

SEQ ID NO: 39942 - DNA, 50 bp, unidentified
  source 1..50: mol_type = unassigned DNA; note = donor_f4ce3c9
  misc_feature 1..23: note = RE
  misc_feature 24..25: note = Core
  misc_feature 26..50: note = LE
ttatttggattacaacacagaatctcctatgtttgttttcaaacaaaaaa

SEQ ID NO: 39943 - DNA, 50 bp, unidentified
  source 1..50: mol_type = unassigned DNA; note = donor_f4d0634
  misc_feature 1..24: note = RE
  misc_feature 25: note = Core
  misc_feature 26..50: note = LE
gcaaaattcgggctggccatagattaatgaaatggccagcccgatcccag

SEQ ID NO: 39944 - DNA, 50 bp, unidentified; identical to SEQ ID NO: 30510
  source 1..50: mol_type = unassigned DNA; note = donor_f4d37e1
  misc_feature 1..23: note = RE
  misc_feature 24..25: note = Core
  misc_feature 26..50: note = LE

SEQ ID NO: 39945 - DNA, 50 bp, unidentified
  source 1..50: mol_type = unassigned DNA; note = donor_f4d54fd
  misc_feature 1..23: note = RE
  misc_feature 24..25: note = Core
  misc_feature 26..50: note = LE
atacttgactattcatagttggtcttgtatgattattctatacagaaaat

SEQ ID NO: 39946 - DNA, 50 bp, unidentified
  source 1..50: mol_type = unassigned DNA; note = donor_f4d7492
  misc_feature 1..22: note = RE
  misc_feature 23..25: note = Core
  misc_feature 26..50: note = LE
cgcggtgggggccgtccacacatgatggggtggacggcccccgctgaacg

SEQ ID NO: 39947 - DNA, 50 bp, unidentified; identical to SEQ ID NO: 39750
  source 1..50: mol_type = unassigned DNA; note = donor_f4d9b3d
  misc_feature 1..22: note = RE
  misc_feature 23..25: note = Core
  misc_feature 26..50: note = LE

SEQ ID NO: 39948 - DNA, 50 bp, unidentified
  source 1..50: mol_type = unassigned DNA; note = donor_f4db548
  misc_feature 1..23: note = RE
  misc_feature 24..25: note = Core
  misc_feature 26..50: note = LE
cttgaccaaaagcatagggacacccgttacatttattgggtccccgaagg

SEQ ID NO: 39949 - DNA, 50 bp, unidentified
  source 1..50: mol_type = unassigned DNA; note = donor_f4e09b6
  misc_feature 1..23: note = RE
  misc_feature 24..25: note = Core
  misc_feature 26..50: note = LE
gacaagttaggaccgtgggatgtctaatggctctcgagcagtcgacggaa

SEQ ID NO: 39950 - DNA, 50 bp, unidentified
  source 1..50: mol_type = unassigned DNA; note = donor_f4f69e2
  misc_feature 1..23: note = RE
  misc_feature 24..25: note = Core
  misc_feature 26..50: note = LE
cccgttgactttaaacacagctgcttgtatgtttaaagacactttaatta

SEQ ID NO: 39951 - DNA, 50 bp, unidentified
  source 1..50: mol_type = unassigned DNA; note = donor_f4fef07
  misc_feature 1..24: note = RE
  misc_feature 25: note = Core
  misc_feature 26..50: note = LE
cgcttgacctcacccatagggacaccgttaccgttttcgcggctcctgat

SEQ ID NO: 39952 - DNA, 50 bp, unidentified
  source 1..50: mol_type = unassigned DNA; note = donor_f501a13
  misc_feature 1..23: note = RE
  misc_feature 24..25: note = Core
  misc_feature 26..50: note = LE
agacttgacttttaatagttagtctcgtataataaagtagtagtttttag

SEQ ID NO: 39953 - DNA, 50 bp, unidentified
  source 1..50: mol_type = unassigned DNA; note = donor_f509086
  misc_feature 1..23: note = RE
  misc_feature 24..25: note = Core
  misc_feature 26..50: note = LE
gcatccccgggggcgtccacagatgatggggtggacgccccctcgacggc

SEQ ID NO: 39954 - DNA, 50 bp, unidentified
  source 1..50: mol_type = unassigned DNA; note = donor_f50bd3d
  misc_feature 1..23: note = RE
  misc_feature 24..25: note = Core
  misc_feature 26..50: note = LE
tgacatccaaaaacatgggatgtctaatgggagctaccgggtcgggatga

SEQ ID NO: 39955 - DNA, 50 bp, unidentified
  source 1..50: mol_type = unassigned DNA; note = donor_f50dc3b
  misc_feature 1..24: note = RE
  misc_feature 25: note = Core
  misc_feature 26..50: note = LE
aaggtcttgacaagcaagaggcttctgatggatggttctggcgggcgttg

SEQ ID NO: 39956 - DNA, 50 bp, unidentified
  source 1..50: mol_type = unassigned DNA; note = donor_f51dc97
  misc_feature 1..24: note = RE
  misc_feature 25: note = Core
  misc_feature 26..50: note = LE
ttggcaaaccggggcgtccatatacaatggaatggacgcccctcctttac

SEQ ID NO: 39957 - DNA, 50 bp, unidentified
  source 1..50: mol_type = unassigned DNA; note = donor_f522b5c
  misc_feature 1..23: note = RE
  misc_feature 24..25: note = Core
  misc_feature 26..50: note = LE
tgcaacgcgggccgttccacatatgatgaggtggaacggcccgctccgac

SEQ ID NO: 39958 - DNA, 50 bp, unidentified; identical to SEQ ID NO: 34093
  source 1..50: mol_type = unassigned DNA; note = donor_f526c80
  misc_feature 1..24: note = RE
  misc_feature 25: note = Core
  misc_feature 26..50: note = LE

SEQ ID NO: 39959 - DNA, 50 bp, unidentified
  source 1..50: mol_type = unassigned DNA; note = donor_f52d3f6
  misc_feature 1..23: note = RE
  misc_feature 24..25: note = Core
  misc_feature 26..50: note = LE
gctatccgggaggcgtccatataagatggtatggacgcctccccccggca

SEQ ID NO: 39960 - DNA, 50 bp, unidentified
  source 1..50: mol_type = unassigned DNA; note = donor_f5317f7
  misc_feature 1..23: note = RE
  misc_feature 24..25: note = Core
  misc_feature 26..50: note = LE
cacaaccgggggacgtccatatatgatgtgatggacgccccctttttcag

SEQ ID NO: 39961 - DNA, 50 bp, unidentified; identical to SEQ ID NO: 33682
  source 1..50: mol_type = unassigned DNA; note = donor_f53479e
  misc_feature 1..24: note = RE
  misc_feature 25: note = Core
  misc_feature 26..50: note = LE

SEQ ID NO: 39962 - DNA, 50 bp, unidentified
  source 1..50: mol_type = unassigned DNA; note = donor_f53b030
  misc_feature 1..23: note = RE
  misc_feature 24..25: note = Core
  misc_feature 26..50: note = LE
gcaagcagggggccgtccatatatgttggggtggacggcccccacacggc

SEQ ID NO: 39963 - DNA, 50 bp, unidentified
  source 1..50: mol_type = unassigned DNA; note = donor_f540196
  misc_feature 1..24: note = RE
  misc_feature 25: note = Core
  misc_feature 26..50: note = LE
gcgttcaacggggaagcccttgtagaatgaaagggacttccccgtcccga

SEQ ID NO: 39964 - DNA, 50 bp, unidentified
  source 1..50: mol_type = unassigned DNA; note = donor_f5498d8
  misc_feature 1..23: note = RE
  misc_feature 24..25: note = Core
  misc_feature 26..50: note = LE
agcaaccggctgtttaatggttgcttgtaatagcaaaaccgattatcgtc

SEQ ID NO: 39965 - DNA, 50 bp, unidentified
  source 1..50: mol_type = unassigned DNA; note = donor_f55baba
  misc_feature 1..23: note = RE
  misc_feature 24..25: note = Core
  misc_feature 26..50: note = LE
tcgcttgactccgaagacggttacttgtatgtttaagccagaccagtacg

SEQ ID NO: 39966 - DNA, 50 bp, unidentified
  source 1..50: mol_type = unassigned DNA; note = donor_f55df5d
  misc_feature 1..24: note = RE
  misc_feature 25: note = Core
  misc_feature 26..50: note = LE
tgcgacacggcggcggaccatacataattggtatggtccgccgcttcttg

SEQ ID NO: 39967 - DNA, 50 bp, unidentified
  source 1..50: mol_type = unassigned DNA; note = donor_f5629cb
  misc_feature 1..24: note = RE
  misc_feature 25: note = Core
  misc_feature 26..50: note = LE
tgccccttgatactaaaggggagcctacttagcattggcgtcagggccag

SEQ ID NO: 39968 - DNA, 50 bp, unidentified
  source 1..50: mol_type = unassigned DNA; note = donor_f563c6b
  misc_feature 1..24: note = RE
  misc_feature 25: note = Core
  misc_feature 26..50: note = LE
tctcccttgacagaactataggaaccattacagtctgagataagtcatcg

SEQ ID NO: 39969 - DNA, 50 bp, unidentified
  source 1..50: mol_type = unassigned DNA; note = donor_f5669b3
  misc_feature 1..24: note = RE
  misc_feature 25: note = Core
  misc_feature 26..50: note = LE
tgtaaaaaaggaggagtccatatacaatgggatggactcctccttaccca

SEQ ID NO: 39970 - DNA, 50 bp, unidentified
  source 1..50: mol_type = unassigned DNA; note = donor_f56a68a
  misc_feature 1..24: note = RE
  misc_feature 25: note = Core
  misc_feature 26..50: note = LE
tgcaaaaaatggggtgaccatagataatgagatggtcacccccacaccct

SEQ ID NO: 39971 - DNA, 50 bp, unidentified
  source 1..50: mol_type = unassigned DNA; note = donor_f56ac50
  misc_feature 1..24: note = RE
  misc_feature 25: note = Core
  misc_feature 26..50: note = LE
ttgcaaacgggatgcgttcatatagaatgagatgaacgcatcccacccat

SEQ ID NO: 39972 - DNA, 50 bp, unidentified; identical to SEQ ID NO: 35472
  source 1..50: mol_type = unassigned DNA; note = donor_f56fa31
  misc_feature 1..24: note = RE
  misc_feature 25: note = Core
  misc_feature 26..50: note = LE

SEQ ID NO: 39973 - DNA, 50 bp, unidentified
  source 1..50: mol_type = unassigned DNA; note = donor_f57495d
  misc_feature 1..23: note = RE
  misc_feature 24..25: note = Core
  misc_feature 26..50: note = LE
ccgccaaggtccgtacagagctactcactgacggacctcaccggtgaccc

SEQ ID NO: 39974 - DNA, 50 bp, unidentified
  source 1..50: mol_type = unassigned DNA; note = donor_f574f5c
  misc_feature 1..21: note = RE
  misc_feature 22..25: note = Core
  misc_feature 26..50: note = LE
ggttgacaaaaacataggaacacccattaccatgtttggtaggtcccgaa

SEQ ID NO: 39975 - DNA, 50 bp, unidentified
  source 1..50: mol_type = unassigned DNA; note = donor_f57ad83
  misc_feature 1..24: note = RE
  misc_feature 25: note = Core
  misc_feature 26..50: note = LE
tgcacaggcggggcgaaccatacataataggatggttcgccccgccgcct

SEQ ID NO: 39976 - DNA, 50 bp, unidentified
  source 1..50: mol_type = unassigned DNA; note = donor_f57da8c
  misc_feature 1..24: note = RE
  misc_feature 25: note = Core
  misc_feature 26..50: note = LE
taggcttgcacaaatcataaaaataccttagatttgcagcggcaaaccga

SEQ ID NO: 39977 - DNA, 50 bp, unidentified
  source 1..50: mol_type = unassigned DNA; note = donor_f57ed4a
  misc_feature 1..22: note = RE
  misc_feature 23..25: note = Core
  misc_feature 26..50: note = LE
actcttgacttctaatagttagtcacgtataataacgttatccttatttt

SEQ ID NO: 39978 - DNA, 50 bp, unidentified
  source 1..50: mol_type = unassigned DNA; note = donor_f57f3fd
  misc_feature 1..23: note = RE
  misc_feature 24..25: note = Core
  misc_feature 26..50: note = LE
ggctataagttcaaacacagttgcctgtctgtttgagatgtggcattgtg

SEQ ID NO: 39979 - DNA, 50 bp, unidentified
  source 1..50: mol_type = unassigned DNA; note = donor_f5926f5
  misc_feature 1..22: note = RE
  misc_feature 23..25: note = Core
  misc_feature 26..50: note = LE
ccaaacgggcgccatccagacatgatgtcgtgaatggcgccctccaccag

SEQ ID NO: 39980 - DNA, 50 bp, unidentified
  source 1..50: mol_type = unassigned DNA; note = donor_f5a24d9
  misc_feature 1..23: note = RE
  misc_feature 24..25: note = Core
  misc_feature 26..50: note = LE
cttattgacatttcttagctggactagtataataatgatatagcaacaag

SEQ ID NO: 39981 - DNA, 50 bp, unidentified
  source 1..50: mol_type = unassigned DNA; note = donor_f5a739b
  misc_feature 1..22: note = RE
  misc_feature 23..25: note = Core
  misc_feature 26..50: note = LE
gaatggtaggggcaagacagttgcttgtgtctagatcaggggataaactc

SEQ ID NO: 39982 - DNA, 50 bp, unidentified
  source 1..50: mol_type = unassigned DNA; note = donor_f5afab7
  misc_feature 1..23: note = RE
  misc_feature 24..25: note = Core
  misc_feature 26..50: note = LE
gggcttgacttttatttgcaggactcctacaatataaaatacggtaaagg

SEQ ID NO: 39983 - DNA, 50 bp, unidentified
  source 1..50: mol_type = unassigned DNA; note = donor_f5bd5cb
  misc_feature 1..24: note = RE
  misc_feature 25: note = Core
  misc_feature 26..50: note = LE
ccccaccggttgacagaggggtgcctacttgtttgaatctcccctaggcc

SEQ ID NO: 39984 - DNA, 50 bp, unidentified; identical to SEQ ID NO: 39061
  source 1..50: mol_type = unassigned DNA; note = donor_f5cce67
  misc_feature 1..24: note = RE
  misc_feature 25: note = Core
  misc_feature 26..50: note = LE

SEQ ID NO: 39985 - DNA, 50 bp, unidentified; identical to SEQ ID NO: 34366
  source 1..50: mol_type = unassigned DNA; note = donor_f5ce319
  misc_feature 1..23: note = RE
  misc_feature 24..25: note = Core
  misc_feature 26..50: note = LE

SEQ ID NO: 39986 - DNA, 50 bp, unidentified
  source 1..50: mol_type = unassigned DNA; note = donor_f5d4679
  misc_feature 1..23: note = RE
  misc_feature 24..25: note = Core
  misc_feature 26..50: note = LE
tgacaacgaaaaccatgggatgtctaatgggacataccgggcagccgtga

SEQ ID NO: 39987 - DNA, 50 bp, unidentified
  source 1..50: mol_type = unassigned DNA; note = donor_f5d7349
  misc_feature 1..23: note = RE
  misc_feature 24..25: note = Core
  misc_feature 26..50: note = LE
gcgggcgctggtcaacacagttgcttatctgtttggaatctggcagcgta

SEQ ID NO: 39988 - DNA, 50 bp, unidentified
  source 1..50: mol_type = unassigned DNA; note = donor_f5dc253
  misc_feature 1..23: note = RE
  misc_feature 24..25: note = Core
  misc_feature 26..50: note = LE
tgacacttcagctcctgggatgtctaatgagttctgggagtaagccatcc

SEQ ID NO: 39989 - DNA, 50 bp, unidentified
  source 1..50: mol_type = unassigned DNA; note = donor_f5e3855
  misc_feature 1..23: note = RE
  misc_feature 24..25: note = Core
  misc_feature 26..50: note = LE
gcacaatgggaggcatccacacatgatggagtggatgcctccctccccta

SEQ ID NO: 39990 - DNA, 50 bp, unidentified
  source 1..50: mol_type = unassigned DNA; note = donor_f5e87de
  misc_feature 1..22: note = RE
  misc_feature 23..25: note = Core
  misc_feature 26..50: note = LE
tacttgactttttatttgcagactactacaatgtatttatggttaatacc

SEQ ID NO: 39991 - DNA, 50 bp, unidentified; identical to SEQ ID NO: 35512
  source 1..50: mol_type = unassigned DNA; note = donor_f5ed673
  misc_feature 1..23: note = RE
  misc_feature 24..25: note = Core
  misc_feature 26..50: note = LE

SEQ ID NO: 39992 - DNA, 50 bp, unidentified
  source 1..50: mol_type = unassigned DNA; note = donor_f5fe448
  misc_feature 1..23: note = RE
  misc_feature 24..25: note = Core
  misc_feature 26..50: note = LE
agtgttgacatctaatagttaatcttgtattatctatagtagtagttatt

SEQ ID NO: 39993 - DNA, 50 bp, unidentified; identical to SEQ ID NO: 34137
  source 1..50: mol_type = unassigned DNA; note = donor_f601f29
  misc_feature 1..23: note = RE
  misc_feature 24..25: note = Core
  misc_feature 26..50: note = LE

SEQ ID NO: 39994 - DNA, 50 bp, unidentified
  source 1..50: mol_type = unassigned DNA; note = donor_f602b96
  misc_feature 1..23: note = RE
  misc_feature 24..25: note = Core
  misc_feature 26..50: note = LE
gacctcggggcgccgtccagacatgatgaggtggacggcgccccgaacgg

SEQ ID NO: 39995 - DNA, 50 bp, unidentified
  source 1..50: mol_type = unassigned DNA; note = donor_f60cbc0
  misc_feature 1..23: note = RE
  misc_feature 24..25: note = Core
  misc_feature 26..50: note = LE
tcaggtgacttcatgatagttgactcctaccatgaattcatgtatagcgg

SEQ ID NO: 39996 - DNA, 50 bp, unidentified; identical to SEQ ID NO: 30411
  source 1..50: mol_type = unassigned DNA; note = donor_f61d8cb
  misc_feature 1..24: note = RE
  misc_feature 25: note = Core
  misc_feature 26..50: note = LE

SEQ ID NO: 39997 - DNA, 50 bp, unidentified
  source 1..50: mol_type = unassigned DNA; note = donor_f648975
  misc_feature 1..24: note = RE
  misc_feature 25: note = Core
  misc_feature 26..50: note = LE
tgcccgggcgaggcaggtcatacataatgggatgacctgcctcgccctac

SEQ ID NO: 39998 - DNA, 50 bp, unidentified
  source 1..50: mol_type = unassigned DNA; note = donor_f64a3d9
  misc_feature 1..22: note = RE
  misc_feature 23..25: note = Core
  misc_feature 26..50: note = LE
aagcttgttttaatcttagaatgctattagattagcattctgtaaaatca

SEQ ID NO: 39999 - DNA, 50 bp, unidentified
  source 1..50: mol_type = unassigned DNA; note = donor_f64b909
  misc_feature 1..21: note = RE
  misc_feature 22..25: note = Core
  misc_feature 26..50: note = LE
taactattgacgccatagtctcttgtatggataatacatccatcttaatt

SEQ ID NO: 40000 - DNA, 50 bp, unidentified
  source 1..50: mol_type = unassigned DNA; note = donor_f654425
  misc_feature 1..23: note = RE
  misc_feature 24..25: note = Core
  misc_feature 26..50: note = LE
ccgcttgacacttaggagagcatcagtgagactgtcggaaccggtattcc

SEQ ID NO: 40001 - DNA, 50 bp, unidentified
  source 1..50: mol_type = unassigned DNA; note = donor_f658ff0
  misc_feature 1..24: note = RE
  misc_feature 25: note = Core
  misc_feature 26..50: note = LE
cgcgtcccttgacataggagcgtcactcagtctaagatcgcctctgaacg

SEQ ID NO: 40002 - DNA, 50 bp, unidentified
  source 1..50: mol_type = unassigned DNA; note = donor_f667c3c
  misc_feature 1..24: note = RE
  misc_feature 25: note = Core
  misc_feature 26..50: note = LE
tggcaaagtgggggcgtccatatataatggaatggacgccccttcctaaa

SEQ ID NO: 40003 - DNA, 50 bp, unidentified
  source 1..50: mol_type = unassigned DNA; note = donor_f671e01
  misc_feature 1..23: note = RE
  misc_feature 24..25: note = Core
  misc_feature 26..50: note = LE
tctcttgacattttaccgctggactcgtataatagtttttgttaaggttt

SEQ ID NO: 40004 - DNA, 50 bp, unidentified
  source 1..50: mol_type = unassigned DNA; note = donor_f677c7f
  misc_feature 1..24: note = RE
  misc_feature 25: note = Core
  misc_feature 26..50: note = LE
tgcagtcacgcggcggaccatacataattagatggtccgccgcggatcat

SEQ ID NO: 40005 - DNA, 50 bp, unidentified
  source 1..50: mol_type = unassigned DNA; note = donor_f678735
  misc_feature 1..22: note = RE
  misc_feature 23..25: note = Core
  misc_feature 26..50: note = LE
ccaagcaggggccgtccacacatgatggggtggacggcccctgctcaccg

SEQ ID NO: 40006 - DNA, 50 bp, unidentified; identical to SEQ ID NO: 30838
  source 1..50: mol_type = unassigned DNA; note = donor_f680c06
  misc_feature 1..23: note = RE
  misc_feature 24..25: note = Core
  misc_feature 26..50: note = LE

SEQ ID NO: 40007 - DNA, 50 bp, unidentified
  source 1..50: mol_type = unassigned DNA; note = donor_f69b1e4
  misc_feature 1..23: note = RE
  misc_feature 24..25: note = Core
  misc_feature 26..50: note = LE
aggctggttagaagagatggtatcttgtatctcttcttgatgagtgttta

SEQ ID NO: 40008 - DNA, 50 bp, unidentified
  source 1..50: mol_type = unassigned DNA; note = donor_f6a000f
  misc_feature 1..23: note = RE
  misc_feature 24..25: note = Core
  misc_feature 26..50: note = LE
acgcttgacttttatttgcaggtctgatataatatatttgaccggaaaaa

SEQ ID NO: 40009 - DNA, 50 bp, unidentified; identical to SEQ ID NO: 30402
  source 1..50: mol_type = unassigned DNA; note = donor_f6a1ea0
  misc_feature 1..24: note = RE
  misc_feature 25: note = Core
  misc_feature 26..50: note = LE

SEQ ID NO: 40010 - DNA, 50 bp, unidentified
  source 1..50: mol_type = unassigned DNA; note = donor_f6a53a3
  misc_feature 1..23: note = RE
  misc_feature 24..25: note = Core
  misc_feature 26..50: note = LE
aacccgcttgatcaatacggatacttgtcttatgattttcctgtcctgat

SEQ ID NO: 40011 - DNA, 50 bp, unidentified
  source 1..50: mol_type = unassigned DNA; note = donor_f6a9bf1
  misc_feature 1..23: note = RE
  misc_feature 24..25: note = Core
  misc_feature 26..50: note = LE
gccaacggggagccgtccagacatgatgccgtggacggctccctaccacc

SEQ ID NO: 40012 - DNA, 50 bp, unidentified
  source 1..50: mol_type = unassigned DNA; note = donor_f6ad077
  misc_feature 1..22: note = RE
  misc_feature 23..25: note = Core
  misc_feature 26..50: note = LE
aatatcatgctcaagacagttgcttgtatcttggttcttcgttatcatga

SEQ ID NO: 40013 - DNA, 50 bp, unidentified
  source 1..50: mol_type = unassigned DNA; note = donor_f6ae744
  misc_feature 1..23: note = RE
  misc_feature 24..25: note = Core
  misc_feature 26..50: note = LE
tctcttgatttttatatagttagctggtatattataaatgactcatttaa

SEQ ID NO: 40014 - DNA, 50 bp, unidentified
  source 1..50: mol_type = unassigned DNA; note = donor_f6b0fc8
  misc_feature 1..23: note = RE
  misc_feature 24..25: note = Core
  misc_feature 26..50: note = LE
atacttgacgcaaaagagagaatcttgtatcttgcgaactgaggcgtgac

SEQ ID NO: 40015 - DNA, 50 bp, unidentified
  source 1..50: mol_type = unassigned DNA; note = donor_f6b21d2
  misc_feature 1..23: note = RE
  misc_feature 24..25: note = Core
  misc_feature 26..50: note = LE
gacagggggttgacagagggtgtctgatggggataccttctcttcgcacg

SEQ ID NO: 40016 - DNA, 50 bp, unidentified
  source 1..50: mol_type = unassigned DNA; note = donor_f6b2948
  misc_feature 1..23: note = RE
  misc_feature 24..25: note = Core
  misc_feature 26..50: note = LE
gcatcaatgggggcatccatacatgatggcgtggatgcccctcccgacgg

SEQ ID NO: 40017 - DNA, 50 bp, unidentified; identical to SEQ ID NO: 35196
  source 1..50: mol_type = unassigned DNA; note = donor_f6bb993
  misc_feature 1..24: note = RE
  misc_feature 25: note = Core
  misc_feature 26..50: note = LE

SEQ ID NO: 40018 - DNA, 50 bp, unidentified; identical to SEQ ID NO: 31714
  source 1..50: mol_type = unassigned DNA; note = donor_f6bf4fd
  misc_feature 1..23: note = RE
  misc_feature 24..25: note = Core
  misc_feature 26..50: note = LE

SEQ ID NO: 40019 - DNA, 50 bp, unidentified
  source 1..50: mol_type = unassigned DNA; note = donor_f6c48e0
  misc_feature 1..20: note = RE
  misc_feature 21..25: note = Core
  misc_feature 26..50: note = LE
tgacgaaggacatagggacacccccgttactatatacagaccttgatcct

SEQ ID NO: 40020 - DNA, 50 bp, unidentified
  source 1..50: mol_type = unassigned DNA; note = donor_f6cb70c
  misc_feature 1..23: note = RE
  misc_feature 24..25: note = Core
  misc_feature 26..50: note = LE
cgacggcctgagagatacagttgcttctgtatctgggctttgctaaactg

SEQ ID NO: 40021 - DNA, 50 bp, unidentified
  source 1..50: mol_type = unassigned DNA; note = donor_f6d7171
  misc_feature 1..23: note = RE
  misc_feature 24..25: note = Core
  misc_feature 26..50: note = LE
ttgcttaacgtttcagacggtatcttgtatcttggagcttgtagtgatta

SEQ ID NO: 40022 - DNA, 50 bp, unidentified
  source 1..50: mol_type = unassigned DNA; note = donor_f6e8086
  misc_feature 1..21: note = RE
  misc_feature 22..25: note = Core
  misc_feature 26..50: note = LE
ggcgcgacttgaccaagagagctcattggatgagtattgaacttgcaggt

SEQ ID NO: 40023 - DNA, 50 bp, unidentified
  source 1..50: mol_type = unassigned DNA; note = donor_f6ed963
  misc_feature 1..22: note = RE
  misc_feature 23..25: note = Core
  misc_feature 26..50: note = LE
cagggcgggggccatccacacatgatggggtggatggcccccgttgcggc

SEQ ID NO: 40024 - DNA, 50 bp, unidentified; identical to SEQ ID NO: 35804
  source 1..50: mol_type = unassigned DNA; note = donor_f6ee3d5
  misc_feature 1..24: note = RE
  misc_feature 25: note = Core
  misc_feature 26..50: note = LE

SEQ ID NO: 40025 - DNA, 50 bp, unidentified
  source 1..50: mol_type = unassigned DNA; note = donor_f6f31b9
  misc_feature 1..24: note = RE
  misc_feature 25: note = Core
  misc_feature 26..50: note = LE
ttgcaatgaggaggagtccatatacaatggtatggactcctcctccccta

SEQ ID NO: 40026 - DNA, 50 bp, unidentified
  source 1..50: mol_type = unassigned DNA; note = donor_f6f3487
  misc_feature 1..22: note = RE
  misc_feature 23..25: note = Core
  misc_feature 26..50: note = LE
tacttgacgaccaagacggtatcttgtatcttgaatgttgggatggttag

SEQ ID NO: 40027 - DNA, 50 bp, unidentified
  source 1..50: mol_type = unassigned DNA; note = donor_f6fb869
  misc_feature 1..24: note = RE
  misc_feature 25: note = Core
  misc_feature 26..50: note = LE
gcagcttgacgaaaaccatagaggcgttagcttgtaggtggcctcggagt

SEQ ID NO: 40028 - DNA, 50 bp, unidentified
  source 1..50: mol_type = unassigned DNA; note = donor_f716172
  misc_feature 1..23: note = RE
  misc_feature 24..25: note = Core
  misc_feature 26..50: note = LE
cttgacgaaaaccatagggacacccgttaccttcctcgtagccccgatcg

SEQ ID NO: 40029 - DNA, 50 bp, unidentified
  source 1..50: mol_type = unassigned DNA; note = donor_f717e12
  misc_feature 1..23: note = RE
  misc_feature 24..25: note = Core
  misc_feature 26..50: note = LE
ctaactgaacgtaaagacggtatcttatatcttgatcatcaaccagtact

SEQ ID NO: 40030 - DNA, 50 bp, unidentified
  source 1..50: mol_type = unassigned DNA; note = donor_f71ae32
  misc_feature 1..23: note = RE
  misc_feature 24..25: note = Core
  misc_feature 26..50: note = LE
gttgacaagggggagtccacataagataattggactcccccacaccttga

SEQ ID NO: 40031 - DNA, 50 bp, unidentified
  source 1..50: mol_type = unassigned DNA; note = donor_f734f89
  misc_feature 1..22: note = RE
  misc_feature 23..25: note = Core
  misc_feature 26..50: note = LE
ctacttgactttttatttgcagactactactatgtatttagtggttggta

SEQ ID NO: 40032 - DNA, 50 bp, unidentified
  source 1..50: mol_type = unassigned DNA; note = donor_f739bf1
  misc_feature 1..23: note = RE
  misc_feature 24..25: note = Core
  misc_feature 26..50: note = LE
acgcttgacacgctatatagtcactggtatattaccgtcatccactcgtt

SEQ ID NO: 40033 - DNA, 50 bp, unidentified
  source 1..50: mol_type = unassigned DNA; note = donor_f73cf7a
  misc_feature 1..23: note = RE
  misc_feature 24..25: note = Core
  misc_feature 26..50: note = LE
gaactctacgggccgtccacgcatgttggggtggacggcccaacggcatc

SEQ ID NO: 40034 - DNA, 50 bp, unidentified; identical to SEQ ID NO: 35217
  source 1..50: mol_type = unassigned DNA; note = donor_f74d4fc
  misc_feature 1..23: note = RE
  misc_feature 24..25: note = Core
  misc_feature 26..50: note = LE

SEQ ID NO: 40035 - DNA, 50 bp, unidentified
  source 1..50: mol_type = unassigned DNA; note = donor_f74dc26
  misc_feature 1..23: note = RE
  misc_feature 24..25: note = Core
  misc_feature 26..50: note = LE
tcgcaccgtcaacataacagttgccctgtgtctgaaaagcctgtcataat

SEQ ID NO: 40036 - DNA, 50 bp, unidentified
  source 1..50: mol_type = unassigned DNA; note = donor_f74f041
  misc_feature 1..24: note = RE
  misc_feature 25: note = Core
  misc_feature 26..50: note = LE
ttgacgaaaaacatagggacaccccgttacctttttagcagccccttaaa

SEQ ID NO: 40037 - DNA, 50 bp, unidentified; identical to SEQ ID NO: 36431
  source 1..50: mol_type = unassigned DNA; note = donor_f750e16
  misc_feature 1..23: note = RE
  misc_feature 24..25: note = Core
  misc_feature 26..50: note = LE

SEQ ID NO: 40038 - DNA, 50 bp, unidentified; identical to SEQ ID NO: 30604
  source 1..50: mol_type = unassigned DNA; note = donor_f758f03
  misc_feature 1..23: note = RE
  misc_feature 24..25: note = Core
  misc_feature 26..50: note = LE

SEQ ID NO: 40039 - DNA, 50 bp, unidentified
  source 1..50: mol_type = unassigned DNA; note = donor_f764a37
  misc_feature 1..23: note = RE
  misc_feature 24..25: note = Core
  misc_feature 26..50: note = LE
gcttgacaatccaagaggaatgttctaccatcggattctgtgcagtgacg

SEQ ID NO: 40040 - DNA, 50 bp, unidentified
  source 1..50: mol_type = unassigned DNA; note = donor_f76c3e2
  misc_feature 1..23: note = RE
  misc_feature 24..25: note = Core
  misc_feature 26..50: note = LE
aggcttgacttttcatagctggtcttgtatgatgtattcataaccgaata

SEQ ID NO: 40041 - DNA, 50 bp, unidentified
  source 1..50: mol_type = unassigned DNA; note = donor_f77ea40
  misc_feature 1..23: note = RE
  misc_feature 24..25: note = Core
  misc_feature 26..50: note = LE
aacctcattgaccaacacggatacttgtcttatggcattttcatctgatc

SEQ ID NO: 40042 - DNA, 50 bp, unidentified
  source 1..50: mol_type = unassigned DNA; note = donor_f77f0de
  misc_feature 1..23: note = RE
  misc_feature 24..25: note = Core
  misc_feature 26..50: note = LE
tctcttgacaaccgagggagtatcttgtatcttcagtttctgagcttcgg

SEQ ID NO: 40043 - DNA, 50 bp, unidentified
  source 1..50: mol_type = unassigned DNA; note = donor_f7878bb
  misc_feature 1..23: note = RE
  misc_feature 24..25: note = Core
  misc_feature 26..50: note = LE
gcgcttgactcggaagacggatacttgtatgttcagaccaggccagaacg

SEQ ID NO: 40044 - DNA, 50 bp, unidentified; identical to SEQ ID NO: 33061
  source 1..50: mol_type = unassigned DNA; note = donor_f78c65e
  misc_feature 1..23: note = RE
  misc_feature 24..25: note = Core
  misc_feature 26..50: note = LE

SEQ ID NO: 40045 - DNA, 50 bp, unidentified
  source 1..50: mol_type = unassigned DNA; note = donor_f795005
  misc_feature 1..24: note = RE
  misc_feature 25: note = Core
  misc_feature 26..50: note = LE
tgcgaatgtggggaagcccttgtagaatgaaagggacttccccgtcccga

SEQ ID NO: 40046 - DNA, 50 bp, unidentified
  source 1..50: mol_type = unassigned DNA; note = donor_f7a303f
  misc_feature 1..24: note = RE
  misc_feature 25: note = Core
  misc_feature 26..50: note = LE
aagttcttgacatttcatagttggtgtatgataaatatataaaatattta

SEQ ID NO: 40047 - DNA, 50 bp, unidentified
  source 1..50: mol_type = unassigned DNA; note = donor_f7b22df
  misc_feature 1..23: note = RE
  misc_feature 24..25: note = Core
  misc_feature 26..50: note = LE
ttgcttgacggtggagacggtatcttgtatcttacccctcatagtgatta

SEQ ID NO: 40048 - DNA, 50 bp, unidentified; identical to SEQ ID NO: 30924
  source 1..50: mol_type = unassigned DNA; note = donor_f7b727f
  misc_feature 1..24: note = RE
  misc_feature 25: note = Core
  misc_feature 26..50: note = LE

SEQ ID NO: 40049 - DNA, 50 bp, unidentified
  source 1..50: mol_type = unassigned DNA; note = donor_f7bb27c
  misc_feature 1..24: note = RE
  misc_feature 25: note = Core
  misc_feature 26..50: note = LE
tggcaaaaaaggggcgtccatgtacaatgggatggacgcccctacccgca

SEQ ID NO: 40050 - DNA, 50 bp, unidentified; identical to SEQ ID NO: 30865
  source 1..50: mol_type = unassigned DNA; note = donor_f7c8199
  misc_feature 1..23: note = RE
  misc_feature 24..25: note = Core
  misc_feature 26..50: note = LE

SEQ ID NO: 40051 - DNA, 50 bp, unidentified
  source 1..50: mol_type = unassigned DNA; note = donor_f7c9f8a
  misc_feature 1..24: note = RE
  misc_feature 25: note = Core
  misc_feature 26..50: note = LE
ttctattgactttttatttgcaggcctgttactataaatttatggtgatg

SEQ ID NO: 40052 - DNA, 50 bp, unidentified
  source 1..50: mol_type = unassigned DNA; note = donor_f7cc895
  misc_feature 1..23: note = RE
  misc_feature 24..25: note = Core
  misc_feature 26..50: note = LE
ttgcaaacgggatgcgttcatataaatgtaatgaacgcatcccacctctt

SEQ ID NO: 40053 - DNA, 50 bp, unidentified
  source 1..50: mol_type = unassigned DNA; note = donor_f7dd917
  misc_feature 1..23: note = RE
  misc_feature 24..25: note = Core
  misc_feature 26..50: note = LE
tatcttgacatttcaccgctggactcgtataatatatttatcaacaaaaa

SEQ ID NO: 40054 - DNA, 50 bp, unidentified
  source 1..50: mol_type = unassigned DNA; note = donor_f7e6e00
  misc_feature 1..23: note = RE
  misc_feature 24..25: note = Core
  misc_feature 26..50: note = LE
atgatttggttttatcatagaaatcctttagatttgttttattaatttag

SEQ ID NO: 40055 - DNA, 50 bp, unidentified
  source 1..50: mol_type = unassigned DNA; note = donor_f7ea257
  misc_feature 1..24: note = RE
  misc_feature 25: note = Core
  misc_feature 26..50: note = LE
taggcttgactttttatttgcaggcctgttactatatatttgggtgagga

SEQ ID NO: 40056 - DNA, 50 bp, unidentified; identical to SEQ ID NO: 32831
  source 1..50: mol_type = unassigned DNA; note = donor_f7efa83
  misc_feature 1..22: note = RE
  misc_feature 23..25: note = Core
  misc_feature 26..50: note = LE

SEQ ID NO: 40057 - DNA, 50 bp, unidentified
  source 1..50: mol_type = unassigned DNA; note = donor_f7efe0a
  misc_feature 1..22: note = RE
  misc_feature 23..25: note = Core
  misc_feature 26..50: note = LE
gacggacaggtggcgattagacaacatggggtaatcgcggcgcgatctcc

SEQ ID NO: 40058 - DNA, 50 bp, unidentified
  source 1..50: mol_type = unassigned DNA; note = donor_f7fa31b
  misc_feature 1..23: note = RE
  misc_feature 24..25: note = Core
  misc_feature 26..50: note = LE
ggtttgacacggaaagtcatatcagactgtatgactttccgtgagacaga

SEQ ID NO: 40059 - DNA, 50 bp, unidentified
  source 1..50: mol_type = unassigned DNA; note = donor_f7fd3bd
  misc_feature 1..23: note = RE
  misc_feature 24..25: note = Core
  misc_feature 26..50: note = LE
ttattgacaatctattagccggtttcgtattattaggtcagccagagaaa

SEQ ID NO: 40060 - DNA, 50 bp, unidentified; identical to SEQ ID NO: 30451
  source 1..50: mol_type = unassigned DNA; note = donor_f80960d
  misc_feature 1..23: note = RE
  misc_feature 24..25: note = Core
  misc_feature 26..50: note = LE

SEQ ID NO: 40061 - DNA, 50 bp, unidentified
  source 1..50: mol_type = unassigned DNA; note = donor_f80a6b6
  misc_feature 1..24: note = RE
  misc_feature 25: note = Core
  misc_feature 26..50: note = LE
ttgacaactgggggagcccttgtagaatgaaagggacttccccgtcccga

SEQ ID NO: 40062 - DNA, 50 bp, unidentified; identical to SEQ ID NO: 30869
  source 1..50: mol_type = unassigned DNA; note = donor_f810241
  misc_feature 1..24: note = RE
  misc_feature 25: note = Core
  misc_feature 26..50: note = LE

SEQ ID NO: 40063 - DNA, 50 bp, unidentified
  source 1..50: mol_type = unassigned DNA; note = donor_f81131e
  misc_feature 1..23: note = RE
  misc_feature 24..25: note = Core
  misc_feature 26..50: note = LE
atgcttgacttttaatagttagtcttgtatactcaatactgtaatagtag

SEQ ID NO: 40064 - DNA, 50 bp, unidentified; identical to SEQ ID NO: 31627
  source 1..50: mol_type = unassigned DNA; note = donor_f814aac
  misc_feature 1..23: note = RE
  misc_feature 24..25: note = Core
  misc_feature 26..50: note = LE

SEQ ID NO: 40065 - DNA, 50 bp, unidentified; identical to SEQ ID NO: 33599
  source 1..50: mol_type = unassigned DNA; note = donor_f81cf2c
  misc_feature 1..23: note = RE
  misc_feature 24..25: note = Core
  misc_feature 26..50: note = LE

SEQ ID NO: 40066 - DNA, 50 bp, unidentified
  source 1..50: mol_type = unassigned DNA; note = donor_f8209ef
  misc_feature 1..23: note = RE
  misc_feature 24..25: note = Core
  misc_feature 26..50: note = LE
acttgaaaattcaagggggatgttctaccattggattttgtgcggagacg

SEQ ID NO: 40067 - DNA, 50 bp, unidentified; identical to SEQ ID NO: 33607
  source 1..50: mol_type = unassigned DNA; note = donor_f826222
  misc_feature 1..23: note = RE
  misc_feature 24..25: note = Core
  misc_feature 26..50: note = LE

SEQ ID NO: 40068 - DNA, 50 bp, unidentified
  source 1..50: mol_type = unassigned DNA; note = donor_f82bb98
  misc_feature 1..24: note = RE
  misc_feature 25: note = Core
  misc_feature 26..50: note = LE
ggggttgacaaaaccatagagacacattacagtttgagccggccctcggg

SEQ ID NO: 40069 - DNA, 50 bp, unidentified; identical to SEQ ID NO: 30818
  source 1..50: mol_type = unassigned DNA; note = donor_f82faaa
  misc_feature 1..24: note = RE
  misc_feature 25: note = Core
  misc_feature 26..50: note = LE

SEQ ID NO: 40070 - DNA, 50 bp, unidentified
  source 1..50: mol_type = unassigned DNA; note = donor_f8302e6
  misc_feature 1..23: note = RE
  misc_feature 24..25: note = Core
  misc_feature 26..50: note = LE
aggattgacttttaatagttaatcttgtattatagagtagtagtgattag

SEQ ID NO: 40071 - DNA, 50 bp, unidentified
  source 1..50: mol_type = unassigned DNA; note = donor_f83759a
  misc_feature 1..23: note = RE
  misc_feature 24..25: note = Core
  misc_feature 26..50: note = LE
cagcttgatccacaccatagaatcttgtatggtgagggtgcgccttccgt

SEQ ID NO: 40072 - DNA, 50 bp, unidentified
  source 1..50: mol_type = unassigned DNA; note = donor_f841532
  misc_feature 1..23: note = RE
  misc_feature 24..25: note = Core
  misc_feature 26..50: note = LE
ataacttgcttatgtcatagaaatcctttagattagcatagttaaattta

SEQ ID NO: 40073 - DNA, 50 bp, unidentified
  source 1..50: mol_type = unassigned DNA; note = donor_f84f960
  misc_feature 1..23: note = RE
  misc_feature 24..25: note = Core
  misc_feature 26..50: note = LE
gacagcccaacgacatgggatgtctaatgggactgcccgggtcggggtcc

SEQ ID NO: 40074 - DNA, 50 bp, unidentified
  source 1..50: mol_type = unassigned DNA; note = donor_f8571db
  misc_feature 1..23: note = RE
  misc_feature 24..25: note = Core
  misc_feature 26..50: note = LE
gggattgactttttatttgcaggctgttactatatacatgccccatgttt

SEQ ID NO: 40075 - DNA, 50 bp, unidentified
  source 1..50: mol_type = unassigned DNA; note = donor_f864527
  misc_feature 1..24: note = RE
  misc_feature 25: note = Core
  misc_feature 26..50: note = LE
acatttggctaaatacataggaagctttaactttgcagtttgaaaagaga

SEQ ID NO: 40076 - DNA, 50 bp, unidentified
  source 1..50: mol_type = unassigned DNA; note = donor_f86d989
  misc_feature 1..24: note = RE
  misc_feature 25: note = Core
  misc_feature 26..50: note = LE
tgcaaacgaggaggggtccatatacaatgggatggacccctcctcacctt

SEQ ID NO: 40077 - DNA, 50 bp, unidentified
  source 1..50: mol_type = unassigned DNA; note = donor_f876e7b
  misc_feature 1..23: note = RE
  misc_feature 24..25: note = Core
  misc_feature 26..50: note = LE
gcaaaggtcaggctgaccatagattaatgtgatggtcagcctgacctaaa

SEQ ID NO: 40078 - DNA, 50 bp, unidentified; identical to SEQ ID NO: 33868
  source 1..50: mol_type = unassigned DNA; note = donor_f881a1b
  misc_feature 1..24: note = RE
  misc_feature 25: note = Core
  misc_feature 26..50: note = LE

SEQ ID NO: 40079 - DNA, 50 bp, unidentified
  source 1..50: mol_type = unassigned DNA; note = donor_f8911ed
  misc_feature 1..23: note = RE
  misc_feature 24..25: note = Core
  misc_feature 26..50: note = LE
tgacacttaagctcctgggatgtctaatgagtgttagcgaggctgctatc

SEQ ID NO: 40080 - DNA, 50 bp, unidentified
  source 1..50: mol_type = unassigned DNA; note = donor_f892db7
  misc_feature 1..24: note = RE
  misc_feature 25: note = Core
  misc_feature 26..50: note = LE
ttgcaatcgggcggggtccatatacaatggtatggaccccgccctccctg

SEQ ID NO: 40081 - DNA, 50 bp, unidentified
  source 1..50: mol_type = unassigned DNA; note = donor_f89678b
  misc_feature 1..23: note = RE
  misc_feature 24..25: note = Core
  misc_feature 26..50: note = LE
actattgacttttcatagttggtcttgtatgatgtatttagtaataaata

SEQ ID NO: 40082 - DNA, 50 bp, unidentified
  source 1..50: mol_type = unassigned DNA; note = donor_f89bc9b
  misc_feature 1..24: note = RE
  misc_feature 25: note = Core
  misc_feature 26..50: note = LE
agcaaatgaggaggagtccatatacaatggtatggactcctcctctcctt

SEQ ID NO: 40083 - DNA, 50 bp, unidentified; identical to SEQ ID NO: 34822
  source 1..50: mol_type = unassigned DNA; note = donor_f8b5c34
  misc_feature 1..24: note = RE
  misc_feature 25: note = Core
  misc_feature 26..50: note = LE

SEQ ID NO: 40084 - DNA, 50 bp, unidentified
  source 1..50: mol_type = unassigned DNA; note = donor_f8bc352
  misc_feature 1..24: note = RE
  misc_feature 25: note = Core
  misc_feature 26..50: note = LE
gcgccccttgacacagaggggtgcctactaggagacttccctgcaggatc

SEQ ID NO: 40085 - DNA, 50 bp, unidentified
  source 1..50: mol_type = unassigned DNA; note = donor_f8bde8d
  misc_feature 1..20: note = RE
  misc_feature 21..25: note = Core
  misc_feature 26..50: note = LE
cacttgaattttatatagttacctggtatattgtaattgactcatttaat

SEQ ID NO: 40086 - DNA, 50 bp, unidentified
  source 1..50: mol_type = unassigned DNA; note = donor_f8c20d1
  misc_feature 1..23: note = RE
  misc_feature 24..25: note = Core
  misc_feature 26..50: note = LE
ctacttgacttttgttagcaggtctattacaataaaattgtcgggtaaag

SEQ ID NO: 40087 - DNA, 50 bp, unidentified
  source 1..50: mol_type = unassigned DNA; note = donor_f8c68f9
  misc_feature 1..23: note = RE
  misc_feature 24..25: note = Core
  misc_feature 26..50: note = LE
tttcttgacatttaatagctggtctcgtataataatgttgtagttaaaaa

SEQ ID NO: 40088 - DNA, 50 bp, unidentified
  source 1..50: mol_type = unassigned DNA; note = donor_f8cb2b2
  misc_feature 1..24: note = RE
  misc_feature 25: note = Core
  misc_feature 26..50: note = LE
ggcaaatcaggaggagtccatatacaatgggatggactcctcctcccgcg

SEQ ID NO: 40089 - DNA, 50 bp, unidentified
  source 1..50: mol_type = unassigned DNA; note = donor_f8cf246
  misc_feature 1..22: note = RE
  misc_feature 23..25: note = Core
  misc_feature 26..50: note = LE
ctacttgacttttgttagcaggtttagtaccataaaagtgtagttgttag

SEQ ID NO: 40090 - DNA, 50 bp, unidentified
  source 1..50: mol_type = unassigned DNA; note = donor_f8d5cc2
  misc_feature 1..23: note = RE
  misc_feature 24..25: note = Core
  misc_feature 26..50: note = LE
ctacttgacttcataccattggactcgtataataagttttaaagttaata

SEQ ID NO: 40091 - DNA, 50 bp, unidentified
  source 1..50: mol_type = unassigned DNA; note = donor_f8d96e6
  misc_feature 1..23: note = RE
  misc_feature 24..25: note = Core
  misc_feature 26..50: note = LE
gcataacgggaggtgtccatatacgatgtgatggacacctcctaccttac

SEQ ID NO: 40092 - DNA, 50 bp, unidentified
  source 1..50: mol_type = unassigned DNA; note = donor_f8d9b32
  misc_feature 1..24: note = RE
  misc_feature 25: note = Core
  misc_feature 26..50: note = LE
tggcaaactgagggcgtccgtatataatggaatggacgccctctttcaaa

SEQ ID NO: 40093 - DNA, 50 bp, unidentified
  source 1..50: mol_type = unassigned DNA; note = donor_f8df5d9
  misc_feature 1..22: note = RE
  misc_feature 23..25: note = Core
  misc_feature 26..50: note = LE
ctgcttgacttttcttagcaggtttagtgccataaaagtgtagcagttag

SEQ ID NO: 40094 - DNA, 50 bp, unidentified
  source 1..50: mol_type = unassigned DNA; note = donor_f8e2197
  misc_feature 1..23: note = RE
  misc_feature 24..25: note = Core
  misc_feature 26..50: note = LE
taatgagtggctatagacagttgcttgtatctctaaagcggattactatt

SEQ ID NO: 40095 - DNA, 50 bp, unidentified
  source 1..50: mol_type = unassigned DNA; note = donor_f8e3350
  misc_feature 1..22: note = RE
  misc_feature 23..25: note = Core
  misc_feature 26..50: note = LE
attgacaagttgctttaacaggcatataaaggaactgccctttacaaaca

SEQ ID NO: 40096 - DNA, 50 bp, unidentified; identical to SEQ ID NO: 30422
  source 1..50: mol_type = unassigned DNA; note = donor_f8ee331
  misc_feature 1..23: note = RE
  misc_feature 24..25: note = Core
  misc_feature 26..50: note = LE

SEQ ID NO: 40097 - DNA, 50 bp, unidentified
  source 1..50: mol_type = unassigned DNA; note = donor_f8f911e
  misc_feature 1..23: note = RE
  misc_feature 24..25: note = Core
  misc_feature 26..50: note = LE
ccaagcaggggccgtccacacaggatggggtggacggtcccttgccatag

SEQ ID NO: 40098 - DNA, 50 bp, unidentified
  source 1..50: mol_type = unassigned DNA; note = donor_f9002d9
  misc_feature 1..24: note = RE
  misc_feature 25: note = Core
  misc_feature 26..50: note = LE
ccgcttgacaacgtcattgagaatccttacctttcttgaagggtgtttgg

SEQ ID NO: 40099 - DNA, 50 bp, unidentified
  source 1..50: mol_type = unassigned DNA; note = donor_f9027c0
  misc_feature 1..22: note = RE
  misc_feature 23..25: note = Core
  misc_feature 26..50: note = LE
catgcaaggggccgtccacacatgatggggtggacggccccaccacggca

SEQ ID NO: 40100 - DNA, 50 bp, unidentified; identical to SEQ ID NO: 30418
  source 1..50: mol_type = unassigned DNA; note = donor_f903f65
  misc_feature 1..23: note = RE
  misc_feature 24..25: note = Core
  misc_feature 26..50: note = LE

SEQ ID NO: 40101 - DNA, 50 bp, unidentified
  source 1..50: mol_type = unassigned DNA; note = donor_f905765
  misc_feature 1..22: note = RE
  misc_feature 23..25: note = Core
  misc_feature 26..50: note = LE
atacttgacttatattagcaggtttcgtactatgtaagtgtagattatca

SEQ ID NO: 40102 - DNA, 50 bp, unidentified
  source 1..50: mol_type = unassigned DNA; note = donor_f9094d7
  misc_feature 1..24: note = RE
  misc_feature 25: note = Core
  misc_feature 26..50: note = LE
gcggcttgacgaaaaccatagaggccgttagcttctaagggcaccgcttc

SEQ ID NO: 40103 - DNA, 50 bp, unidentified
  source 1..50: mol_type = unassigned DNA; note = donor_f914ea2
  misc_feature 1..23: note = RE
  misc_feature 24..25: note = Core
  misc_feature 26..50: note = LE
gcgatccgggaggcgtccacataagatggtatggacgcctcccccagcaa

SEQ ID NO: 40104 - DNA, 50 bp, unidentified
  source 1..50: mol_type = unassigned DNA; note = donor_f92d773
  misc_feature 1..23: note = RE
  misc_feature 24..25: note = Core
  misc_feature 26..50: note = LE
gcatttttgggcgcgtccatgcacgatggggtggacgcgcccttccgggg

SEQ ID NO: 40105 - DNA, 50 bp, unidentified
  source 1..50: mol_type = unassigned DNA; note = donor_f943865
  misc_feature 1..23: note = RE
  misc_feature 24..25: note = Core
  misc_feature 26..50: note = LE
gcatttacgggggtgtccacagatgatggggtggacacccctcgacggca

SEQ ID NO: 40106 - DNA, 50 bp, unidentified; identical to SEQ ID NO: 32094
  source 1..50: mol_type = unassigned DNA; note = donor_f94900c
  misc_feature 1..24: note = RE
  misc_feature 25: note = Core
  misc_feature 26..50: note = LE

SEQ ID NO: 40107 - DNA, 50 bp, unidentified
  source 1..50: mol_type = unassigned DNA; note = donor_f94c89a
  misc_feature 1..22: note = RE
  misc_feature 23..25: note = Core
  misc_feature 26..50: note = LE
cccaacgggggccgtccacacatgatggggtggacggcccccgacccgac

SEQ ID NO: 40108 - DNA, 50 bp, unidentified
  source 1..50: mol_type = unassigned DNA; note = donor_f957379
  misc_feature 1..23: note = RE
  misc_feature 24..25: note = Core
  misc_feature 26..50: note = LE
cggcttgacaatctcattgagaatccttaccgttataggtgggtcttcga

SEQ ID NO: 40109 - DNA, 50 bp, unidentified
  source 1..50: mol_type = unassigned DNA; note = donor_f95b527
  misc_feature 1..23: note = RE
  misc_feature 24..25: note = Core
  misc_feature 26..50: note = LE
gacccgccgcaacttaatggttgcttgtaatagcgaaatcgattatcgtc

SEQ ID NO: 40110 - DNA, 50 bp, unidentified
  source 1..50: mol_type = unassigned DNA; note = donor_f96867e
  misc_feature 1..23: note = RE
  misc_feature 24..25: note = Core
  misc_feature 26..50: note = LE
actgttgacttttaatagttagtctcgcattatatagtcacgcccattct

SEQ ID NO: 40111 - DNA, 50 bp, unidentified
  source 1..50: mol_type = unassigned DNA; note = donor_f96e85b
  misc_feature 1..23: note = RE
  misc_feature 24..25: note = Core
  misc_feature 26..50: note = LE
acccgttgtttaatccataagaataccttagatttgatcgattgtattta

SEQ ID NO: 40112 - DNA, 50 bp, unidentified
  source 1..50: mol_type = unassigned DNA; note = donor_f96f4c2
  misc_feature 1..23: note = RE
  misc_feature 24..25: note = Core
  misc_feature 26..50: note = LE
cctattgactttttattagtaggctcctaatatatagttgtggggttaag

SEQ ID NO: 40113 - DNA, 50 bp, unidentified
  source 1..50: mol_type = unassigned DNA; note = donor_f97b2d2
  misc_feature 1..24: note = RE
  misc_feature 25: note = Core
  misc_feature 26..50: note = LE
ccacttcttgacacagaggggagcctacttgttgtatggacgcacggctc

SEQ ID NO: 40114 - DNA, 50 bp, unidentified
  source 1..50: mol_type = unassigned DNA; note = donor_f983033
  misc_feature 1..23: note = RE
  misc_feature 24..25: note = Core
  misc_feature 26..50: note = LE
attttaggtggaagagatggtatcttgtatcttgccccactcaaaatggt

SEQ ID NO: 40115 - DNA, 50 bp, unidentified
  source 1..50: mol_type = unassigned DNA; note = donor_f9868e0
  misc_feature 1..23: note = RE
  misc_feature 24..25: note = Core
  misc_feature 26..50: note = LE
tgtaagagggagctgtccacatatgttgggttggacggctcccaacggca

SEQ ID NO: 40116 - DNA, 50 bp, unidentified
  source 1..50: mol_type = unassigned DNA; note = donor_f988f91
  misc_feature 1..24: note = RE
  misc_feature 25: note = Core
  misc_feature 26..50: note = LE
tgctacgcacggccggaccatacataatggaatggtccggccgtgctccc

SEQ ID NO: 40117 - DNA, 50 bp, unidentified; identical to SEQ ID NO: 36899
  source 1..50: mol_type = unassigned DNA; note = donor_f990f47
  misc_feature 1..23: note = RE
  misc_feature 24..25: note = Core
  misc_feature 26..50: note = LE

SEQ ID NO: 40118 - DNA, 50 bp, unidentified
  source 1..50: mol_type = unassigned DNA; note = donor_f9955d0
  misc_feature 1..22: note = RE
  misc_feature 23..25: note = Core
  misc_feature 26..50: note = LE
caaaaagggagccatccacacaggatggtgtggatggctcctgcaccatt

SEQ ID NO: 40119 - DNA, 50 bp, unidentified
  source 1..50: mol_type = unassigned DNA; note = donor_f99d297
  misc_feature 1..23: note = RE
  misc_feature 24..25: note = Core
  misc_feature 26..50: note = LE
cgctgggggttgacaaaggatgtctgatggctctaccctcctgcattgag

SEQ ID NO: 40120 - DNA, 50 bp, unidentified
  source 1..50: mol_type = unassigned DNA; note = donor_f9aaa70
  misc_feature 1..23: note = RE
  misc_feature 24..25: note = Core
  misc_feature 26..50: note = LE
ccaacacatgaacaagacagttgcttgtgtctttgaattttgctagagaa

SEQ ID NO: 40121 - DNA, 50 bp, unidentified
  source 1..50: mol_type = unassigned DNA; note = donor_f9adc42
  misc_feature 1..24: note = RE
  misc_feature 25: note = Core
  misc_feature 26..50: note = LE
tgcgtcttggaggtcgtccacacatgatggtgtggacgacctccacctga

SEQ ID NO: 40122 - DNA, 50 bp, unidentified
  source 1..50: mol_type = unassigned DNA; note = donor_f9b5899
  misc_feature 1..24: note = RE
  misc_feature 25: note = Core
  misc_feature 26..50: note = LE
gaccctcttgacatagaggggagcctacttgttgacttgtgctacggccg

SEQ ID NO: 40123 - DNA, 50 bp, unidentified
  source 1..50: mol_type = unassigned DNA; note = donor_f9b6f8a
  misc_feature 1..23: note = RE
  misc_feature 24..25: note = Core
  misc_feature 26..50: note = LE
gcaaccggggaggcgtccatataaaatggtatggacgcctcccatcttaa

SEQ ID NO: 40124 - DNA, 50 bp, unidentified
  source 1..50: mol_type = unassigned DNA; note = donor_f9b923d
  misc_feature 1..24: note = RE
  misc_feature 25: note = Core
  misc_feature 26..50: note = LE
accccttgaccaaagtcataggggcccccccattaccgtcttcgtggccc

SEQ ID NO: 40125 - DNA, 50 bp, unidentified
  source 1..50: mol_type = unassigned DNA; note = donor_f9c2f58
  misc_feature 1..23: note = RE
  misc_feature 24..25: note = Core
  misc_feature 26..50: note = LE
cagggtgagggtcaagacggtatcttgtatctcgactttcgcctcccaag

SEQ ID NO: 40126 - DNA, 50 bp, unidentified
  source 1..50: mol_type = unassigned DNA; note = donor_f9c63e5
  misc_feature 1..23: note = RE
  misc_feature 24..25: note = Core
  misc_feature 26..50: note = LE
gacatccctacgccatggggtgtctaatgggccttgtcgggccgtgagga

SEQ ID NO: 40127 - DNA, 50 bp, unidentified
  source 1..50: mol_type = unassigned DNA; note = donor_f9c7e40
  misc_feature 1..23: note = RE
  misc_feature 24..25: note = Core
  misc_feature 26..50: note = LE
cttgccaaggggccatccatacatgatggtgtggatggccccaccagcgg

SEQ ID NO: 40128 - DNA, 50 bp, unidentified
  source 1..50: mol_type = unassigned DNA; note = donor_f9c9fc1
  misc_feature 1..23: note = RE
  misc_feature 24..25: note = Core
  misc_feature 26..50: note = LE
gcatcaaacggggcatccacacatgatggtgtggatgcctcacccctgaa

SEQ ID NO: 40129 - DNA, 50 bp, unidentified
  source 1..50: mol_type = unassigned DNA; note = donor_f9ccca3
  misc_feature 1..22: note = RE
  misc_feature 23..25: note = Core
  misc_feature 26..50: note = LE
cctattgacttttatttgcaggactcctacaatatatttgtaggtagccc

SEQ ID NO: 40130 - DNA, 50 bp, unidentified
  source 1..50: mol_type = unassigned DNA; note = donor_f9cef77
  misc_feature 1..23: note = RE
  misc_feature 24..25: note = Core
  misc_feature 26..50: note = LE
cttgcgcgggaggcgtccatagattatgggatggacgcctcccgcaagcg

SEQ ID NO: 40131 - DNA, 50 bp, unidentified
  source 1..50: mol_type = unassigned DNA; note = donor_f9cf488
  misc_feature 1..22: note = RE
  misc_feature 23..25: note = Core
  misc_feature 26..50: note = LE
cggcttgactcggtcattgaaactccgtaagttgttggacggcccgggag

SEQ ID NO: 40132 - DNA, 50 bp, unidentified; identical to SEQ ID NO: 36535
  source 1..50: mol_type = unassigned DNA; note = donor_f9d172b
  misc_feature 1..22: note = RE
  misc_feature 23..25: note = Core
  misc_feature 26..50: note = LE

SEQ ID NO: 40133 - DNA, 50 bp, unidentified
  source 1..50: mol_type = unassigned DNA; note = donor_f9e15b6
  misc_feature 1..23: note = RE
  misc_feature 24..25: note = Core
  misc_feature 26..50: note = LE
atctggcttgaccatcacggatacttgccttatggttttcccggctcatc

SEQ ID NO: 40134 - DNA, 50 bp, unidentified
  source 1..50: mol_type = unassigned DNA; note = donor_f9e3381
  misc_feature 1..23: note = RE
  misc_feature 24..25: note = Core
  misc_feature 26..50: note = LE
gcaactctgcggcggaccatacataatgggatggtccgccgcaggaacct

SEQ ID NO: 40135 - DNA, 50 bp, unidentified; identical to SEQ ID NO: 39402
  source 1..50: mol_type = unassigned DNA; note = donor_f9e5b02
  misc_feature 1..21: note = RE
  misc_feature 22..25: note = Core
  misc_feature 26..50: note = LE

SEQ ID NO: 40136 - DNA, 50 bp, unidentified
  source 1..50: mol_type = unassigned DNA; note = donor_f9f0b9a
  misc_feature 1..23: note = RE
  misc_feature 24..25: note = Core
  misc_feature 26..50: note = LE
cttgccaaggaggcgtccacatatgatgatgtggacgcctccatcaccgg

SEQ ID NO: 40137 - DNA, 50 bp, unidentified
  source 1..50: mol_type = unassigned DNA; note = donor_f9f87b5
  misc_feature 1..21: note = RE
  misc_feature 22..25: note = Core
  misc_feature 26..50: note = LE
tcgcagcttgacacatgtcaactcactggtgcaccatccttgcgtcggcg

SEQ ID NO: 40138 - DNA, 50 bp, unidentified
  source 1..50: mol_type = unassigned DNA; note = donor_f9ffbcd
  misc_feature 1..23: note = RE
  misc_feature 24..25: note = Core
  misc_feature 26..50: note = LE
gccaacccggagccgtccacacatgatgctgtggacggctcctccacccg

SEQ ID NO: 40139 - DNA, 50 bp, unidentified
  source 1..50: mol_type = unassigned DNA; note = donor_fa04563
  misc_feature 1..23: note = RE
  misc_feature 24..25: note = Core
  misc_feature 26..50: note = LE
gcaggagatgggctgaccatacattaatgagatggtcaacctgaccgaga

SEQ ID NO: 40140 - DNA, 50 bp, unidentified
  source 1..50: mol_type = unassigned DNA; note = donor_fa0580a
  misc_feature 1..23: note = RE
  misc_feature 24..25: note = Core
  misc_feature 26..50: note = LE
aacatggtactgagagatggtatcttgaatctctcagtctgatatatttg

SEQ ID NO: 40141 - DNA, 50 bp, unidentified
  source 1..50: mol_type = unassigned DNA; note = donor_fa07c46
  misc_feature 1..22: note = RE
  misc_feature 23..25: note = Core
  misc_feature 26..50: note = LE
cttgacttcgaaagccccatacaagatgctatgggcggcagcggggagca

SEQ ID NO: 40142 - DNA, 50 bp, unidentified
  source 1..50: mol_type = unassigned DNA; note = donor_fa12a2f
  misc_feature 1..24: note = RE
  misc_feature 25: note = Core
  misc_feature 26..50: note = LE
ttgcataccgagagcgtccatgtataatgggatggacgctctcaccctaa

SEQ ID NO: 40143 - DNA, 50 bp, unidentified
  source 1..50: mol_type = unassigned DNA; note = donor_fa16e53
  misc_feature 1..23: note = RE
  misc_feature 24..25: note = Core
  misc_feature 26..50: note = LE
tgacatccgagatccagggatgtctaatgggaggcaccaaggctggccgg

SEQ ID NO: 40144 - DNA, 50 bp, unidentified
  source 1..50: mol_type = unassigned DNA; note = donor_fa19c46
  misc_feature 1..23: note = RE
  misc_feature 24..25: note = Core
  misc_feature 26..50: note = LE
aggcttgacttttaatagttagtcttgtattatagagtagtagtttttag

SEQ ID NO: 40145 - DNA, 50 bp, unidentified
  source 1..50: mol_type = unassigned DNA; note = donor_fa1ccb3
  misc_feature 1..24: note = RE
  misc_feature 25: note = Core
  misc_feature 26..50: note = LE
cccgatagggcccccccccccccccgttaccttcttcgcagccctcgggg

SEQ ID NO: 40146 - DNA, 50 bp, unidentified; identical to SEQ ID NO: 35963
  source 1..50: mol_type = unassigned DNA; note = donor_fa1eab3
  misc_feature 1..24: note = RE
  misc_feature 25: note = Core
  misc_feature 26..50: note = LE

SEQ ID NO: 40147 - DNA, 50 bp, unidentified
  source 1..50: mol_type = unassigned DNA; note = donor_fa1edda
  misc_feature 1..21: note = RE
  misc_feature 22..25: note = Core
  misc_feature 26..50: note = LE
gccaaggttgacacagggcaactcactggtgcaccatcctcaggtcggta

SEQ ID NO: 40148 - DNA, 50 bp, unidentified
  source 1..50: mol_type = unassigned DNA; note = donor_fa1fbb9
  misc_feature 1..23: note = RE
  misc_feature 24..25: note = Core
  misc_feature 26..50: note = LE
tcactttactaattcatagctagctcgtatattaatattgtcagatacat

SEQ ID NO: 40149 - DNA, 50 bp, unidentified
  source 1..50: mol_type = unassigned DNA; note = donor_fa2508b
  misc_feature 1..24: note = RE
  misc_feature 25: note = Core
  misc_feature 26..50: note = LE
agagttgttttttacctcagttcttcttaagtttgattctcattaaatcg

SEQ ID NO: 40150 - DNA, 50 bp, unidentified
  source 1..50: mol_type = unassigned DNA; note = donor_fa2b28e
  misc_feature 1..23: note = RE
  misc_feature 24..25: note = Core
  misc_feature 26..50: note = LE
tgagggcttgagcaaaacggatacttgtcttatgatttttcccggctttt

SEQ ID NO: 40151 - DNA, 50 bp, unidentified
  source 1..50: mol_type = unassigned DNA; note = donor_fa38df8
  misc_feature 1..23: note = RE
  misc_feature 24..25: note = Core
  misc_feature 26..50: note = LE
ttacttgttttttaatacagttcgtcgtacgtttgtagttagttaaacaa

SEQ ID NO: 40152 - DNA, 50 bp, unidentified
  source 1..50: mol_type = unassigned DNA; note = donor_fa46090
  misc_feature 1..23: note = RE
  misc_feature 24..25: note = Core
  misc_feature 26..50: note = LE
gccttgacaggtcaaaacatatcagacatgatgttttgacctgcccgtcc

SEQ ID NO: 40153 - DNA, 50 bp, unidentified
  source 1..50: mol_type = unassigned DNA; note = donor_fa47690
  misc_feature 1..22: note = RE
  misc_feature 23..25: note = Core
  misc_feature 26..50: note = LE
tgcttgacattcaagataatcgcttgtatcttaagagtagagagatagac

SEQ ID NO: 40154 - DNA, 50 bp, unidentified; identical to SEQ ID NO: 31332
  source 1..50: mol_type = unassigned DNA; note = donor_fa49708
  misc_feature 1..23: note = RE
  misc_feature 24..25: note = Core
  misc_feature 26..50: note = LE

SEQ ID NO: 40155 - DNA, 50 bp, unidentified; identical to SEQ ID NO: 37664
  source 1..50: mol_type = unassigned DNA; note = donor_fa4ec0d
  misc_feature 1..23: note = RE
  misc_feature 24..25: note = Core
  misc_feature 26..50: note = LE

SEQ ID NO: 40156 - DNA, 50 bp, unidentified
  source 1..50: mol_type = unassigned DNA; note = donor_fa518fe
  misc_feature 1..23: note = RE
  misc_feature 24..25: note = Core
  misc_feature 26..50: note = LE
gcatcacgggcggcaaccatagaagatgggatggttgccgccctccccaa

SEQ ID NO: 40157 - DNA, 50 bp, unidentified; identical to SEQ ID NO: 35458
  source 1..50: mol_type = unassigned DNA; note = donor_fa576db
  misc_feature 1..23: note = RE
  misc_feature 24..25: note = Core
  misc_feature 26..50: note = LE

SEQ ID NO: 40158 - DNA, 50 bp, unidentified
  source 1..50: mol_type = unassigned DNA; note = donor_fa5a718
  misc_feature 1..24: note = RE
  misc_feature 25: note = Core
  misc_feature 26..50: note = LE
acccttgacaactattagcaagtttcgtactatataagagtagagaaaaa

SEQ ID NO: 40159 - DNA, 50 bp, unidentified
  source 1..50: mol_type = unassigned DNA; note = donor_fa6f830
  misc_feature 1..22: note = RE
  misc_feature 23..25: note = Core
  misc_feature 26..50: note = LE
cccttgatttttgatagttggtcttgtataatagatttcagttgatgagg

SEQ ID NO: 40160 - DNA, 50 bp, unidentified
  source 1..50: mol_type = unassigned DNA; note = donor_fa7058e
  misc_feature 1..24: note = RE
  misc_feature 25: note = Core
  misc_feature 26..50: note = LE
aatcttgacaactattagctggtttcgtaatataaggttagccagatttt

SEQ ID NO: 40161 - DNA, 50 bp, unidentified
  source 1..50: mol_type = unassigned DNA; note = donor_fa70fb3
  misc_feature 1..23: note = RE
  misc_feature 24..25: note = Core
  misc_feature 26..50: note = LE
ttacttgacttttatatagttagctggtatattagaaatgactcatctga

SEQ ID NO: 40162 - DNA, 50 bp, unidentified
  source 1..50: mol_type = unassigned DNA; note = donor_fa7a698
  misc_feature 1..23: note = RE
  misc_feature 24..25: note = Core
  misc_feature 26..50: note = LE
acacccaacgggcccattacagaagatgacgtaatgggccaaggagctgg

SEQ ID NO: 40163 - DNA, 50 bp, unidentified
  source 1..50: mol_type = unassigned DNA; note = donor_fa7d429
  misc_feature 1..23: note = RE
  misc_feature 24..25: note = Core
  misc_feature 26..50: note = LE
aggcttgacgggcgagacggtatcttgtatcttgatcgagttgatgatta

SEQ ID NO: 40164 - DNA, 50 bp, unidentified
  source 1..50: mol_type = unassigned DNA; note = donor_fa8eac6
  misc_feature 1..21: note = RE
  misc_feature 22..25: note = Core
  misc_feature 26..50: note = LE
gcttgacttttaatagctggtctcctagaataatgttgtcgcatttgtta

SEQ ID NO: 40165 - DNA, 50 bp, unidentified
  source 1..50: mol_type = unassigned DNA; note = donor_fa971d7
  misc_feature 1..24: note = RE
  misc_feature 25: note = Core
  misc_feature 26..50: note = LE
tggcttgtattttaactcagttcttcttaagtttgtcttttagtaaattt

SEQ ID NO: 40166 - DNA, 50 bp, unidentified
  source 1..50: mol_type = unassigned DNA; note = donor_fa9f145
  misc_feature 1..23: note = RE
  misc_feature 24..25: note = Core
  misc_feature 26..50: note = LE
gcaaacggggaggagaccatatacgatgagatggtctcctcccctcttaa

SEQ ID NO: 40167 - DNA, 50 bp, unidentified; identical to SEQ ID NO: 35512
  source 1..50: mol_type = unassigned DNA; note = donor_faa57f7
  misc_feature 1..23: note = RE
  misc_feature 24..25: note = Core
  misc_feature 26..50: note = LE

SEQ ID NO: 40168 - DNA, 50 bp, unidentified
  source 1..50: mol_type = unassigned DNA; note = donor_faa8cda
  misc_feature 1..23: note = RE
  misc_feature 24..25: note = Core
  misc_feature 26..50: note = LE
cccgatgaggggcaagacggtatcttgtatctcgactatcgctccgccag

SEQ ID NO: 40169 - DNA, 50 bp, unidentified
  source 1..50: mol_type = unassigned DNA; note = donor_fab38a7
  misc_feature 1..24: note = RE
  misc_feature 25: note = Core
  misc_feature 26..50: note = LE
agagttggtttttacctcagttcttcttaagtttgaatctcactaaatta

SEQ ID NO: 40170 - DNA, 50 bp, unidentified; identical to SEQ ID NO: 30373
  source 1..50: mol_type = unassigned DNA; note = donor_fabaf4b
  misc_feature 1..23: note = RE
  misc_feature 24..25: note = Core
  misc_feature 26..50: note = LE

SEQ ID NO: 40171 - DNA, 50 bp, unidentified
  source 1..50: mol_type = unassigned DNA; note = donor_fabeca0
  misc_feature 1..23: note = RE
  misc_feature 24..25: note = Core
  misc_feature 26..50: note = LE
gcttcgacggggtcgtccacacatgatgcggtggacgacccctgacggca

SEQ ID NO: 40172 - DNA, 50 bp, unidentified
  source 1..50: mol_type = unassigned DNA; note = donor_faccd57
  misc_feature 1..23: note = RE
  misc_feature 24..25: note = Core
  misc_feature 26..50: note = LE
tgcaagcgggagccgtccacatatgttggagtggacggctcccaacggca

SEQ ID NO: 40173 - DNA, 50 bp, unidentified
  source 1..50: mol_type = unassigned DNA; note = donor_fadc301
  misc_feature 1..24: note = RE
  misc_feature 25: note = Core
  misc_feature 26..50: note = LE
acatttgacaatgtataggagcatcgttgataatggttatgccggtttag

SEQ ID NO: 40174 - DNA, 50 bp, unidentified
  source 1..50: mol_type = unassigned DNA; note = donor_fafda8d
  misc_feature 1..24: note = RE
  misc_feature 25: note = Core
  misc_feature 26..50: note = LE
accaaccccttgacagaggggtgcctacttaaagagaatttggtgtacga

SEQ ID NO: 40175 - DNA, 50 bp, unidentified
  source 1..50: mol_type = unassigned DNA; note = donor_fb0009b
  misc_feature 1..23: note = RE
  misc_feature 24..25: note = Core
  misc_feature 26..50: note = LE
gacctttccgggccgtccacacatgttagggtggacggcccgacggcatc

SEQ ID NO: 40176 - DNA, 50 bp, unidentified
  source 1..50: mol_type = unassigned DNA; note = donor_fb0518a
  misc_feature 1..23: note = RE
  misc_feature 24..25: note = Core
  misc_feature 26..50: note = LE
actattgatttttatatagttagctggtatattgttattgactcataaaa

SEQ ID NO: 40177 - DNA, 50 bp, unidentified
  source 1..50: mol_type = unassigned DNA; note = donor_fb138ea
  misc_feature 1..24: note = RE
  misc_feature 25: note = Core
  misc_feature 26..50: note = LE
tggcaaaccgggggcgaccatctataatggaatggtcgcccctatctaat

SEQ ID NO: 40178 - DNA, 50 bp, unidentified
  source 1..50: mol_type = unassigned DNA; note = donor_fb280b3
  misc_feature 1..22: note = RE
  misc_feature 23..25: note = Core
  misc_feature 26..50: note = LE
catcgagggggccatccacacatgatgaggtggatggcccctgagcggca

SEQ ID NO: 40179 - DNA, 50 bp, unidentified
  source 1..50: mol_type = unassigned DNA; note = donor_fb37c70
  misc_feature 1..22: note = RE
  misc_feature 23..25: note = Core
  misc_feature 26..50: note = LE
gtccttgacaaacattagcaagattagtaatatataagcgagggtgttac

SEQ ID NO: 40180 - DNA, 50 bp, unidentified
  source 1..50: mol_type = unassigned DNA; note = donor_fb3a05c
  misc_feature 1..21: note = RE
  misc_feature 22..25: note = Core
  misc_feature 26..50: note = LE
ttgggggttgacacaggatgtctcactggactaccttcccgtccatgaag

SEQ ID NO: 40181 - DNA, 50 bp, unidentified
  source 1..50: mol_type = unassigned DNA; note = donor_fb5a1e3
  misc_feature 1..24: note = RE
  misc_feature 25: note = Core
  misc_feature 26..50: note = LE
tggcaaaccgggagcgtccatgtacaatggaatggacgctcccaccccgt

SEQ ID NO: 40182 - DNA, 50 bp, unidentified
  source 1..50: mol_type = unassigned DNA; note = donor_fb6a5c6
  misc_feature 1..22: note = RE
  misc_feature 23..25: note = Core
  misc_feature 26..50: note = LE
tgacattaacgaccaaggggtgtctaatggtgtccgtcatcgtcttttga

SEQ ID NO: 40183 - DNA, 50 bp, unidentified
  source 1..50: mol_type = unassigned DNA; note = donor_fb747e6
  misc_feature 1..23: note = RE
  misc_feature 24..25: note = Core
  misc_feature 26..50: note = LE
gtaccacgggcggcaaccacagaagatggggtggttgccgccgtcccgaa

SEQ ID NO: 40184 - DNA, 50 bp, unidentified; identical to SEQ ID NO: 31463
  source 1..50: mol_type = unassigned DNA; note = donor_fb75dc0
  misc_feature 1..23: note = RE
  misc_feature 24..25: note = Core
  misc_feature 26..50: note = LE

SEQ ID NO: 40185 - DNA, 50 bp, unidentified
  source 1..50: mol_type = unassigned DNA; note = donor_fb78ba1
  misc_feature 1..23: note = RE
  misc_feature 24..25: note = Core
  misc_feature 26..50: note = LE
aaatatactgttcaagacagttgcttgtatcttgaaatttggttataata

SEQ ID NO: 40186 - DNA, 50 bp, unidentified
  source 1..50: mol_type = unassigned DNA; note = donor_fb7ae89
  misc_feature 1..24: note = RE
  misc_feature 25: note = Core
  misc_feature 26..50: note = LE
ttgcaaacgggatgcgttcatatagaatgtaatgaacgcatcccaaccac

SEQ ID NO: 40187 - DNA, 50 bp, unidentified
  source 1..50: mol_type = unassigned DNA; note = donor_fb83370
  misc_feature 1..23: note = RE
  misc_feature 24..25: note = Core
  misc_feature 26..50: note = LE
cccggaaggttttgtttcacagtaaactcccatgcccgcgcgcttggcac

SEQ ID NO: 40188 - DNA, 50 bp, unidentified
  source 1..50: mol_type = unassigned DNA; note = donor_fb87288
  misc_feature 1..22: note = RE
  misc_feature 23..25: note = Core
  misc_feature 26..50: note = LE
cgcttgactttcaacagagtatcttgtatgttgaacatgaagacgcgggg

SEQ ID NO: 40189 - DNA, 50 bp, unidentified
  source 1..50: mol_type = unassigned DNA; note = donor_fb9dfef
  misc_feature 1..23: note = RE
  misc_feature 24..25: note = Core
  misc_feature 26..50: note = LE
ggacttgacttttaatagttagtcttgtattataaagtagtagtttataa

SEQ ID NO: 40190 - DNA, 50 bp, unidentified
  source 1..50: mol_type = unassigned DNA; note = donor_fb9fa92
  misc_feature 1..23: note = RE
  misc_feature 24..25: note = Core
  misc_feature 26..50: note = LE
gcaccaaaggggccgtccacacatgatggggtggacggcccccggcggca

SEQ ID NO: 40191 - DNA, 50 bp, unidentified
  source 1..50: mol_type = unassigned DNA; note = donor_fbaf8fd
  misc_feature 1..23: note = RE
  misc_feature 24..25: note = Core
  misc_feature 26..50: note = LE
atagtaaatcatttataacatgtctcgtataaaggataattgcagcttta

SEQ ID NO: 40192 - DNA, 50 bp, unidentified; identical to SEQ ID NO: 38907
  source 1..50: mol_type = unassigned DNA; note = donor_fbb9ea7
  misc_feature 1..22: note = RE
  misc_feature 23..25: note = Core
  misc_feature 26..50: note = LE

SEQ ID NO: 40193 - DNA, 50 bp, unidentified; identical to SEQ ID NO: 31727
  source 1..50: mol_type = unassigned DNA; note = donor_fbbd9c2
  misc_feature 1..23: note = RE
  misc_feature 24..25: note = Core
  misc_feature 26..50: note = LE

SEQ ID NO: 40194 - DNA, 50 bp, unidentified
  source 1..50: mol_type = unassigned DNA; note = donor_fbbf133
  misc_feature 1..21: note = RE
  misc_feature 22..25: note = Core
  misc_feature 26..50: note = LE
ttgacgaatcccatagggacaccccgttaccgttttcgcgtccccatccg

SEQ ID NO: 40195 - DNA, 50 bp, unidentified; identical to SEQ ID NO: 34479
  source 1..50: mol_type = unassigned DNA; note = donor_fbdb9ad
  misc_feature 1..23: note = RE
  misc_feature 24..25: note = Core
  misc_feature 26..50: note = LE

SEQ ID NO: 40196 - DNA, 50 bp, unidentified
  source 1..50: mol_type = unassigned DNA; note = donor_fbdcddb
  misc_feature 1..21: note = RE
  misc_feature 22..25: note = Core
  misc_feature 26..50: note = LE
agcttgactcggtcattgagactccgtaaggtgttggtcggcccgggagg

SEQ ID NO: 40197 - DNA, 50 bp, unidentified
  source 1..50: mol_type = unassigned DNA; note = donor_fbdf61c
  misc_feature 1..24: note = RE
  misc_feature 25: note = Core
  misc_feature 26..50: note = LE
accaaagagataggggcacccccccgttaccgtcttcgtggctccgcaat

SEQ ID NO: 40198 - DNA, 50 bp, unidentified
  source 1..50: mol_type = unassigned DNA; note = donor_fbe2235
  misc_feature 1..23: note = RE
  misc_feature 24..25: note = Core
  misc_feature 26..50: note = LE
gcgctttagcgggcgtccacacatgatgaggtggacgcccccccacggcc

SEQ ID NO: 40199 - DNA, 50 bp, unidentified
  source 1..50: mol_type = unassigned DNA; note = donor_fbeb7a5
  misc_feature 1..23: note = RE
  misc_feature 24..25: note = Core
  misc_feature 26..50: note = LE
atatttggaattcaacacagaatctcctatgtttgaatcgcacttagtaa

SEQ ID NO: 40200 - DNA, 50 bp, unidentified
  source 1..50: mol_type = unassigned DNA; note = donor_fbf69e7
  misc_feature 1..23: note = RE
  misc_feature 24..25: note = Core
  misc_feature 26..50: note = LE
gggcttgacttttaatagttagtctcgtattataaaaagagtagtattta

SEQ ID NO: 40201 - DNA, 50 bp, unidentified
  source 1..50: mol_type = unassigned DNA; note = donor_fbfef73
  misc_feature 1..23: note = RE
  misc_feature 24..25: note = Core
  misc_feature 26..50: note = LE
cttgcgcacggggcggttacacatgatgatgtgaccgccccccgacggca

SEQ ID NO: 40202 - DNA, 50 bp, unidentified
  source 1..50: mol_type = unassigned DNA; note = donor_fc09541
  misc_feature 1..23: note = RE
  misc_feature 24..25: note = Core
  misc_feature 26..50: note = LE
agccagcttgatcaaaacggatacttgtcttatgattttttcggctcatg

SEQ ID NO: 40203 - DNA, 50 bp, unidentified
  source 1..50: mol_type = unassigned DNA; note = donor_fc2001a
  misc_feature 1..22: note = RE
  misc_feature 23..25: note = Core
  misc_feature 26..50: note = LE
aaaaaggcttgacatagagagtcttatacattaaactagaaacaagccca

SEQ ID NO: 40204 - DNA, 50 bp, unidentified
  source 1..50: mol_type = unassigned DNA; note = donor_fc2363f
  misc_feature 1..24: note = RE
  misc_feature 25: note = Core
  misc_feature 26..50: note = LE
attattgacaactattagctggtttcgtattataaggtcagccagaaaat

SEQ ID NO: 40205 - DNA, 50 bp, unidentified; identical to SEQ ID NO: 37636
  source 1..50: mol_type = unassigned DNA; note = donor_fc28cd0
  misc_feature 1..23: note = RE
  misc_feature 24..25: note = Core
  misc_feature 26..50: note = LE

SEQ ID NO: 40206 - DNA, 50 bp, unidentified
  source 1..50: mol_type = unassigned DNA; note = donor_fc4050b
  misc_feature 1..24: note = RE
  misc_feature 25: note = Core
  misc_feature 26..50: note = LE
tgcaatagaggaggagtccatacacaatgggatggactcttcctcaccta

SEQ ID NO: 40207 - DNA, 50 bp, unidentified
  source 1..50: mol_type = unassigned DNA; note = donor_fc41b1b
  misc_feature 1..22: note = RE
  misc_feature 23..25: note = Core
  misc_feature 26..50: note = LE
gatattgacatcctattagctggttcgtattatagagttcagccagatct

SEQ ID NO: 40208 - DNA, 50 bp, unidentified; identical to SEQ ID NO: 39088
  source 1..50: mol_type = unassigned DNA; note = donor_fc4b41a
  misc_feature 1..23: note = RE
  misc_feature 24..25: note = Core
  misc_feature 26..50: note = LE

SEQ ID NO: 40209 - DNA, 50 bp, unidentified; identical to SEQ ID NO: 35018
  source 1..50: mol_type = unassigned DNA; note = donor_fc4db3f
  misc_feature 1..23: note = RE
  misc_feature 24..25: note = Core
  misc_feature 26..50: note = LE

SEQ ID NO: 40210 - DNA, 50 bp, unidentified
  source 1..50: mol_type = unassigned DNA; note = donor_fc4e08f
  misc_feature 1..24: note = RE
  misc_feature 25: note = Core
  misc_feature 26..50: note = LE
ccgtccccgcataaactgacttggttgtctctcaaatctatgctctaatg

SEQ ID NO: 40211 - DNA, 50 bp, unidentified
  source 1..50: mol_type = unassigned DNA; note = donor_fc52da6
  misc_feature 1..22: note = RE
  misc_feature 23..25: note = Core
  misc_feature 26..50: note = LE
acttgacaaaaacataaggacacccgttaccttgtgggtatccccgataa

SEQ ID NO: 40212 - DNA, 50 bp, unidentified
  source 1..50: mol_type = unassigned DNA; note = donor_fc5309c
  misc_feature 1..24: note = RE
  misc_feature 25: note = Core
  misc_feature 26..50: note = LE
aggcgtcttgacacagaagggtgcctactagttgcattgacctcagatcg

SEQ ID NO: 40213 - DNA, 50 bp, unidentified
  source 1..50: mol_type = unassigned DNA; note = donor_fc57905
  misc_feature 1..23: note = RE
  misc_feature 24..25: note = Core
  misc_feature 26..50: note = LE
ccggataaccgacaagacggtatcttatgtcttgaacttccccgccagtg

SEQ ID NO: 40214 - DNA, 50 bp, unidentified; identical to SEQ ID NO: 34682
  source 1..50: mol_type = unassigned DNA; note = donor_fc5e65d
  misc_feature 1..20: note = RE
  misc_feature 21..25: note = Core
  misc_feature 26..50: note = LE

SEQ ID NO: 40215 - DNA, 50 bp, unidentified
  source 1..50: mol_type = unassigned DNA; note = donor_fc5f7e8
  misc_feature 1..24: note = RE
  misc_feature 25: note = Core
  misc_feature 26..50: note = LE
cttgcaggcggggcgagccatacgtatggaatggctcgcccctcaggttc

SEQ ID NO: 40216 - DNA, 50 bp, unidentified
  source 1..50: mol_type = unassigned DNA; note = donor_fc6696d
  misc_feature 1..23: note = RE
  misc_feature 24..25: note = Core
  misc_feature 26..50: note = LE
gacagcttccagccgtgggatgtctaatgggacccgacggcatgcgtagg

SEQ ID NO: 40217 - DNA, 50 bp, unidentified
  source 1..50: mol_type = unassigned DNA; note = donor_fc68802
  misc_feature 1..24: note = RE
  misc_feature 25: note = Core
  misc_feature 26..50: note = LE
cttggcatagggggcgtccatgtacaatgggatggacgcccccacccatt

SEQ ID NO: 40218 - DNA, 50 bp, unidentified
  source 1..50: mol_type = unassigned DNA; note = donor_fc6ab03
  misc_feature 1..23: note = RE
  misc_feature 24..25: note = Core
  misc_feature 26..50: note = LE
tttgttgcaagttaacacagaatctcctatgtttgtaaaagtataaaatc

SEQ ID NO: 40219 - DNA, 50 bp, unidentified
  source 1..50: mol_type = unassigned DNA; note = donor_fc72668
  misc_feature 1..24: note = RE
  misc_feature 25: note = Core
  misc_feature 26..50: note = LE
aaaactacttgatttttatatagttggtatattgtaattgactcatctta

SEQ ID NO: 40220 - DNA, 50 bp, unidentified
  source 1..50: mol_type = unassigned DNA; note = donor_fc78d8e
  misc_feature 1..23: note = RE
  misc_feature 24..25: note = Core
  misc_feature 26..50: note = LE
cttgcgcaaggggcggttatacatgatgatgtgaccgaccccgacggcat

SEQ ID NO: 40221 - DNA, 50 bp, unidentified
  source 1..50: mol_type = unassigned DNA; note = donor_fc8650c
  misc_feature 1..23: note = RE
  misc_feature 24..25: note = Core
  misc_feature 26..50: note = LE
ttgcagacgggatgggccatacgttatggatggcccacccctcatcatcg

SEQ ID NO: 40222 - DNA, 50 bp, unidentified
  source 1..50: mol_type = unassigned DNA; note = donor_fc89a8f
  misc_feature 1..21: note = RE
  misc_feature 22..25: note = Core
  misc_feature 26..50: note = LE
gcggcgggaggcgtccatagattatgggatggacgcctcccgtcttccga

SEQ ID NO: 40223 - DNA, 50 bp, unidentified
  source 1..50: mol_type = unassigned DNA; note = donor_fc91aac
  misc_feature 1..24: note = RE
  misc_feature 25: note = Core
  misc_feature 26..50: note = LE
acaaacaacgtcatagaagggagcctacttatgtcttttcagatcgcctg

SEQ ID NO: 40224 - DNA, 50 bp, unidentified
  source 1..50: mol_type = unassigned DNA; note = donor_fc92dc9
  misc_feature 1..24: note = RE
  misc_feature 25: note = Core
  misc_feature 26..50: note = LE
tgcgacgcaccgccggtccatacataatgggatggaccggcggtgctccc

SEQ ID NO: 40225 - DNA, 50 bp, unidentified
  source 1..50: mol_type = unassigned DNA; note = donor_fc984e1
  misc_feature 1..23: note = RE
  misc_feature 24..25: note = Core
  misc_feature 26..50: note = LE
gccaactcggagccgtccacacatgatgctggggacggctcctctaccgg

SEQ ID NO: 40226 - DNA, 50 bp, unidentified
  source 1..50: mol_type = unassigned DNA; note = donor_fc994b8
  misc_feature 1..23: note = RE
  misc_feature 24..25: note = Core
  misc_feature 26..50: note = LE
tggcttgacttggataacagtatcttgtattatcaagtcgtgcttttcaa

SEQ ID NO: 40227 - DNA, 50 bp, unidentified
  source 1..50: mol_type = unassigned DNA; note = donor_fc9a9ec
  misc_feature 1..22: note = RE
  misc_feature 23..25: note = Core
  misc_feature 26..50: note = LE
actattgacttttgttagcaagtttggtactataaaagtataatagctaa

SEQ ID NO: 40228 - DNA, 50 bp, unidentified
  source 1..50: mol_type = unassigned DNA; note = donor_fc9afb3
  misc_feature 1..23: note = RE
  misc_feature 24..25: note = Core
  misc_feature 26..50: note = LE
gcaggcagggggccgtccacatatgatggggtggacggcccccgaacggc

SEQ ID NO: 40229 - DNA, 50 bp, unidentified; identical to SEQ ID NO: 32049
  source 1..50: mol_type = unassigned DNA; note = donor_fc9e3bf
  misc_feature 1..22: note = RE
  misc_feature 23..25: note = Core
  misc_feature 26..50: note = LE

SEQ ID NO: 40230 - DNA, 50 bp, unidentified
  source 1..50: mol_type = unassigned DNA; note = donor_fc9e7ae
  misc_feature 1..20: note = RE
  misc_feature 21..25: note = Core
  misc_feature 26..50: note = LE
ggcggcttgacacagggctactcactggtccaccattcccttgtcggtga

SEQ ID NO: 40231 - DNA, 50 bp, unidentified
  source 1..50: mol_type = unassigned DNA; note = donor_fc9eb86
  misc_feature 1..22: note = RE
  misc_feature 23..25: note = Core
  misc_feature 26..50: note = LE
tgcgttattttttgtttgataagaggggccgccccgtcttcgacgccgcg

SEQ ID NO: 40232 - DNA, 50 bp, unidentified
  source 1..50: mol_type = unassigned DNA; note = donor_fca0953
  misc_feature 1..24: note = RE
  misc_feature 25: note = Core
  misc_feature 26..50: note = LE
ttggcaaacaggggcgaccatctataatggaatggtcgccccgccccccg

SEQ ID NO: 40233 - DNA, 50 bp, unidentified
  source 1..50: mol_type = unassigned DNA; note = donor_fca203a
  misc_feature 1..23: note = RE
  misc_feature 24..25: note = Core
  misc_feature 26..50: note = LE
gtacaattggaggagtccatataagatgtatggactcctcccccttatcg

SEQ ID NO: 40234 - DNA, 50 bp, unidentified
  source 1..50: mol_type = unassigned DNA; note = donor_fca2df2
  misc_feature 1..24: note = RE
  misc_feature 25: note = Core
  misc_feature 26..50: note = LE
tgcaactctgcggcggaccatacataatgggatggtccgccgcggatttc

SEQ ID NO: 40235 - DNA, 50 bp, unidentified
  source 1..50: mol_type = unassigned DNA; note = donor_fca4afa
  misc_feature 1..24: note = RE
  misc_feature 25: note = Core
  misc_feature 26..50: note = LE
caaccacttgacacaaagaggcttctgattgatgatgggggtgctgcggg

SEQ ID NO: 40236 - DNA, 50 bp, unidentified
  source 1..50: mol_type = unassigned DNA; note = donor_fca802f
  misc_feature 1..24: note = RE
  misc_feature 25: note = Core
  misc_feature 26..50: note = LE
atattttgtaaaatacataggaagctttaactttgcagctgaatactaag

SEQ ID NO: 40237 - DNA, 50 bp, unidentified
  source 1..50: mol_type = unassigned DNA; note = donor_fcb00c5
  misc_feature 1..23: note = RE
  misc_feature 24..25: note = Core
  misc_feature 26..50: note = LE
aagctggtgcttgaagagagtatcttgtatattaaatgcatctctaaaaa

SEQ ID NO: 40238 - DNA, 50 bp, unidentified; identical to SEQ ID NO: 33802
  source 1..50: mol_type = unassigned DNA; note = donor_fcbba44
  misc_feature 1..23: note = RE
  misc_feature 24..25: note = Core
  misc_feature 26..50: note = LE

SEQ ID NO: 40239 - DNA, 50 bp, unidentified
  source 1..50: mol_type = unassigned DNA; note = donor_fcc868f
  misc_feature 1..24: note = RE
  misc_feature 25: note = Core
  misc_feature 26..50: note = LE
actcttggattttaactcagttcttcttaagtttgattctgtttaaatta

SEQ ID NO: 40240 - DNA, 50 bp, unidentified
  source 1..50: mol_type = unassigned DNA; note = donor_fcca76f
  misc_feature 1..24: note = RE
  misc_feature 25: note = Core
  misc_feature 26..50: note = LE
aaaatttgctttatacataggatacctttagttttgttttatagattata

SEQ ID NO: 40241 - DNA, 50 bp, unidentified
  source 1..50: mol_type = unassigned DNA; note = donor_fccb79d
  misc_feature 1..22: note = RE
  misc_feature 23..25: note = Core
  misc_feature 26..50: note = LE
gatcatcacggactttcatgccaaacgcacatgatattcttggaataaca

SEQ ID NO: 40242 - DNA, 50 bp, unidentified
  source 1..50: mol_type = unassigned DNA; note = donor_fcdfbad
  misc_feature 1..23: note = RE
  misc_feature 24..25: note = Core
  misc_feature 26..50: note = LE
tgacatttaagctcctgggatgtctaatgagtgttagcgggttcgccgtc

SEQ ID NO: 40243 - DNA, 50 bp, unidentified
  source 1..50: mol_type = unassigned DNA; note = donor_fce85af
  misc_feature 1..24: note = RE
  misc_feature 25: note = Core
  misc_feature 26..50: note = LE
tgcagttctggggaagtccttatagaatgaaagggacttccccgtcgcgg

SEQ ID NO: 40244 - DNA, 50 bp, unidentified
  source 1..50: mol_type = unassigned DNA; note = donor_fcec0e3
  misc_feature 1..24: note = RE
  misc_feature 25: note = Core
  misc_feature 26..50: note = LE
gccaaaccgggaggcgtccatataatgtaatggacgcctccctccccgct

SEQ ID NO: 40245 - DNA, 50 bp, unidentified; identical to SEQ ID NO: 31323
  source 1..50: mol_type = unassigned DNA; note = donor_fcf2e4f
  misc_feature 1..23: note = RE
  misc_feature 24..25: note = Core
  misc_feature 26..50: note = LE

SEQ ID NO: 40246 - DNA, 50 bp, unidentified; identical to SEQ ID NO: 32117
  source 1..50: mol_type = unassigned DNA; note = donor_fcf41e2
  misc_feature 1..24: note = RE
  misc_feature 25: note = Core
  misc_feature 26..50: note = LE

SEQ ID NO: 40247 - DNA, 50 bp, unidentified
  source 1..50: mol_type = unassigned DNA; note = donor_fcfdb19
  misc_feature 1..23: note = RE
  misc_feature 24..25: note = Core
  misc_feature 26..50: note = LE
aggcttgacttttaatagttagtctcgtattatagtgtcatagccttttc

SEQ ID NO: 40248 - DNA, 50 bp, unidentified; identical to SEQ ID NO: 31399
  source 1..50: mol_type = unassigned DNA; note = donor_fd04eb2
  misc_feature 1..24: note = RE
  misc_feature 25: note = Core
  misc_feature 26..50: note = LE

SEQ ID NO: 40249 - DNA, 50 bp, unidentified
  source 1..50: mol_type = unassigned DNA; note = donor_fd13abd
  misc_feature 1..22: note = RE
  misc_feature 23..25: note = Core
  misc_feature 26..50: note = LE
aaaaaggcttgacatagagagtcttatacagtaaactaagaacaagccct

SEQ ID NO: 40250 - DNA, 50 bp, unidentified
  source 1..50: mol_type = unassigned DNA; note = donor_fd14887
  misc_feature 1..23: note = RE
  misc_feature 24..25: note = Core
  misc_feature 26..50: note = LE
gcatcttctggggcgtccacagatgatgggggtggacaccccccggcggc

SEQ ID NO: 40251 - DNA, 50 bp, unidentified; identical to SEQ ID NO: 30467
  source 1..50: mol_type = unassigned DNA; note = donor_fd15f0e
  misc_feature 1..24: note = RE
  misc_feature 25: note = Core
  misc_feature 26..50: note = LE

SEQ ID NO: 40252 - DNA, 50 bp, unidentified
  source 1..50: mol_type = unassigned DNA; note = donor_fd23376
  misc_feature 1..24: note = RE
  misc_feature 25: note = Core
  misc_feature 26..50: note = LE
ttgcacccgggaggcgtccacataatggtatggacgcctcccaccttaaa

SEQ ID NO: 40253 - DNA, 50 bp, unidentified
  source 1..50: mol_type = unassigned DNA; note = donor_fd26167
  misc_feature 1..21: note = RE
  misc_feature 22..25: note = Core
  misc_feature 26..50: note = LE
gttcttgacttttcatagttggtcttgtatgataaatacataaaatattt

SEQ ID NO: 40254 - DNA, 50 bp, unidentified; identical to SEQ ID NO: 37211
  source 1..50: mol_type = unassigned DNA; note = donor_fd268ce
  misc_feature 1..23: note = RE
  misc_feature 24..25: note = Core
  misc_feature 26..50: note = LE

SEQ ID NO: 40255 - DNA, 50 bp, unidentified
  source 1..50: mol_type = unassigned DNA; note = donor_fd29a8f
  misc_feature 1..23: note = RE
  misc_feature 24..25: note = Core
  misc_feature 26..50: note = LE
atcgtttggttttatcatagaaatcctttagattagcaaaacagaaaaaa

SEQ ID NO: 40256 - DNA, 50 bp, unidentified; identical to SEQ ID NO: 38296
  source 1..50: mol_type = unassigned DNA; note = donor_fd2cae6
  misc_feature 1..23: note = RE
  misc_feature 24..25: note = Core
  misc_feature 26..50: note = LE

SEQ ID NO: 40257 - DNA, 50 bp, unidentified
  source 1..50: mol_type = unassigned DNA; note = donor_fd2fb47
  misc_feature 1..23: note = RE
  misc_feature 24..25: note = Core
  misc_feature 26..50: note = LE
accggtctagttcagcacagttgcttgtgtccggaaaattcggcagaatg

SEQ ID NO: 40258 - DNA, 50 bp, unidentified
  source 1..50: mol_type = unassigned DNA; note = donor_fd30a4c
  misc_feature 1..23: note = RE
  misc_feature 24..25: note = Core
  misc_feature 26..50: note = LE
tcacttgacgttcgagacggtatcttgtatcttaaatcttatagtggtta

SEQ ID NO: 40259 - DNA, 50 bp, unidentified; identical to SEQ ID NO: 39963
  source 1..50: mol_type = unassigned DNA; note = donor_fd339d2
  misc_feature 1..24: note = RE
  misc_feature 25: note = Core
  misc_feature 26..50: note = LE

SEQ ID NO: 40260 - DNA, 50 bp, unidentified
  source 1..50: mol_type = unassigned DNA; note = donor_fd356d3
  misc_feature 1..23: note = RE
  misc_feature 24..25: note = Core
  misc_feature 26..50: note = LE
ttacttgacttttcatagttggtcttgtatgatgtatttagaagcaaata

SEQ ID NO: 40261 - DNA, 50 bp, unidentified
  source 1..50: mol_type = unassigned DNA; note = donor_fd38aa3
  misc_feature 1..24: note = RE
  misc_feature 25: note = Core
  misc_feature 26..50: note = LE
tttcttgcatttgaacatagaatgcattaagtttgcagcatcgttgcgga

SEQ ID NO: 40262 - DNA, 50 bp, unidentified
  source 1..50: mol_type = unassigned DNA; note = donor_fd56fc0
  misc_feature 1..24: note = RE
  misc_feature 25: note = Core
  misc_feature 26..50: note = LE
tgctcaaccggggaagtccttatagaatgaacgggacttcccctgcgcgg

SEQ ID NO: 40263 - DNA, 50 bp, unidentified
  source 1..50: mol_type = unassigned DNA; note = donor_fd639f9
  misc_feature 1..24: note = RE
  misc_feature 25: note = Core
  misc_feature 26..50: note = LE
tgcgatcggggagcaggccatagataatggaatggcctgctcccacccta

SEQ ID NO: 40264 - DNA, 50 bp, unidentified
  source 1..50: mol_type = unassigned DNA; note = donor_fd6bc44
  misc_feature 1..24: note = RE
  misc_feature 25: note = Core
  misc_feature 26..50: note = LE
gacttaacttcttagtagttggtcacgtataataaaaaccgtctcgaaag

SEQ ID NO: 40265 - DNA, 50 bp, unidentified
  source 1..50: mol_type = unassigned DNA; note = donor_fd6d265
  misc_feature 1..23: note = RE
  misc_feature 24..25: note = Core
  misc_feature 26..50: note = LE
aaatttgttttttaaaatagtacctcatatctttgtttctaatttaaata

SEQ ID NO: 40266 - DNA, 50 bp, unidentified
  source 1..50: mol_type = unassigned DNA; note = donor_fd710e5
  misc_feature 1..23: note = RE
  misc_feature 24..25: note = Core
  misc_feature 26..50: note = LE
gcatccgaaggggcgtccacacacgatggggtggacgcccccgacggcat

SEQ ID NO: 40267 - DNA, 50 bp, unidentified; identical to SEQ ID NO: 32058
  source 1..50: mol_type = unassigned DNA; note = donor_fd7387a
  misc_feature 1..24: note = RE
  misc_feature 25: note = Core
  misc_feature 26..50: note = LE

SEQ ID NO: 40268 - DNA, 50 bp, unidentified; identical to SEQ ID NO: 38770
  source 1..50: mol_type = unassigned DNA; note = donor_fd765b7
  misc_feature 1..23: note = RE
  misc_feature 24..25: note = Core
  misc_feature 26..50: note = LE

SEQ ID NO: 40269 - DNA, 50 bp, unidentified
  source 1..50: mol_type = unassigned DNA; note = donor_fd767ff
  misc_feature 1..23: note = RE
  misc_feature 24..25: note = Core
  misc_feature 26..50: note = LE
ttagaggcgtcagcatgtagtgcctcctcctcctacggggcaatccacgc

SEQ ID NO: 40270 - DNA, 50 bp, unidentified
  source 1..50: mol_type = unassigned DNA; note = donor_fd7dfca
  misc_feature 1..23: note = RE
  misc_feature 24..25: note = Core
  misc_feature 26..50: note = LE
ccccccctccagcaacacagttgcttatctgagcggaatctggcagttta

SEQ ID NO: 40271 - DNA, 50 bp, unidentified
  source 1..50: mol_type = unassigned DNA; note = donor_fd9649a
  misc_feature 1..24: note = RE
  misc_feature 25: note = Core
  misc_feature 26..50: note = LE
gttgcaaacgggacgcgttcatataattgatatgaacgcgtcccaccccg

SEQ ID NO: 40272 - DNA, 50 bp, unidentified
  source 1..50: mol_type = unassigned DNA; note = donor_fd9abdd
  misc_feature 1..23: note = RE
  misc_feature 24..25: note = Core
  misc_feature 26..50: note = LE
cttgccaaggggccgtccacatatgatgatgtggacggccccgcctaggg

SEQ ID NO: 40273 - DNA, 50 bp, unidentified
  source 1..50: mol_type = unassigned DNA; note = donor_fd9cda8
  misc_feature 1..22: note = RE
  misc_feature 23..25: note = Core
  misc_feature 26..50: note = LE
gttgacacgaccctttaacaggcatataaaggagttgtccttttcaaatc

SEQ ID NO: 40274 - DNA, 50 bp, unidentified
  source 1..50: mol_type = unassigned DNA; note = donor_fdac6f9
  misc_feature 1..24: note = RE
  misc_feature 25: note = Core
  misc_feature 26..50: note = LE
gacttgacaaaccattagctggtttcgtattattaggtcaaccagagttt

SEQ ID NO: 40275 - DNA, 50 bp, unidentified
  source 1..50: mol_type = unassigned DNA; note = donor_fdb4299
  misc_feature 1..24: note = RE
  misc_feature 25: note = Core
  misc_feature 26..50: note = LE
tgcagtcgcgcggcggaccatacataatgagatggtccgccgcttgtttt

SEQ ID NO: 40276 - DNA, 50 bp, unidentified
  source 1..50: mol_type = unassigned DNA; note = donor_fdc226a
  misc_feature 1..22: note = RE
  misc_feature 23..25: note = Core
  misc_feature 26..50: note = LE
aatattgacaaactattggctggttcgtattataaggttagccagatatt

SEQ ID NO: 40277 - DNA, 50 bp, unidentified
  source 1..50: mol_type = unassigned DNA; note = donor_fdc52f0
  misc_feature 1..23: note = RE
  misc_feature 24..25: note = Core
  misc_feature 26..50: note = LE
tcagtggtcgctcttaatggttgcttgtattagcgcgctcgcctatagtg

SEQ ID NO: 40278 - DNA, 50 bp, unidentified
  source 1..50: mol_type = unassigned DNA; note = donor_fdc73d6
  misc_feature 1..22: note = RE
  misc_feature 23..25: note = Core
  misc_feature 26..50: note = LE
attgacttttcttatagtttgtcttatattataattagcgcagttagcta

SEQ ID NO: 40279 - DNA, 50 bp, unidentified
  source 1..50: mol_type = unassigned DNA; note = donor_fdcfd30
  misc_feature 1..23: note = RE
  misc_feature 24..25: note = Core
  misc_feature 26..50: note = LE
tgacttgacttttattagcaggtctattacaataaatttggacaggaaag

SEQ ID NO: 40280 - DNA, 50 bp, unidentified
  source 1..50: mol_type = unassigned DNA; note = donor_fdd7a87
  misc_feature 1..23: note = RE
  misc_feature 24..25: note = Core
  misc_feature 26..50: note = LE
gcgccggggcgggcgtccacagatgatggggtggacgcccccaaacggca

SEQ ID NO: 40281 - DNA, 50 bp, unidentified
  source 1..50: mol_type = unassigned DNA; note = donor_fde2b7a
  misc_feature 1..24: note = RE
  misc_feature 25: note = Core
  misc_feature 26..50: note = LE
tgcaggcgcgcggcggaccatacataatgagatggtccgccgcgcgatca

SEQ ID NO: 40282 - DNA, 50 bp, unidentified
  source 1..50: mol_type = unassigned DNA; note = donor_fde64e5
  misc_feature 1..20: note = RE
  misc_feature 21..25: note = Core
  misc_feature 26..50: note = LE
tgacgaaccccatagggacacccccgttacctttttcgtggctcctgatc

SEQ ID NO: 40283 - DNA, 50 bp, unidentified
  source 1..50: mol_type = unassigned DNA; note = donor_fdebb0b
  misc_feature 1..23: note = RE
  misc_feature 24..25: note = Core
  misc_feature 26..50: note = LE
catgagcgggtttaagacggtatcttatatctcgattctgaccgaaaaaa

SEQ ID NO: 40284 - DNA, 50 bp, unidentified
  source 1..50: mol_type = unassigned DNA; note = donor_fded0f1
  misc_feature 1..23: note = RE
  misc_feature 24..25: note = Core
  misc_feature 26..50: note = LE
atatttgattattaacacagaatctcctatgtttgatgaaataaaagagg

SEQ ID NO: 40285 - DNA, 50 bp, unidentified
  source 1..50: mol_type = unassigned DNA; note = donor_fdf30a2
  misc_feature 1..23: note = RE
  misc_feature 24..25: note = Core
  misc_feature 26..50: note = LE
ttccgagccccacataacagttgcctgtgtctggcaattctgtcatgatg

SEQ ID NO: 40286 - DNA, 50 bp, unidentified
  source 1..50: mol_type = unassigned DNA; note = donor_fe0befa
  misc_feature 1..24: note = RE
  misc_feature 25: note = Core
  misc_feature 26..50: note = LE
tgcattcacgcggcggatcatacatactgggatgatccgccgcttgatct

SEQ ID NO: 40287 - DNA, 50 bp, unidentified
  source 1..50: mol_type = unassigned DNA; note = donor_fe15973
  misc_feature 1..23: note = RE
  misc_feature 24..25: note = Core
  misc_feature 26..50: note = LE
ttacttgactttttctttgcaggctactataataaatttatgggtaagtt

SEQ ID NO: 40288 - DNA, 50 bp, unidentified
  source 1..50: mol_type = unassigned DNA; note = donor_fe1b9d3
  misc_feature 1..23: note = RE
  misc_feature 24..25: note = Core
  misc_feature 26..50: note = LE
gcacaacacgggacgtccatatatgatgtaatggatgtccctctgtgtaa

SEQ ID NO: 40289 - DNA, 50 bp, unidentified
  source 1..50: mol_type = unassigned DNA; note = donor_fe25858
  misc_feature 1..24: note = RE
  misc_feature 25: note = Core
  misc_feature 26..50: note = LE
ttgccccttgacacaaagaggcttctgattgatgatgggaggtgcgttgc

SEQ ID NO: 40290 - DNA, 50 bp, unidentified; identical to SEQ ID NO: 34508
  source 1..50: mol_type = unassigned DNA; note = donor_fe2a084
  misc_feature 1..23: note = RE
  misc_feature 24..25: note = Core
  misc_feature 26..50: note = LE

SEQ ID NO: 40291 - DNA, 50 bp, unidentified
  source 1..50: mol_type = unassigned DNA; note = donor_fe2ffda
  misc_feature 1..23: note = RE
  misc_feature 24..25: note = Core
  misc_feature 26..50: note = LE
gcacttgacaactaagacagtcgcttgtatcttagaaatagtagtagacc

SEQ ID NO: 40292 - DNA, 50 bp, unidentified; identical to SEQ ID NO: 35281
  source 1..50: mol_type = unassigned DNA; note = donor_fe40271
  misc_feature 1..23: note = RE
  misc_feature 24..25: note = Core
  misc_feature 26..50: note = LE

SEQ ID NO: 40293 - DNA, 50 bp, unidentified
  source 1..50: mol_type = unassigned DNA; note = donor_fe45d10
  misc_feature 1..23: note = RE
  misc_feature 24..25: note = Core
  misc_feature 26..50: note = LE
taacttgattttaaacagagtatcttgtatgattaatttaaatgaatttt

SEQ ID NO: 40294 - DNA, 50 bp, unidentified
  source 1..50: mol_type = unassigned DNA; note = donor_fe4b927
  misc_feature 1..24: note = RE
  misc_feature 25: note = Core
  misc_feature 26..50: note = LE
tgcaaaaaggagggtgaccatagataatgaaatggtcaccctccacctta

SEQ ID NO: 40295 - DNA, 50 bp, unidentified
  source 1..50: mol_type = unassigned DNA; note = donor_fe57b48
  misc_feature 1..22: note = RE
  misc_feature 23..25: note = Core
  misc_feature 26..50: note = LE
cttgacaaagaacatggggacacccttacctttttcgtgggcgccgggca

SEQ ID NO: 40296 - DNA, 50 bp, unidentified; identical to SEQ ID NO: 34158
  source 1..50: mol_type = unassigned DNA; note = donor_fe5c47f
  misc_feature 1..24: note = RE
  misc_feature 25: note = Core
  misc_feature 26..50: note = LE

SEQ ID NO: 40297 - DNA, 50 bp, unidentified
  source 1..50: mol_type = unassigned DNA; note = donor_fe5e080
  misc_feature 1..24: note = RE
  misc_feature 25: note = Core
  misc_feature 26..50: note = LE
ttacttgttttttacctcagttcttcttaacttagcatttcactaaatta

SEQ ID NO: 40298 - DNA, 50 bp, unidentified
  source 1..50: mol_type = unassigned DNA; note = donor_fe69aaf
  misc_feature 1..23: note = RE
  misc_feature 24..25: note = Core
  misc_feature 26..50: note = LE
tggttgttgactttttatagttggtataatatatttaggttaataaaggc

SEQ ID NO: 40299 - DNA, 50 bp, unidentified
  source 1..50: mol_type = unassigned DNA; note = donor_fe6fb1a
  misc_feature 1..24: note = RE
  misc_feature 25: note = Core
  misc_feature 26..50: note = LE
tggcgcatcgggggcgttcatataatggaatgaacgcccccacctacgaa

SEQ ID NO: 40300 - DNA, 50 bp, unidentified
  source 1..50: mol_type = unassigned DNA; note = donor_fe7d2c4
  misc_feature 1..23: note = RE
  misc_feature 24..25: note = Core
  misc_feature 26..50: note = LE
gacttggaggggccgaatagagaagatggagtattcggcctgccatccca

SEQ ID NO: 40301 - DNA, 50 bp, unidentified
  source 1..50: mol_type = unassigned DNA; note = donor_fe80a3f
  misc_feature 1..23: note = RE
  misc_feature 24..25: note = Core
  misc_feature 26..50: note = LE
gttgacataggggagtccacataagataattggactcccccgcactttaa

SEQ ID NO: 40302 - DNA, 50 bp, unidentified
  source 1..50: mol_type = unassigned DNA; note = donor_fe8cf78
  misc_feature 1..23: note = RE
  misc_feature 24..25: note = Core
  misc_feature 26..50: note = LE
acagcttgacaaagtcatagtgttccattagacttgtttgttagtaatat

SEQ ID NO: 40303 - DNA, 50 bp, unidentified
  source 1..50: mol_type = unassigned DNA; note = donor_fe8ec79
  misc_feature 1..24: note = RE
  misc_feature 25: note = Core
  misc_feature 26..50: note = LE
cttgccgacggggcgggccatacgtatggatggcccgccccttagctgag

SEQ ID NO: 40304 - DNA, 50 bp, unidentified
  source 1..50: mol_type = unassigned DNA; note = donor_fe9415d
  misc_feature 1..23: note = RE
  misc_feature 24..25: note = Core
  misc_feature 26..50: note = LE
gcataacggacggcaaccacagaagatggggtggttgccgtccgccccaa

SEQ ID NO: 40305 - DNA, 50 bp, unidentified
  source 1..50: mol_type = unassigned DNA; note = donor_fe9a349
  misc_feature 1..24: note = RE
  misc_feature 25: note = Core
  misc_feature 26..50: note = LE
ttgacgtacggggggatccatgtagaatgacatggatcccccctcatgtg

SEQ ID NO: 40306 - DNA, 50 bp, unidentified
  source 1..50: mol_type = unassigned DNA; note = donor_fe9b122
  misc_feature 1..23: note = RE
  misc_feature 24..25: note = Core
  misc_feature 26..50: note = LE
gacttaccaaggcccgttacagaagatggggtaacgggccggccgcccgc

SEQ ID NO: 40307 - DNA, 50 bp, unidentified
  source 1..50: mol_type = unassigned DNA; note = donor_fe9e990
  misc_feature 1..24: note = RE
  misc_feature 25: note = Core
  misc_feature 26..50: note = LE
accgcttgacaaacatagaagcgtctgtgagagttggggtggctggtctg

SEQ ID NO: 40308 - DNA, 50 bp, unidentified
  source 1..50: mol_type = unassigned DNA; note = donor_fea0879
  misc_feature 1..24: note = RE
  misc_feature 25: note = Core
  misc_feature 26..50: note = LE
ctcaaacggagcgcgttcatatagattgaaatgaacgcgctccacccgta

SEQ ID NO: 40309 - DNA, 50 bp, unidentified
  source 1..50: mol_type = unassigned DNA; note = donor_fea1929
  misc_feature 1..23: note = RE
  misc_feature 24..25: note = Core
  misc_feature 26..50: note = LE
ctgtcctctacattctttcacactaatctccattccgccgccaagcggcg

SEQ ID NO: 40310 - DNA, 50 bp, unidentified; identical to SEQ ID NO: 32650
  source 1..50: mol_type = unassigned DNA; note = donor_fea2a68
  misc_feature 1..23: note = RE
  misc_feature 24..25: note = Core
  misc_feature 26..50: note = LE

SEQ ID NO: 40311 - DNA, 50 bp, unidentified
  source 1..50: mol_type = unassigned DNA; note = donor_fea30b2
  misc_feature 1..24: note = RE
  misc_feature 25: note = Core
  misc_feature 26..50: note = LE
tgcaaaaacggagcggaccatacataacgggatggtccgttccgattcca

SEQ ID NO: 40312 - DNA, 50 bp, unidentified
  source 1..50: mol_type = unassigned DNA; note = donor_fea6692
  misc_feature 1..22: note = RE
  misc_feature 23..25: note = Core
  misc_feature 26..50: note = LE
gacccaaacgcccaattagagaagcatgcgtaattgggctgcctctgttc

SEQ ID NO: 40313 - DNA, 50 bp, unidentified
  source 1..50: mol_type = unassigned DNA; note = donor_fea8fbe
  misc_feature 1..24: note = RE
  misc_feature 25: note = Core
  misc_feature 26..50: note = LE
ccgcgtcttgacacagaggggagcctacttgttccattgacccaggaccg

SEQ ID NO: 40314 - DNA, 50 bp, unidentified
  source 1..50: mol_type = unassigned DNA; note = donor_feb7ee3
  misc_feature 1..22: note = RE
  misc_feature 23..25: note = Core
  misc_feature 26..50: note = LE
cccaccgggggtcgtccacacatgatgaggtggacggcccccacccaaac

SEQ ID NO: 40315 - DNA, 50 bp, unidentified
  source 1..50: mol_type = unassigned DNA; note = donor_fed6a48
  misc_feature 1..23: note = RE
  misc_feature 24..25: note = Core
  misc_feature 26..50: note = LE
gcaccaacgggggcatccatacatgatggcgtagatgccccctcctgacg

SEQ ID NO: 40316 - DNA, 50 bp, unidentified
  source 1..50: mol_type = unassigned DNA; note = donor_fedfa1d
  misc_feature 1..23: note = RE
  misc_feature 24..25: note = Core
  misc_feature 26..50: note = LE
tgacatcgaaaaacctaggatgtctaatggcttgtgccggcctgctgcgg

SEQ ID NO: 40317 - DNA, 50 bp, unidentified
  source 1..50: mol_type = unassigned DNA; note = donor_fefeee3
  misc_feature 1..24: note = RE
  misc_feature 25: note = Core
  misc_feature 26..50: note = LE
ttgacaaaaaacatagggacaccccgttaccttcttagtagcccttatcg

SEQ ID NO: 40318 - DNA, 50 bp, unidentified; identical to SEQ ID NO: 32492
  source 1..50: mol_type = unassigned DNA; note = donor_ff0a4f3
  misc_feature 1..24: note = RE
  misc_feature 25: note = Core
  misc_feature 26..50: note = LE

SEQ ID NO: 40319 - DNA, 50 bp, unidentified
  source 1..50: mol_type = unassigned DNA; note = donor_ff0e827
  misc_feature 1..23: note = RE
  misc_feature 24..25: note = Core
  misc_feature 26..50: note = LE
gcgaggagcgggccgtccacatatgttggtgtggacggcccccagcacgg

SEQ ID NO: 40320 - DNA, 50 bp, unidentified
  source 1..50: mol_type = unassigned DNA; note = donor_ff18819
  misc_feature 1..23: note = RE
  misc_feature 24..25: note = Core
  misc_feature 26..50: note = LE
gacactcacagcccatggggtgtctaatgggctctaccgggtcggcttga

SEQ ID NO: 40321 - DNA, 50 bp, unidentified
  source 1..50: mol_type = unassigned DNA; note = donor_ff247e7
  misc_feature 1..24: note = RE
  misc_feature 25: note = Core
  misc_feature 26..50: note = LE
gacaaaagtggggaagcccttgtagaatgaaagggacttccccgtcccaa

SEQ ID NO: 40322 - DNA, 50 bp, unidentified
  source 1..50: mol_type = unassigned DNA; note = donor_ff2f3e1
  misc_feature 1..23: note = RE
  misc_feature 24..25: note = Core
  misc_feature 26..50: note = LE
cttgacaaatctttatagccggtctactatagtaattaaagatttcggta

SEQ ID NO: 40323 - DNA, 50 bp, unidentified
  source 1..50: mol_type = unassigned DNA; note = donor_ff32082
  misc_feature 1..24: note = RE
  misc_feature 25: note = Core
  misc_feature 26..50: note = LE
cttacctctactttctttcacactatctccattccgcggtcaagcctgcg

SEQ ID NO: 40324 - DNA, 50 bp, unidentified
  source 1..50: mol_type = unassigned DNA; note = donor_ff3409a
  misc_feature 1..23: note = RE
  misc_feature 24..25: note = Core
  misc_feature 26..50: note = LE
tcgcttgacctacaagacggttgcttgtatctttaagcctcggaccaact

SEQ ID NO: 40325 - DNA, 50 bp, unidentified
  source 1..50: mol_type = unassigned DNA; note = donor_ff4612d
  misc_feature 1..23: note = RE
  misc_feature 24..25: note = Core
  misc_feature 26..50: note = LE
ccgcgtctacttcagcacagttgcttgtgtccaacaaatctgacagaata

SEQ ID NO: 40326 - DNA, 50 bp, unidentified
  source 1..50: mol_type = unassigned DNA; note = donor_ff511b1
  misc_feature 1..23: note = RE
  misc_feature 24..25: note = Core
  misc_feature 26..50: note = LE
aggtggtggttgacagagggtgtctgatggctctaccttcccttcgcacg

SEQ ID NO: 40327 - DNA, 50 bp, unidentified
  source 1..50: mol_type = unassigned DNA; note = donor_ff5d2e7
  misc_feature 1..24: note = RE
  misc_feature 25: note = Core
  misc_feature 26..50: note = LE
agatcaacgcataaactgacttggttgtctctcaaatctatgctttaatg

SEQ ID NO: 40328 - DNA, 50 bp, unidentified
  source 1..50: mol_type = unassigned DNA; note = donor_ff60d8a
  misc_feature 1..24: note = RE
  misc_feature 25: note = Core
  misc_feature 26..50: note = LE
cttgtgaaaaacatagggacaccccgttacctttttagtagccccctaat

SEQ ID NO: 40329 - DNA, 50 bp, unidentified
  source 1..50: mol_type = unassigned DNA; note = donor_ff6cfec
  misc_feature 1..24: note = RE
  misc_feature 25: note = Core
  misc_feature 26..50: note = LE
tggcagaaagtgggcgtccatgtataatggaatggacgcccactacccta

SEQ ID NO: 40330 - DNA, 50 bp, unidentified; identical to SEQ ID NO: 35737
  source 1..50: mol_type = unassigned DNA; note = donor_ff7b315
  misc_feature 1..23: note = RE
  misc_feature 24..25: note = Core
  misc_feature 26..50: note = LE

SEQ ID NO: 40331 - DNA, 50 bp, unidentified
  source 1..50: mol_type = unassigned DNA; note = donor_ff7d222
  misc_feature 1..23: note = RE
  misc_feature 24..25: note = Core
  misc_feature 26..50: note = LE
tatggttgacttttcatagctggtcattttttctcttgtatgatgtttat

SEQ ID NO: 40332 - DNA, 50 bp, unidentified; identical to SEQ ID NO: 35797
  source 1..50: mol_type = unassigned DNA; note = donor_ff7efd4
  misc_feature 1..24: note = RE
  misc_feature 25: note = Core
  misc_feature 26..50: note = LE

SEQ ID NO: 40333 - DNA, 50 bp, unidentified
  source 1..50: mol_type = unassigned DNA; note = donor_ff876d7
  misc_feature 1..23: note = RE
  misc_feature 24..25: note = Core
  misc_feature 26..50: note = LE
acccttgacggccgagacggtatcttgtatctttgtttccgtcgcggtta

SEQ ID NO: 40334 - DNA, 50 bp, unidentified
  source 1..50: mol_type = unassigned DNA; note = donor_ff8a9b8
  misc_feature 1..23: note = RE
  misc_feature 24..25: note = Core
  misc_feature 26..50: note = LE
tgacccttccaatcctggggtgtctaatgggagtcgaccgggtcggatag

SEQ ID NO: 40335 - DNA, 50 bp, unidentified
  source 1..50: mol_type = unassigned DNA; note = donor_ff8fdc5
  misc_feature 1..23: note = RE
  misc_feature 24..25: note = Core
  misc_feature 26..50: note = LE
gacaaaccaaggcccgttacagaagatggggtaacgggccggactagcca

SEQ ID NO: 40336 - DNA, 50 bp, unidentified
  source 1..50: mol_type = unassigned DNA; note = donor_ff917c1
  misc_feature 1..23: note = RE
  misc_feature 24..25: note = Core
  misc_feature 26..50: note = LE
aggcttgactttatgttagcaggctactacaatggagttcggttaggaga

SEQ ID NO: 40337 - DNA, 50 bp, unidentified
  source 1..50: mol_type = unassigned DNA; note = donor_ff9180e
  misc_feature 1..24: note = RE
  misc_feature 25: note = Core
  misc_feature 26..50: note = LE
ccccgatttgacacaaagaggcttctgattgatgatgtgggggttgcggg

SEQ ID NO: 40338 - DNA, 50 bp, unidentified
  source 1..50: mol_type = unassigned DNA; note = donor_ff9e636
  misc_feature 1..23: note = RE
  misc_feature 24..25: note = Core
  misc_feature 26..50: note = LE
tgggcaactgagggagatggtatcttgtgtctctctcgatgtactgatta

SEQ ID NO: 40339 - DNA, 50 bp, unidentified
  source 1..50: mol_type = unassigned DNA; note = donor_ffa3984
  misc_feature 1..24: note = RE
  misc_feature 25: note = Core
  misc_feature 26..50: note = LE
tttcttgtgtagaaacatagaatgctttacctttgcattatcagatatta

SEQ ID NO: 40340 - DNA, 50 bp, unidentified
  source 1..50: mol_type = unassigned DNA; note = donor_ffa5a2f
  misc_feature 1..23: note = RE
  misc_feature 24..25: note = Core
  misc_feature 26..50: note = LE
gactgagcgaggcccgttacagaagatggggtaacgggccggccgggtcg

SEQ ID NO: 40341 - DNA, 50 bp, unidentified
  source 1..50: mol_type = unassigned DNA; note = donor_ffab3e2
  misc_feature 1..23: note = RE
  misc_feature 24..25: note = Core
  misc_feature 26..50: note = LE
aggggggaattaaatatagttgactcctaccattaattcctgtataacta

SEQ ID NO: 40342 - DNA, 50 bp, unidentified; identical to SEQ ID NO: 32146
  source 1..50: mol_type = unassigned DNA; note = donor_ffab849
  misc_feature 1..23: note = RE
  misc_feature 24..25: note = Core
  misc_feature 26..50: note = LE

SEQ ID NO: 40343 - DNA, 50 bp, unidentified
  source 1..50: mol_type = unassigned DNA; note = donor_ffb3016
  misc_feature 1..24: note = RE
  misc_feature 25: note = Core
  misc_feature 26..50: note = LE
ttgcaatcaggcggggtccatatacaatggtatggaccccgccgccccag

SEQ ID NO: 40344 - DNA, 50 bp, unidentified
  source 1..50: mol_type = unassigned DNA; note = donor_ffb5afd
  misc_feature 1..22: note = RE
  misc_feature 23..25: note = Core
  misc_feature 26..50: note = LE
tcgctatgcttttctacatagcagtaattatgtaagaaaagcatagcgca

SEQ ID NO: 40345 - DNA, 50 bp, unidentified; identical to SEQ ID NO: 38228
  source 1..50: mol_type = unassigned DNA; note = donor_ffb7db4
  misc_feature 1..23: note = RE
  misc_feature 24..25: note = Core
  misc_feature 26..50: note = LE

SEQ ID NO: 40346 - DNA, 50 bp, unidentified
  source 1..50: mol_type = unassigned DNA; note = donor_ffbb148
  misc_feature 1..24: note = RE
  misc_feature 25: note = Core
  misc_feature 26..50: note = LE
ggcataactgggagcgtccatgtataatgtaatggacgctcccttcctaa

SEQ ID NO: 40347 - DNA, 50 bp, unidentified
  source 1..50: mol_type = unassigned DNA; note = donor_ffbfc2c
  misc_feature 1..24: note = RE
  misc_feature 25: note = Core
  misc_feature 26..50: note = LE
tgcagccaagaggaagtccttatagaatgaaagggacttccccgtgccgg

SEQ ID NO: 40348 - DNA, 50 bp, unidentified
  source 1..50: mol_type = unassigned DNA; note = donor_ffc04f4
  misc_feature 1..23: note = RE
  misc_feature 24..25: note = Core
  misc_feature 26..50: note = LE
gactaccgaaggcccgttacagaagatggcgtaacgggccggccgccggc

SEQ ID NO: 40349 - DNA, 50 bp, unidentified
  source 1..50: mol_type = unassigned DNA; note = donor_ffc1085
  misc_feature 1..23: note = RE
  misc_feature 24..25: note = Core
  misc_feature 26..50: note = LE
cccccttgtgttctttcattggagaggtggcatgaaagaggccgcgccca

SEQ ID NO: 40350 - DNA, 50 bp, unidentified; identical to SEQ ID NO: 30604
  source 1..50: mol_type = unassigned DNA; note = donor_ffc5e95
  misc_feature 1..23: note = RE
  misc_feature 24..25: note = Core
  misc_feature 26..50: note = LE

SEQ ID NO: 40351 - DNA, 50 bp, unidentified
  source 1..50: mol_type = unassigned DNA; note = donor_ffcf629
  misc_feature 1..23: note = RE
  misc_feature 24..25: note = Core
  misc_feature 26..50: note = LE
tcgcttgactggaaagacggtatcttgtatcttttcttctgtggtggtta

SEQ ID NO: 40352 - DNA, 50 bp, unidentified
  source 1..50: mol_type = unassigned DNA; note = donor_ffcfb93
  misc_feature 1..23: note = RE
  misc_feature 24..25: note = Core
  misc_feature 26..50: note = LE
cctcttgacctctgagacggtatcttgtatcttaattcacatagtgatta

SEQ ID NO: 40353 - DNA, 50 bp, unidentified
  source 1..50: mol_type = unassigned DNA; note = donor_ffd0f9d
  misc_feature 1..23: note = RE
  misc_feature 24..25: note = Core
  misc_feature 26..50: note = LE
aggcttgactgcgaacataggatcttgtatgttccccccggctcctacga

SEQ ID NO: 40354 - DNA, 50 bp, unidentified
  source 1..50: mol_type = unassigned DNA; note = donor_ffd661d
  misc_feature 1..23: note = RE
  misc_feature 24..25: note = Core
  misc_feature 26..50: note = LE
tctcttgactttttatagctggtctcgtataatagatttacggtttaact

SEQ ID NO: 40355 - DNA, 50 bp, unidentified
  source 1..50: mol_type = unassigned DNA; note = donor_ffeb32d
  misc_feature 1..24: note = RE
  misc_feature 25: note = Core
  misc_feature 26..50: note = LE
tgcaaaacggcggcggaccatacatactggtatggtccgccgcctgtgcc

SEQ ID NO: 40356 - DNA, 50 bp, unidentified
  source 1..50: mol_type = unassigned DNA; note = donor_fffa977
  misc_feature 1..24: note = RE
  misc_feature 25: note = Core
  misc_feature 26..50: note = LE
tgccctcttgactcaaagaggattctggttgagacttctaggcagacgct

SEQ ID NO: 40357 - protein, 408 aa, unidentified
MEVMYPKCAGLDVHKDTVVACARLVSGREVSQQVVTFGTTTKELLALSDWLTEQGCTHVAMEATGVYWKPIWHILEGSFELILANAMHIKNVPGRKTDVNDATWIADLLAHGLIRASFVPETLIQDLRTLTRTRKQLVREKARHVQRIQKALQDANLKITSAVSDIMGVSGRAILNALIEGETDPEKLVEAAGKRLRASRATLVEALRGCVTEHHRFMLKLHLTQIQALETAIGEVDGRVGSALEPFREAVEHLNTIPGVSDVVAQVIISEIGLDMSRFPTVAHLISWAGLCPRNDESAGKRRSTRLRMGAPWLKTILVQAAWSATRAKNTYLRAQFHRIRARRGPKKAIMAVAASILTAAYIMLRDGVEYRDLGHDYFDKLDTDKTASRLIRRLRDLGVEVEVKQAA

SEQ ID NO: 40358 - protein, 363 aa, unidentified
MITIGVDAHKRVHAAVALDDAGGELAQWRGPNSAEGWQQVAAWAAALGPDCRWGIEGAWNYGRGLAQFLVEAGVVVYEVNPRWTAQRRRTARTRGKSDRLDARAVALLVRGEASTLPAVAADDVTATLELLSTERDDAVAEATRLRNQVHQVLLHLDPEYTAHLPKLRTKAGLRALERYETADPRPLQQQRAGTVRRLGQRLRLAQEHARYLAAQIRELAASRFAPLAQICGIDLLTAGTLAGILGPGRRFATDAQLAAYAGAAPLETSSAERVRYRLNRGGNRRLNAILYRIVLTQSRYAPQAQAYLARRMTEGKTRREAVRALKRFVVRAIWRRWQECLTPEAMDCTPFTRPPGKSTFPGQ

SEQ ID NO: 40359 - protein, 393 aa, unidentified
MMTHLDHPQEQTAIRTDLGAIFVSLELSRAKWLITSLSPGGGEKMSKHTVAGGDVAGLFERFEQLRAKARARTGRTFPIIVIQEAGLDGFWIHRLLEAEGIESYVVDAASIATSRRRRRAKTDKIDGEALVRALLAFKRGEPRVCSMVKAPSPEEEDHRRLCRERKALISERVRHINRIKGLLFAQGIGDYEPEKRDRRARLDDLRTGDGRDLPAHLKTQILREIDRLELLMAQVKVVEAERDALLRPEPAAEHAPGGHAPAAELTRLRGIGPEFASVLWAEGLYRAFDNRRKITAYAGLAPTPWRSGKIDHEQGISKAGNPRLRATMIQLAWMWLRHQPGSALSQWFQSRAQNGSAKLRKVMIVALARKLLIALWKFVTTGLVPNGAVMTVA

SEQ ID NO: 40360 - protein, 462 aa, unidentified
MIVRMGIDIAVRAPHQASLADERGTVLWSGHRFRTRGEDLDRLWARLSSDVTPDEVTVVMEPTRNAWVPLAAWFRRQGATVVLVSAERSADLRAYYAKHTKSDRLDSILLARLPLLHPEGLYPERGAGPGDPLRRATKLHSTLVQRRTASLARLDALLEILGPDWHAALSGDLANKTPRRFLAAGYADPHTIRRLGRSRLTRFFYRHSRGSWGEPEADKILAAAAATAQLWGEELAFSELADDIAVEARLALAITDEIKDVDERITVLVAERDPEGIITSAPGIGAVTGAVILGRLGNINRFSSLAAVRGFSGLVPSLDASGLSGSHGGPTKRGDALLREALFMAASQARRNDPTLAAKYHRLMVEAGKHHNSALCHIATTLLTRIASCWKNNTPYQLRDVDGTPVTRAQARAIVAERYTVPEDIRRSRKTTVVGTGQRTKKSPRAPSTDPSNTHAKPHRAA

SEQ ID NO: 40361 - protein, 407 aa, unidentified
MELSALYKCVIGLDVHQSQITACALIQQPDGGVRIEQRQFGGFMRDRRELAQWAASLNPDEVVMESTGIYWKSPYAALEAVGIRAKVVNARHVKHVPGRKTDVGDAHWLAMLARAGLLRASFVPPAALRELRLIARQRQKLVGQLASEKNRLHKVLTDSGIRLGVVVSDLHGQSARAMVKAIIAGHAPQQVIKLASRRLKASREEILDALQGELSASHRFVLDELMQHIEEIEARISRFDARLLEGLESERDTLALMQTIPGIDQIGAAMLLVEIGADMDAFGSADRLASWVGVCPGNNESAGKRKSGHTRKGNPYVRRLLCEFAHAASRTTSMFKSKFQALVVRRGYKRAIIAIGHKMLRTLFFMLKRREHYRDCATDYEALSVQRNAPRWIKALTRFGFITPASA

SEQ ID NO: 40362 - protein, 348 aa, unidentified
MALTIVETRAVTGGVDTHADVHVAAALDPVGGLLGVEEFPATPAGYARLLGWLGGFGTVCLVGIEGTGSYGAGLSRHVTGAGVRVVEVDRSDRQDRRRQGKSDPLDAVSAARAAQSGRARGAPKGRDGTVEAVRALMVAKRSARSERTQTINQARALVLTGPDDIRARFTRHTPAGLVAELASLRPRPGATVGYATRIALRELGRRARFPDGQLERLDEFIVPLVTARGPGLLALYGIGPDTAAMLLVAAGDHPGRLRSEAAWAHLCATAPLSASSGKVTRYRLNPGGDRQAGHALYRIVITRLSSCPPTRAYAGRRTKEGLSKKEIIRCLKRYVAREVYPCLRPPAG

SEQ ID NO: 40363 - protein, 348 aa, unidentified
MVVIGVDSHKRTHTVVAVDEAGRKLAERTVTTTADGHLEMLGWGRRWPERTWALEDCRHLTRRLEADLLKAGEAVRRVPTKLMAGARRSAREPGKSDPIDALSVARAALREPNLPTARLDGVERELRLMVDYRDVLITDRTRHQSRLRWFLVELGIPEPPSRRLAVPVVLAGINLQLVGRPEPCARIARDLASRISELTVAIDDLARQIGRLTENLAPTLLALLGCGPLSAAKIVAETAGIGRFRSRAAFAAHNGTAPIPVWSGNLVRHRLNRGGNRQLNVALHRIAITQLRCPGPGQAYVAKRQAAGDTKTEAIRALRRRLSDEVFRRLQVDEAARASIEDVARAAA

SEQ ID NO: 40364 - protein, 352 aa, unidentified
MEIATVGIDLGKTVFHLVGLNAAGETMVRKSFSRAQLLRFTGILKVGLIGMEACAGSHFLGRALRQQGHEVRLMPAQYVKPFVKTNKNDYIDAEAIAEAVGRPRMRFVPIKSDEQLDMQSLHRARERWVRNRTALLNQIRGLLLERGITIRKGRRHAEEALPTILQDAEANLTGMMRQLLARLMSELKQLDVQISEIDAMIAGKADDHEACQRLMAIPGIGPITATAIVSAIGNGAEFRKGRGFSAWLGLTPAEHSTGGKQKLLGISKRGNCHLRKFLVHGARSVMQCREKQTPGLKAWLGELVSRCHPNVATIALANKMARMAWVLLAKGETYRPALLKSSLEAAAPQLVA

SEQ ID NO: 40365 - protein, 432 aa, unidentified
MDQVIIGVDPHKLSVTIEARDSREILRATGRFGTDARSYRRLLAYARQWPDRVWAVEGANGIGRPLAQRLLASGERVLDVPAKLAARARVSGTGQGRKTDPAHAHAIVMVALRDKRLRELTADPGLTVLRLLCDRRDELSSARAQALNRLHRLFLELIPGGAPVKKSAAQYRRLLATARPRDAAGKTRRRMAAEELGDIERLDAKLKTMKAELKAAVTASGSHLMDTHGLGPAGAARIHADVDDVARFPNRAHFASWTGTAPIDASSGQHTHHRLSRAGNRRLNHVLYMAGLAQLRNDTPGRAYYRRRVAEGKTPMEAMRRLRRRLSDVVYRQLTADAPPQQAGPGGHSGATLLSSAAGLLPVTGTSDQPLPRPAPTTLPPPPVNRTPPTAPAGATQRRRAAGVNVQRPTGRTTLTPTSVDAPSKASRTRAS

SEQ ID NO: 40366 - protein, 401 aa, unidentified
MKRLSGGIDVGSESHHIIILDEEDNILYNQKVAHKLNEFTENIKLFKQLEKKERGKLSFALEGKNGYSAPLDRILLDQGFTLYNVDNFKLKRFREAFAGEWRDDERDSLMLSKMLKLKEHINSPREKVFIEIEKPSPLTESLKLLSRHQQTLIDEKIRMMNRLRKKLLEVCPQILELAKLKNKKIIAILVKYPDFSKYKRITLKSLLKIKGIGKKQAPFLLKRLNHAEYIPGLTDIYKTIILSYAKRILKLQKEISDIDKSLDEIGEKNKEVNHLKTIPGVATKLASRLIGEIGDINRFPSEKQLAIYCGVACVNNDSGKITKAKAVYKANKICKQTLINMAGCSIRFSPQCKAYYLKKRAEGKTHNHALRCLARQLIKVIYRMLTEDREYIVRKELKKVA

SEQ ID NO: 40367 - protein, 418 aa, unidentified
MKSHPKSIPIERYIAIDIHKHYLVVGGMNSQKEWVLRTRKVRMSRFPEWVQKNLNSMDAVVIESTSNAWEIHDLIAPLVGKIVVANPLKVGQIADAKVKTDRLDVERLLTLLIADIVPEVWVPPHHVRDLRSLISHRWRIQKQITMTKNRLQSFIHRFNLVPPEGKLFSEENRSWWQQQDFSSMVRLQIEQDLLILEHLSEHKEAIHQELACLSNCAPWDKDMVFLMQIPGLGVIISMTALSAIGDITRFEHAKNLVGYAGLGAGVHDSGLKHQGKGITKAGRKELRWAMVEAAWGAVRSDPYWKAQFENLKRRGKHANEAIVAIARKLLVVIWHVLSKGEPHSHSTDEDLAYKMLIWSQRMNEDALQGMTRQQFTKYGLLRLGTGQDITRIVRNGFPRRIAPSEEVLALKPELNLLE

SEQ ID NO: 40368 - protein, 416 aa, unidentified
MEVLHARCAGLDVHKDTVVAGIRIAGGGPAKTEVRTFDTTTPGLLALSAWLAEAGCTHVAMEATGIYWRPVWHVLSDGEVTLILANAAHVKNVPGRKTDVADAVWLADLLAHGLIRPSFVPEAATQEMRALLRTRKQLVREQASHVQRLQKTLEDANIKLSSVLTNIMGKSGRAIIEALIEKQTNPEGLLALVQKGVKAPAERIKAALTGRVTDRHRFLLRLHLQQIDALDAAIAAIDAEVDRGLDPFRQAVELLRSIPGVSDLTAQVIVSEIGTDMSRFPTAGHLISWAGLCPRNDESAGKRRSNRLRHGAAWLKTTLVQCAWAATRKKASYLQAQFQRLRHRRGPKKAVCAVAASILTAAYHMLRDGTFYQDLGPDHFRRTSPETHAKRLAQQIAKLGFTCTIAPASTVEEVSI

SEQ ID NO: 40369 - protein, 356 aa, unidentified
MHQLTTIGIDLAKDVIAACVMDQYGAVTEQRVLRREAFERWAAQLEPAMVAMEACGSAHHWGRWFAARGHTTRLIAPEFVVPFRKGGKNDTADAEAVAIAARQPTMRFVPIKTADQQAMLAWHCAREGWKEERVALLNRVRGLLAEYGVVIPRSPERLLTALPALTEDARLPDRIHALLLEVREQLSALHARLAKCDAHIAAHANHSTAAQRAMQLTGVGPVTASALAATVPDARVFRNGRRFGAWLGLTPRQHSSGGKTRLGRISLHGNVYLRNLLIQGARSTLQSALRADPAKANRLQRWISALYGRKGYFKTVIAIANKHARMLWAMLARDENYDASAWQRHPMTSIASPKNP

SEQ ID NO: 40370 - protein, 321 aa, unidentified
MIDGENTVLYKQRHRNELPSILSALDPFKKDVRGVVVESTYNWYWLVDGLMDAGYTVHLANVSAIKQYEGLKAIDDKRSSLWLANLLRLNILPTGYIYPKEERPTRDLLRKRLQLVRHRTSHILSVKNILARNLGVRMKSDEVKKLTAGEVTALFPDKEMRTAIMASVGLIGHLEEAIDGIEKLTMKKLKIGEEFIKLLTMPGIGQILGLTIMLEVGHVDRFPTVGDYSSYCRCVKSTRTSNGKVTGYGNRRNGNKYLSWAYVEAAQFARRFHETVRSYYERKMSRTNRIVAVKAVSHKLARASYYVMRDRVDYDPRLFSE

SEQ ID NO: 40371 - protein, 344 aa, unidentified
MTIVEDACVITGGVDTHADAHVAAALDRLGGLLGVREFPATAAGYADLLGWLAGFGTVALVGVEGTGSYGAGLARHLAAAGVRVVEVDRADRQDRHRQGKSDPLDAVSAARAALSGQAAGVPKGRDGAVEAIRALMVAKRSARNERTQAINQARALILTGPDELRARFGGLRAAALAEAVAALRPRPGDAADYSVRVALRELGRRVEFLDAQIERLDDLIVPLVTARAPGLLSLYGVGPDTAALLLIAAGDHPERLRSEAAWAHMCAVAPIPASSGKTRRHRLNRGGNREANHALWRIVITRMSAHPATRAYLERRTKEGLSKKEIIRCLKRYVAREVYPYLRG

SEQ ID NO: 40372 - protein, 387 aa, unidentified
MPQPNDLSRSLVALDQNSTIIAVVELSQSSWLVGGVLPGIERQPCKKLEPSAERLLGLLHRWRDEAVRAGSSITRIALAFEAGRDGFWLARWLQAHGVEAHVIHPSSVAVSREHRRAKTDRLDTELLKRSFLGWLRGERGHCSMARVPTMLEEDAKRPNRERECLVGERTRIVNRMKGTLARLGIRTFKPTLRKAAERLATLHTPEGSPLPPNVSAELQHDMARLRLLISQIREIENARQERLEQEPETGPHAMVRLLARIVGVGIETADMLVNEVLSRRMRDRKAVARYAGLTGSPDESGTKRREQGLARAGNARVRRGMIQLAWRFLLFQKESALALWYRARTADSRLGTRKTMIVALARKLLIALWRFVTTGETLEGVVLRPAG

SEQ ID NO: 40373 - protein, 311 aa, unidentified
MGSKSYVGIDVSKDQLEVFVLSTGGNQTVTNTEEGIASLIPLLQSTDPKLIVLEATGGLERPTAEALTAAGFPVAVVNPRQVRDFAKAKGILAKSDRIDARVLADFGEAIRPEARPPKAPEVQELEALTTRRRQIVDMITVEKNRLGTAPKRTRLQIQDHLRYLGKALKDINQELNKTLKKHPQFQERNRIIRSVPGVGPVLAVTLLSDLPELGSIDRKAVAVLVGVAPLNRDSGRFRGRRCVWGGRARIRAVLYMATLAATRCNPVIRAFYNRLLQAGKEHKVALTACMHKMIGILNAMIKNQTTWRLAS

SEQ ID NO: 40374 - protein, 366 aa, unidentified
MKEQKTLPRYVGIDLGKRTYEMAAVGKGGKVTKSNGKTYPLARQGLYNKLRPGDKVALEACSLAFIMAKEIEASVGCKVYVLNPGRLSIIYKSMKKTDKEDALKLAHILEDFSEDRLPVVAVPSDKEMERRKILANYRRADQNRTRNINLLHALFVSQGITTVKKKDLETAAARKETIQMLVGMERDEAEYLVQCLDLTEERKEKLDRVINEAAANDEEMKRLQEVPGVGPKVSFAFASHIGAARFENAGQLSNYLGLVPRVYMSGDTVRYGQITKRGNSYVRAMLVQAAWAMVRTKNGGKLKEMFEYMTIEKSKGKKKAIVAVARRIAELLYLLMRDEVRYVSKPFISPEKKKEAEKIAQLALSA

SEQ ID NO: 40375 - protein, 315 aa, unidentified
MAMPVATTQTIIGVDVAKDELVIYCAESDQLETISNTKAAIKKWLKTVAKPVAIAIEATNIYHQEFADLAHADGCVIYMVGGYELSHYRKGVNVRAKTDALDARLLARYLTNEGDHLRPWTPPSPLYCRLISLFRRRAALVQARVSLKQSWENEPLLKTAFKHQINAMQRLEILLEKTILTQIEEAGLGAQLKRCMKVEGIGMLTGARLLASFQRGDFRNADAFIAFLGLDLRISDSGKKKGRRCLTKRGDSEARRLLHNAAMAASRTSAWKGFYEALRERGLSTTQALVALARKLARVVFALLKNQSEYSPKAV

SEQ ID NO: 40376 - protein, 360 aa, unidentified
MHATTVAVDLAKSVFQLVVADEHWRIVETQRLTRTQFERWFVNRSVGLVVMESCGSAHHWARWLNALGIEVRLLPAQYTRAYVRRNKTDATDAAALLEAARAADIRPVRVKSVEQQALQGLHRIRSLWMGTRTSRINALRGFLREFGIAIPVGARTGVEAIGRVLADPNTAVPDLIRGSAKLLVEEIRLLEARIAQVERELAAAARLSPACTTLLSIPGIGLLTATALVAATSGDVSHFQDARHFASWFGLTPREFSSGNSRYLGRISKKGDRYLRMLLTHGARSVLRAAKVAEGAGKEVCGVRRWALEVQGRTNHNKAACALANKMARICYATLRDKTTFDENSRLSRKINRQAFVMPA

SEQ ID NO: 40377 - protein, 418 aa, unidentified
MTRGDDSRIIRIVHPICCGLDVHKESVSACIIFPDDKGEEQYDVKVFGTFTDDLMRLRDWLAAHNCPVVAMESTGVYWRPVHNVLEDSVQVVLVNARDMHNVPGRKTDIGDSRWIAGLLRHGLLKSSFIPPQDVRQWRDLTRLRKKYVHTVGDYRKRTHKLFESANIKIDSVVSDLFGVTGRNLMQLLVADRKLTLSDIQTCVRGKLKGKEAELFRSIQGFFTDHHRFVLKMILETIATLEAQIEALDLQIRCAMKEHETLLDRMKQAPGIADVASREILAEIGPTLDSFRKDTALVAWSGLCPGNNESAGKRKSGKSPVRKHHLKTIMIEVAWAAIKKKDSYFKDKYYRLKARRGAKRAIVAIAHRILLGIYHVIKDGADFRDLGGDYLTLRNKSQKVFHLRKQALAMGFDLVPQTV

SEQ ID NO: 40378 - protein, 355 aa, unidentified
MSGEKYIGLDVHQATISVAVVDSQGKVVMESILETKASTLLEFLAGLRGSLFVTFEEGTWAAWLYDLLKPHVTEVLVCNPRKIPLLKHGNKSDKIDARKLAERLRLKDLKPVYHGETGVRMLRELARSYLTVVKDLSRVMNRLKALYRSWGIPCAGRDVYYTRHRREWLEKIPEAGTRRRAEQLYQQLDMLQPLRLQARRELLAESRKHAITAKLRKIPSLVPIRSALAVALIQTPHRFRSKRQLWTYSGLGLETRDSGEYHYVRGQVRRRKKQATIRGLNKDYNHDLKSLFKGAATRASVKPGPFQEFYQRALAKGIKPTMVRLTLARKIAAITLTLWKKGEDFDINKLNSQAA

SEQ ID NO: 40379 - protein, 314 aa, unidentified
MASIGTVVTIGVDPHPGSHTACALEANGLELGRVRVTNDGGGLGQLYQWAQQFRCRRWAIEGAGNRFANALVGQLLAVQEEVFSIPPSMTSQYRSRRGRAKDDAIDAANVARVLQANPNLPLYDPTPYESRLKELSRTYARVSEQLTANRMALESIDVPAAQQAMTEVIAALQRAAKTLKREMQAAVQATAPRLLDLCGVGPVVAATVLAETGRIRRFPNHDHFAAYAGCAPVRWQSGAHSTLRVNTGGNRTLNWAIYIMVINRLRVDPRTQIFHQRKLAQGKTQREVLRALKTYVARELYHTLRCITPCPHPN

SEQ ID NO: 40380 - protein, 454 aa, unidentified
MAKKREKRECKAVVLEPDAAGIDIGAEEIYVAVPPDRDEESVRMFSSFTCDLHALADWLQQCRIRTVAMESTGVYWIPLFQILEARGLEVYLVNAHYLKSVPGRKSDVSDCQWIQYLHSVGLLRASFRPTLDICAVRSLWRHRGSLLQMASEHILHMQKSLSQMNLQIHHVLSDITGASGQAILDAILAGERNPVQLAQLCNCRVKSPREKVAKALEGDYRPEHVFTLKQSLDGYRYYQKMIAELDREIQRLMQTLPSAVENGQEIPRRTKHSAFQRQGNDPGFDLRGQLYRIAGVDLTDIPGVSAVTAQVILTEIGPDLRRFRHASAFASWLGLCPENRVSGGKVLSCKTRKVKSRAALALRLGANSLSRAKGYFGEFFRRMRAKLGTAQAITATAHKIARVLYHVLRTKQPYAETVFHRSDEHARRRAEMRLRKQAALLGFQIIPVPADSAT

SEQ ID NO: 40381 - protein, 362 aa, unidentified
MEYFCGLDVSIDETAVCVVDAQGDVHLQTTAVTDAEALFAVLKPYLPRLRRVGHEAGSLSPWLHPEMLKLGLPAICLETVHVRAAMSAQRNKTDKADALGIAHIMRTGWFRRVHVKTEGCYRMRLLLTHRRNLKRKFLDLENAIRHSLKAFGIRLGGTGRGKFDAAVREAVADDPFTTELIEAMLAARAALWKEYCRLHDLVVKMVAQSELCRRFMAIPGVGPVTALSVMTAIDDPSRFRRSRDVAAYFGLTSRRWQSGTSIDVKGRISKAGDADVRRALYEAASALMTRFKGKDDLKAWGTALAKRSCHRKATVAVARKLAVIMHAMWSAGTFYTGVPNDGAAQADARQMRKERKLLGAHA

SEQ ID NO: 40382 - protein, 442 aa, unidentified
MRKNLTTRFVGLDVHKRQITACFVDGEGRKLETRTFELTRAKLMHFAKHVLRPTDQVALEATTNCWAVARVLQDHVTRVVVSNPLVTKAIAQAKVKTDKVDAHVLAQLLRCDFLPEVWHPDTTTQQLRELTGRRAALVQQRTALRNRIHSALAMRLIEAPESLFDSAGQDWLAKLLPTLDAQGQLLITSDLRLLLAVQQEIDTLGQQLAKQGWQDQRVRLLMTLPGVDVTVAESVLAALGDIERFPTPEQAAAYLGLVPSTRQSADKCYHGPITKRGNNQARWMLVQAAQHVGRHPGPLGHFFRRLKQRKNHNVAVVATARKLVMIAWHMLRKNEPYRYAISRTTETKLTKLRVQATGQSRKKCPAKRTKRTVKLPGGSRVIKSLDRVYASEGLPARQPLTAGEERAIAATQSVQFVADLAHDHVVPRQQKTPRVAKQLSTD

SEQ ID NO: 40383 - protein, 377 aa, unidentified
MHSENIAAYVGLDVHKETLAVAIAAPERLGEVRYYGTINNEAQAVRRLFQKLQGLYGNILSCYEAGPCGFGLYHQFTAMNIKCQVIAPSRIPKSPTDRIKNDHRDAISLARLLRAGELTPVWIPDLTHEAMRDLIRARAAAKRDSRVARQRILSMLLRTDKHYAGKHWTGKHRTWLANQSFSQPSQQIAFQHYCQSLEQIEDRILQLDQEISRLLPEWSLCNLVCQLQALKGVGQLIAITLVAELGDFSRFSNPKQLMAFLGLVPGEYSSGNSIRPRGITKVGNSELRRLLYEAAWSYRTPAKVGAWLIYYRPDSVTQYSKDIAWKAQQRLCSRYRSLTAKGKKSQVAITAVARELTGFMWDIALAAQSSFSQQKQN

SEQ ID NO: 40384 - protein, 454 aa, unidentified
MKKEDQKKKPEETVKKKRFSQGLPVLNPFAAGIDVGDTRHDVAISDGVSGHEVREYLTFTEDLTDLVNWLKSEGITTVAMESTGIYWLNLYLMLEEAGIEPYLVNARHVKNVTGRKKDDTDAIWLQKLHCCGLLQKSFQPEAEIRTLRAYVRQRRNLVLISSDSVRRMQKALELMNIKLHTVISDLLGKTGLQMVRAILSGVRDPEELILLKDSRIKASDEDIKKSLNGIWKEEYLFMLEQAYQEYVFYQSQILKCEERIRDLLLNHAARVLDGDITGLDVKKKKPRKNEFNYTIRPLLKIIATVDLCRIDGISEVSCLEILSETGADMTKWKNGKHMAAWVNLAPNTKITGGKIISSKLQKKKNHAGQTLRMCANSLKTCKSPLGDYARKMKSRLGKRSGVVVAAHKLTRIIYTMMKEHIEYNPQIIANDHEKWKEKRIKYLEKQLCQLKMAA

SEQ ID NO: 40385 - protein, 347 aa, unidentified
MGCPPNRVNSKERIEHDRGSLREFLERCERGSPVAVETIGNWYWIVDEIEAAGCVPKLVHARKAKLMMGEINKTDRLDARGLNRLQRNGTLPTVWIPPGELRDQRDLPRTRMVLVRQRTQLKNRIHATLAKYALHDLEVSDFFGVRGRALLRQRFDLLPPHTAYASQQLLEQVEELDRRVREFEQRIQAVFKPTPAIQLLLTLPGVGLTLAAVIALEVGDVARFARAEKLAAYAGATPRVHTSGGKTRFGPSRPDVNRYLKWAFVEAANAICIGRGRAPHCHVSRLYERIARRKGHAKAIGAVARHLAEATFWILRKHEPYREPKASAVSPTGDKRGWPLSSRKLDR

SEQ ID NO: 40386 - protein, 375 aa, unidentified
MKKVRCVGLDVHADTIAVAVAESGGEVRSLGQIPNRPESIRKLMKKLGPADSVRACYEAGPTGYVIYWQLTALGVRCDVVAPTLVPVKAGDRVKTDRRDAEKLARSYRAGDLTAVWVPDAAHEALRDLVRAREAAKKDQLRARHRLGKFLLRHGRRPPTGMTSWTQRYLAWIKTAVHFEQPAQEATLLDYLHEVEHVAGRIAGLERAIDEAVRTVPARMRAVIDALQALRGIALVSAVTIVAEVGELSRFTRAPQLMGYAGLGTREDSSGSRTRRGGITKTGNAHLRRIVIEAAWAYRHRPAVGGALKKRQATLGEEVKAIAWKAQHRLHGRYRKLLGRGKCQQQVVTAVGRELLGFIWAIGVEVEHRTSSTIAA

SEQ ID NO: 40387 - protein, 470 aa, unidentified
MILRNAIGIDPDSKGFQCAFVNLGETRPQHKDYLATAEGMESFIRWVKTQDDVIVAIEGSNGLSLPIEKALRASEMVFYSFKASDVAKFRKAVLGQNKNNKLDAESTARYAMALESQGILDNWKRVWRVDEQLQGLTRSYAQKIKESTREINRLWKLLRVASVDLYLALGGQHPDIDISENTLQNESFMRVLVEKSDIHEWKTLSEADFADLMGARNYAGREQLIKEIQKVSESFVPVPAAISLMINNAAAQILLLRRQQSEIKKMIGTLTKDNRAVQKLSEHKGIGVLTSSTLIAEIIDIRRFAKNDNLASYSGLARREYKTGDSEKEIANHFFNPRLKNAFMTAAKNFVIFNPDSHLSGYYENLVKGGMKKIDARKRVARALVRVFFKDLNSVVHSDYTNTVEEKKEGNDMANGSSRSDKDHSNISFPSHMINISECVEKINEECPTIHADGNADTIGEKNKISLEIY

SEQ ID NO: 40388 - protein, 392 aa, unidentified
MICVGIDVAKDKHDCFILNSEGEVLADVFTITNNAEGFDILLQTIRSCSRPENKIKVGLEATGHYSYNILGFLLNKGLATYVINPLHTNLYRKSLSLRKTKTDRIDARTIATMLMSDVDLKSYTDTSYHNEELKSLTRYRFDKVHERAKLKSSIARLVCILFPELEKLVSTLHMASVYALLSEFPGAKQVASAHLTRLTNLLHEASKGRYGREKALQIRDAARKSIGSAMLAKSLELKHTIHLIGELDAEIEEIETEIDSIMETLHSPITTIPGNGNRMGAMILAEIGDFSNFDSADKILAYAGLSPSTYQSGQLTSSYAHMEKRGSRYLRYAIFNATKFVCNWDPSFAAYLAKKRGEGKHYNVAISHATKKLVRLIYAMEQTKQPYRQAAV

SEQ ID NO: 40389 - protein, 340 aa, unidentified
MGDITTIGLDLAKNVFQVHAVDQAGNVVVRKRIRRGQVLAFFSGIPTCLVGLEACATAHHWARELIALGHDARLMPPNYVKAYVKRNKHDVADAEAICEAVRRPSMRFVPLKTTEQQSALMMHRARDLLIRQRTMLVNALRGHLAEFGLIEAQGLHKVARLVTIVVDEVDERVPEMARQVLKVIVNQLKDIQTGIADLEKQVLVWHKNNPVSQRLATIPGIGPIIATAIAATIADPNTFRSGREFAAWLGLVPRQNSTGGKARLGGISKRGDSYLRRLLVNSAHTVLLCSKAAKNDPWLISLLSRKPRLVAAVALANKTARVAWAIMSRHDTYRHVAAAA

SEQ ID NO: 40390 - protein, 377 aa, unidentified
MTEKLRFLGMDVHAETIAVAVAEPSGEVRSLGTIANREDSIRKFIRKLGSPEQLRACYEAGPTGFVLYWQLTQLGVKCDVVAPSLVPKKPGDKVKTDRRDALKLARSHRSGDLTAVWVPDEASEALRDLVRAREAAKQDQLRARHRLTKFLLRTGQRPPLGVKAWTARYMEWVQKVRYTHPAQEATLLDCMNEVEHMAARVSRLEKSIVEVIELAPAPMREVVRGLQALRGIAHISAVTIAVELGNITSRFEGARDLMGYSGAFPSEDSSGKRIRRGGITKSGNAHLRRIVVESAWSYRHLPRVGAKLRKRQQGLPAEITEIAWKAQTRLHKRYMALTARGKDQRKTMTAVARELLGFIWAIGIKAEAMASKQQMAA

SEQ ID NO: 40391 - protein, 336 aa, unidentified
MTIIRVGLDTSKHVCQIHGVDENEQPVLRRQIRRSEVAKFFAKLAPTRIGIEACGAAHYWARVLRGLGHEVVLVPPQYIKPYVKRGKNDKIDAEAICEAMSRPSMRFVPVKTAEQQAALTMLGVRDLLVKQRTMLINAIRGHAAEFGLTVAKGPKQVNELLQRLASEEGVPALAREMVSVLASQLEGLGVKLKTIEKQLMAWHRQDPTSQCLATIPGIGPIAGVSFALKVADPQAFRSGRHFASWIGITPRENSTAGRQKLGRISRAGDEDLRRLLVIGATAVIRAAKPGRTSLWLLALLARKSKKLAAVALANKMARIIRAMMVSGETYRQPTQA

SEQ ID NO: 40392 - protein, 360 aa, unidentified
MRQDEVEDIMQEKMGGSEVNVTTIGLDIAKNVFHLTGTDAKGVEVLKKRLRRHEVLSYFANLPRCVVGMEACGGAHYWGRELEKLGHTVRLMNARHVEAYRRGQKNDYNDARAIGEAVRQPRMRFVALKSREQLELQALHRTRQGLIQERTRWVNRARGLLSEHGLVINRSVKAFRETLPRILEAADNGLSPTMRALLNDLYEQVCAVDEQLSRYNRYVREACRNSETCRRLDELPGVGEVVATALLASVGDGRQYRRGRDLSACIGLVPRQHTTGGQIRLLGISRRGDRYLRTQLIHGARAVVRVAHRKDDPLSRWVTRLRQQRGTNIATVALANKLLRIAWVIITRGERYNPALAASA

SEQ ID NO: 40393 - protein, 422 aa, unidentified
MLGVGIDWAEEFHLVALGRPEEGVMHLRRVEHTPAAVDQLVGQIAALEPDPAEVRVVIETRHGLLVERLVDAGYTVLPVNPDLISRRRGPARKKDDAEDARIACLLALDRHAALRPLLPHGELAGELRAIARDDDRAARDQRRLLNRLRQDLIATFPAALQLAGDDLGAPTVLKLLERWPTRDQLAAAAHQELVAFARAARHGWPDRLADQVAQALAGDHFRPRDYLVRAKADTIRLTATQLLAISTQRRTWERRMGELLLGAPRHGRARRPREDQPGQAVPGGKIYLSFAGLGDRLAARVAGEIGDHIEQFTTPNALQCYAGKAPVTRRSGKSELVVSTRLACNRYLANAVQQWAFCSLSQSGWAREFYDAQRARGKGHHAALRALGNRWLEILWHCLIRGQLYDEATHLANRNRALGKAA

SEQ ID NO: 40394 - protein, 413 aa, unidentified
MDVLHPRCCGLDVHKSSISACILLREAGRVQKHQRRFGAMTQELQELAEWLRQFGVSQVAMESSGVYWKPVWNILEGQFTVVLANAQHIKNVPGRKTDQKDAEWIAQLLQYGLLRPSYVPCEIIRDLRDLTRMRASLSQEASRISSRIQKVLEDANVKLASVATNVLGKSGRAMLEDIISGEDDPEHLASLALGHLRVKIPQLRLALEGKVRSHHRFLLRRLVDQIQFVEHEIGLLDERLEEIAQQRPELSQAVARWDTIPGIDRVAAWALLAEIGDNMAQFPTAGHLASWAALCPGNHESAGKRLRGTTRQGSPWLCRMACQCAWAAARTKNTYLSSQFRRLAARRGKKRAVIAVAHTIIVIGYHLQKNQSNYEDLGGNYFDRIHSDGLKRYLVKRLQQLGHKVTLEPMEAA

SEQ ID NO: 40395 - protein, 423 aa, unidentified
MKNSAAKNRKQVPSGYLVIGIDPHKKKHAAIFMTQDFTTQGKLKFNNSREGFEMVLERAKTEMLRAGCRGVIFAIETGAHHWRNLAYFLDERGIPLRLINQFTLKRRREGKDLNHRKNDYRDSEVAAQLLCTGEFNAARLSQGVYAELRATYGSYRRLVKEKTRIINLVKALLDGLFPEFTQVFKNPCGKTATSVLCACAVPRVIADMKESEFINTIKAGCQGRIMKGKLQALHHAAMTSIGIEAGARSVSSEIAFLIEKFHMLERQRHHINETLAMLVDDTREGKYLLSIIGLNYVSVAGILAELGSFSSYQNAKQLIKMAGSNPTESESGGKRHSHTPISKQGRPVLRHCAWTAVIPMLRFNADFRDWAKKLRERPAGANPLSGRAVVVAGVNKLLRLAFALVKKQSFYRIPVPQPVEIAL

SEQ ID NO: 40396 - protein, 372 aa, unidentified
MTNHEAFVGFDVHKETIAVAIAKGGAGGDVGGFGTIKNSKQAVALLARKLARTHGKLSFCYEAGPCGYAIYRQLADLGHDCQVVAPSLIPTKPGDHIKTDHRDAVTLARLLRAGELTAVWVPDQAHEAMRDLVRGRIAVMQSVRKARQQLQGFLLRQDLRYPGKSPWTKLHRDWLRSLTFAYPAHHVLVHELLHVIEEGQRRQQRIEQQIQALLPTWSMAPIVRAIQAMRGVSVIAALTLAAEIGDFRRFDNPRQLMAYLGLVPSEFSSGKRVTRGSITKAGSAHARRVLIEGAWAYQQRAGISKLHMQRLTNLPTQIREIAWDAQLRLCARYRRLAAKGKCKNVVTTAIAREMAAFVWAIAREVEPVRIAA

SEQ ID NO: 40397 - protein, 422 aa, unidentified
MDEIVEESVELVERVCAIDIAKADLVACVRVPHETKPGRRLQEIREYSTLTAALLALADWLRCQQVQLVAMEATSDYWKPVYYLLEAEGFECWLLNAKHVKNVPGRPKTDRLDAVWLAKVVERGMCRPSFVPPKPIRQLRDLTRYRRSLVRECSREKQRLEKLLEDAQIKLSSVIEDICGVSGRRMLEEMIGGHRDPKALAQLARGRMRAKVGVLEEALRGHFEDHHGFLCQKMLRRIDQLSADIDEVTTRIEELVAPFAETAQRLDEIVGVAVTSARELIAEIGVNIAVFPTAAHLVSWAKFAPVDNSSAGRKKGSSTGKGNPWLAATLGEGVAATARTDTFLGERYRRLVKRRGKKRAIVALGNSILTIVWHLLADPQARYRDLGADFHQSKINKARQEQTLIRQLERLTGKKVALRVVA

SEQ ID NO: 40398 - protein, 410 aa, unidentified
MEVLHAHCAGLDVHKESVVACVRHMADSKVATVVKTFKTTTQELMALSDWLSAEGATHIAMEATGVYWKPVWHILSDGESELILANAAHVKNVPGRKTDVNDASWLADLMAHGLIRPSFVPDEPTQQMRDLLRTRKQMVRERSSHVQRIQKTLEDANIKLDSVVTDILGLSGRRIIEALIAGQTMPQALASLAHRRIHASADELEAALRGRVTKHHRFLLKLHLDHIDALDAALARIDGEVSANVEPFRTAIEMLSTIPGISTLSAEVIVAEIGIDMSRFETASHLISWAGLCPKNDESAGKRRSNRMKKGAPWLKTTLIQCAWAASRKKNSYLQAQYLRIRSRRGAKKAIGAVAASMLTAAYHMLKDGTLYQDLGANHFDNRAKEKHVLRLVNRLQNLGFDVQITPLAA

SEQ ID NO: 40399 - protein, 411 aa, unidentified
MRVHHTICCGIDVHKKSVTACLMWGPADQEPQCEIRRFGTMTAQLKALAEWLKQAHCEIAAMESTGAYWKPVWNVLEADIALLLANAKHVRAIPGEKSDNKDGKRMASYLRHGLVRASFVPARDIRELRDLTRYRKKLLANGAAERNRIQKLLEDANIKLGSVLSDVFGVSGQRMLHALVDKPSATIEEVTALAHWRLQPKIEELKNALEGRITAHHRFMIELSLGHMQYIEQQILRLDEEIHRHLAPYQKQVELLQTIPGIGEQASASILAEIGPDMSPFDDEGKLASWSGICPGSNESAGKKFSTKTRKGNVHLVSTVVECAWASTRTKGSHFSARYHRVRARRGAQRAIVAVGHSLVRTVFVVLKTGKPYQEPVRPLLSERQRTRKAQRLTQELRNLGFDVSLKTKTP

SEQ ID NO: 40400 - protein, 417 aa, unidentified
MTDGKNASSCRYVALDIHKHYSVIAAVNRDGQIVLDPVRIEHEDLEAQLRKKLLPSDQVVIESTTNAWHIYDLLEPLAAKVLVANPIRVKQIACAKVKTDIRDTLILARLLAANLVPTVWVPPVEVRDLRYLLSQRRRLVGMHTQTVNRMGSVAHRHHLNHPKGKRYIEKNTEWQQDDELSDSEKFQLELDMATGEHLDGQAKKIAEKIARMSQEEPWAANMMYLMQLPGFGVITGMTVLSAIGDIARFESSGKLSSYSGLTAGVEQSGTKNRGKGITKEGRKELRWAMVEVAQRAVKSDPYWKSRFQALERRMHRNQAIVAIAHQMLELVWHVLTHKQAYRHFSEERIAYKYLTWGWQLDEEARDGLTRQQFARYYLMRLGIGHDLKRIALNPKYPRKLASEAEVLALKPELNQTR

SEQ ID NO: 40401 - protein, 361 aa, unidentified
MKKPTHHLIAEVPLSSSKVERTIGIDLGDVWSHYCTLNPDGEVVDRGRFRTTPASVDKWFTDLPRTRIAMEAGTHSIWISEQLQELGHEVLVANVRELRAISHSDRKSDQVDAEKLARYARLDPEILRPISHRTVAQQEALTLIRARNLLVRLRTAAVNAVRGLAKPCGYRLPASSTLCFAKRCMEVLPPGLVQALGPVLEQIASLTVKIKHYDRLVKQLTETEYVETQALIKVYGVGELTALTYVLTLGNKQRFKRSRDVGCYLGLRPRRSQSGDRDPQLGITKAGNVYLRSLLVECGNHVLGPRGKDSTLRRWGLHLAERGGKQSRNRAIVAVARKLAVLLHRIWVTQEPYVPFYAEAA

SEQ ID NO: 40402 - protein, 321 aa, unidentified
MQIVGALDVHRSQITTKTLDLDSGEVRYGRISPVTRESVREWLSRFAPGEAEFALEGTTGWRFVVEEIHAAALRAHLADPAETAARRGRKKRAKTDKADCDLQLELLVAGRLPESWIPPAHILELRTLVRTRKALLDERTGWQQRIQAQLFHQGVPRGIKLRTAAGRAALAEAGLSAAGRELVTLGLRMLDVLDRELDPLDRRLRAFARRQPGCKALIAELYGVGALLAPAILAELGDCRRFSSSDDVVRHSGLDVTVHESDSRRAAGRLSHQGPELLRWALYEAAQCAARPSSPDYGYFLQVQDPSTIPPRGRWRSPPDR

SEQ ID NO: 40403 - protein, 408 aa, unidentified
MRSIALDVHRDFCEVAIKDGTQLRSGGRIKTNVAELELFAKSLALDDQVALESSGPALAIKRVSEPHVAGVVVANTKRVRAIAEAKVKTDKVDARTLCELLDAGFLPGVFSPDEWTRSLRRRLQRRSKLVRARTRAKNELHAVLARNLKGRPPMSDVFGKAGRAWLGALELPPDERETVEGCLRQVDFLDAEVGLIERELAGQALSSEEIRRLMTVPGVSLVSAATFVAVVGDVTRFATPKKLVSYVGLDPRVRQSGEAPARHGHISKQGPGEARHMLCEAAWVVVRTPGPLRAFYERVRARRGAQIALVATARKLCVLFWHLLTREQDYAFERPSLTRRKLRALELKVDEGWRRGKHSGPRVNETRKDREREREFAEQSELAYRRLVQDWQPKPKKKGAGATPGRAS

SEQ ID NO: 40404 - protein, 334 aa, unidentified
MQNVALIGIDLGKHSFHIHCQDKSGNALLRKKFTRTKLMQFLVTCPSSVVVMEACAGAHFMARRISGIGHDVKLISPQFVRPFVKSNKNDFIDAEAICEAASRPSMRFVQPRTETQQAMRALHRVRESLIRDKVKTTNQIHGFLLEFGISLPTGDAVIKRLSLVLAEHEIPEYLSRLLMKLHAHYLYLIEQITELESELNQSIKADATAQRIMTIPGVGPITASLLSSQLGDGKQFSCSRDFAASTGLVPRQYSTGGKSTLLGISKRGDKNLRRLLVQCARSFMMRLEHQQGRLAEWVRKQLDNKHSNIVACALANKLARIAWAITALQKEYQA

SEQ ID NO: 40405 - protein, 344 aa, unidentified
MGEVSTIGLDIGKSVFQVHGVDVVGAVVIRKRVSRARVLEFFGELPPCLIGIEACPSAHHWGRELQVLGHMVRLVPPSYVKAYLKRSKNDANDAAAICEAVTRPSMRFVPIKTKEQQTALMLHRTRQLLVRQRTMLSNALRGHLAELGIVSAKGRNGTAELLRIITNGADSRVSPAVRDILDVLARQYSAIGIEIASIDRSIMALHRGCEASRRLAEIPGIGPIAATALVAEIGDWKTFSSGRSLAAWIGLVPKQYTTGGKDRLGSITKQGNRYLRWLLIVGAMAVIRYARKHGTEKRPWLGRLMERRPTKVAAVALANKIARMAWAIMVRGERYKEPKLLLAA

SEQ ID NO: 40406 - protein, 396 aa, unidentified
MYYCGIDIGKYHHEGSVIDEGGKALLDSLSFKNTREGCAKLLELFERLNITKEELLLGMEATGHYWLSIHAFLLEQGYEVKVINPIQSEAFRRMYIRQTKNDSKDSFIIAQIMRFGQFSATNLSEEVIVALRQLSRYRLALVDSCGDCKRRVIALLDQVFPEYDSLFSDTFGAASKEILSRYPTPEDLLTVSTGKLAKLLEKVSRGRLSREKAEQLKAAAAGTFGVSFAKDAFAFQIRQLIEQLSFLEEQIKELEEQISWLLKQTGSYITTIPGIGDTLGAIILSEIGDIHRFDAPGKLVAFAGLDVRVTQSGEFTGTRQTISKRGSPYLRRAIWLAASRAAFCDPILSEYYQSLRARGKHHLTAVGAVSRKLCNTVYTILKEDRPWQPIPPNRSS

SEQ ID NO: 40407 - protein, 320 aa, unidentified
MSNNQLQTYIGIDVSKELLEVAAHESSYQFRCPNKPDADAALLAELIPLRPTLIVLEATGGWEARVTAALHAAGLPVVVINPRQVRDFARAAGQLAKTDRLDARVLAHFAAAIKPPLRALQSQKEKELDALSGRRRQLVEMLTAEKNRHGSATTEAVRAKIKEHIDWLEQGIDELDQQLQGLLKCSPLWRSKDEILQSVPGIGPVVSVSLLAELPELGTLNRHQISKLVGVAPLNRDSGPQRGTRHIYGGRARVRSILYMATLSATRFNPVIKDFYQRLLAKHKPFKVAITACMRRLLVIINVMLRDSLPWKLEQSSLSA

SEQ ID NO: 40408 - protein, 421 aa, unidentified
MKNTAARKLKQVPEGYLIVGVDPHKKKHTAVAITQDFTVRDRFKFDNTKEGLEFLLRRVRMEMVKSGCRGIMFAIETGGHYWRNVAYFLDERGILFRFINQYTLKRRREGKDLNRRKNDYRDSEVAAQLLCTGEFVESVIPQGVYAELRTAHNAYRRLVKERTRITNLLKGLLDSLFPEFVQVFKDPCGLTALSVLSTCCVPRAIATMTEDEFIATIEARHRGRLMRKKLAGLHCVARSSIGIAAGAQSVSSEISFLVEKLKLIEGHIGVMERRLIRLVDATDEGKYLLSIRGLNYIAVAGLLAELGCFKAYRSAKQMIKMAGSNPTESESGGKRGNHTPMSKQGRPVLRYCAWTSVIPMLRFNPDFRAWAKQRRERPVHANPLGGREVVGAALNRLLRLSFALVKNQTFYRSPQLVQVTG

SEQ ID NO: 40409 - protein, 355 aa, unidentified
MIIIGVDYHPEFQQIAWLDKDSGEFQEKRLSHPQEAEQFYRGWAAAGEKVRVGMEASGHARWFERLLAELGFELWVGDAAEIQSKRARKQKTDRQDAQLILKLLRKDDFPRIWVPSGENRDLRQLLWHRHRMVQARTRLMNQLQAVAINEGLRCKKRLWRASGRQQLESLRLAPWASRRRRDLLELLDRLNPTIAELSQAIEQEAEKCAEARQLMTHPGVGALTALAFVLIIGDAQRFQCGKQVASYLGLVPLEKSSGNRRRLGHITKQGSSLLRFLLVEAAQVTVRSLPEWRSQYFRMMMRRGRKTAKVAMARRLAIHLYWMWREGRDYEQQKSSVRTQDGPEQAMVGSRTPSN

SEQ ID NO: 40410 - protein, 347 aa, unidentified
MNFYTQQHKHYCGIDLHAKAMYVCILDQHGTKLVHKNLPTTPEAFLRVVAPYREELVVGVECMFTWYWLADLCAQEGIAFVLGHALYMKAIHGGKAKNDKIDAHKIAVLLRGGMFPLAYVYPAAMRATRDLLRRRCHLVRQRAELLAHIQNTNSQYNLPEIGKKLAYQANREGVEEHFPDPSVRKTIALDVALIDHYDKLLGEVELYITRTAKTQDVQTFARLQSIPGVGQILALVLLYEIQDIARFPRVQDFVSYCRLVKCAKESNHKRLGTSGKKIGNVHLRWAFAEAAVLFLRHNQLGKAYFAKLEHKHGKAKALTVLAQKLARAVYYMLSREQAFDLKRFVTA

SEQ ID NO: 40411 - protein, 394 aa, unidentified
MKLVGIDVGKNSHHFCVMDKETGELNVTPSSFSNNKEGFDFLINSLKPYSKKSILLGMEDTGHYHVALLKFLLSNGYTVALINPKTTDFTRKMEGGITKNDKLDTITICNVLDTPERKKQYRITKVDRFDLYEQRQLTRHHHNLKEELNIYCNRLQKSIDLVFPEFNTLFGSKYGVVYMNLLKTFGSAEAIASTDIRTIRKCFEIKGRGGRISLTPEKLKECAKNSIGISSEVETIQIKHLVSQITLIKEQIAEIDKKIEEFSITNNSPILSIPGISHFSGTSILAELGDIGNYSKPSQIIKFAGVAPYHYESSQYNAQHTGITKKGSKYLRKTLYQIILTVINNNPVFKKYYRLKISQGKGHRCAQGHCIRKLLRIIYHLLETGQSFDPALLR

SEQ ID NO: 40412 - protein, 337 aa, unidentified
MQFKRVSVDTSKSVFTVHAIDESDVPIVQRDFSRAQFKVFFSKLKATQVVMEACGGAHYWGRVLAAMGHEVKLIPPQYVKPFVKRTKNDRNDAAAISEAASRPDMRYVPVKSAEIQADGIELTSRTMLVDQRTSLINALRGHAAEFGVVSAKGQHLAGKLLELIAESDEVPAAAKAALAQIGEQIRYLDGQLKAMERRLAQRHKANAVSQLLSAIPGIGVISSLTLAVHVDPKQFKSARHFSAWLGLTPKQRSSGGKQRLGSITKAGNQRIRTLLVVGAMTVIRHAAKGGKCGTLWLQSLLGRRPKKLAAVALANKMARIAWAMMTTGEEYRHPARA

SEQ ID NO: 40413 - protein, 375 aa, unidentified
MLVQGEAGDELFSATFTHDEAGVASLCRTLVGLGVERVAIERPDGLLIERLLDAGLSVIAIHPNQVHAARPRFRVSGGKSDHFDAFVLCELARTDSHRFRVLVADSDETKALRALSRAREDLVQTRVALANQLRAELDRFWPGAALIFADIDSPIGLAFLERYPSPLDAKALGEKRLGAFLDRNSYSGRKTPAQLLVKLRDAPQGRAGESEIEARRQIVLALVAALRPIVAKISELTNEIAHRVHAHPDGQVFLSLFRDPKSVICAAALLSEIGDCRARYPSAETLAADAGMSPVAVESGKRKVAAFRRGCDKRLRDATCTLADATRHWHPWAQDRYATARARGHDHSRAIRTLGRAWCRVLWRCWQDGVPLRPR

SEQ ID NO: 40414 - protein, 389 aa, unidentified
MFYVGIDISKFKHDCFIVTEAGEVVCDSFPIKSDSDGFTELLSVLDSLDPKENVRIGFESTGHYALNLKLFLEKAHYSFMEFNPVLLSKFNKSQSLRRTKTDAIDSISIARWLMTVDYKPYPIGFYHTYALKSLTRLRDSLVKQRSFYMVKITNVLDHVFPEFKPFFNNRFSKTAIYLLENYGSAKRIAKMNTRSYDPLRSISRGKFSMQKFLKLKELAKNTVGCDHELFTCQLNSLLSLYKQLANEIASIEDQIESLIAEIDPKTLSIPGIGPLSAAVIYAEYGDLSKFNSPAQMLSFAGLEPGYYQSGTSEHGGGMVKRGSSHLRYTLMNLCIPLIQYNMTFAEYYHKKRNEGKSHRVASSHLVKKLIRVIFTLEKNGIDFDPTKLR

SEQ ID NO: 40415 - protein, 383 aa, unidentified
MNSVGIDVSKGRSTVAAMRPFGEVAISPFEVSHTDSELSELARQLKSLDGETRVVMEATGNYHLPVAQALRDAGLYVSVVNAKLVHGYGNNELRRVKTDRKDAVKLANYGLDRWLSLPRYIPEENTRLLLKNCYRQYQQGCKVQTMQKNNLVSLLDTTFPNANRLFHGPVRADGSEKWVDFVAEFWHCECIRERSEKVFTTKYQRWCKKNGYNFSEEKARNIYNEACGCVGVMPKSSTARLLVEQAVSQLKATSSALAALKQEMQTLAAQLPEYPVVMGMFGVGPTLGPQLMAEIGDVRRFYSKKALVAYAGIDAPPNDSGDVTGRHKAMSKVGASSLRRTLFLVMSVYLQNSPLDEPVYQFMDRKRSEGKPYRVYMLSLIHI

SEQ ID NO: 40416 - protein, 311 aa, unidentified
MNTQVFVGIDVSKAQLDLAFRPEGRCSAPNDEAGCAQVLERLRAAPPTLVVMEATGGLEIPLAGVLAAAGVPVVVVNPRQVRDFAKATGRLAKTDALDAQTLAHFAEVMRPALRPLPDEQTQALAAILARRRQLVEMLTVEKNRLSAASKPVRKSLRTHIAWLERALSHTDSDLAHAIRESPVWREKEELLRSTPGVGPVMTTTLLANLPELGTLTGKQIAALAGVAPLNRDSGTMRGKRMVWGGRAQVRAVLYMAALVAARFNPIIRAFYQRLCAAGKAKKVALTACMRKLLIILNAMLKHRIPWRTELV

SEQ ID NO: 40417 - protein, 350 aa, unidentified
MRQATTIGVDLGDRWSHVCVLGEDGQTQDRFRARTTPSGLTKRFGAIDRCRVALETGTHSPWVSRLLEELGFEVVVANARQVRLIGARDKKTDRLDAELLARLARTDPTLLAPVHHRSAQAQADREILRAREALVRARTDLINHARGAVKAFGGRLPSCTSRAFARKTRPELPAKLRSVLEPVLETIAGLTRRILDYDRAIEEVSAQRHPVTAHLRTVHGVGPKTALAYVLAVEDPARFAKSRKLGAYFGLCPRQDQSGAVDRQCRITKAGDALVRRLLLQGAHYMLGSRGEDSDLRRWAQAKMEHGGRAAKKRALVAVARRLAVRLHRIWMTGEIYDPLRLAKRRGEAA

SEQ ID NO: 40418 - protein, 418 aa, unidentified
MAARRIIPKPFISKKGVDYSLVKFHLGVDIGKSRHKACLHNLEKDSFSGIFSIDVTREGFEKLCNTLNKYSTNPEDFLIGLEATGSYGTTLAYYLLAKGYKVVEINPYQANKFRQAQGKKAKTDAIDARSLAAFIGIGQHKPLSIPDPAIDNLRELTRFRTELIQDRSSLINQLKQTLNTLYPEIGQVLASLDSPSCLDLLVACPGPSYILQAGESSLTDRLIKASHGKLGEEQAHELVEAAQKTIGLLIRQEALAIKVKILGERILGLNLAIEKVEKQVREIYHGLPNKPAGFPVGEEVSLATLVAEIEDIGRYATIKQFLSHLGWCPRVYQSGSFNMEHPPMSHAGNRYVRHLIWLLSIVAIRDVPEYRAYFQRRVASGKGKMDVLVAVGRKLLSAFYAILKSGNPYKPRQEVIPA

SEQ ID NO: 40419 - protein, 416 aa, unidentified
MKKGQDTRGYERYMALDIHREYILVGAWNEKKEWVLTPRRVSIEKFPDWAKKNIRKGDIVVLETTTNVWTIYDIVVPLASWVLVANATEVWELAGARVKTDKEDIQRLLKLLVGGIVPEVWVPPMEVRELRAFVSYRSRLVTTATMIRNRLQSLLHKHNLYLSEAGLLDQAWWEGQKNISSLEKMQIRQELSLLQEVEKLKEAVDEELQRQSTSSQWGKQAVQIMQLPGVGFVVAMTVLAAIGDISRFENAKQLVGYAGIGAGVHDSGKTHKEKKITKKGRRELRWALVEAAWRAVRMSPFWKAEYEKHLKRMRKPNQAIVVIARKLLIAIWHVLSKEETDIHASEEDLAYKMLLLSWSLSEDVRQGLTYKQFAKYALMQLGVETDITRFVRKDVPRRLAPREEVLARIAELGLSA

SEQ ID NO: 40420 - protein, 433 aa, unidentified
MTACPYDLIVGLDRSDKKADLCLIDVRPGQRRSVTIDIAPEALWEWLLELRQAFPDARLGLCLEQPAVHLISFLEAYPWITLHPINPITLQKYREAFVTSRAKDDTKDAEYLADLLLSHHAKLPVWAPEDSATRAVQQLGFHRRAVVDERTALTNRLQALLKQYFPQALTLCGPDLWRPLATAFLLKWPSLGAVQKAKAATLKGFYYLHGSRSQKLITERLALLERAVPVTDELAVIGSFALRVQLICRQLQALQRTLGAFDQKLAAAYAAHPDREIFASLPGAGPVLGPRLLASLGSQRERFGQSAASLQCYTGIAPVTKRSGGSCRIHRRYLCPKFHRQSFHEYAKESILWSRWAGAYYLQQRQKGSAHHTAVRALAFKWQRVIWRCWQDRKPYDDTRYEAMLRKRNSPVVALLDRVELGKSPWKNPAKKS

SEQ ID NO: 40421 - protein, 318 aa, unidentified
MNSPSVTVGIDISKQRLDLARFPQGDTFSVAYTDTGLTKMLKRLRGWSPQIILLEASGGYEYGVVAALVAAGLAPVLINPRQVRDFARSLGILAKTDKIDAKVLAEFAFRVQPEPRPLPAAQQQELNHLLSRRSQLLEMIQMEFNRREISPFPRVRQSIDHNLDSLRRQMADLEREIDDFFHQSPLWVQQDTLLRTVPGIGPQTVLSLQAWLPELGALNRHQIAALVGVAPFNRDSGVFRGRRMIRGGRHKVRQALYMATLSAVRYNPIIKTLFDRLTSQSGKPGKVALVACMRKLLIILNAMVKSETPWHCMTSLTT

SEQ ID NO: 40422 - protein, 356 aa, unidentified
MPKTASAQIAVIGIDIGKNSFHVVGHDSRGAIILRQKWSRGQIEARLANMTPCLIGMEACVGAHHLARKLATFGHDTRLMPAKYVRAYARGQKNDFNDAEAIAEAVQRPTMKFVATKTADQLDLQALHRVRERLVSQRTGIINQIRAFMLERGIAVRQGLRFLRAELPCILATRTDALSPRMLRILEDLTADWRRLDARIEDLSSEIEALARQDKGCERLMSVPGIGPIISSAMVAAIGAGDAFSKGRDFGAWLGLVPKQLSTGDRTILGSISKRGNRYLRSLFVQAAWVVLVKIGPKHWDRYGLKSWIETASKRLHHNVLAIALANKLARIAWAVLHKGCAFECVKTNEAASRPA

SEQ ID NO: 40423 - protein, 397 aa, unidentified
MYIVGIDIAKRKHEAAVIDGEGAVIIKPFSFTNNCSGYNRLLAMLAKAKLPLDEVSFAMEATGHYWLALFTRLQKEGFRVQVINPVQTNSIRSFYIRQAKTDPRDALLIAEVIRFGHFSESTLHPENIYELRELCRGRHAIVSMQADVKRKVVALLDQVFPEYETAFTNMFSDTSMAILQTCPTPKELSEMPLEELCHLIEVSSRKRFRMSKARELQALARNSFGFAMAGDVFSTMIRLYAKHLDFLKQQVKEMDRKITEIMDTLDTPITTITGIGPTLGAYILSEIGDISRFSSAAKLAAYAGIDPTMRQSGEYNGVRNRMSKRGSPYLRHAIWLAASSAVLHDPALKLYFQKKRDEGKPYMASVGHACRKMVSIIYAVMRDNKAYTPYIPNEISA

SEQ ID NO: 40424 - protein, 407 aa, unidentified
MVVEPEVYIAPPPPSKGRIIGLDCHPDTYTAAVFRGTTPHDAQKLTSREYITLQQLLNWVTKEFTKEDLFLLEAGSNSFEIARRLMDLGVRAVVLESYHVGKHAKTYADNDKMAAARIALVYLAGNAPCVWQPDAKTCERRELLHAYEKAVSDHTAASNTLKSYLNQFAIRLRELDLKQEITRGWILKQRNWTLLQKELLTDYFENLDTQGERRTRLGRLISQEICNEPLMLRCMKLLGIGKINAFALLAVIGDVRRFNRPEKLVAYIGLNPGQRISGNGKHVKVGIGNHGRKDMRNLLIQGAQAILRMGRDTVLGKWGWKLFARKGNRNVAVAAIARKLVVQVWHLLSGNPPTALETDKSHALKLQKLVVTIGKELRIKMGLPSQLKACILELQKRMILTPEQLAV

SEQ ID NO: 40425 - protein, 493 aa, unidentified
MGACGLESGDVVLAAIPIRKMTIGIAQTLLLVIEWRIAMPKRTTGDRPELKTVSVGAAAIDIGSKMHMAAVNPACTDVPVRSFGTFTQHLYDLADWFKACGVTSVAMESTGIYWIPVYEILEQRGFDVILVNARYAKNVPGRKTDVSDAAWLRQLHSYGLLRGSFRPDAEIATLRAYLRQRERLVEYAAAHVQHMQKALMEMNLQLHHVVSDITGATGMRIIRAVVAGERNPDVLATYRDVRCHSSPETIRAALVGNDRDEHIFALTQSLELYDVYQAKMLDCDRWLEVLIAALSNKGAKPVGRLSKPRIKTKQINTPTFDVRTALYGVLGVDLTEIHGLGPSLALKLVGECGTDLKAWPSAKHVTSWLCLAPGNKISGGKVLSSRTRRSSSRAAALLRLAATTVGRSDTALGAFYRRLSSRAGKSKAVTATARKIAVLFYNTLRHGMSYRDPGADHYEHQYRNRVLANLQRRAKSLGFVLQAIPGNAYPAVS

SEQ ID NO: 40426 - protein, 353 aa, unidentified
MSSLTDLREVVDVVIGVDTHVHTHSAAAIDARTGGVLDEITVEATADGYAQLVEFADEHAALRAWAIEGTGGHGAGLTRHLERGEEVVIELDRPERAQRRHGAKSDPLDAIRAAREALARPRLGGPRSGGDRQALSVLLAARRSAVKAATDAQRQVFSLVIAAPEPIRERFRGQKLPAMIQTAAGLRGHASWDVETTTTVTVLRTLARRARALAEEAAEHEKAIRAIVRSWRPDLLGQLGIGPIVAATVLCAWSHPGRIHSEAAFAMLAGVAPIPANSGQVTTRHRLNRYGDRQLNRALHTIVLTRIRYDQTTRDYVTRRTTEGKTTREIKRCLKRYIARDLYRLLEHQPIAA

SEQ ID NO: 40427 - protein, 350 aa, unidentified
MEHHAGLDVSLKETSVCIVDGAGKIIRETRVASEPEALVGYFASLEIKVVRIGLEAGPLSQWLYAALTQAGFEVVLLETRHVKAALSAMTVKTDRRDVRGIAQLLRMGWYRPVHCKTLPAQEVRAIITARKTLLGKLIDIELSMRGILRGFGLKVGSVTRKSFEIRVRELMAGQVTLTTIMEGLLNARATLVAEVTKLHRELLAIARADEVCRRLMTVPGVGALTALTFKTAIDDPTRIAKSRDVGPLFGLTPGRYQSGETDIIGKITKVGDVMVRTALFEAATVMLTRTTKTSRLKAWALDLVKRRGTKRAIVALARKLGVILHRIWVDGSTFRCAKEGAAMPALITAK

SEQ ID NO: 40428 - protein, 377 aa, unidentified
MKEQTFVARKFEIFGGLDVDKKSIAVTFMSHQGILQSFSMPYRAENLLSYVGKHFAGKKVAFAYEAGPTGWGLYDRLTAEGHLCVVAAPSMIPKVPGQRVKTNRLDSQKLSEHLRGGQLKSVHVPSQSYRQLRQLVQLRDTFVQDLVATKLRVKALLLLEGLEFPPAPAGSQWSLIVRGKLKKVSCSSAVRFKLDQLMESLESTEKRVVQTIKEIRRFYQQDPELCQAMRHLKSIPGIGEIVASHLLARVGDPQQIGNVRQLAGFIGLVPTERSTGDRVARGHITRSGDGRLRSKLIQAAWSAIRQDPELREFYRSVYQRHPRDRAARKAIVAVARKLTTRIYAVLKQQRPYEVRKIVHSAPLTQEETSPQGTTRRR

SEQ ID NO: 40429 - protein, 358 aa, unidentified
MNANKERPPLTAGLDLGDKYSYLCLLDTEGGEVIEEGRVRTTPEALRRRFASERPLRVAIEAGTHSPWVSRLLEECGHEVLVANARKVQLIYANKRKTDEVDAENLARLARLDPKLLYPLKHRGEDSQAHMAIVRSREALVSARTQQVNHVRGAVKSFGGRLPKCPARSFHKRAAEHIPQALMPALGPILEQIGSLTERIRDYDRQLETISEERYPETKLLRQVEGVGALTALTFVLTLEDPHRFEKSRSVGPYLGLVPASDQSGDRDPQKRISKEGDEMLRKLLVSCAHYILGPFGKDSDLRRHGEKIASRGGKNAKKRAAVAVARKLSVLLHHLWVTGEVYDPLYNAHRRTQQEAA

SEQ ID NO: 40430 - protein, 403 aa, unidentified
MNSVGIDISKGRSTIAVMRPFGEVVISPFEVRHTGSELSKLARQLKSLDGETRVVMEATGNYHASVAKLLHDAGLYVSVVNAKLVHDYGNNELRRVKTDRKDAVKLANYGLDRWLTLPRYIPEEDTRLLLKNCYRQYRQYSKVQTVLKNNLISLLDTVFPNANRLFSSPIRGDGSEKWVDFVAEFWHCRCVSEKSERAFTSKYLRWCRKHGYNFSEAKAHTIYAEASGHIGVMPKSETTKLLVEQAVAQLRATSTALAALKLEMQTLASQLPEYPVVMDLFGVGPTLGPQLIAEIGDVRRFYSKKALVAYAGLDAPPNDSGDVTGRHKSMSKIGASSLRRTLFLVMSVYLQNAPLDEPVYQFMDRKRAEGKPYRVYMMASANKFLRIYYATVKAYLESLEHTA

SEQ ID NO: 40431 - protein, 347 aa, unidentified
MIIIGCDFHARMQQIAMADTETGELTESQLEHEDEQVRSFYAGLKEPALVGIESTSYTRWFAELLSELGHELVVGDAAKIRAKETRKQKHDRRDAELILNLLVKGDFPKIWLPSAEERDVRVLIEHRHQLVQMRTRAMNGLQAVALNYGLRLRRRLWSKAGKEKLQKLPLREGPGRRRADLLALVAQLDHWVNELDQRVAQEVARRPDAQLLLTHPGVGDLTALTTVLVLGPVERFPGTGQVTSYVGMIPEEVSTGGRQRFGHLTKQGNRLLRFLLVEAGQTACRRDPGLQRFYRRLVFRKGTAIAKVAVARKLLIRLYIMLRDKIDYQEFCRRGSHAGMLGDLALV

SEQ ID NO: 40432 - protein, 309 aa, unidentified
MQQSSTLYVGLDVHKDAIAVAYVAQDHGADVVSLGTIGTRQCDIDKLIRRLQSKSPHLVFVYEAGPCGYWLYRYLTKKGQVCWVVAPSLIPKKPGDRVTTNRRDAIKLARLMRSGDLTPVYVPQVEDEAMRDLCRAREDAIHDLKAAKFRLKAFLLRQDIRYTGRATWNSAHLRWLSEVVCPTPAQQSVFQEDVRAVTEQTERLARLEQERKDQVQTWRLVPVVEALQALRGVQCTVAVTTVAALGDLTRFETPRQLMNYLGFTPSEYSTGERRRQGGITKTGNSQARRALVEGAWASRSPAKVRRHLQ

SEQ ID NO: 40433 - protein, 364 aa, unidentified
MSTITLGVDLAKSVFSVCEVDGSGHVLRRLDFKRDAFAVWLAHVPAGTVVAMEACSGAHHWARRCIEHGLQPRLMAAQLVKPYRLSQRSKNDRNDAEAIATAARQGNMRFVPVKDIDQQVRLSWHRVREGYKAESLAIGNRLRGLLAEFGIVVATSDMALRHVLGDLDQAGLPGEFKELLRRLEAHWTEVRKALDACDARIDVHAREDARCVRLRAIIGIGPITADAMVASLGLAKDFKNGRQMSAWLGLVPTQHSSGGRARLGEISCRGDAYLRTLLIQGARSSLQRAKAVSVEKSTPEQIWIRQLACRVCFGKVLVAIANKHARQLWAMLAHDQTYDADAWLKHPMVQRPAGKHAITVAAMA

SEQ ID NO: 40434 - protein, 480 aa, unidentified
MIPGIHYTEKGGFKMKPFYMGIDVSKGYADFMILNSKKQPVAQNFQLDDTFEGHQSLYKILGRFLTDHPESTLFAAVESTGGYENNWYNSLIEFQGSLNIQTARLNPLGVMHNSKADLKKNTTDKISAQNIAEYLIAHPEKVVYQQDDQLAGLRKQWGFIKMLTKQSTQFLNQLNALLYTANPELLSYCQDGVPGWMLTLLVQYPSAARLKNAHAKTVANIPYVSRMRAQQLIANAKRSVASATDTTTEQLIVATTRQILHLKNTIAEQMKRMIKECPISEIELLKTFPGISDTSAIGLIIEIQTVKRFAGVKKLASFFGVHPVYKVSGDGVGGFKMSKQGRKAPRQILYMVALSAIRCNPLIKETYEKHQQQGKHNMAAIGICMHKILRILYGMLKHNKPFDPQIDIRNRQRKVRVKSDTPAKDTNRRFQDYDQNAPVTRRQRKKRLERERPHNVGDIKSGVTAPVPLADIIADILPQL

SEQ ID NO: 40435 - protein, 390 aa, unidentified
MIRPLSVKGGIGAEGLSTGDGMVAALPRRHRNVPKSRCQKPRSGEDGNMKDTMIGVDLAKRVFQVHGASMIGHVKFRKKLSRDQFRKFMAEQSGCVVVFEACGSASYWAREMEKLGHEAKLIAPQYVRPFVKRQKNDAADAEAIVIAAQRPEMRFVSPKSEDQQARAVLFRARERLVRQRTEGVNALRAVLYEYGHVFPVGLAHLKRIEALVEDPGCDLPALVVTECQDLLAQIAEKTERIADKTKTLKALAAETDTARRLQTMPGVGPLTALAIEAFAPDLAQFSSGRDFAAWLGLVPRQHSTGGKERLGRMSKAGQSDIRRLLIIRAMSRIVGRARHKIPAESWIERMLARKPKMLVGIALANKMARQVWAMLMKKEDFRDPALAAAA

SEQ ID NO: 40436 - protein, 329 aa, unidentified
MNNAGIDTSNKTLDVVVRKKGKSLDCRKFDNDYAGHMAIITYLRKHKVTRVGIEATGYYHLDLALELDDAKDIEVMIINPRASKNFARAMMQRNKTDASDANVLAEFVERMDFVKWTSPVGEVLDIRACGRRLVSLGKEKTKAKNQLHAFSRTRRTPRFVIDDIHLSIEQIEAQVDKLISHALRLIKQCEFLKERYRRLTSMKGVADKTAIKLLGELGVLAMDMSAKQWVAHAGLYPRAFESGTSVKKRTYIGKVGNRYIREALYMAALSASSHDPHIRGFYLHLIEDNGLTKLQAVCAVMRKMLLAMHGMLKENKPFDGTRFYNLSNT

SEQ ID NO: 40437 - protein, 338 aa, unidentified
MKVYAGIDLHSSNNYVGIINEEDRRLYQKRLPNRLEDILLALEPFKESMEGVVVESTYNWYWLVDGLEEEGYKMHLANPSAIKQYEGLKHTDDKWDSFWLAHMKRLNILPEGYIYPKAERPVRDTLRRRSLFVRHRTSHILSLQSAITRNLGDKMSGSDIKKLNESDADTLFNEPFLILSAKNSISTIRFLETRIKEIEKAVKSHINLKPEFKYLLTMPGIGNILGLTIMLEAGDISRLPTVGRYSSYCRCVKSERLSNKKKKGEGNRKNGNKYLAWAYVEAANFAKRHYPEFQSFYNHKEAKTNGIVAIKALSNKLARASYYVMRDQVPFDMNQLFR

SEQ ID NO: 40438 - protein, 343 aa, unidentified
MEYYVGLDVSLKQTSICVVDQAGLVVREGVVDSDPEAISVFVRSKASGAVRIGLETGPTSTWLWTELKRLGLPVICIDARHAKAVLKMQINKNDRNDAIGIARIMQTGWFKEVHVKDIDSHSVRALLASRALLVKIKRDLENHVRGLLKNLGLVIGRATFNVFAVRAEELIEDRPDLVAAVRPLLEARNAVEQQVSELDRKVMKLARRDAQVQRFMTVPGVGPITALAFKATIDDPARFARSRSVGAYVGLTSRRHASGEIDWSGRISKCGDAMLRSYLFEAAGVLLTRVPKWSTVKAWGTRLAKRNGLRKAKVAVARKLAVILHRMWIDGTEFNWSKKEIAA

SEQ ID NO: 40439 - protein, 429 aa, unidentified
MNEVDIIRLEQFRQLKKEIRGSSEYLIVGIDMAKHKNYAFYGTATGETLLKRMIFENSIEGFEKLRIHEDALKVIHGLKKVIYGLEPTANYHKPLAEHLIKCCRNVVLVAGTAVKNNRRMVDGRWDKHDTKDAAVIADLISQGKFLFYEYPSMPLRDLRNLLSLKRRLKKQEHSQKVRIRNHLLAQYFPELDKYYRNWGQEGLAIVRWCLDPSVIAGLEYEEFVHRVAPNGRGGIRQQERLRAVWKKAIDSIGCRAGKSLDVEAKLMVEGLKYIRESIRDIEDKIEEICLDFPEYSYVLSIPGFGPDISSKVVGAIGNPFRFNNGRQVLKMAGMDLSANRSGKNSDNAAPKLSKNGKADLRYALYQAALITSFKNIHFMRYYTNRIRGREKERAIKTKMRVKLAAKLLIIAWTLMKKEEPFSPDYLNIE

SEQ ID NO: 40440 - protein, 343 aa, unidentified
MKIMRVGVDLAKSVFQVHAVNGQGRVVARKRLSRGQMTTYFSRLEPCVVGMEACASAHHWSRVLQALGHEVRLMAPQFVHPYRKGGKNDGNDAEAICEALSRPNMRFVAVKSLEQQAVLTLHRARELLVRERTALVNQIRGLLAEYGVVLKLGVAAVRRGVPEVLEAEGNGLPSLARETFAELHERLIELDGRVTLYDRRIAVLAEEMEAAKRLMQMPGIGPVTATALVASVGDGRHFANGRQFAAWLGLVPRQHSSGGKIRHGRITKRGERYLRTLLVHGARARVCQSRRREDGASRWARAVWARRGFNKATVALAARHARMVWAMLARGEDYRPLPEALNA

SEQ ID NO: 40441 - protein, 350 aa, unidentified
MLIIGCDYHPAFQQIAFVDTDTGELQEARLQHREEAEKFYRDLAAQGMKVRVGMEASGHGRWFERLLAELNFELWIGDAAEIRAKQVRKQKTDRQDAQHILRLLLEDRFPQIWVPSWENRDLRQLLWHRHRMVQARTRIMNQLQAVALNEGLRCKKKLFRETGREQLEAFRLARWASRRRHDLLELLDRLTPTIAQLTEAIEQEVEKCPAAQRLRTHPGVGPLTALAFVLIIGKADRFQCGKQIASYLGLVPLEKSSGNQRRLGHITKQGSSLLRFLLVEAAQVTARSLPEWRSKYYHLTMRRGRKIAKVAMARKLAVRLYWMMRKEWDYGQLTKFGSHAGKLGTGDGVK

SEQ ID NO: 40442 - protein, 330 aa, unidentified
MQGKVMNEHSATTDGAVGIDVCKEWLDIHILPAGTTLRVANTKKGHKQLLAALKHCPVEIVVLEATAKYHRSVHRFLHDAGLPVAVVNPLRARLFAEAMGVLAKTDSVDAAMLANFGQIGKLQATPPLNENIENLREIARNRDAAMLAKVALDNQLSTATTTVVRQQISRQLKVAQAAADAMAAAAIALIKGCARLARRFEILISMPGVGDITAMGLIANMPELGSLDAKQAGLLAGLAPVASDSGQRNGPRHIRGGRAAVRTGVYMAAHSAARFNPHLKAFYDRLVAAGKPKKLALTAVMRKLVVLANTLLKEDRLWSPESPIAKPLSS

SEQ ID NO: 40443 - protein, 384 aa, unidentified
MKKRSTEATTTKRVTERTGGIKGADSVAPGSSRSLTIGLDLGDRMSQICVLDSMGEIVEETRVATTKSGLTRIFDIERLGKCRIAMEVGTHSPWVSRLLKEMGHEVIVANSRKLRFIYQNRGKTDRVDAQSLARVARMDPALLSPVEHRDEEVAQDLAVLRARDLLVRTRVKLIGHARGAVKSAGHRLKASSTRSFTAETESMLPDELKETLGAVFSAIDAISEQIRTLNQRVRELAKKKYPETELLRQVSGVGFILSLAYVLTLETPDRFEKSRMVGPYLGLVPARRQSGDSDPQLRITKEGDGFMRCLLVQGAQYILGPFGPDCDLRRFGLALEGRGGKYAKKRAVIAVARKLAVLLHKLWRSGEVYEPDRRLALLPEPSKA

SEQ ID NO: 40444 - protein, 338 aa, unidentified
MAIVTLGIDLAKNVFALHGVDATGRAVLVRPSVARSKLLELVASLPPCLIGMEACSGAHHWARLFASHGHTVRLMAPKFVAPYRLSGKRGKNDAADAAAICEAVTRPAMRFVPPKSIEQQSQLLVHRARQGFVVQRTATINRIRGLLSEFGVVLPLKAAIVRREAMRHLEDLPGWANTVIGDLLSEVSRLDERIAQYDKHIDAIARDSAPARQLMQLPGVGPTTATALVAMIGRGQQFKCGRQLSAWLGLVPGQYSSGGKQRLGRITKAGDPYLRMLLVLGARSVLQSAATKSDAVSRWAVQLAARVGYWKAIVAIAAKNARMCWAILARGESFKLPA

SEQ ID NO: 40445 - protein, 345 aa, unidentified
MPIVGGLDIHRKQITFDYLDTVTGQVQRGQVSPADREHLRAWLARFAGREDVAFAVEGCAGWRYVAGELAAAGATAHLAEPADTAARRGRKRHAKTDKTDARHLRMLLAEGRLPECWIPPGHILECRALLETYHDLRREHTAWVQRIHAVLFHQGAPALGVGTLRTGQGVAALRAAADDCLSPAGQLQVATALEVIEALEARMHVVRHQLTDAARHLTGARVLAARLYGVGPFAALALTCWLAGAGRFSSSRKAVRFAGLDVTVWSSDRKGPPGKLSRQGPPVLRWALYEAGKTHARASAPDHAYYAQVKDRKNSKRAALSEARKILRQAHHILAELGDDALAAA

SEQ ID NO: 40446 - protein, 367 aa, unidentified
MKKVSTAVAKQSRNISQQQLTIGLDLGDRNSWYCVLDAAGQIQLEQRVRTNVQALREVFGGMPTSRIALETGTHSPWISRLLKELGHEVIVANARKVRLIGESRKKDDRLDAQTLARLARIDPQLLCPVKHRSAEAQADLTVIRARAGLVRARTALVNTARSLAKSYGERLRGCNVRNMNPEKAEALSPKLQSALEPLLAEIESLSECIAEYNHRIEALAEQNYPQVKVLQQIKGVGTLIALTFLLTLEDPHRFGKSRDVGCYLGLQPGRRNSGQSEPQMHISKEGDPYLRTLLVQGAQHILGPFGVDCDLRRWGLKLAERGGRNAKKRAIVATARKLAVLLHHLWVSGEVYEPLHNHKRMTLTAAA

SEQ ID NO: 40447 - protein, 360 aa, unidentified
MQTQRNELNFEGQNIYVGLDVHLKSWTACIMTEHLEHKKFTQPPEAKVLYNYLTRNFPGATYHSVYESGFSGFWAHRQLEALGIHSMVTNAADVPTGQKEKIQKDDAVDSRKLARSLRSGDLEAIYVPSESILEERSLIRTRAALVKDMTRFKQRIKSFLYFFGIRIPERFNKSGSHWSKNFMRWLKEEVKLSQETGRQSLDILIQEVEEQRKLLLLVNRQVTSLSTNERYASNVRLLKTIPGIGLLTAMTLLTEMETVERFADTDHFAAYVGLVPNRHNSGDVKNDGEMTFRGQSTLKKCIIEATWIAARRDPALSLAYNRYVQRMNSNNAIIRIARKLLNRICFVLKNKKEYVTCIVK

SEQ ID NO: 40448 - protein, 346 aa, unidentified
MLDHQPLFAALDVSLEKTTVCVMSLDGAITKEAVVATDPEAIATCLSDDLGRLERVGVEAGPMSEWLVRGLADLGVSVVLMETRQVRAALSAMIVKTDRKDARGMAHLLRTGWFRPVHLKTVDAREQRAMLSARTTLVARLKDIENSVRGLLRGFGLRLPKALRGRWDAGVREAVAGHPTLLQILEPLLVARGALREQLILLDKRVRDAAKADRVCRRLMTAPGVGAIVAMTFRAAVDQPDRFRSSKQIGACFGLTPRKYQSGETDRAGAISRAGDASVRVALFEAAHVIMTRSAKWSKIKAWAMNVAKRRGAKRAKVALARKLGVVLHRMWVDETDFRFGQPAQA

SEQ ID NO: 40449 - protein, 324 aa, unidentified
MKNYEEVVGIDVSKNTIDAHCYKSSTHRKFINDVAGYRQLIKWVLKESKGLSVFYCFENTGYYSLKLALYLSSKDIVYVEESPLKIKRSSGIVKEKTDALDASLIARYAWLYREELKPSSVKSMSHLELGRLLALRDQLVRNNAGLKGTLKEIKGLLSSPTTDFGCISLKRSIDYLSKQVRAIEERIKEILSADVFMKKNYELLSSLKGVGLVVACQLIYHTGNFTRFDNWRSFSSYCGIAPFEHSSGTSIHRRKQCHYLGDRKMKSLLSMASVSAIQHDNELKLYYNRKLAEGKDKMLAINNVRNKLIARAFAVVKRGTPYVV

SEQ ID NO: 40450 - protein, 347 aa, unidentified
MRKIAYLAMDVHARNCVLGDMDANGKFRGNRSFTTCEINIIKALKAIKAKKKYLVIEAGPMSNWVAQLANDHLTRVFICDPRENALIYKSSQKHDKVDTKKLCRLLRLNEFKEVYQPENDQRAIFKAAVQHYADLRDQLTAIKQKIKAMYRQWGVINVFTDSVYSLSGRDKFLKQVKHRPIYLQLKRLYTLLDTTAAMKQDAQKSMTSLGRNYREIAEFKKMPGMGIIGTHTFDAYIQTPYRFAKRSRLWKYCRLGVIDHTSDGKPLGYKRLDKSGISELKAVSYRAFLSAMKGDNEVKGFYLNSLQRTHDKKHARLNTQRKILSVMLGIWKKGDAYRPELFLDPST

SEQ ID NO: 40451 - protein, 445 aa, unidentified
MGEYDFTLGIDLACSAAHVATLADAAGRLVWSNHRFRTAAVDLDGLWSKVPAGARLQLVMEPTRNAWVPLAAWFRARGATVILVPPEQSADLRRYYQKHTKNDRLDSVLLARLPLLHPDGLTVCTGIGPADPLRRAVRRRAKLVSQRITSMNRLTALLELLGPGYLTVFSGSLGSKTTQMLLSRYADPPKLLRTPAARLAHVVTAASHGQHGQLLADQLRVAAREAVALYAATDIDFAELAADIEAEVRFIAAVQAEIDQLDQRIQRLYAQADPDQILRSVPGAGATLAPAIHALFGDPHRFANLDAARALTGLVPGTNQSGIGQAATRPTKAGDPGLRTALFMAADLARQTDPTLAQRYRRLVVDRKLHHNSAICHLAAVLATRIIACLRSHNQYQIRTVDGRAINPQDARAICATLRVQPHERRPRQGKAGQTKKEVAKRLVA

SEQ ID NO: 40452 - protein, 356 aa, unidentified
MSKVNKLDFDGQEIYIGMDVHKKSWSISIFTDKFEHKTFTQPPEVETLVNYLKRNFPGATYKSVYEAGYSGFWIHDRLQEHGVQCLVVNPADVPTKDKERTSKTDRVDCRKLARNLRNAEVKGIYVPCRCKVENRSLIRTRDSMVKKQTRCKNQIKSILQFYGIQIPEELANSHWSKRFITWIEAIKMQQGSGNFVFKAHLEELNNVRKIIADITRAIRTLANSEEYRQNVCLLKTVPGISTLTAMTVLTELYEISRFKNLDKLCSYVGLIPDTDSSGETDRKTGITGRRNARLRVILIESAWVAVRRDPALMMSFNTLCKKMPKNNAIVRIARKLLNRIRYVLKNQQEYVPAVVQ

SEQ ID NO: 40453 - protein, 345 aa, unidentified
MKVTTVGIDLAKNVFQVHGVDEGGKTVLRKQLKRKDVVSFFANLAPCLIGMEACGGAHYWARKLSALGHTVRLVAPQFVKPYVKTNKSDRNDAEAICEAVGRANMRFVPVKTAEQQAVLSVHRARQGFVKARTAQANQIRGLLAEFGIVIPQGIGHIAKRLPEILEDGENGVPGMMRELLQRLGENLKAMDEQVGELEQQIKLWHRENEQSCKLEAIAGIGPLTASAYVASVGDAKSFKNARQVPAWLGMVPRHGGTGGKVKLGRISKRGDVYLRTLLIHGARSVIAQLERKPDQAEGWLKKLLARRNKNIAAVALAARNARIAWALLAHERTYQCDYVASRAPA

SEQ ID NO: 40454 - protein, 392 aa, unidentified
MIYAGVDIAKVDHVIGAVDETGAEVARPMQFKNSEAGFERCVAWLESVAESEDDVFVGMEATGHYWMACFAYLTNKGYRVCVVNPMQVHAMRKLKSLSGVKNDRIDSWLIAETLRQGNYDETRLATDEVQALKQLTRYHQGLKQELATVKTQAICVLDSYFPEYAGLFSDIFGAASLKVLAECPTPAEVDRRRASTIAKLISEGSRGRLGAGKAAQIKAAAKSSIGIKLGEDAASFQLKTMVSQVEFLNQTIAKVEKETAALLAKVEPNITTIPGVSTVTGAQIVAEIGDVKRFRNAASIVKYAGLNSGVDESGQFSAKGVPITKHGSPYLRRSLWLAANRARQHDDRLRGFYEKKRREGKPHRVAVTAVARKLCHIVYAVMRDGEPYDPAK

SEQ ID NO: 40455 - protein, 351 aa, unidentified
MKFYRTTTEYNCGIDLHSRQMYMCLMDREGNKLVHTNVTGNDWDYFMSRIKPYRDDLTVCCECTFNWYWLADACAAEDIEFILAHALYVKAIHGGKNKNDRIDSEKLAHLLRSNLIPPAYVYPAAKRPVRDLMRRRTTFVWKRTELQHHLTCMPLVQGQEPVKKCQHRVRERWFEQLRPRFDEAMRKLSAEADMYLIKEFDKIVDRLERAIVKETKKEQGRDFALLKTIPGIGDILALTILYEMDSVDRFPRVQDFSSYCRLVKGSVASAGKIKGLRGAKLGNPYLRWAFGEAAVIGKRSNTHLNRYGKKLEAHNPKPVVNAILANKLARSVYFMLKHGKGFDPKLFSKGL

SEQ ID NO: 40456 - protein, 390 aa, unidentified
MTVVGIDVSKGKSMVAAMKPGGELVTTPYEVKHSGIELSRFALDVLCMEPDTRVVMEATGRYHEPVAALLHSEGIFVSVLNPLLIKQSGAGSLRKVKSDPKDALKIAKYGLDNWSTLREYTPMEAIRQQLKLCARQCDLYSKNIVMLTNNLISLSDKTFPGVNELFSSPEKENGHLKWVDFYRTFWHCDCINRMSPDAFEERYKKWCKRKGYHFSADAADALYAASCGLYTTLPRDNNAKLLVTVATDQLIALRENQSKLETEMLNLCKQLPEYETVMAMYGVGKSTGPHLMAELGDIRRFPHRSSIVAFAGVDPGVVGSGKMQLSSVATSKRGSPQLRKALFQVVSAYVKRKPENEAVYQFYAKKRDEGKPYYVCTTAAANKFLRIYYP

SEQ ID NO: 40457 - protein, 517 aa, unidentified
MAIRPRKPARKYHILKPAGHFTARVQAVGPERFGVLCFDCAKARSKWMLANFYGAVLVPPQPVEHTRGHLDAMLDQVRQARTQHDLRDLIVAIERTGEYHRPLQRACRAAEFDTRLVHPFTSKQFRQPADPGNKTDDTDLAAIFRAAVNGFGLSETPLPDDYERLRLLIRHRRDLVFKASAVCCQVRELLHALMPGYAACFSELWSSAVALPLARCTGSAERLLRYDEIGLMRLMSKQGVTLRSSRATAILAWARMAPPAHPQVELLTQMLIHLDDDRLAKNRLISSLERQSAHLLARMPYIVLLVIPGINVVSAADVAGEMGPITHYANANGITGRAGLAPSRYQSDQVDRADGPLRRRANRRLRAVLTQSADNLITCNHYFKAKAMVWRGQGRDEHWMRVKVAKTFTRLLFAMVAGRQLFQHPCRQNDHYVLQKLMKFHQQCDTPMATLLADLNAASEQLPRSACAGEAQALRDRLAALERRKGPQPLADILPIVLARLGRMSIQSKESEGPGPS

SEQ ID NO: 40458 - protein, 328 aa, unidentified
MKDFKTFVGIDVSKDTLAFSIYDGKEHIVKEIKYTKAVITKELIKPFKDKKDLVLFVMEATGIYHNKLANLLYKEGLAVSVVNPFAIKSYAKSRLKRVKTDKSDSKLIAEFAYIFSRDLTLYKPKDKEQKEIDDILKSIDDINLINTTLTNQIKALKEQDRYSKDIVKLKEELLKKNNQVKERLKKLLDKKLKESFTKEYKLLKAIPGVGLMVSGSIISIFNAFKEFDSAKRACSFIGIAPAPYESGSSVKRRGSISKRGNPLIRKILYMATLSAIKHNKTVKEFYERLLQKGKTKMVALIAAMNKLLRIIFAVVKHKREFCENYVRA

SEQ ID NO: 40459 - protein, 397 aa, unidentified
MIAVGIDISKAKSTVAVIDSDGTVLASPFTMAHTQPEMEAFVSYLKGLGEPTTILMEYTGHYHYPVLKKLQDEGFPVCIVNPYQMKKYGDVEIHKAKTDKKDALRIAAYALEKSYKLVPYSSMEQKYEDLKFLSRQYNQRISYVAKLKVQLIALLDQTMPGITRILPLNSRNPEKCALLLFIKRFKSFDEIQRIGKARFLASYDVLAKKASERSASSKGLSIYELAVDSITTRGEDPYIWLSQNQCVDLLSATQNAADEIISQMRNIAETIPEYKALRAMHGVGDRLGPIILAEIGDVRRFHSGKALNSYAGNDAPPYQSGQFESRNRHISKRGSSALRKACYEVMQALKLIKPQDDPVYLFMLKKEQEGKPFNVAKMAGVNKFLRIYYARAMELYK

SEQ ID NO: 40460 - protein, 405 aa, unidentified
MIKENYIYVGIDLHKETHTAVMIDCYNQKLGEITFPNRPAAFPKLVTKVKKCNTDGKEVVYGLENAYGYGRALAVWLIDKGYLVKDVNTAISHRQAKHRGAMYRKSDSDDAKAIALATLNMLDKLPDACPNDAYWSLGQLVHRRDNIMKQRTRLVNQLHEQLCIAYPSYKQFFNDISRPTALYFWEHYPSRKYLKGKSVEDLRAELVPVSHNKCSTKTCEKILDAVASDKVKNNAYQDARDMVTLSIVSDLQHYDSQLTEVDKMLEQMYKMLGCTLTTIPGVNVITAVKILAEIGDIKRFSNANKLAQFAGIAPLHLSSSGKGKDVATKQGNRRLQAIQMVQLSSKGTPRNPVVRAYYEKRKAEGKTSQQALICISRRLISIIYGMLKNGTEYRMPVVENAGEKL

SEQ ID NO: 40461 - protein, 343 aa, unidentified
MQAVTTIGLDIAKSVFQVHGVDVQCTIAIRRPLKRRQVLPFFKKLPPCLVGMEACATSHHWSRQLQALGHTVRLMPPAYVRPYVKSQKNDAADAEAICEAVMRPSMRFVETKTPEQQSCLMLHRTRHLFIRQQTAVINAIRAHLAEFGVVAPVGRNGVEELLDVIADPKDNRVPEVARECLAALGRQLHMLKAQILQFDRHIMAWHRSNETSKRLDAIPGVGPALATALVASVANPRAFRSGRDFSAWVGLVPKQNSSGGKEKLGSITKRGDRYLRSLFTAGALAVIRYAKIHGTKHRPWLTQLLARRPTKVAAIALANKIARMAWAMMAKGERYKEPITLAA

SEQ ID NO: 40462 - protein, 406 aa, unidentified
MSVHDCASSMVVVAVDVGKNTVACSVTDDKRHRLLGPVDFAMTRAGLAATLTKIHATVPPDVSVKVGIEAAGHYHQPLMVPASWPSGWQLLELNPGHVTEQRRVQGPRRVKTDAIDLEAITELVLAGQGRPVTDRAVVLGELASWVRHRSRRVEARSALKNQLLGQLDRAFPGLTIALPDVLATKVGRLVVEHFTDPARLAALGESRFIRFAATRDLAVRRPVAVRLVAAARDALPTPDAAVAREMVANDLQMLQILDRQVAAAEAQLDALLPTTPFAPLTTVPGWATVRASGYGAAIGDPGRWPGPSQIYRASGLSPMQYESAGKRRDGRISREGSVTLRRALIDLGVGLWLNEPAAKAHAAGLRERGKKGGVIACALAHRANRIAYALVRDQHPYQATRWTQED

SEQ ID NO: 40463 - protein, 383 aa, unidentified
MAATTRFTDPVLPDPPALYLAFELSNRSWKLAFTSGLGQKPRLRSIPARDLQALTSEIAAARTRFRLPESAPLISCFEAGRDGFWLHRFLQSEPGRFNLIVDSASIEVKRRRRHLKTDRIDALKLLSMLIRYHNGETKVWSVIHVPSPEAEDARNLHRELLTLKSDRTRITNRIKGLLAAQGLSAPPLVRRFSDHLDDHRLWDGTPLCPELRQRLEREWLHRCYVSDRIRLIEKIQAERLESSHDPALALVRQLMTLKGVGPQSAWLFTFEFFAWRKIQNRRQLAALCGFTPTPYQSGDETLDQGISKAGSSLVRAMAIQIAWGWLHFQPDSALTLWFQQRFANGGRRMRAIGIVAVARRLIIELWRFLETGTLPEGAVTSPS

SEQ ID NO: 40464 - protein, 437 aa, unidentified
MSLYELSTGRYESSEILPSARPAPPEGRWAKISPLSIPPVDNSYRDGPRPFRATLIKKKGKSLTFGYNFVGHKILTERRLAMINRSKLDFTGQPIYIGLDVHKKSWSVSIFTRHGEYKTFSQPPHVETLIYYLGHHFPGALYYAVYEAGYCGFWIHDQLVKQGVHCTVVNPADVPTKNKEQRRKGDRVDCRKLSRGLRNGELDGIYVPPRGRLEDRSLIRTRLSMGRKQTRCKNQIKGMLLFYGVEIPEEREMGHWTRRFIQWIEGVRMERASGDMALGVHLEELSHLRQILAKLNRAILALSRTEEHREWVRLLRTIPGISTLTAMIVLSELGEITRFRSIDQLCSYVGLVPDTRGSGDKEHVEGVTQRRHSHLRWLLIEASWTAIRKDPALMEAFDQYCKRMKKSKAIIKIARKLLNRVRYVLKNQAEYVPCVIE

SEQ ID NO: 40465 - protein, 349 aa, unidentified
MLHAGLDLSRNRIDVCVLRDEGELVDEFSSPADRDGLSHLHRRIARHGEPVRAVVESMTGARHVHDTLERLGFDVLIADAQKTKGLAPLACKTDRIDARVLAVLSERCLVPEIWLPAPGIRAERELARFRLHLVKHRSMLKQRIHSTLINFGQPCPVSDLFGLAGRELLQKLDLPAPWRQSVDTSLYLIDELDLQIAEVAKELRATGADHPYVPLLMSAPGIGWVLAFTIAAEIGDISRFASATKLQGYTGLCPKVVQSGNSDRRGPLSKHGPRYLRWALLEATMHALRHPAYSERYQCTKKRAGRQRGSKVAQVEIARRLTRAIWHMLTNSEPFNAQAPGGAAGRLAA

SEQ ID NO: 40466 - protein, 336 aa, unidentified
MRYIGVDLHTTQITVCYLKATGEFEIRKYQLYEMNKFVNTLEITDEMAVEATCNTRWFSQQVREAVKRVVLVNARGFEVVKNSCKKTDKNDALNLARFLKADLLPEVRAKKEEAEKVQSLVQTRTKLVRLKTSLINKIHALYVSNGGKLKKTTLASEKGLEKVLLDEWSAIERLELEIIIEQIRSLKVSIGKLDKAIEAESKQLAGYRNLRSMAGIGSLSAGILLSVIGEITDFGSADKLAAYFGIVPRVSNSNETVKTGRITKQGNKSGRTTLVQCSLAAIRKSEYLKNYYEQVKTRRGHGKAKIALARKYLRIIYNTLTNNWVFADFNNFELAE

SEQ ID NO: 40467 - protein, 411 aa, unidentified
MHPKLKQIYVGVDTHKRTHTAVIVNCFSEKLGEITFENTPPAYEELLKEVKKHTGKGMTPIFGLEDTGGSGRALAVYLLGKKKIVKKVDASLSSSERKNQSITHKTDSHDALCVARVLVSRLNELPNADPQDICWTLSMLVGRRSAIVKASTALKNQLHNYITHHYPSYKKFFSVFDSNSALAFWEHYPSPSKLKGVTVEILGELLRVHSSGFFSTKKAEEILSIIERDGDTSTELQDSRDFMVSTTVRQLRQNHEEIKRIELEIKNIMDRLGYKLETMIGIELVTAASLVAEIGDIHRFSNADKLAKYAGIAPVKYSSGDKDKSFRNRQGNRKLYALFHDLASRQVCCGRNKDKPVNAIFYDYYQKKMSEGKTQHQAIICIMRRLVNIIYGMMKNKTEYVHPTLSSKQTA

SEQ ID NO: 40468 - protein, 349 aa, unidentified
MNFYTNTHPYYCGIDLHTRLLYVCIIDNENNILVHEKIDDSPDKLLALLKPYLGNIVVGVECMHCWYWVSDFCEEHNIDFILGHALYMKAIHAGKTKNDKIDALKIAKLMRGGNFPLAHAYSKKHRSIRDALRRRTHIMRMSAQLKAHVASTVGQYNLPALETRLDLRNSPDREKMRHFFPDEAVQKSMDLNLNIIETMVSELYKIEHYVKTQAQTHCATDLHILKSFPGIGKILALTILYEVGDIKRFPSVQKFASYSRLVKCKAESAGKTHGTQGNKIGNAHLKWAFSEAAVLYLKGNDNAKRYLAKLQKRMSKAKALSALAHKIGRCTYFMLKNQQVFDEERFLNG

SEQ ID NO: 40469 - protein, 326 aa, unidentified
MTASQSSDNTFVGIDVGGAVLEVAWHRGGSAQYANRPDAIATLIQKLQSGPTITRIVIEPTGGYERPLRKALRQAGLPVEVIHPSRFKAYRTLVGTKAKSDTSDARLLAAYAAAPDDVRGCKAHHVELPEDAIREALNELANRREQLKHMIHAETCRLNTARLADVRLAIEAHREALVADDKQVHKMMLTLVRQRVDLRRDQRLLRTICGIGEKSALACIAMVPELGRIDNKAAAALIGAAPFVHQSGTKTSPARIYGGRSAVRNILYMAAVAASRHNPVLRPFYERLIAAGKPAKVALIAVLRRLVVFANAVLKSGQPWRGAVPA

SEQ ID NO: 40470 - protein, 318 aa, unidentified
MNTLPENSRVVHLGVDVAKHELVLDLQGSIRRFANTPKGIAELINAISSRTDFPPHLVCEATGGYERALTAAALQRGVPISVVQPQRVRHFAKAIGLHGKSDPLDAGLLSRYGSQVLPLPLMPKDSARQRLDALLRARTELLDSMHRELNRSENDVSPVVIRIRKDLVKRFEKHLATLDDEIAKLVAGDSALARADAMLREVKGVGPQTSRTMLAFLPELGRIGRRAIAALVGLAPYDRDSGKTKGRRFIQGGRAHVRQVLHMAAVVAARHNPVLKAFYQRLREAGKPFKVAIVAVTRKLLLHLNTRMAIFLGNPLVD

SEQ ID NO: 40471 - protein, 394 aa, unidentified
MQVGIDAHKRSCTVCVIEEGAVTDSFSFPTTREGVNEFMEKIHGKATVVIEASTTGKVLSRMLLEKYEVHMVAPPERRRSVKTDRRDAERVVREDTLQYLRRCYIPSPYIEMLRFLVMQQIQIGRKIGRVKNQVHALLERNMIHDLDEFSDIFGVQGLRRMVEVKLPSLERTALARSLEELKLHVAHHRQLETELAKIAESDADALLLMSIPGIDFFTALAVKSRIGDVGRFPTKKHLCSYGAVVPGASNSGEYISTHNHVKHGDMVLKYALTCAVRGAVSAGKNSAVKRFYVKHSRRMGAQKAEVAAARKMACVVWKVLSTHQPYREEDERLTAKKKRILAWKAKRQEKNVSSDIRQLAETLMGDTAILTKYPADFNQQFVDSSHKENERAWT

SEQ ID NO: 40472 - protein, 446 aa, unidentified
MKPKPQEKTSKDSCRPKPGHWNEMNRKQRRETMRKIQSDDLSLEVVHPDSAGIDIGNESHYVAVPPTRDSQPVRRFGCTTAELKEMAQWLKQCAIRTVAMQSTGVYWIAVYDIFEAAGFEVYLVNARETKNLPGRKSDVQESQWLMKLHTYGLLRNSFRPSQEIRTMRTYWRQRNDLVQAAGRHIQRMQKALTQMNIQLANVLSDVSGMTGQAIIQAILAGERDPHKLAEFRDPRVKASKHEIARSLEGNWQEDLLFVLKQEQDGYEFCQKQMLECDRQVEQYLQQREDRSKGTPLPEEKRKGRLKKKKGNAPVFDLRGELFRMTGADLTQIDSIDIMTATTILSEVGWDMGKWETEDHFVSWLRLCPDNRISGDKIVGKGRLPTKNRVSIALKMAASTLRRSNTYLGAQFRRFRTKLGSPIAIKAMAAKLEELKRTLDKLNAVQR

SEQ ID NO: 40473 - protein, 384 aa, unidentified
MIYVGVDVAKNTHYACVTGDKQKVLTSPFSFTNDETGFAKFRNSFAKYSIDDVIVGLEATSIYGENLMAYLADLGYRLALINPIETSTVRKTRIRNAKTDKIDAKNICKYLSKEEYRLMQPKELQMLRLRGLCRFRQTIKKSVCRLKTQLVSYLDVSFPELHTAFYSVHLKSAYAVLSQFPTANTISKANVVKLTSILSSASRGKFKREKADELKSLAKRSVASNDMSFQIKHTIEQIRLIEFQLKNVETRICAVFDELNSIIQTIPGIGAINGSMILSEIGDISRFSNPSQLIAFAGLDPITNQSGNFRAKSTRMSKRGSSLLRYALINAAWNVSLNNDTFKSYYNEKFTQKRGHYAALGHVAGKLTRVIFKILKDNVPFDLP

SEQ ID NO: 40474 - protein, 352 aa, unidentified
MDQQHQPEQHYTGLDVSLDATSICVLDAKGAVVWRGKCSSTPEAIRDALRQHAPALVRAGLETGQLSNWLTHGLRRLGLPIVCLDARHAKAALKLQVNKTDANDALGLAQIVRTGWYREVAVKSMDSQTLRMLLVARAQLVSQRQTLANTIRGLLKTFGLRVVCCSGGLFETRVRAAAEGNDALLAIIEPMLTAWQTLREQVAVLDQRIAARAKTDEVARRLMTVPGVGVVVALAYSAVIDDPARFRRSSAVGAYLGLTPRRQQSGEADYTGNISRCGDALLRSYLYEAANVILCRRVRPNAIRTWGLALAQRIGMCRAKVAVARKLSAVLHSIWRSGAEFHWNAQSVPPVA

SEQ ID NO: 40475 - protein, 378 aa, unidentified
MNRIIKIGMDVHTTNYTLCIFEPSFEHDGTVHCITQVKPEVKNIIHVIETFKKKHENEELNIVCGYEAGCLGYSLYHELKEKGIECVILAPTTMKTEKGGRKLKNDYRDAKMIAECLAYGGYSAVHVPTELDNSVKEFIRMRDDIKENLKSIKQQIIAFLTRNGKQFEGKSFWTRKHIDWINTVSFSEPLLQDTLKEYMIEYNHLCDRVETLDKQIEEISLKEEYVEKVQQLQCLIGIKTHTALSLIVETSDFNRFKKGNMYSAYLGLIPGEDSSGGQENKLGITKAGNSHLRKLLVEAAQGYTRGKVGFKSKVLKSRQEKCSSEVVAYADRANERLRRKYYRMTLRGKRYNVAKAAIARELACFVWGIMTDHIDLCS

SEQ ID NO: 40476 - protein, 336 aa, unidentified
MTIIRIGLDTSKHVFQVHGVEESEQAVLHRQLRRSEMAKFFAKLAQTRVGLEACGASHYWARVLRGLGHEVVLLPPQYIKPYVKRGKNDAIDAAAICEAMSRPGMRFVAVKSTEQQAGLMLLKVRDLLVKQRTMLINAMRGHAAEFGVTAAKGPVKVSELLRRADAAADVPALAREMLSLLSGQLDALEAKLKALEAQLMAMHKQDPVSQCLATQPGIGPIGAVSFALKVSDPKAFRSGRHFAASLGLTPKENSTAGRHRPGRISRQGDESLRRLLVLGATAVIRFAKPGRTSPWLLNLLARKPKKLAAIALANKMARTLWAMMVSGETYRHPKEA

SEQ ID NO: 40477 - protein, 319 aa, unidentified
MTHTNLFVGIDVSKNTLDVATFTNGHQNAIWSVPNHKRGIQTLLRRLQKLHPTLVVLEATGGWETAAITSLSAAGLPAVVVNPRQVRDFAKATGILAKTDRIDAQVLARFALAVQPPPRPLPDDTTRLLKHLLARRQQLLKMITAERTRLSRAIPPIQKFIRRHIRGLKTEQDELEQTMKDLVQSNPTWQSNDSLIQSVPGVGPVTSHTLLGCLPELGTLDNKQIASLVGLAPHCRDSGTRKGKRTIWGGRAHVRKPLYMATLAATIHNPAIRTFYQRLLVNGKSEKTALTACMRKLLTILNAIVKEQTPWRLPNLANI

SEQ ID NO: 40478 - protein, 353 aa, unidentified
MSQQNARVAVVGIDIGKNSFHIVGQDGRGEIVLRQKWSRSQVEARFANMSPCLIGMEACVGAHHLSRRLRALGHDARLMPAKYVRPYSKGQKNDFRDAEAIAEAVQRPTMKFVATKTADQLDLQALHRVRERLVSQRTGIINQIRAFLLERSIAVRQGIRFLRAELPRILAMPPDVLSPRMVRIIEDLACDWRRLDERVEGLSNEIETIARQDAGCERLMSVPGIGPIISSAMVAAIGAGDVFTKGRDFAAWLGLVPKQISTGDRTILGKISRRGNRYLRVLFVQAAWVVLIKPKIWERHGLKTWIEAARKRLHHNVLAIALANKLARIAWSVLAHGRAFEARKIDQAANQSA

SEQ ID NO: 40479 - protein, 413 aa, unidentified
MPHEARIFVGIDWGNEIHHTWVTDGDGAAIDHRRFEHSGAGLTALAEWLVSCAAEPRAIIVAIEVPRGPIVETLLERGCQVWAINPKQLDRFRDRYSVGGAKDDRRDARVLAQAARTDPSAFRPLDAADPLTAQLRECSRHDAELAADFGRVANRLRELLLRAWPEVLRLAPAADAPWLWTLLARAPTPDAAAALRPAWVRQLLRRHHIRRWTAEDLLTVLRTPSVHLVAGTREGIAPRITDLVAQLEVLHQQRRAAERRLVGLLDALTDDAPPQVGREHPDAVILQSLPGIGIRITGTMLAEAADMLRRRDYHALRTHTGIAPVTKQSGKTRVVQMRLACNGRLRDAMFCWGRSALRDPHVHAHYTRLRAGGHSHARALRGVVDRLLKVLIVLLTNGQLYDATRRPSPAPVA

SEQ ID NO: 40480 - protein, 309 aa, unidentified
MTFDATAIVGNAEYSAKFDNDSKGLNQFSDRLKSLGCQNLHICMEATGNYYEEVADYFAQYYSVYVVNPLKISKYAESRFKRTKTGKQDAKLIAQYCRSAQESELVKRQKPTDEQYRLSRMIAAYAQIKSECAAMKNRHHAAKDEEAAKAYAQIIKAMNEQLEVLKEKIKEQTEKPNCKEGVKRLETIPAIGRMTAAVLFHHLTSSKFETSNKFAAFAGLSPQQKESGTSVRGKGKLTKFGNRKLRAVLFMPAMVAYRIRAFPDFIKRLEEKKKPKKVIIAALMRKLAVIAYHVHKKGGDYDPSRYKSA

SEQ ID NO: 40481 - protein, 485 aa, unidentified
MKAKNSCARRRSENNFVRRGQPLQPSAQMPMIHPHAAGIDVGATAHWVCVPEDAVAEGQSPVREFGAFTKDLDELVEWLLRCQVKTVAMESTSVYWIPLFQKLEAAGLEAILVNARHVRHVPGRKTDCKDCQWLQRLHSYGLLNGSFRPSDDICCLRSLVRHRDNLSKACGQQVQPMQQALNYMNIHLHHAVSDLNGETGLRILDAILRGERDPKELVKRRDPQISRSTVEEMEAALRGDWREEHLFVLRQSLENYRHLLKQMEICDGELEKVLAKVVVNPATVVEVERPKNPPAAEPKSKRQKRFKKLKAGTGLKRDLSAELQRICGVDLTRIIGLNVLGVLIVISEIGVDMSRWRNAKAFCAWLGLCPGNKISGGKVLSSHTVHVVNRGAILLRTVAPAVGRSDTWLGIFHRRMRARLGPAAANTATARKLACMIYHLLQYQEEYIDVDCLIYQEKIRKSRIAKLCKQAEELGFEVIKKQKAA

SEQ ID NO: 40482 - protein, 379 aa, unidentified
MRRVCGLDVHKDSVFMCILSENGEKVQEKYGVLTKELDTLRDVLVANNVGEVAMESTSIYWMPIWRVLESDFDLKLVNPYFIKQLPGKKSDVKDAEWIATCLQKELIKGSFVPDAAIQRLRQYNRRIFDLNKDISYKLTKLDMALQCCNIRISNYVSRTDSKSYKKVVDKLAGGITDPQELEKCIHGRTVNRFGKDVITASLTGVINETDIDIMSQLKSEIDLAERHKSECLMKMREICMENYPKQLENIKSMPGVKEQSATAIIAEIGVDMKMFLTAAAIVSWCGLRPRNEESAGKIKSRKIVHGNKYLRRTLIECAWAASKTQGCFYNKFSYTQVSIRKKNVLKVRVAVARKMLVTIWNILSKGEAYREILDCTLPQ

SEQ ID NO: 40483 - protein, 533 aa, unidentified
MVTKRNSRKSRTISPAVLGKPKGVIQARVQAVGPERFGIVAVDCAKARSKWMLCDFYGKVLIPPTVVEHQRTALEVATMQLREAIQQHGLQDHLVAVEMTGTYHRPVQRAFRKAGSETRLVHPFASRHYRLPAHADSKTDDHDLEGIFRAAVNGFGLVEPEWDDIYRHLQVLARHRRDLVQKRAKLQSQIRQALERCLPGYAALFLSDDLWTRPVAMAVARRAVRPEAIAAAGVSGVWRWLKEDKLQVQSRTVERLVAWAANAAAADPLCDHLARVWQTLYEDWQAKTRHIHRLEQDLAAILVKTPYLLLLSHPGINVVSASELAGEMGPIEHYAHAKAISGRAGLFPSRYQSDEVDRADGPLARFRNARLRAVWMRVADCLIKSNAHYRGKSELWKQRGVDPRDIHCRVANRATRTVFQMVSGRRLYQHPSRLDRQYVLDKLRVFHQEHGTPPVEILRDLHEAAAQIPKSEQAAEARPLQEACRKARRSRRAGPQAIGEILLVLLAKLGFGQVQSEAEAPSPDANVSGTGTR

SEQ ID NO: 40484 - protein, 322 aa, unidentified
MSLPGPLCVGIDVSKATLDIAASSAIEPFSVTNDTDGFDSIIAELREYSVALVLMEATGGLEAAVACALQAEGFEIAVVNPRQARDFARAMGYLAKTDRIDARVLAQMAEVINRHPERSRFIRALPDAERQVLNAMVVRRRQLIAMLGAERNRLYLAPPQSRKSINTIIKALEDELARIDDDMNNHIRSHFKELSERLSGIKGVGTMTVAALLAEVPELGRLSRREISALVGVAPVNRDSGTMRGRRTIFGGRAGVRTALYMAALVATRYNPVIKAFYTRLVAAGKPKKVALVACMRKLLTILNAMLRKNEEWNESYHHVAP

SEQ ID NO: 40485 - protein, 360 aa, unidentified
MGMRRIIALDLGKFKTVACVMNAVDRSHLFETIEMSPGAVHDLLTRHTTDPAGDTLVVFETCDCCGWVYDLCVALGLAASVVAANSEAWQWRRVKRKTDRDDALKLAKLALLDQLTIVHMPSPLQRQKRRLILHRRSIVARRTQSRNAIRSIFSQQGIALVRGSRQWTQAGVEQLRQYARPLADCTDLLDLWRGRLHAELQLMADADAQLKIFDRKLDALADDRVKLLQTIKGVGPRVAEAVVSHLDDPHRFADAEHVASYAGLVPKQIESGEMSRFGHITRRGPSLLRSMLVESAWVVWRHNPWAQAWAAKISRGSRGRRKIAIVALARRLLTILWAMLRDNQPFRVPGGPPPVASLMT

SEQ ID NO: 40486 - protein, 342 aa, unidentified
MQVTTIGLDIAKNVFQVHGIDAAEKVVVRKQLRRRQVLEFFKALPACLVGMEACATAHYWARELTKLGHRVRLMPAKDVKAYVKRNKNDAADAEAICEAARRPTVRLVQIKSTEQQGRLMLHRARDLLMRQRTQVINAMRAHLAELGIVAAQGRDGIKELLKIIASEADARLPVDAHTSLVVLAAELQAMQTLIGSIEKRIMVQHRLSEASKRLESIPGIGLIGATAIAATVPDPKVFGSGRAFAAWIGLVPREDSTGGKQKLGPISKRGDRYLRRILVVGACAVLRYARHKPEKYPWLTKLLERKPFKVVAVALANKMARIAWALLAKGDTYRVPALAAAA

SEQ ID NO: 40487 - protein, 371 aa, unidentified
MHFITKFVGLDVSKEKISVAIADSGNEAPRYYGSIPHTPEALRKLIKHLGPAETLSFCYEAGPTGYATYRWITSMGAHCTVVAPSLIPKRPGDHVKTDRRDAEQLARLFRAGELTPVYVPDQADEALRELVRIREATKADLHRARQRILKFLLRHHIEPPVTIKRRWTKKYLDWLRQLSFPYASMQLAFDEMLHALFEIEQRMERLGKELARQMESSPKAPLIQALQSLRGIGRLTAITLVAEIGTFSRFRSPAQLMAYLGLVSREYSTGLSTRRGSMTKTGNGRARRAVVESAWSYRYRPAVKGDLAERLEGMPAEVQRISWKAQERLHGKYRRLVYAKNKHKNVAIGAVARELVGFIWAVAQFVEQKAS

SEQ ID NO: 40488 - protein, 341 aa, unidentified
MSDYSYFGGIDLAKNHFSIHVVDSQGKVTLHKSVTRSKLLTTIANMPPMRIGLEACGGAHYWARTLNKLGHDARIMAVKYVVPHRTKGKNDLNDAVAICQAVHHPSTRFVPVKSPEQQAILSVHRMREHWVRERTALMNRIRALLSEFGLIIPVGRSSLMKQVPLMLEDAENELPQLARTVIADAYYHLEQLNQRIADTEQVFEAFSKVSENVQRIMKVRGIGPQTATAILASIGNGSQFDKSRDFSAWLGLVPKQYSTGGKPRLGRITKHGDKYLRTLLVHGARTVIANLGDKQDRLSQWCRGVLERRGMNRAIVALAAKNARIIWSLLHNQTEYENYAA

SEQ ID NO: 40489 - protein, 350 aa, unidentified
MPSIALQHTDVIVGVDTHKDEHVAVALDGLGGRLGERFVEATTPGYAGLLAWATQLGRPMAFGVEGTGSYGSGLARFLRREGNTVIEVGRPPRRSERRLDGKSDPIDAEHAARAVLAGTATATPKLADGAVEAIRLVKIARDTAVKAHSQAMIALKATIITASDELRAELKLLTDFALVTTCASFQSATDLSDPAVAMRHVLASLARRWLELHEEIKIHTRHLKSLTKAAAPQLVEAFGIGFDIAAELLVSAGDNSNRIRSEAAFAKLCGACPIPASSGKSTRHRLNRGGNRQANAALYRAVIVRMRWHAPTIAYVERRTTEGLSKKEIIRCLKRFVAREVYRLLPVPDV

SEQ ID NO: 40490 - protein, 388 aa, unidentified
MRQSTPVQFGRLFVGMDIHKNNHAAVAVNCFGDPLFKQELGNEIRDFNQLIARVQAITKERQLNPVFGLEDTSGSGEFLARFLFNHGYEVKTINPVLVKRERDYETHPEKSDLADALGVAKVLIQRIDSVPAYNISETTEVSRDIRALTKDRETIVLEQTRLKNQLHALLHHSFGSGYKTLFRDVFSKKALLFWQDFPSAQTLKSSRKRNTAKPDWITRRSADELPHASETQANQIRRKVKRLLSIREELNEIEKELDDLTKQTGQRLDTLPGCGLVLSAVVLAEVKDINRFSSPAKLAKYAGCAPRKLESGKRKRHVKTRSGNRRLNKALYQIALTQISNQGIPKAKAYFQKKVNEGKSKKHALTCLKRQIIDIIWSMLKEKRAYYS

SEQ ID NO: 40491 - protein, 452 aa, unidentified
MAKKKKINRKKTVKHLHVLQPNSAGIDIGATEIYIAVPDERASKAVRRFDTFTDDLHDAAKWLKKCGIESIAMESTGVYWIPIFQILDTYGFEVILVNARHVKNVPGRKTDVIDCQWLQYLHSVGLLRGSFRPAQDICAVRSLLRHRDNLVKAAASHIQHLQKSLTQMNLQIHNVISDITGITGLAIIDAILAGERDPKILAELRDPRIKADKQTIVKSLIGDFRSEHVFTLKQTLQSYRNYRQLIQGCDREIENHLKKFESRVDLDSLPPLPPGTPKRKPKGNEPDFDLREHMYKLLGTDLTQIDGISGLTAHVFFSEVGPDLSMFKNVKHFCSWLGLCPNNKISGGKILSSHTRPGSNRFAHSLRLSANSLWNSKSYLGNYFRRMRSRHGAPKAITATAHKLARVIYHLVKNQKMFDDTVFAEEEKNHQKRFEKRVLRQAKALGFQLVPA

SEQ ID NO: 40492 - protein, 356 aa, unidentified
MTSIPHPVAPQLTFGVDTHLEVHVAHANDQLGRPVATLQIPTTPAGYQQLLRWAHELGEPVAWGVEGTGSYGAALARFLTVNAQVVVEVNRPDRQARRLKGKSDPLDARAAAKAVQAGEVTVLPKAGTGQVEMIRCLRVARATAMRSRTQTINALKGLLVTAPTELREQLRGRSVTRLVQAAAALEPGPLTSPLAAAALALGSLARRHQALSAEIDSLTSQLERLVATAAPELVARFGIGHDSAGALLVAAGDNPDRLRSEAAFSMLCGASPIPASSGKTIRHRLNRGGDRQANAALHRIVIVRLRYHQPTRDYMTTRLGQGKTKKEIIRCLKRYVAREVFAALHQMSQDLPTLAA

SEQ ID NO: 40493 - protein, 315 aa, unidentified
MAMPVATTQSIIGVDVAKDELVIYCAESDHLETISNTKAAIKKWLKTVAKPVAIAIEATNIYHQEFADLAHADGCVIYMVGGYELSHYRKGVNVRAKTDALDARLLARYLTNEGDHLRPWTPPSPLYCRLISLFRRRAALVQARVSLKQSWENEPLLKTAFKNQINAMQRLEILLEKTILTQIDEAGLGAQLKRCMKVEGIGTLTGARLLASFQRGDFKNADAFIAFLGLDLRISDSGKKKGRRCLTKRGDSEARRLLHNAAMAASRTSAWKGFYEALRERGLSTTQALVALARKLARVVFALLKNQSEYSPKAV

SEQ ID NO: 40494 - protein, 425 aa, unidentified
MSYRIAAIDVHKRMLAVVVTDVAGDGDFEFERRKFGASPGELHVLAQWLGQQEVEEVVMESTAQYWRPVWGMLEQYWKPARQQREGASKKCGTLHLCQAKSNHGPRGRKNDYLDAERMVKRLVAKELILSFVPDEEQRLLRTVTRRKYQLTRAKVGFKNQLESLLEQGHIKLSSLVSDLLGVSARRMLKALAEGESDPAVLAAMADSKLRATAEQLRDALGASAHWNGTFRRLLKLSLEELELIEQHIEKLGREAMKLLKGHEDVVQRVAAVPGFGADCAVQMIAEVGLEAATFLAAKRLSSWVGVCPGNQESAGESQSTRSPKGNRQMRRLLNQAAQSAVKVKGSIFEVAFHRLLPRLGYQQAIWAIAHRLCRLLWLILHKGVRYEERGPSVSAKSKRDREARMIRALRKISYRVEAPAVGTPA

SEQ ID NO: 40495 - protein, 430 aa, unidentified
MEVIYPKACGVDVHKSFIVAVICDSTSVKPQYLRKRFSTFNNSLIEFRNWLLANDCQNVCMESTGKYYVPVYNALEGHISNVVLANPKWVRCIKGEKDDNKDAKWIADFFKLGIVRGSFIPNKDIRILRELTRYLYKLTNMRTSEKNRFTNSLTVGNCKLDLVFSDIFGKTSSAIINTILSQNEYNDEDILKNIDWRCKSSNEDILNSISGISWEDTQKQRMNVIQEHIDYLDKSIKTIRGIIDSIIAPYESAINLLCSIPGIDRKSAITIISEIGTDMNQFSSHYRLASWAGLAPGCNESAGKKKSVKISRAGVYLKPALVEVAHCAVKDKANDYYAKKFNILSKRRGKKRAYIAIARKILVAIYHMLSSGELFNPTDVAKVETTDKDKIKFTKNNFMQSTKQLISLGLTIDELQAFITSKISESTLII

SEQ ID NO: 40496 - protein, 396 aa, unidentified
MVSDLSFTLNEDQPGGRLNVGIDMGKNKWVMDVLDTANGRHRQHLFTGPACLADAVEEVRGLVACGREVDVVYEAGRNGFTPARLLQQLGARVTVVPVNKLEVVNTGKKAKSDRLDARRLSERDARAEGFPSVWVPPVEQECRRRDLRERDRLQEDIGRNNNRILAILERWPVPSERRHLPARLWRQRLKQWRESESGGPAVPETDLACIANLVAELQVLEKNLAAWEKRTAAQMKEERKAAKKAGQVHAVDRLMEYKAIGERIALGLVWYVGDFERFVNGKKFASYVGLVPVPWASGGTSRCQGISKSGNPELRRLLIELAWLWNRHQPDSPITRKWAGALARKGRSRRTAIVAMARQLAVALFRLLKYGEALPGAVKNRPVQVPAATPDSPLVP

SEQ ID NO: 40497 - protein, 355 aa, unidentified
MENQKVSFEDQCLYVGIDVHKKQWSISIFSSELHHKTFSQPPSPASLKSYLDLHFPHAKISCAYEASKFGFWIQRELSAYGYQCLVVNPADIPTSNKEASGKTDPIDSRKIGKTLRSGLLTAIHVPAVHTEGDRQLFRYRKKLWGDLVKVKNRIKDKLLFAGINIPDELESSNWTKAFLKWLKELQIQASSTRLTLDLLLDQYHYLYKHFLKVSTQVRSLQRLPRYKNNAKLLRAIPGIGPLTTVQLLCEIEDINRFPSFKKLNSFVGFKPSSHSSGEHDWRGRMTYRQHKQLRSSLVECAWTTIGADPVMMQRYQELKKRITAKRSIIIIAIKLLSRIYHVLKNQKPYELGVVR

SEQ ID NO: 40498 - protein, 337 aa, unidentified
MRAYPHDQSKVLFVGIDVSQKTLAVAIDGQAVREFSNDQKGWNKLTSAVTKAKRDVRVVLEATGSYHFDAACHLANSPRVQVMIVNPRMAKAFHLAQGRRAKTDAVDATSLLEMARRMEFTPWKAPGEATFEIRQLSRYVDSLIQEATRLKNQLHAATITSRANEFVVADLRARLADVEGRTTRAENQLLAAVKADAEHQRRVAAMKSVPGVGTATAVRLLSEFLILDPEMTSKQITAYAGLDPRPRESGTSVRGARGISRLGNGRLRRLLYMPAVAVGRIKGPFKSLADRVAERSGKKMVGLVAVMRKLLVTAWAIFKSGQAWDVARAVRGEPMAA

SEQ ID NO: 40499 - protein, 441 aa, unidentified
MVDTAVTTPEPVWAAFLALDWGSQKHAWILQPADGGKRNEGFVDNTPEAIAVWAAGLYQRFGGRPVAVALEQKRGSVVNLLLPYAHLVLFPVPPSMSASYRKTFVPSGAKDDPTDAGWILDLLLRHRDRLRRLAPDDANTRLLLMLVEDRRQLVDDKTSLTLRLQDCLKQYFPQLVRWFDVDTALVADLLQQWPDLQHLQRCHDGTLRKFFRQHHGGEKLTGERIETIRAAVPATNDPSVLEAGSMKARHLTESIAALRGQITQLERRRDELVADHPDAPIFASFPGAGPATVPRLIAAFGTCRERYQCAFDVECDSGIAPVHIRSGKVDLVSMRRACQKFTRQTFHEFAGQSIPQCEWASAFYHAHCTKPEEHHAAVRALAFKWIRILFRCWKDRKPYEEQLYLTSQRRRGALLGPGLASVTSLEWKNVAGFSKLSEKNS

SEQ ID NO: 40500 - protein, 371 aa, unidentified
MKLFVGIDVSMKDFKARMFDAEGEEIAKRIRCKNDDPGAESFVKYLVEICGANEVDSLRIGMESTSVYGWHLQMRLAGEPLLASFHPQVYVFNPKVIANFRKQYVDIPKDDWFDCLVIADRLRFGRLPESCQVDFRYLPLQRLTRFRYHLIQTITREKNYFLTNLFLKFNTICQDKVLSDIFGATSEAILTEFLSPEEIAARPLDELIDFLMEKGKSHFSNPEATAKALKHAAACAYRLHGSLLEPLNLILATSLQTIRTLEQQVKSIDKAIEKELSHFPNTLQSMPGMGPVCTAGIIAEIGDIHRFDNEKAVAKFAGLTWRKHQSGEFEADDTPLTKTGNVYLRYYFVMAADSVRKWDPRFAEFYARKFK

SEQ ID NO: 40501 - protein, 309 aa, unidentified
MFVGIDVSKARLDVAFRPEGASFQVSNDEAGIGDCVRRLQALRPELIVVEATGGFETALVAGAAVVGLPIVVVNPKQVRHFAKAIGRLAKTDSIDAGVIARFAEAVRPEVRPIQNEAGELLTALLSRRRQVLEMMVAEKNRLVTMRERHVRQRITHHLHFLKQELRELDKDLDKEVRSTPAWREKEDLLKSVPGVGPVLARTLLAELPELGQLDRKRIASLVGVAPMNNDSGSLRGQRRVQGGRAQVRTVLYMAALVASRFNPRLKRFYDSLRASGKTGKVALVACMRKLLVILNALVRTGERWNAEAT

SEQ ID NO: 40502 - protein, 324 aa, unidentified
MSKDKKYFGIDISKDVFDVYDYLGNFQQFTNDFKGFKEFSNELGSFSHCVMEATGYYHSKLAYYLVEKGVLVSVENPLKIKRFIQMGLSKIKTDKSDAKQIYNYALQVDVSLWYGESKIQQESLQVVRLLSVYTKQSTMLKNKIHGEDVLGTPSKLVVQSLNRQLKSIQKEIKKLEVVLENNVKTEHQESLTLLKSIPGIGPKTAMMLLVFTDGFSRFNTSKELCSYAGITPVIRESGSSVKGRPRISKVGNVKLRNLLFLCSFNACKYNKSCKALFDRIVAKGKSKKLALIAVCNKLLKQAFSIVKNRIPYDDNFRSTLVKNN

SEQ ID NO: 40503 - protein, 400 aa, unidentified
MSERRARIWVGIDAGKAHHWAAVVDETGATLWSEKIENDESAILTALGGILDLAEEVHWAVDISSRSSALLLALLAAHGQQPVYVPGRTVNRMAGAYRGEAKTDARDAYVIAETARHRRDFATIGVPAQLAADLALLTAHRTDLVTDRVRTVNRLRDVLTGMFPALERAFDYSARKGALVLLTGYQTPAALRRRGLARLTSWLANRGVRDAGSVAATAMEAAQAQQTALPGEDAAAQIVADLATQILALDDRLKRLDRQIRDAFRTHAQAEIIESLPGMGPILGAEFIVAAGDMTAHTDAGYLASAAGLVPVPRDSGRRTGNLHRPKRYSRRLRRVFYLSAQTSIIRDGPNRDYYLKKRGEGCKHVQAVIALARRRTSVLWALLRDDRAFTPTPPIAQTA

SEQ ID NO: 40504 - protein, 350 aa, unidentified
MLIIGCDYHPSFQQIAFVDTDTGELQERRLEHGEEAEKFYRGLGVQGMKVRVGMEASGQARWFERLLGELKFELWIGDATEIARKRERKQKTDRQDAQHILRLMLKDDFPQIWVPSGENRDLRQLLWHRHRMVQARTRIMNQLQAVALNEGVRCKKRLWQEKGRERLESFRLAPWASRRRHDLLELLDRLNPTIVALSQAIEQEVEKCPEAQRLRTHPGVGPLTALAFVLIIGKPDRFQCGKQIASYLGLVPLEDSSGNRRRLGHITKQGNSLLRFLLVEAAQVTARSLPEWRSKYVHLTMRRGRKIAKVAMARKLAVRLYWMMRKEWDYEQLKKFGSHAGQPGNRDGVK

SEQ ID NO: 40505 - protein, 405 aa, unidentified
MNAVGIDVSKGKSTVTIRKPGDGVLMSPCDIPHTQSAINDLIKQIKSLEGETKVCMEHTGRYYEPVATWLSDAGIFVSAVNPILIRDFGDDSLRTPKTDKADSKKIARYTLDRWAKLKQYGIMDKTRNQLKTMNRQFGFYMAQKTAMKNNLIALIDQTYPGANDFFDSPARNDGSQKWVDFIHTYWHVDCVRSKSLNAFTEHYQNWCKRKNYNFSAEKAAKIYQISSDLIAVFPKNDITKMLIWQAVALLNTASKTVESLRSKMNELASTLPEYPVVMDMNGVGATLGPQLIAEIGDVSRFTHREALTAFAGVDPGKNDSGKHIQNSVRTSKKGSPYLRKTLFQIMDSLIKRSPVDDPVYAFMDKKRSEGKPYYVYMTAGANKFLRIYYGRVREYLSNLSNNETI

SEQ ID NO: 40506 - protein, 339 aa, unidentified
MNEVTVIGIDLGKHSFHLHAQDAAGRMVFRKKLSRQQLLRTLANVPCCRVVMEACAGSHWLARQLAGMGHEPRLISPQFVRPFVVGNKNDFGDAQAICEAACRPSMRFVSPRNEAQQTVSAMHRLRERLVRERTATVNQIHGFLLEFGISLPRGAALMSRLPTVLDHETLPPRLVGLVVRLHAQVHYLEEQLRQVVQDLKASLREDDKSRRLLEIPGIGPITASALAVELGDARQFANARQFAASIGLVPRQYSTGGKPTLLGISKRGDRNLRRLLVQCARAVMQHTASRTDALSLWVKTLSTRRHSNVVACALANKLARIAWAVLARGTHYQARALTT

SEQ ID NO: 40507 - protein, 371 aa, unidentified
MRNDSTVFVALDVHQKSIVAAYAVDAGAVEDLGQIGILQRDLDRLCKRMQAKGAQVRFVYEAGPCGYAVYRYLTGKGFDCTVCAPSLIARKPGDRVKTDQRDARKLVQALRMGDLSAVHVPDVTDEAFRDLVRVWSAARMDLAKAKQRLKSFLLVHDVRYAGTANWGPAHRHWLSRFVFKEMNSRFAFQEHLHSIEDRLAQCERVEALLREAAPHWRFYPAIRALQALRGVQFKVAIGLIAEIGEISRFASAPQLMAWLGMTPSEHSSGERRRQGAITKCGNANARRLLIEAAWAYRHPPKVSPTIQQRHEGLPTVITDRAWDAQLRLCKRFRKLSARGKPHNVALVAVARELAGFIWDIARMSAATSNTH

SEQ ID NO: 40508 - protein, 361 aa, unidentified
MKKHTQDLIAEVPRGCSKVGMTIGIDLGDIWSHYCTLNEEGEVVDRGRFRTNPSSVDKWFTDLPRVRIAMEAGTHSIWISEQLQELGHEVIVANVRELRAISHSDRKSDQVDAEKLARFARLDPKILRPIAHRTVAQQEALTLIRARNLIVRLRTAAVNAVRGLAKPCGYRLPASSTLCFAKRCLAVLPPALARALRPVLHQIADMTVKIKQYDRAIKQLTETEYPETQALLKVYGVGQLTALTYVLTLGSKERFQRSRDVGCYLGLRPKRSQSGERDPQLGITKAGNVYLRSLLVECANHVLGRHGKDSTLRQWGLSLASRGGKQSRNRAIVAVARKLAVLLHRIWITQEQYIPFYAEAA

SEQ ID NO: 40509 - protein, 356 aa, unidentified
MGKDITADERRTIGLDLGDKYSEAVVLDGGGEEVERFRVRTTQPGLSRRFAGFEPTRVVLEVGTHSPWASRLLAAQGHEVIVANPRRVRLIAENDAKSDGFDAELLARLGRMDPRLLSPVAHRGEAAQRDLVLLRARDGFVRARTQLINQVRGFAKSLGARLPSSSAEAFPRRVRSAAPDDLFPGIGTMLQTIERLTLEIRAMDREVERLCRERYPETAVLRQVKGVGPITALGFVLVVEDPGRFRQSRSVGTYLGLCPRRRDSGEQRPQLRISKAGDPLLRRLLVTAAHYILGPFGPDTDLRRFGLRLAERGGKAAKKRAVVAVARRLAVLLHRLWVTGEAYQPLGYDASLAKAA

SEQ ID NO: 40510 - protein, 377 aa, unidentified
MGRGDVVLMFHSQAERTLSVPDTKIWRGAMEARLDVIQEHLYVGLDLHKRHWISTVRTRDLFLKRMATPADKELFVQSLRRQWPQAKFSVVYEAGCFGYHIADYLRAQDIEPIIVAPHRVPVMPGDRIKTDAIDSNKLAEALAAGTLKSIHQRPAPLLYDRGVLRKRQQLIKRRVQIQLQLKADLLFYGFELRAPGSSRWSKRTVASLRSVVFPNERFRRAYLLVLDEYDSIVAQLRELNTMVHELLVAEPYVHTVTLLRSVPGIGPLIALTLALEVGDFARFRNHGEFASYLGLVPSEHSSGDRIRRGHLTGMGHTHLRSLLIQAAWVAVRKDGELRRVFDRLAVGGKQRAIVAVARRLAHRIRTVMIEQRPYQLR

SEQ ID NO: 40511 - protein, 431 aa, unidentified
MKLKPVPVAGVDVSKEFSDMCILTPDNAVFERVKIYHDKASMTQSVKALARAGAAFGQRPVVVMESTSHYHRTLQQFLTRHKYQVITINPLQSSAFKNVTVRKIKSDPTDAYRLALAYRTQALRPNLVPSDKIENLRLLTRQHFDLKRDITSYVQRLQCVLDQVFPGFRKQFEHLHCETSLIILEQYPTPEALKRARTSSIAKIFQCAARRSPEYCRKRAEALKAEALKALEIRVSRESADLLIKAYVSVLRALEQTIRQVDDEIHRVIQSDPKLLADVELLCSIPGVAEFGAAVIIAEIGDFSNFRKAKQLVAFFGLEPSVHQSGKYVGKNNQLSKRGSRFMRKMLHLIVQTNIAHLPGKPDVYRNPVISDYYKKKCESKAKLAACCAVMHKLVNIIFAVLRDRKPYEIRTPEEHIKLMQARCVAAVTAA

SEQ ID NO: 40512 - protein, 469 aa, unidentified
MNNAKKKKRKNSGKLHNSLSQLDQINLNAAGIDIGAEEHYVAVPQCRDPEGEDVRHFNTFTVDLLSLANWLKKCKIDTVAMESTSVYWIPLFEILDSQGFDVKLVNPRFIKNAPGRKTDVLDCQWIQQLHTYGLLQGSFRPDDQICELRSYLRQRSMLISYASHHIQHMQKALEQMNIKLNHVITDITGVTGMAIIRAIIAGERNPEKLAQMRNSRCKSSKSTIAKSLHGNWRSEHIFSLQQAVELYDFYKSQITACESRIQQHLETFDDRSDGKPLPKPPFKSGGCRKKFHFDARTYLYQMTGVDLTRIDGIDTPTALTIIGETGIDMSMWPTDKHFSSWLALSPGSKISGGKVLSSKSKPCANRAAHAFRLAAYSLHKSNSALGAFLRRKKSHLGSPKAITATAHKIARIFYNMLKTGTEYVDLGQDYYERCYRDRVITNLKRKAKQFGYDLVNVNPSLIPSRTQLQ

SEQ ID NO: 40513 - protein, 363 aa, unidentified
MKKISKRQLAMETTKDKPGMTVGLDLGDRSSRYCVLNEAGEVMEEGRMQSTEAAFRRHFEGEPRQRVALECGTHSPWVSRLLKSMGHQVIVANARKIPAITGSQSKNDRNDAELLARFAAHDPRLLSPVQHRSLERQQDLNLIQVRSTLVRARTMMANALRGLVKSAGSRLPACSTQSLPVRATVAIPPALTAVATPLIQQMELLNQQINAMDGQIGNLAGKYPEIPLLRSAPGVGPVVAAAYVLTLDRPDAATNRSAGAFLGLRPAQSQSGESDPQRRISKAGDSYLRSLLVQSGQYILGRFGPDSALRRWGLKLAQSGGKRGKKRAIVAVARKLAVLLHSMWRTGQSFQPFPHPPIDPTVV

SEQ ID NO: 40514 - protein, 392 aa, unidentified
MHNCLAIDVAKGKSMVTLVSSNGEVLINPYEVNHSIIDFTNLLNRIKKLKLDNISVIMESTGIYHRPIERFLVENNFKVFVINPIYGKMKKRNLRKTKTDKEDCFNLVNLFISNTFKEYIKPDQLYLDLNALSRQYFALDELCVNIKNRYRNLVYLCFPEYENIFKDSLIYSNIALKFIEAFPHADIIFNTRIDKLQNFFKKHKFRYWKSKAFKIKEISSSYPSVNMNDEIVSNLSQIARLVNEYQKAIDIIKYKIIFLAKKSKYFEPINSIYGIGEFTTSIIIAELGDINRFNNIKELTAYCGLDPSIKQSGKSINVHGPISKSGNKYMRKILYITCSNIIRLTAISKSENDIEIYYRKKRNEGKHHYASIVACTTKLLRKILALCKQLDN

SEQ ID NO: 40515 - protein, 375 aa, unidentified
MAQGTRWVGLDAARVSALVAVEASNDGLVKGEAAGRLPIVMGLDQHRAQITAEWIELSSGEISRGRVVPADRASVRKFLKRFAGRDLEVALEATTGWRFVAEELERVGAGVHLAEPAETSGLRGPKKRPKTDWADARHLRELLLIGRLPESWIPPDHILDLRARVRCRHTLSHQRTEWQQRIQSVLYHHGCPQRRALMTVEGREWLDAQPLPAAAREQVTVAVAMINALDVQVAPLTARLYDYAKRQTGCKALIAAYYGIGGLTAVTILAELGDTRRFENSRDVVRYGGLDITVKQSDQHRAPGHLSRQGPPALRWALYEAAQQARHPRSPDREYYLQAAERIGGNRACLALARKLLKRCYHTLRDLGEDALTPA

SEQ ID NO: 40516 - protein, 375 aa, unidentified
MGDHSEAFVGFDTSKLRNAVAIADAGRGGEVRFFGEIENTPAATAKLVRKLSAKYQRLTFCYEAGPTGYGLQRQIKELGFACLVVAPSLIPKRPGDRVKTNRRDALSLAKLLRADELTAVWVPDGAHEAMRDLTRARETAMLDLRTKRQHISAFLLRLGRPYGERKKTWTKAHVSWIASQKLEHPQQRLVLEEMMLAMRQAQERQQRLEQAIAAAVPEWSLAEVVTALRAMRGIDLISAATLLAEIGDLSRFRTPTELMAYLGLVPSEDSTGDVIKRGPITKAGNRRARRMLVECAWSYQHPPRVGSAKQPKVDAAPEAVREIAWKAQCRLYRRYRALIRRNKLKTVAIVAVARELSGFIWAVAREVTTARAALA

SEQ ID NO: 40517 - protein, 368 aa, unidentified
MQKAVGGIDPHKNSITVGLVDGFGANVAVMSFANTDDGLRQTLQWLADQPVEIVRMGIEGSAGHGRHVAERLAAAGYDTREVPTRRTAERRRARRRAKSDHEDALAIARATAGEPGLGPVKQPGVDGVLDELAAVRRHRDVLVQRRTMMLNHAEAVLVALPRPVADALPPCRAVAPRLAAVATIDTTSMSPAVCSDLHLLRELVEDIAVISDRVKALERRLGHLVNASGSTLTQEAGIGIVAAATLLVETGNPSRFRTESAFNRWWGGAPVAVSSGEGDGQPVRHRLDRLGNRTVNSTLHIMAVTQSRCHEPAKDYLARKRREGASAREARRAHKTHLGRRVIRRMWADQRKATAAACTPNGAAPAAA

SEQ ID NO: 40518 - protein, 337 aa, unidentified
MKFCGIDLHSNNSVVVVTDETDRVLVSRRCPNELTPILSLLEPHRDELVGVVVESTYNWYWLVDGLMAAGMDVKLANPVAMKRYDGLKHSDDKDDAVFLAHLLRLGILPTGYIHPPQERALRDLARKRIQLVRTRTQHILAVENIAARQFGHGFSCNEIKGFSAASVDRLGLPTDVALAMNANVAVIQALEAQIAGLEARLLQQAKLRPEYLLLKTMPGVGEVLATVIMLETGDIGRFAEVGHFASYARCVKSARYSNGKKKGEGNAKNGNAYLIWAFIEAANFARRFSDDAKRFFEKKKAKTNGVVATKALAHKLARATYHILKEKQPFDAKRCFA

SEQ ID NO: 40519 - protein, 421 aa, unidentified
MEEDPQVEEIVARVAALDIGKAEVVCCVRVPHEGKPGRRLQEVETYSTMTCSLLAMSDHLRCMGVSRVVMEATSDYWKPVFYLLEAQGLDPWLVNAKDVKHLPGRPKTDKLDAVWLCKVAERQMIRPSFVPPPQIRRLRDVTRYRIDLVGVRTAEKQRVEKLLEDAQIKLSVVASDIFGVSGREMMGALVGGQTNPKALAQLARGRLRAKLGALEEAFTGHFTDHHGFLLGTMLARIDALDADIAALDTKIEEMVAPFALAVDKLDEIPGVGTTAADVILAEIGVDMSRFPTAAHLASWARFAPGVKESAGKKKGKGTTGHGNRYLARVLGEAAVSAGQTDTFLGQRYRRIAQRRGKKRAIVAVGRSILVIVWHLLSDPETRFTDLGPDFYDNRTSPERKKRNHIRQLEALGYKVTLEPAA

SEQ ID NO: 40520 - protein, 448 aa, unidentified
MEGIYAGVDWASEKHDVLVADAAGEKLLAATFAHDERGLRSLCRALVRLRVQLVAVERPDGVMVERLLDAGLRVLALHPNQVAAARDRFRVSGGKSDGFDAFVLCELARTDHHRFRVLEPDSDATKAIRALTRGREDLVGARTALVNQLRAELERFWPGPLGLFSDLHSQISLAFLERYPSPADAHGLGEARVRAFLARERYSGRQKPAQLLAKLKAAPTGRVGERELAIRRQLVCGLVAMIKTLNAQITELERQIATAIREHPDGAVFTSLFKGAVITAAELLAEMGDCRGRYPTRDTLAGDAGQAAVAIESGKRKAACFRWGCNKRLRQAFHTLADSSRHHNPWAQDLYAQALARGHDHPRALRTVGRAWSRIVWRCWQDRVPYDPARHRALQRHVTVTIPTASGPVPDIAASQRMAGAAVTRRAARRAERAALDGKPTSAIPLGG

SEQ ID NO: 40521 - protein, 313 aa, unidentified
MTHVLGIDVSKAKLDVALRRPDGKLRSKVVQNSPSGFVALTAWLGTHDVTQVHACLEATGIYWEAVAEYLADAGHAVSVVNPAQIKAFGGAGLVRTKTDRVDAKLIAAFCVAQSPPPWQAPPAAVRALRALVARRDALDAMRTQERNRLGVATDAVRPGIEAHLAYLEQALADIEAAIRQKIDNDPGLGAQRQLLDSIPGLGDKTIPTLLAYYGGPLRFDTAKQAVAFAGLDPRQHQSGSSVRGKPRLSKVGHARLRKALYMPAMVATDTHGLGPRPETAPGRLWQATDADPGRHDAKTAVRRLRRAALRTAF

SEQ ID NO: 40522 - protein, 355 aa, unidentified
MKYYTSTTQFNCGIDLHARQMYVCLMDRDGHKLVHTNIKNNDFAFFLQRVAPYRHDLTVCCECMFGWYWLADACQAAGLPFVLAHALYLKAIHGGKNKNDRIDSEKLAHLLRTNLIPPAYVYPADKRPLRALLRQRLFFVWRRAELLARIHSHQLAHNRPPLRQTRRVRDPWEAQLLAAEDHPLRQLALKNDLAMIKHFDTQIFQLEEELQRQAKKSASREYALLQTVPGIGENLGMTILCEIGDIERFPSVKNFLSYCRLVKGTVASAGKIKGLRGAKLGNPYLRWAFGEAAVIAKRDHAVIGPLAQRLEARMNGNKFKANTVVAIKLARAAYYMLKSQTVFDPDRLVAALSRN

SEQ ID NO: 40523 - protein, 348 aa, unidentified
MNQFIGLDGHKNSCTFVVINEKGKVKQKAVLPTDEKALLEFVKSIPGRRHLCIEEGTQSQWFYEIFSDHVHDLAIVQGRKSPGNKDDERDARNLAERFRTRDLGHRVQKVPDSLATLKDLVRSYEMLNTDLVRVKNRIKHLYRSRGIAYSKTGCPFCTGRGGCQKPGFHQRLQLLRTQQESLKPLKAEAQKAMVTEANRHPMARILQTAPGFGPVRTAELLSIVIDPYRFRTSRQFWCYCGLAIVGRSSANWVQKPNGELSRVKINHTRGLNQNFNHMAKAIFKGAAVTVLTSMPTEPLRADYDRLLANGTKPNLARLTLARKIAALVLAMWKNKEAYDPGKYRVTSI

SEQ ID NO: 40524 - protein, 355 aa, unidentified
MVTIGVDAHKRVHVGIALDDAGQEIGHWRGPNSVVGWESLLGWVSAFGESRAWGIEGAWNYGRGLAQHLVEQGETVYEVNARWTAAGRRRARTPGKTDRLDAQAVARCVRQEAPHLPRVGADDATAVLDLLTSQRETVLTETTRLRNQLHALLLQLDPEYRDRLPSMDSSTGLEALERYQAAPGSTVLQQERAAAARRLAQRLRIASQQADELKAQIETRTEEAGLLPLIAIHGVGLLIAGTLAGILGPGCRFRSDAEFAAYAGVAPLDASSAGYVRHRLNRGGNRRLNSLLHMVALTQLSTWKPAKDYVKRRITEGKTKREAMRALKRFLARAVWQAWKRCLAISNGKGNAQPA

SEQ ID NO: 40525 - protein, 305 aa, unidentified
MSPDGRHRTKKFANTTKGHDELVSWLKGHKIDHAHICIEATGTYMEPVAECLYDAGYIVSVINPALGKAFAQREGLRNKTDTVDARMLAEFCRQKRPAAWEAPHPLERALRALVVRHQALTDMHTQELNRTETAREVQRPSIDAHLLWLEAELKRLEKQIKDLTDDDPDMKHRRKLLESIPGIGEKTSAVLLAYIGLKDRFAHARQFAAFAGLTPRRYESGSSVRGASRMSKAGHVSLRRALYMPAMVATSKTEWGRAFRDRLAANGKKGKVILGAMMRKLAQVAYGVLKSGVPFDASRHNPVAA

SEQ ID NO: 40526 - protein, 379 aa, unidentified
MPMTMRYVGLDVHAETIAVAVAASDGSVRELGTIRHRPEAVRKLITKLGGPAQLRVCYEAGPTGYPLYWQLTALGVACDVIAPSLVPTKAGDRVKTDRKDAARLARCYRAGDLTAVWVPDAATEALRDLVRAREVTKQDQLRARHRVSKFLLRHGCQRPDGMRPWTRAHAQWLARQTFAGPTLQVVYEEYRAALALLTDRVVRLERAIGAALPTLAPAQYALVGALATLRGVRQITAATIVSELGTLRRFATAPQLMSYAGLVPREHSSGSHVHRGAITKTGNAHLRRVLVEAAWAYRHRPTPASGVLRARQHGQPATIIAIATKAQQHLCPRYRRFLAHGTPPLAVATRIARELLGFIWAIGHAVEPPPASLGAPMSA

SEQ ID NO: 40527 - protein, 362 aa, unidentified
MTKHIFIGIDLGDKNSVARIAMDREKSERFTFVNNRQGRGRLLREAQRRSQQAGGAKIIMAYEASSCGFVLSDEAEAAGVECWVLAPTKMEKSVEQRKHKNDDRDAEDVLDKLRGHILAGNRLPTVWVPDRQTRDDRELIRMRLELVDKQTQIKSQIQMLLKRHGLERPSGIGSGWTMGYRRWLEALSESESLGWGSRQALHSLRQQLQFIEQEIERLQKPLEQLANEPRLKPIIEELRQESGVGLITAMVYKTEIGYAGRFRRGRQVGKFAGLTPTSHESGQQHDRKGHISRQGPPRLRKVLCQASWAHLRHHDGPLRRSYQQLVSRNPKKKKIALVAVMRRLAVRLWHRMRKVEMQLAQD

SEQ ID NO: 40528 - protein, 361 aa, unidentified
MQIIGCDLHTRQQTMAMLDTKTGELVEKILVHEASNVRNFYSTLPGPVRVGIEATGSMQWFVNLMEELGIECQVGHPAKIRAAEPRKQKHDRRDADLILKLLLENRFPSIWLPSKELSDLRALLLHRHQWVRMRTRIQNALQAIALANGLRRGPSLWSQAGQCTIASLPLAPHTAHRRSELQAMYVKFEAEIEKLNQRVEEQACERPGARLLMTHPGVGPVTALATDVFLGDPTRFADGKALASYVGIIPSEYSSGGRQRLGGLSKQGNPLLRFLWCEAAVHAVRRDPELQRFYRRKLIQKGLGKARVAVARKLGIRLWIMLRDQIDYNEFCRRGQMRQKNGDACAGMPETRYGAEQSPAD

SEQ ID NO: 40529 - protein, 417 aa, unidentified
MTEPAAYTVYVGIDWATTSHEVCVLSPERAVVATRRVAHTAAGLDELVALLATFGSATAVAIGIEMPRGALIEALLAHGYPVYAINPKQSDRFRDRHTMAGAKDDRLDAFVIADALRTDRPCFRRVQSDEATVLQIREYSRIDAELRDEQSRLTNRLREQLYRYFPQVLTLCPAVDEPWVWALLAMASTPAAAARLRRPRLAACLKTYRIRRLTADDVHAALATRAMVESAGTIAAAAAHVALLLPRLTLVHAQQRTCAAALTHLLETLSAAHDTDPSAPTPSDVQILRSLPGVGLKTVAALFAEAADAIATRDLAALRAHAGIAPVTKRSGTRCVVVMRRACSGRLRTALYHASRVSAQCDAGAKQMYAALRARGHSHGRACRSVADRMLRILMAMLRTGTTYVTPTPAAPVMQPA

SEQ ID NO: 40530 - protein, 391 aa, unidentified
MNRNTGMHAGQVIGWINGLQVVGMDIAKSVFQIYTADMKTGELRDKRLKRDKVLEYFRLMAPAVVAMEACGGAHHWARQLQKLGHQVRLVHARAVRPFVQGNKTDVTDARAIWLAVQQSGMRFVAVKTEAQQAALTLHRQRQQLVKMSTMQLNGLRGLLYEFGVTLPLGRKAMLAQVVSAIDSVAPVLPKVTVDSLLEQVQRIAQLRQAVDEVEVILKQLIKQDRQMQRALTIPGVGILSATAAVATMGDPHHFKSGREFCAWLGLVPRQEGTGGKVKLLGISKRGDKYVRTLLVHGARAVLLRKAQSSDWQTELQKRRHKNVAIVAQAAKIARTIWAVLAKDQDYQANHKSVRPQQSRAAAQEPSQDASPTCPPQRPFVAGDARRRGQVS

SEQ ID NO: 40531 - protein, 383 aa, unidentified
MNEPAPVSSFIPRDYDIFGGLDVDKKGMAVTFTDHGTMRKSLKLPYSASQLLNYTRKHFPGQRVAFVYEAGPTGFGLYDELTAASHPCLVVSPSMVPTAPGQRVKTNRLDSRKLSEGLRGGQLRSIHVPAESYRELRHLVQLRDTQVAQLKATKCRIKSLLLYEGIPFPAANGKWSGRVLRELAALPCSATVRFKLERLIDALQFHFQSAATVQKEIRRFCQNDPELRQSISFLASLPGIGSITATHALARLGDWREISNVRQIAGFLGLVSSEHSTGDKENRGPITRSGDSRLRNKLIQCAWVAINKDPDLRAFYRRIYERQPKKVAARKAIVAVARKLTTRMYAVLKEQRPFVIRVDGSIAPLTTEETVGPRVRLDTAQSD

SEQ ID NO: 40532 - protein, 340 aa, unidentified
MEKTTTIAVDLAKSVFEVAVSEAPGRVSERKRLSRSGLAAFFANRPPAVVLMEACGSAHHWGRELLKLGHDVRLLPPACTAKYRIGNKTDRTDADAMLEANRNEKILPVPVKTIPQQTLTSVHRLRQAWMATRTARLNSLRGLLRELGVAIPLGATVVVPKVMDAISQGRVPEDLHPLFLVSVAEIRKLEENVKECDRLLARLARSIPVARALQEIPGIGLLGSTALIPAVGDPHRFRSGRKMAAFFGVVPREYSSGHRRRLGKITKRGDTYVRTLVIHGGRSVLQAAHRRKNPDRLHRWALEVERRQGRNRAAVALANKLIRLAWAVWTRGTRYDGALA

SEQ ID NO: 40533 - protein, 320 aa, unidentified
MRNTVGLDISKLTFDATAIVGNAEYSAKFDNDSKGLDQFSDRLKSLGCQNLHICMEATGNYYEEVADYFAQYYSVYVVNPLKISKYAESRFKRTKTDKQDAKLIAQYCRSAKESELVKRQKPTDEQYRLLRMTAAYAQIKSECAAMKNRHHAAKDEEAAKAYAQIIKAMNEQLEVLKEKIKEQTEKPNCKEGVKRLETIPAIGRMTAAVLFHHLTSSKFETSNKFAAFAGLSPQQKESGTSVRGKGKLTKFGNRKLRAVLFMPAMVAYRIRAFPGFIARLEEKKKPKKVIIAALMRKLAVIAYHVHKKGGDYDPSRYKSA

SEQ ID NO: 40534 - protein, 419 aa, unidentified
MFEQGKRTHQSAEVIFSHRKNRAFGQVDVRGHRDFDRRALRGLNEHRRRRYVLHIINLKSSDDIVASIPKVSREWPMQDVATVGLDIAKQVFQAHGADASGETLFNTKIKRENVLEFFSKLTPCLIGMESCATSYYWARQLLEFGHDVRLIHTSYVKPFVKRGKTDANDAEAINVALTQKTMRFVPVKTLNQQAAITIFRTRSLFVSQRTQLVNALRGHLAEAGLVAAKGIQNYSKLVNLMETAADTVLPTVMKQALTDICDQIHRLNDLVTKLDKEIERRVRHDENACRLLTIPGVGPKTAMCVIATIPDIHRFPSGRHFSSWLGLTPRTHSSGGRSVLRRITKMGNSELRTMLYLGGTVIMMRDKKTPIGRWASRLRARRPYKVAVIAVANRIARIIWALLTNGGVYDPTYGREASA

SEQ ID NO: 40535 - protein, 362 aa, unidentified
MESMRWVGVDVHAKESVAVVLDQATGEITAQRIAGRPDEVVEWLSTLEPPFRAVHEAGPTGYGLVRRARERGLDVVVCAPGHILKNATDHIKVDKRDAVRLARLLSAGELRLVRVPEPEEEQLRDLVRSREDLRVDLTRIRNRIGKFLLRREIYAPKHTETWGVLHRKWLQSLRFEDRASEPVFEDAMHAHDILVARREQLERALAEDRRDLALGAHHRPAQVLARHRHPIRARPGRRGGRLPPLPTPTFLSSYLGLVPSEHSSGEKRRQGGITKAGSKHARRLLVEAAWQYRHVPRTSHHISQRQRGQDQRVIDIAWRAQRRLYKRWQRLHDERRKRRTVVAVAVGRELAAYCWEIATLSS

SEQ ID NO: 40536 - protein, 367 aa, unidentified
MALKIVYKICCGIDVHKTFVVACVASTSDKGITSYESHRFSTYTSGLKTLLQWLIDRNCKDVCMESTSKYWIPVYNILEKGCSIVLAHPKYVKAIRGKKTDKKDAKWIADLFKHDLVAGSFMPPSDIRQLRDLMRYRFKLTCFKSSEKNRLQNCLTVSNIQLGNVVSDTFGKSAQAILDKLLENPADTSFDLEPLVYKSLKKKLPELRDAIDGFITPEQAGKLKIIKDHYDNLESRKAELEELILALAAPYQQELAILQTAPGISSDFTAIGIIFEIGTNMGAFPSAKHLCSWAGLTPTNNESAGKKKSVRVSKAGCYIKPLLVQCANAVIKSTKHPEMRNRYLRLKKRRGHKKAILPENRSSSSRA

SEQ ID NO: 40537 - protein, 434 aa, unidentified
MDEVTDEPLYRDRVCGIDIGKAGMVATIRVPSDASPARRMAETRSFGTTRREVLALADWLRAWQVPAVVMEATSDYWKGPFYRLEAEGFECVLADAKQVKNLPGRPKRDPSDSRWLAACFERGAVTPCFVADPEFRVIRLHTRYRRDLIGERTRDKQRAEKLLESAAVKLSSVVSDLHGVTGRDIMNHLITGERNPKVLAQMARGRARAKIGQLEAALDGAEFFTGHHAALLKLMLERIDRLAAEIAALTEVIEQLLAPFEEQLAQAESMPGWGRRTAQDALAETGPDMTRFPTGAHLASWAGRTPLDNSSGSRTRRSKSKKGNRYLAAVTGETAVAASKTQTREGARYRRLARRRGKLKAQVALGNTQLKVYHKLLSTPGLRYQDLGPDYYDRQRGTRRQIAHHVAKLGALGFEVTLCRIPGPDPGPETHQAA

SEQ ID NO: 40538 - protein, 402 aa, unidentified
MTYDYVIGMDVGKFFHHACVLDQEGHQVQSKRINQHEASLRELFRKFSAGGKQVLVVVDQPNNIGRLTVAVAQAEGVDVRYLPGLAMRQLSRIHAGNAKTDIRDAYVIAYAGCHLPEALRSVDRVEQVFLELKILNGIDEDLSRSYTRLINQIRSALVGTYPAFEQVLRGQMIHRKWILQLLAKYGGPTKIKRLGKRRVVEIARKHRARNPEPIVDALFAAITEQTIHIAGGHYAELGVAMSAKDALLKLEHRKEIERQVVAIIQDIPHTAILLSMPGIGPKTAAQILMTVGDMSDFPTAGHLASYAGLAPRTHQSGTSIMSNALNRAGNKKLKNALWQSSFASIRFHERSQQFYERKRQEGKRHNAAVVALARRRLNVLYAMMRNKEFYRDTTAETGAAAA

SEQ ID NO: 40539 - protein, 342 aa, unidentified
MNYHIGIDAHHSCSFFQHMDTEGAIGLSERVATDPDSINELLAQLDEPTTITFEAGRNYWWLHEFFANHPMVSQVNVVDPRRSRKLASELSVLSGYGRAKTDFIDAEMLAEQTRRGLAPTIHVPTAEQLEKRTMCRHRFNSVMNRTRAKNLIHAILDLHGYSAKIAGLLTPSANRDQFMASLPPYVAFIVEQFVARIKLFDHQIASCETQLDRLLPESHPQMKIVMSAPGFGIVLGRMVHTEILDIAYFKEPKYLISYSGLAPIENESAGRKGSIKLNKHCNYYLKYAFVEAAHNAREHPRYRRKYDLDVKRHGKIIAKLNLARRLAKTVYWMLTRQQLYRA

SEQ ID NO: 40540 - protein, 343 aa, unidentified
MNEIITIGVDLAKSVFQVHGVDAEGGVVVRRQLRRGQVVPFFKKQRSCLVGMEACATSHHWAREIAALGHEVRLMAPRYVKPYVKRNKNDMADAEAICEAVTRPTMRFVEIKTREQQSVLMLHRTRQLFVRQRTALINALRAHLAEFGIVAGIGRNGLERLLKVIGDGDDDRVPPAARDCLLALRDQLEMVKHQILDADRRILAWHRSSEVSQRLDDIPGVGPLIATALVASVPDPHVFKSGRDLAAWIGLVPRQNSTGGKERLGHISKAGNRYLRMLLVVGALSVIRRAKQMGYTRRPWLARLLERRSTKIAAIALANKIARTAWAMMAHGTYYQEPASQAV

SEQ ID NO: 40541 - protein, 380 aa, unidentified
MDVHSTNFTLCSFEPGYGFEADKIFGQTQIKEDIFNSTVKYINKLKSMRPDVDVVCGYEAGCLGYNLHRKLKAKEIESVILAPTTMAVSRNCSKKKNDYRDAITIAKCLASSAYKAVYIPDDKDEDVRDFIRMRDDHKTALKQIKQQLNAFCLRHGHHYDKTKWTGLHLNWLRKLELSKLQRETVEEYLATYETLTSKIAALDVRIEDIASEERYAEKVNKLKCIKGIKTHTALSFICEIGDFNRFKSADKFAGFIGLVPGECSSGNTERMLGITKAGNRHLRRLVVEISNTYRRGTVGRKSAALKERQKDMPKDVVAYADKATNRCQRKYQRMMFKGKNSNQAVAAVARELCCFIWGMMTGHHSRTAQAEASVYRSELD

SEQ ID NO: 40542 - protein, 360 aa, unidentified
MQAQNSELSFKGQSIFVGIDVHLKSWTVTILTESLFHKTFTQPASHLVLHNYLTKHFPQATYYSVYEAGFCGFMPHYRLRELGIKNIVINPADVPTTQKEHLQKDDPTDSRKLARSLRSQELTSIYIPQLSSLGDRTLVRLRASLVSDMVRYKQRIKSLLYFYGISFPEEFKKPHTHWSSRFMKWLRESVELAHETDRQSLQILVQQAEQQRRLLLEVTKKIKALSSSQKYEKNIKLLRTVPGIGLITAITLLTEIEDIGRFPNTDHFAGYIGLVPTRHSSGENTRVGEMTFRGQKRLRKHLIESSWVAARLDPALLKCFNQYTMRMEKNKAIVKIARKVLNRIYFVLKNQMEYVPSVVK

SEQ ID NO: 40543 - protein, 444 aa, unidentified
MPKHRPNSKHIRKTIIPQPLKTINTNIAGIDIGSSEIYVAVPPDRDQISIRVFSSFTCDLYNLAHWLKQCSITSVAMESTGVYWIPLYDILQHEGIDVCLVNARYVKNVPGKKTDVLDCQWLQQLHSYGLLNNSFRPSEEIRRFRTIARHRDMLLKYRAAHVQHIQKALHQMNIQLDNVLSDITGVTGFAIIRAIIAGEHNPETLAMFRDGHYRCSLQDIIKSLQGTYLDEYLFELTQAVELYDFYSKQILDCDLRLSELYERATPSPNATKPLKPPVKRYKRTSQAIPFDLRSCLYRLSGVDLTQVDGLSALSVQTILSETGVDMNKWPSVKHFTSWLSLAPNNKITGGKIISTASKKTTNRAAQAFRLAARSLYHSKSALGAFYRRIHAKYGAPLANIATTHELARIVYAMLKYHTEYHDIEELYYDTYFWQSHSFGKRTFS

SEQ ID NO: 40544 - protein, 350 aa, unidentified
MIIIGVDFHPEFQQIAWVDTDSGELEERQLRHREEAEAFYRGLVTEGKKVRVGMEASGHARWFERLLGELKFELWIGDAAEIRTKRVRKQKTDRQDAQLILKLLLEDRFPRIWVPSWENRDLRQLLWHRHRMVQARTRIMNQLQAVALNEGLRCKKRLWGERGRQQLESFRLAPWASRRRRDLLELLDRLNPTIAELSQAIEQEVERCPEAQRLMTHPGVGPLTALAFVLIIGKAERFQCGKQITSYLGLVPLEESSGNRRRLGHITKQGSSILRFLLVEAAQVTVRSLPEWRSKYFHLMMRRGRKIAKIAMARRLAVCLYWMLRQGSDYQQWNKFGSHAGQPGNRHGVQ

SEQ ID NO: 40545 - protein, 373 aa, unidentified
MKKVRFLGLDVHADTIAVAVAEPEGEVRSLGIIPNREESVRKLVKKLGPAEQLQACYEAGPTGYVLYWQLTALGVKCEVVAPSLVPVKAGDRVKTDRRDATKLARSYRAGDLTAVWVPNQEHEALRDLVRAREAAKQDQLRARHRLSKFLLRQGRRVPSGFKVWTQRYQDWVKEHVHFEQPAQEYTLMDYVHEVEHMDDRIRRLDVAIAEAVKLAPSGMQEVIQALQALRGIAQISAVTVVAELGKISRFDRARQLMGYSGAVSSEHSSGKRMRRGQITKTGNAHLRRIAIEAAWAYRHRPAIGPRLRKRQEGLSEEVKEIAWKAQHRLHKRYRTLSAAGKEKQKVITAVGRELLGFIWAIGVQAERNSKRVA

SEQ ID NO: 40546 - protein, 364 aa, unidentified
MDECTHIGLDVHKDTIAVAMLRPGTTDCEERLIPNTPEALRKLLARFPDRDGLRTCYEAGPTGYDTHRLITSLGVACEVIAPSLIPRRSGVRVKTDRSDARNLARLHRAGELTAVRVPTPAEEALRDLVRAREDLKSDRRIARQRIRSFLLRYGKRYPSPGARWSFRFEVWMRALRFDEPAAQAAFEHLLGAYFVRDAQLAAVDAQIEELASADPLALDVARLRAFRGTDTLTAVTLTTETCDFHRFPSAGSYMAFTGLTPSEHSSGASIQHGAITKTGNAHVRRVLVEAAWAYRYAPAVRGAHARRLEGQPPEVAAYSWAAQCRLHATYRKLAARKGPNKAVTAVARELSGFVWGAMTDRMTV

SEQ ID NO: 40547 - protein, 344 aa, unidentified
MEAQVSVVGLDIAKSVFQVHGADSAGKAVIRRRLKREEVEVFFRALPRSLVALEACPGSHFWARLLRDIGHDVRLIPAQYVRPYVKTNKNDAADAEAICEAVTRPTMRFVPIKEEMQQEVLVIHRVREMLIRQRTQLINSIRGHLAEFGIIAPNRAHNIGVLTKLIEDENFEELPSVARHALRYLVEQLREVKSKLFRIDQDLIRVVKGSDACRRLMTIPGVGVVTATALVSSMREPSDFKSGRHFAAWLGLVPKQHSTGGKDSLGGISKRGDGYLRRLLIHGSRSIMRWRGRSWTWLAKLRDRRPANVAAVAVANKTARIVWALLRFGGTYGHPGEGATMRTA

SEQ ID NO: 40548 - protein, 386 aa, unidentified
MDQYTAKYVGFDVHKEMISVAIAHEGRSEPNYYGEISNEAEALRKLVKKVVSNGESVSFCYEAGPCGYDVYRRLIDLGQRCEVVAPSLIPKKPGDRVKTNRRDAMTLARLYRGGELTPVWVPDKEQEAIRDLTRAREDMKIMEGHAKQRLGGFLLRHGKKFGGRSKWTQAHFRWLEGIRFEMPAQQIVFQEYVDMVKHMKGRVEALEEEMRQAMPGWSLAPVVTGLMALRGVDFLTAMTVVAELGDISRFTSAPEIMAHLGLVPSEHSSGDRKKRGGITKMGNGHARRVLIEASWCYRAPARKTAHLQRRAEKTSESVQAIAWKAQKRLCKRYWYLVLKGKRPVEACTAVARELSGFIWAIACEVTREMAVHKAKVACSTKSRKRG

SEQ ID NO: 40549 - protein, 348 aa, unidentified
MRNYSSSKRIKTIGIDLAKSVFHLHGVDASGKVVVRKRLSRSKLIEFMAQVSSCLVGMEACGGSHYWARKFSDMGHDTRLISPQFVKPFVKGNKNDEADAEAICDAVQRPNMRFVPIKNIEQQDIQSIHRAREQVVCRRTAQANQIRGLLMEYGLVIPKGRKVLCAHIPDILADADNGLSVMFRELLSGLWEEMIHLEQRVSEYDLQIEVLSKQSDVCQRLMTVPGIGPMVATALLASVADGKAFKSGREMAAWLGLVPRQHSTGGKPRLLGISKRGDTYLRKLLIHGARAALRWTDKKHDKRSVWATALKERRGQNIAAVALANKTVRTAWVLITRHEEYQMSTAKT

SEQ ID NO: 40550 - protein, 386 aa, unidentified
MQNLNDFSRSRIALKPDGTLIAVIEMSLSSWLVAGIAPGVERQPLKKLTVDESALLKLLHRWREEAEKAGRRIERIAVAFEAGRDGFWLARWLMARSIEAHVIHAASVAVSREHRRAKTDRLDTELLKRAFLGWLRGERDHCKMVAIPSIKNEDAKRPNRERENLVSEQSRIINRMKATLIRLGIRGFNPKLKRAAGRLDDLRTPEDEPIPPNTLAELRRDMERRRLVRDQIRQIEETRLERLDHAPDDGPHAMVRLLARVIGVGIETADMLVHEVLSRNMRDRRAVARYAGLTGSPDESGRKRREKGLARSGNGRVRRGMIQLAWRFLLHQKDSALARWFRVRTENGRGTRKRMIVALARKLLIALWQLVRQGVVPDGVVLRPAQ

SEQ ID NO: 40551 - protein, 421 aa, unidentified
MEETSDLSELAWRVAALDLGKATLTACVRVPHADKPGRRCQEVREYRTTTRALLTLAADLRGHGVTLVAMEATSDYWKPVFYLLEAEGFTCWLLNARHVKNVPGRPKTDKLDAIWLAKVVERGMCSPSLVQPRDIRRLRDLTRYRRTLIRQRTAEKQRVEKLLEDAQIKLSAVVSDIFGMSGRAMLEAMIGGERNPRALAQLAIGRMRAKLVVLEEALTGHFDDHHAFICRMMLDRIDDITRQAAELTARIEEQIAPFADAAARLDEIPGVGRTGAQELIAEIGVDMTRFPDAAHLVSWAKFAPIDKNSAGKKKTASTGKGNPWLGATIGEIVSAAARTDTFLAERYQRIARRRGKRRAIVAVGNSVLTIIWHLLADPEASYRDLGPGYYESRISAQRRQRNLIRQLERLTGQKVALQPAA

SEQ ID NO: 40552 - protein, 417 aa, unidentified
MNKNANPINRVIGLDAHPDTFTAALLQGTTPAAAVLEKTFNQVPLAQLSRWAQKHTTAQDLFVLEASGNSFHVVRTLARMERQALVLESGQLGKLKEAHANNDRISAVRIGKAYLAGTAKAVWVPDLKTQERRDWFHSHRKAVQRTTQLRNRLRSYLSDQGVRLAQGTPLARGPSAGEQLRQLKNWSPRQWQVLEGLLLELRHADEQRAHWRSLIAQEVLTDPQLLSLVRLCGVREMVAFALGAIIGDIHRFAEPRKLVKYIGLNPAFDHSGQGEWSGGIAGHGRKDLRGLLIESAQSILRSGHPLARWGKKLLARKGSRNLAVGAVARKLTVAIWYLLMGRWTQLEELDASLAVKVGKIITSVGTQGLKQLGQTRKALREASHRSLLTGRVYVLQPHKTSTPQLEKNKNTFKKKLV

SEQ ID NO: 40553 - protein, 369 aa, unidentified
MAETTEAFVGIDVAKLRNAVAVADAGRDGEVRFYGEVDASPESMRRLAAELAGKHQRLHFCYEAGPTGYGLHRLLTGLGHSCVVVAPSLIPRKPGDRVKTNRRDALSLARLLRAGELTPIWVPDTAHEAVRNLVRARAAAVKDVGLKKRQVGAFLLRHSRLFPRKKNWGARYRSWLETQSFEHPADQIVLQEGIESVRLAEERLARLDRAIGEFLPTWSLAPLVEALQALRGVDLVTAVTFVVEVGDIRRFESPRQLMGYLGLVPGERSTGETVRRGSITKMGNARVRHLLVESAWTYRHPPRVGKAKLPKLERVSPRVREIAWKAQSRLTARYRALTARGKKTTVTCTAIARELAAFMWAVAREARPA

SEQ ID NO: 40554 - protein, 402 aa, unidentified
MNAVGIDVSKGKSMVAIMRPFGEIVSTPFEIKHTSSDINSLVKLIKSIEGESRIVMEHTGRYYEVLAHQLSKANLFVSAINPKLIKDFDNDSLRKVKTDKADSVKIARYALDKWQNLKQYSVMDELRNQLKTMNRQFGFYMKHKTAMKNNLIGILDQTYPGVNTYFDSPARSDGSQKWVDFASTYWHVDCVRKMSINAFIDHYENWCKRKKYNFSKSKAEEIYGKAKELVPVLPKDDITKLIIKQAVDQLNSASITVESLRTLMNETASKLPEYPVVMAMKGVGTSLGPQLMAEIGDVSRFTHKGAITAFAGVDPGVNESGSYEQKSVPTSKRGSSDLRKTLFQVMDVLIKTHPQDDPVYQFLDKKRAQKKPYYVYMTAGANKFLRIYYGRVKEYLASLPES

SEQ ID NO: 40555 - protein, 295 aa, unidentified
MLIFEGGCDFHSRFQQIAMVNTETGELIERRLDHSNGEAKKFYAELQKPVRVGMETTGYAQWFERMLAKLGYELWIGDAAEIRAAMVGKQKTDARDAQHILDLLLTNRFPRIWIPSPGERDLRQLLRHRHKMVCLRTSVRNQLQALAMGQGVYRKRKLWAAGGRTELEGLALDPWASRRRQELLDILDRLDPCLAELDRAVAKEAEQRPAARCLMEQPGVGPVTALMFVLTIGPVERFRRSKQIVSYLGMNPRESSSGGRQRLGAIRKQGNSMARFLLVEAAQTASRYDDELRRD

SEQ ID NO: 40556 - protein, 359 aa, unidentified
MHQKVTEKTFEGQSIYVGIDVHRKEFKVSIMAGNVFFKTFSSPPEAQAIVNYLRNNFPGGSYYSAYEAGFSGFWLHRALMKMSVNSIVVNAADIPTTDKERQQKEDRRDSRKIVNGLRLGQLKGVHIPSERAQHDRGLLRIRDRIVRDLTRNKNRIKGLLYFYGIEYPERFRSNGSHWSGAFITWLECIQFDYQTGTFGLKAYLDQGREQRALLLRLNRQIRELSHTNEYRRNFELLISVPGIGPLTAMKLLTELESVDRFTSLDQLCSYVGLVPSTHSSGENRTDNGITTRRNSSIRGALIESAWIAIRNDPALLAFYQKHCKAMNGNKAIVRVAKKLLSRIRHVLQNQEPYQKSILR

SEQ ID NO: 40557 - protein, 370 aa, unidentified
MRHSSTLYVGLDVHKESIAVAYVAQAHHAEVVSIGNIGTRQCDIDKLIRQLQSKSPHLVFVYEAGPCGYWLYRYLTKKGQVCWVIAPSLIPKKPGDRVKTNRRDAIKLARLMRSGDLTPVYVPKVEDEAIRDLCRAREDAIRDLKAAKFRLKAFLLRHDIRYTGRATWGPAHLRWLSEVVCPTPAQQIVFQEYVRAVTEHTERLERLEQELKDQVQTWRLAPVVEALQALRGVQFTVAVTTVAELGDLTRFDNPRQLMHYLGLTPSEYSTGERRRQGGITKTGNTHARRALIEGAWAYRYPAKVSRHLQLRLETVPKPIQDISWKAQVRLCKRYRQLSARGKNPNQVVVAIARELSAFMWAIAQEVPLVS

SEQ ID NO: 40558 - protein, 403 aa, unidentified
MSQPTRFIGLDIHKFYMVAAGVDADQNEVLSPQRVTWERFDAWVTRALTRRDALVIEMTTNTWDVYDALVDHVHSVCVVHPPHVKAVVNPQVMTDKIASRTLAKLLAAKLLVSIWVPPREVRDLRMLVAEYHKMSVLGATAKHRLHALLHRHRILPEAGLEIFHPDVRPWWNLLHLSPAEKACMNTDLDTLAFAQSQKKLLDAALSECAAKDERVQLLVQLPGVGMLTAITVLAAIGDIRRFPDEDHLVGYAGLGASVHASGEKRTSGGITKHGRRDLRRVMVDAANHAVAHHPYWKKELARLEPKLGRSRAVVRIARLLLMAVWHTLTKDVADKNTDARSVACSLFLYAYRVKVRNLGGMSAKQWTRHQLDRLGIGRELSEIPWGTKKVKLPPSSLKKGELP

SEQ ID NO: 40559 - protein, 367 aa, unidentified
MSNSRIQSKALNAKLSWEIIGLDLAKNDLSFVGITLEGEIIRIDRLSYEQLVEFSRDTDPTTFAMEPCCESHYLTNQLELYGHQCRIIPGKAVQNYIDTYFSGQKNDLNDAEALAFLGQQKRLKFVRAKNRDEMQIQTLLTVREHYIDEYRKTLTSLKGVAQYWGLRLAKSLSSEMRLIALIEDADLPEDVKGIFKEMVKTYKDLQKKARELTKKIEAFTQGDEFCQKIRKIPGLGPISSAGLKVAIGDIARFPSPRTLPAYFGLVPRNITTGHSLKMGKITKRGDKLVRTYLVQAASSLLMLDGKGKFRDCQLRRWIQRKRQTLNHGKLVVALAAKLLRIVWAILSKNEAFDYRKAGVAKCSLPKT

SEQ ID NO: 40560 - protein, 405 aa, unidentified
MEVIIERVCGMDVHKDNITACIMTPGGKEIQTFSTKTIFLIKLMDWIRSHGCTHVAMESTGVYWKPIVNLIEAEELEFFVVNAQHMKAVPGRKTDVKDAEWIAQLLRHGLLTASYVPDRNQRELRELVRYRRSIIEERSRQLNRIQKVLEGANIKLGSVVSDIMGVSAKEMLNAIADGEEDPTKLAGMARRSLKRKKDELELALRGYVNPHQRMLLKTILTHIDFLTEQIEKLDSEVTQRVSSYQEDIERLDSIPGIATRMAEQILAEIGTDLENQFGSAPRLCSWAALVPGHNESAGKRKSTKSKKGNKYLKSALTEAAHSVGASKNYLGAMYRRTAARKGRKRAGIVVAHAMLRIAYYLLTRKEMYRDLGEDYFDKQKEASMVRYSVRRLEKLGYSVSIEEVS

SEQ ID NO: 40561 - protein, 403 aa, unidentified
MESYAGIDWATEEHALCVVDEAGATLAGELYPHTEEGIREVVARMRALGVCRVAIERPEGLLVERLMEAGLVVLPVHPNKLAATRPRYEVSGGKSDGFDAFCLAELARTDSHRLPVLRPQADETRALRELTRTREDLVGVRVRLGNQLRAQLDGFWPGAARIFAAVDSQIALAFLRRYPSPAETRGLGEKRLAGFLEREGYSGSRSAGELLERLRSAPTRDLGAVEAEARRAAVLGLVSALEPIVAQIAALGSRIARGVHAHPDGKVFAPLFRNRKSVLTTARLIAEIGDDRARYPNAEALAANAGMAPVARESGKRKTAFFRRACDKRLREAVSCLANSTRRHHPWARSVYLAARERGLDHPHAIRILGRAWLRVLWRCWQDEVPYDPAKHGNLRRLQMAGG

SEQ ID NO: 40562 - protein, 345 aa, unidentified
MNKSVSSNPTTVFCGIDVSAGSLSVALIEPDHCVCQREFANSASGHKALLGWLGKYNALVRVSLEATGIYSLDLALALDAQDSVEVAVLNPRLVNRFAQTLRRSKTDAADAQVLAEYSQRMPFTPWQRPGIQELRLRAISRYIESLVIDLAGVKNRLHAAERASTTPRAVLVDLKQAQAAFLRRLVKMRREAMMLVQAEVALRERFQLLVSIPGIAEISALQILSELVLLPAGMTVRQWVAYSGLDPVHQVSGSSVHKPSRISRAGNRHLRRTLYMPTLSAVRYDPHLRAFYRALRERHKTGLQALMAVARKLLHAIYGIFKSGMPYDGRRLFPQIQLAVESTAG

SEQ ID NO: 40563 - protein, 359 aa, unidentified
MYFSGLDAHLRYVTVAVLDRLGGVALETTVPTREPDRLLAVLAPFRPLEVVVETCPFWPWIYDLLVPAGIGFHLAHAKALRAIATAPQKSDAVDARLLARMLLSGLIPEAYPRSADQRELLRLLRHRTALVRFRTRLAGRIHSQLHQQRLSLPREKLLRRATRAWLEATAWPRLTVEQRAIVTTHLELIDHLTPLIRALERRIAAAAAGDATAPLLATIPGIGPYRSLLLAAELVPISRFPRAEHLVSYAGLAPVTRSSGGHTHHGSIPPAANRWVRGALVSAIPSHVRYAPTSPVTVAYEQLKARLGWRVARVAAARKLARVVYVMLTRRTPWHGVPAAGDVRDEVQNSHVAPTTSFC

SEQ ID NO: 40564 - protein, 368 aa, unidentified
MFEHTFIGLDVHAVNVVGHALNPATGEISNHTMPADPALVLEWVRRFESPVKVVYESGPTGFVLARYLRSAGIDCVVAASSKLLRAHGDRIKTDRRDARVLAEMLAVGSVTEVRIPDPEEEALRDLSRLRSGTAKDLAHARQHVNAILLRHGIRYPNDTRWTKEHGLWLHRQRFQEPALQFTYEADVEQAELLAGHLKRIDKQVAVTAAACRYTPVIEALMCLRGIRVTTAFGLAVEIGDWTRFTGSSIGSYLGLVPSEESSGQSRHQGPITKAGNSYARKLLIEAAWQHRRPYARPGERLLRQLDLVAPATRIRALEGNHRLHHKWEAFDARHKMSVKANTAIARELAGWCWSLAAPLQQGEHMNAA

SEQ ID NO: 40565 - protein, 344 aa, unidentified
MDHFAGLDVSVKETSVCIVDDTGRIVREVKVASEPEALLAVLRNPAYHFKRIGLEAGPLSQWLFSALAEAGLPVICVETRHMRAVLKAQINKTDRNDARGMAQMMRVGLYRPVHVKTLRSQKLRMLLTHRQLLLSKAIALENDLRGTLRNFGLKVGMVGKVKFEARISELVESLPDLAVLVEPMLIVRRVLREQIVILHRRLLAIVRDDEVCQRLMTTPGVGPVVSLTYRATVDIPARFRKSKSVGAVFGLTCVKYQSGEVDWDGRISRCGDEMMRTMLYEAAQAMMRSKKWSWLKAWAMQIARRRGMKKAIVALARRLAVIMHRIWIDGTEFRWTREQAAVAA

SEQ ID NO: 40566 - protein, 371 aa, unidentified
MEHTRFIGLDIHKERISIAVAESGRAGAVEYHGEIANDPGAIGKLCDRLRRPGKPLAFCYEAGPCGYGVHRQLTSLGHRCDVVAPSLIPTKSGDRVKTDRRDATMLARLHRAGELTPVWVPDADHEAMRDLIRLRSVVRQIVTRARQHLQGFLLRHGRKHGGGTAWRMAYRRWLSTLAFEHPAQQIAFQDYVDAVMDAERRLKRVEEQIVGLLPEWNLRPVVDALQAMRGIALINAVVLVTEVGDFTRFSNPRQLMAYFGLVPGERSSGQTVRRGGITKTGNAHARRALIEGAWAYRMKPRIGRHKVDRIEALPKVIRDIGWKAQIRLCARYRRLSARGKTANVVNVAIAREMVGFIWSIACVIQSTPTAA

SEQ ID NO: 40567 - protein, 356 aa, unidentified
METAYDGRQVVGMDLHRRRSVLVRMTEDGRRLGTAKITNSPAELRAQIARAGKSPRVVLEATYGWYWAADTLAAAGAEVHLAHPLGVKAFSCRRVKNDERDCADLADLLRMGRLPEAWIAPHHVRELRELTRYRIKLVRLRTSCKDQVHGVLAKLGVEVTCTDIFGKAGSAWLDGLRMPQPYAGKVTSLRQLAGALTTEITLLGDVIADLLAGDRGYQVIQQLPGIGPVLAAVIIAEIGEVSRLSNPGQLCSRAGLTPRHRESDVKVSRGHVTKQGSRLLRWALIEAIQRIPRDCVIGGVKEAIIARRGKEAKNIAKVAAARRLLTLVYYGMRDGQIRCLSGSAREPSAARTARAA

SEQ ID NO: 40568 - protein, 439 aa, unidentified
MTSPSLPVLDPTAAAIDVGSEQLHTSVAGGPPKIFGTTTGQLHALEEWLKSQGVKSVAMEATGVYWLCPYEVLEKGGLQVVVVNGKYVKNLPGRKTDMKDCQWQATLHAHGLLKPGFVPPEHIRRLQDYLRVRTDHITMAGSHEQHMQKALDRMNLKIHEVISDLTGLSGLNMVQAIIKGERNPLALIALCDPQVQKNKVGALREALEGNWKEEHLFALRQAYELWQFYQQKIAECDQAIKQVLLEISGPEDPAHPAPPAVKRGGVNTPEIAGLHSMLWRLCGNKDLTVLPGVADYVLLQLLAEVGTDLGKHWHSEKQFTAWLGLAPGSRQSGKRRGNQKRGRNRAGRLFCVIARSVGRSVDKALGGFYRRIKGRRGGLVANLALARKLAQLFWRLMVKGITYVEQGLKKYEEKVAQTEHRLLQKLASKYSLTLQPKAA

SEQ ID NO: 40569 - protein, 400 aa, unidentified
MNIIGIDVSQGESHATLITKEAEEIAFKFKHNKSGFQILNSYIKPGTIIIFETTGVYSAQLTTYLKNKKVKFYELNPLEAKLRMASLRRNKTDKNDSFKLALLGKTQLAEIKNHCNKQSNSLYESLRILSLRYKQLIKCRTRILNFLRSSLELTFPELNQIFKNAYAVLALQVFRMYCHPDFLVGLTLKEMTTRVYQSVSRRIHKDVIQSYCAQVWLAAKDSYPAVPADSLEIEIISEYCDEIESYNKEIAYIQSKLIKTAVGLDDFKVISSIPGAGQLNSALLLGFTGDIARFDNYKQLNAFLGLDLNRYQSGKYGKGDTINRRGSSQGRAVETDMIRSMLRNQGKIQNHLVDYYYKLKKPPFNKHDKVALIACANHLNRTIINLVHTHQLYNYSKAIH

SEQ ID NO: 40570 - protein, 370 aa, unidentified
MKPNFEPSKWFMQCVGIDIAKSTFTACLCMYEFDMGCSTAPVVFNNNKTGFNQFVKWSRKEALKGYPLRYLMEPTGVYYEALACHLYKLGLDVCVVLPNKARDFAKYEGILTKTDDMDAYTLGMMGCLDKRLKTWTPPSPIFKELRQMTRFVADINKVKTELNNHLESLAHSETAEKSIVKHYNKLIEKIDKKLASNEKAIREKVKQEPGLAERIDRIVTIKGIGYMTVITILAETSGFALITNRKQLTRYAGLDVPAHQSGPVDPKRHISKQGNVHIRTALYFPAIVSTQYNPQMKEFYARLCKKNPQSKMVGVTAIMRKLLLLIYSLWKSGEKYDQEREKPVCSRKKKEAEPIGVQPHGIDIGTVAEE

SEQ ID NO: 40571 - protein, 337 aa, unidentified
MNNYIGIDVAKSTLQVFIPKNDLDIEIANSDNGLKAFYSKLKKQYKKDIDDIVFVYESTGSYSTYLEQFAESKSIKCFKVGAYQSSSFAKVVKNRSKTDIVDARMLSQMHVIATDEDIKIPSRDVKAYQIRSYIKYYQSLVKEEIRSKNYLEAATFNLEDKFVLNQVKKKIKNIQKDQVDIISKTMEIINSNEKYKKAYTNITSIKGVGEKSGVILLYLFLRYPNASRQHITALCGLDPIQRSSGTSVQHKERISKQGLSLVRAILFMPTMTAILHNKEMKLIYDRLVDRGKPKPLAQIAVMRKIILLAHSLYKNDERYDENRYLDFTQTKVDEDMK

SEQ ID NO: 40572 - protein, 368 aa, unidentified
MLQETVVGLDVHADSITAAILPPTSDTPEVVTLSGDLMQVRRLFRRLTEAGPVRSCYEASGAGFVLQRLLAYDGFSCEVIAPSLIPRKPGEHRKTDRLDAIMLARLYRSGHLTVVHVPDEDHEALRRLLRLRETYHRYCTATMQRISGVLRNHGHIFKEGKSAWTKKHRAWLSRLCQDTLEGPLKTALGVELEHLEYLETQQTAMDAELDRYASLPQFRGTVEALCCLRGVKTLTALTLLVEIGDVRRFRSPRSLMAYFGLVPSEYSSGSKEYRGSITKAGNVHVRRLLVEAAWNNRHNAAAALILKRRRQGQSPNIVAIAVKAQHRLVNKFLRLDHRKHRHVAITAVARELCGFVWAILMAVDINRN

SEQ ID NO: 40573 - protein, 407 aa, unidentified
MDEPCDWPVFAGLDWGGSQHQLCVVDHRGQRLMQLRVEHDVAGLRVLDAELSRHGDRLPVAVERSEGLLVEHLQARGHVVFPVSPRIAARARERYRVAAVKDDRFDAFVLADTLRHEHGHWRPLAVPSPLLAEIKALTRDRDRLLETQQAVESQLRMILEAYHPAPVRLFSSVDRQITLHFVLDYPTPATASRVKTTRMSGFLARHSYTGRKPAQILAERLRANLLTASAGTVAGKSFSALAYTRLLQQLNTQLAEYDDAIASAVAEHDDAPIFASFPGVGPVLTAVLLAEIGEDRTRFPRAEVLLAEAGLAPVTRASGRSRNVRFRYAANSRLREASMWWAYNSMKEAPWAAAAFRDARDRRGQRYHRALRGVAARWMRVLWSCWTNRTPYNPEQHNTAQAALAPA

SEQ ID NO: 40574 - protein, 358 aa, unidentified
MLREKGMAMTIVENHLLSVTGGIDTHSDFHVAAAVDRNGGLLGVETFDTTTGGYRRLVAWLAGFGDIDLIGVEGTGSYGAGIARHLTGKGIRVVEVDRPNRQARHRAGKTDAVDAIAAARAALSGTATGVPKSRTGPIEAIRVLTVARRSATSEWVAILNQMRHLCFTAPDELRERFQDLSPITLVRTCAALKPRRSDADIVRFTTLSTLRELGRRALFLREQKKRLDADMKPLIDEVAPGLIAVFGVGYHVAATLLVAAGDNPHRIRSEGAWAHLCGVAPIPASSGKVQRHRLNRGGNRQANSALHRIMLTRMAYDDRTRAYITKRTSDGKTLGETSRMLKRYIAREVYHHLPSTMT

SEQ ID NO: 40575 - protein, 339 aa, unidentified
MKKSYSPTYLGIDVSKGSLDCCLYNGTEHKTRSFNSNKLSTVQKIISHFKISPDSCRVVLEATGVYHSAAFIGFTSQDFDVAVENPLRIRSFATMKNLLRTKTDPVDAKTIAEYGFINKPVSTKPKEAYQCKVVARLKLIGFFKKLIAQNRNYIEALNNNSFECNATSLITHVKNEINHLNVTINEIKSDIEKILTKHCPELYKQYKSIPGIGPTVAGAIICFYGDFSEFSNSKKAAAFAGLCPKVCKSGSSVDKKGSISKKGNSMLRTLFYMAALSAARCNNACQEAYLRLRQAGKPAKVALIAIANKLLRQAMALARKGESFIENYKEISPCAAKTT

SEQ ID NO: 40576 - protein, 322 aa, unidentified
MNKYSETFGIDISKDVFDCYGSTQGHLQFKNTESGFKKFQKLLRKDSLVVMEATGYYHYRFAQFLYHQGFLVSVVNPLSVKRFIQMKLAKVKTDKSDAKAICNYGLSQEVPLYNALTEVQSECLQLFRLLDSYLKKRTMTKNKLHGEDVLGIPSKHVYRSLKRNRKHLDTEIASIETKLLSLVKQDQQAQLTLLKSIPGLGVKTALFLIVITDGFTKFETAAQLCSYVGITPTIRQSGSSVRGRSSISKVGNKKLRNLLFLCSFSACKHNKSCREIYERIVNKGKSKKLALIAVANKLLKQAFAIAKSGNPYDETHVSLLSK

SEQ ID NO: 40577 - protein, 318 aa, unidentified
MTSHAVTIAAGIDAGQRFLDVGFAPSGKTFRVPNLADGIATLIERLMQAGVKRVILEAIGPYAQRLVQALSVAGFEVGIVNPRRIKAFRDAEGRRAKTDRLDARLIARFALTMSDAIHPLPSVEQQVLKSLSLRRRQLTEMIAMEKTRLKQTLEPILLDSHRATIAQLSAQREHIESELAQRISEDPELVRVFSILRSIPGIGDRVATVLVTDLPEIGQRDRKAIASLAGLAPHVSQSGNAPPRAAIAGGRPCVRAALYMAALVAARHHPELKATYKALRDQNKPAKVALIAIARKLLVTANALVKHNTHYLHKPLDS

SEQ ID NO: 40578 - protein, 411 aa, unidentified
MDVVNARCAGLDVHKATVVAGVRVPGPQPGARRGETTTFATTTRGLRDLTNWLRTHGVTVVAMESTGVYWRPVYEALEGLVQLVVVNARHVQMVPGRKTDVKDCEWLAQLLECGLLRGSFVPPRAVRDLRDLTRLRKALIRERGHHVNRIAKTLELAHLKLSCVVTDLMGKTGRAILQALSAGVDDPERLAACAQGVLRKKQAALREALGGRLTPHYAFLLQQHLSLIDGLDAHIATLDTRIEAALAPLAEAAALVQTMPGVAARAAQAILAETGVDMDLFPTPAHFASWARLCPGNHESAGKRQNTTTGKGATWLRATLQETAWAAVRSKKSYYRALYHRLKGRRGAKRAIVAVQHAMIVALWHMLKHRVAHQDLGTDYFERRNIARIRRHHVRRLEQLGYDVTLRGKAA

SEQ ID NO: 40579 - protein, 347 aa, unidentified
MNFYTQQHKHYCGIDLHAKAMYVCILDQSGTKLVHKNLPTTPEAFLRTVAPYREDLVVAVECIFTWYWLADLCEREGIAFVLGHALYMKAIHGGKAKNDKIDAHKIAVLLRGGMVPQAYVYPAERRAPRDLLRRRCHLVRKRAELLAHIQNTNSQYNLPEIGKKLAYKANREGVEDHFPDPSVRKTVEVDVSLIDHYDKVLGEVELYITRSAKAHDVQTFARLQSVPGIGKILALVILYEIQDIARFPRVQDFVSYCRLVKCAKESNGKRLGTSGKKIGNVHLRWAFAEAAILFLRQNHLGKEYFAKLEHKHGKAKALTVLGHKLARAVYYMLTRGQPFDLQRFVSA

SEQ ID NO: 40580 - protein, 361 aa, unidentified
MKRALKDNQDAFAGQEFYIGIDVHQKQWTISIQRNQLPLAKPLTIDPSARSLSSYLKRQYPGGKYHAVYEAGYSGFWPARDLLTHEIDTIVVNPADIPTMHKERSTKTDSVDSRKLARSLENKELRAIYIPERKAEEYRLLNRYRSQLVRDETRIKNRIKAILAEFNYRVPVDLEGNRWSGAYLRWLQTITFETPYAQIAYNERLEHLAESRKRLAKVLRELKLMATQEPAIASLVKLLQTVPGVGFLTAILLVVELIDMHRFKRFDNLVSYIGLAPSIHQSDEHSYSRGLTKRQHKELRFRMLESAWIAVRKDPALTMKYGQLCKRMNKNKAIIRIAKMLLSRIRTVWITQTPYVYGVIE

SEQ ID NO: 40581 - protein, 317 aa, unidentified
MSQPDLFVGIDVAKDELVIHLHPAGMLWRVANSKTGLAMLGRKLTRLAGTACLRIGLEASGGYERKLTILLDRLALAAYLLDPARVRSFARAERQLAKTDPLDAAVIARCLAALHAELTPHVHDPEAIRLAEHVRLRDLAVAQAVQLGNQLESIADTAMRRLIVAQVARLKALALRIEKAIAVVIAASPDLAAREALIRTAPGVGPIVAACLLARMPELGRLSSRQVAALAGLAPFDRQSGKTSRPGRCSGGRPSVRRSLYLAALTIARSGKGHLAATTSRLREAGKPFKLAIVATMRKLLITLNAMVKNNTEYRSA

SEQ ID NO: 40582 - protein, 337 aa, unidentified
MEYFAGLDVSMEETHICILDREGVLIREGKASSTPKSITAFLAEGPVCVKVVFETGRMAPMLFHGLTELGVPVVCIESRQAYQALKSLAGHKTDRNDARGLAHLARTGFYKPTHVKSLSAHAIRSLIAARKKLVGQRVTIDNQIRGLVVVFGVRLPRALSPTFKDAALKVSDGVPGLHAALRGLFAAREAILAAVAAIDSDIKTMTRKSKTCTRLMTVPGVGPITALAFAAAIDNPARFKRSRDVGPYLGLVPKRHQSGEVDYTGSISKRGDVRVRTLLYEAANVMLTRYAAPLKLKSWALAIGARSTMRKARVALARRLAIILHAMMRDQTDFQAV

SEQ ID NO: 40583 - protein, 376 aa, unidentified
MKASGEIFVGIDTAKARNAVAVAEGGRDGEVRYLGECDNTPDAVAKLIRKLAARYETLHICYEAGPTGYGLYRQILALGHDCMVVAPSLIPRRPGDRVKTNRRDALSLARLLRAGELTAVWVPDETHEAVRDLVRTRAMAVEDYRRKRQHVTSFLLRHGRSYDGKTSWRGRHKRWLDGQNFAHPAQRLAFQEMLKAVQATVERLDRLEAALIEIVPDWTMAPVVSAFQAMRGVQFMTAVTMVSEAGDLRRFDHPRQLMAFLGLVPSERSTGETRRQGGITKAGNSSARKALVEAAWTYRHSAGVGVAHHQRQAELPPQVREIAWKAQTRLCARYRRLMAKGKRNTVVVVAIAREIAAFLWAISHHIAPLPPTARPV

SEQ ID NO: 40584 - protein, 452 aa, unidentified
MTDVDKISMEIVNPRAAGIDIGSRSHWVAIGQGPNDFKEFGVYNEDLFAIAQWLKESGIKTVAMESTGTYWQSLYAVLMAEGFQVILCNGKFTKNIKGKKTDIQDCQWIQKLHSIGLLSGSFLPDEATEQLRTFCRHRANLLDSAASASKKMQKYLRLLNLRLDVVVNDICGLTGMAIIKAICNGEKNPERLADLRHHNCRKSKEEIAKALHSNGRQDYLFTLKQELEMYELFQTKIALCDIEIEKMLNETIDNDENKKQHYIEKKAYKKINKNTPKNIDLNLMAYQHFEGVDLMAIEGMSYSTVLSLISEVGVDGIKRFPTAKHFANWLRLAPNNKISGGKVLSSKVPKGSNRLKIALRNAANAIGNLKDSTPLRDFFQRINFRKGRVSAISATARKLAVIIWNMVVKRVPYQNPEEYLFRDQKKKLGLLKRIQKQITKFELESTDFQFVN

SEQ ID NO: 40585 - protein, 405 aa, unidentified
MSQFITAVGVDVSKGKSMVAVRRPGGETVMQPFEVRHTQSGLTELAARLKGLDGDIRVVMEHTGTYWQPIAMYLKKEGFFVSVVNALLIHDFTDNSLRKVKTDKADSMKIANYALAFWSSLRELSAEDEIRQQLKAQSRLYERTRKMSSAMRNALIAVLDQTFPGANLFFSGSTRTITGHYKWVDFVHRFWHKDCVTAVSLNSFADTFSKWCKRTGYHFSMADAQRIHSIARDSVATLQKNDSTKLLVTQAADSLNAIYEATQALREEMNRLASMLPEYAVVMSMHGAGPITGSQLMAEIGDVRRFTHKGALVAYAGVDAPPYQSGTFDSKNRHVSKRGAPQLRSVLFLVCSTILKHEYADDPVYCFMDRKRAEGKHYYVYMVAGAAKFLRIYYAKVKESLAEAG

SEQ ID NO: 40586 - protein, 361 aa, unidentified
MKKVSRELPKMEAGAAKPEMTVGLDLGDRHSHYCFLNSDGEIVEEGRVQSTEASLRRHFEGEDCLRIALECGTHSPWVSRLLNALGHQVIVANARKIPAITGSESKNDRNDAEKLARFAAFDPKLLSPLEHRSEERQVDLNLIHARSTLVRARTMIVNALRGLVKSAGGRLPACSTESLPTRVLAAIPPALSAVATPLVEQIVLLTAQIDGMDKQIEKLSAKYPEIVLLRTAPGVGPIVAAAYVLTLGQPDAASNRSAGAFLGLRPAQSQSGAADPQRRISKTGDSFLRSLLVQSAQYVLGSFGPDSELRRWGLKLAATGGRRGKKRAIIAVARKLAVVLHALWRSGQRFQPFPQQVAVAA

SEQ ID NO: 40587 - protein, 351 aa, unidentified
MIVLGADTHKRSHTIAAVAAGTGELLASQTIQVGRRGFDVLLQWARGLGEERVWALEDCRHVSASLERLLIERGERVLRIPTHLTAKERKRSRERGKSDAIDALNVARAALQEGLGGFPMARLEGPELDLRLLVDHRERLVRHRVELNSTLLWHLHDLWPELQLPGGALFSKKWSTRIGGRLARAEQTMRVRIARDMLRRLRELTATINQLERDITILVEQIAPQLLTEPGFGPLIAAKLVGEIAGAERFATPAKLARVAGVAPIPASSGNTQRHRLDQGGNRQINAALHRVIVTRARCHQPTRDYLERRRREGKSTREAIRCLKTYLARHVWRLLQPPHPDQRELPLSIS

SEQ ID NO: 40588 - protein, 305 aa, unidentified
MSEVIIIGLDIAKHVFHAHGADERGRAIFSKRISRGKLLDFFAAQPSCTVALEACGGAHHWGRQLTQLGHKVRLIPPAYVKPFVKRQKNDAIDAEAICEAAQRPSMRFVAVKSEQQQAAGLVFRTRDLLVRQRTQLINAIRGHLTEYGWIAPKGPSHVAMLADLIDEEEMASSLPEAAHAMFRLMLDLLAGLNNKIADLDKEIARRAREDEVSRRLMTVPGIGPISATAIAALAPPAETFAKGRDFAAWLGLTPLQRSRAASRNLARHPRWANARLGASSSSAAVPSCNRRANAARQRVLGSNRC

SEQ ID NO: 40589 - protein, 389 aa, unidentified
MSLDHPFDGPTAIRTHIAAIFVSLELSRSNWLVTSLSPGKGEKMSKHSVAAGDTAELLALFAELRRKAEVRTGHNYPIVTIQEAGLDGFWLHRVLQQNGIESHVVDPASIATPRRRRRAKTDRLDGETLLRALLAYKRGEPRVCAMVVAPSPEEEDRRRLCRERRTLIEERITQVNRIKGLLFAQGISDYAPLRRDRRARLEALRTGDGRELPSHLKAQLGRALDRIELLVDQIKAVEAGQEALLAAARKPASEEAVPDPVTMLLALKGMGANFAAVLWSEAFYRQFANRRQVAAYAGLAATPWQSGGIRHEQGVSKAGNPRLRTTMIQLAWLWIRHQPQSALTRWFKERSQQGRKRAIVALARKLLVALWKYVTQGVVIEGAVMKPAA

SEQ ID NO: 40590 - protein, 351 aa, unidentified
MELEHTACPKLYIGIDIHKSSWKIHCATDLSCGKTFSMGPDPDKLRDYVSRHYSGYKVTTAYEAGCCGYYAHRSFESYGWKSFVVNPADIYRRGKARHTKTDRIDAQLIARELKDGRLNSIHVPDIQREQLRSLFRRRNDLVKDYRRIKSLIKSQLLYMGVSLPKEYDNSHWSHSFRDWLDNLEFAYSPARATLDSRMRMFRFIDQEVRDVSTGLRSFCKVYYKTDYMLLRSIPGIGGIVACGILCELGNLRRFRDLKQLSGYVGLAPGIYQSGDNLRTTGITPRAHRLIRSYFIEASWQAIRTDPVMQAYYRKHQGKNVKSIIVKVARKLLSRTLAVIKTETPYVIGVVA

SEQ ID NO: 40591 - protein, 321 aa, unidentified
MTEAQTGPTFVGVDVSQAAWDVHVRPGDRRVRIEVTDEAASQLLAAVGAPGACLVVVEATGGLERPLVAALLEAGVTTAVVNPRQARDFAKAMGRLAKTDRIDAETLALFAERVQPRPAQKTPEKQEQLDALVTRRRQLVALRAVERTRQRQTVQRTAKQSIDKTVKFFDKQIAELEQAIARLIDADEDWRAKRDLIQSVPGVGPTTGATLMAELPELGQLNRRQIATLAGVAPLNRDSGTLRGRRCVRGGRASVRTALYMAAFAARRFNPAIRAFADRLHQAGKPFKVVLTACMRKLLTILNALVRQNAHWKLPSQSLVS

SEQ ID NO: 40592 - protein, 344 aa, unidentified
MNKYAGLDVSLEETAIAVVDESGRVVREGKVASEIEAIDGWLRASGAVIVRLGLEAGPLSSWLYAGLRACGWPVVCIETRRLRAVTQAMPVKSDRKDAEAIAQVMRTSWYRPVHVKSDDSQRLRVLLRHRQILQAKRQDIDNELRGTLKAFGLKLGKVGQAGFAARVTELVAGEPWLERLTQPMLAARAALRQSFAELHKLLLTIVREDTVCRRLMTAPGIGAVNALAYKTAIDDPTRFRHSADVGPHFGLTPRLYQSGETEYSGRISKCGDAMVRSLLFEAATALLHRVKAASPLKLWARRLAKKIGVRKATVALARRLAVIMHRMWVDGTDFNPELGRAAAH

SEQ ID NO: 40593 - protein, 351 aa, unidentified
MSEKPNSAIAVIGIDIGKNSFHMVGLDDRGAIVLRQKWSRGQVEARLANVPACLIGMEACVGAHHLSRKLKALGHDARLMPAKYVRPYSKGQKNDFRDAEAIAEAVQRPTMKFVATKTADQLDLQAMHRVRERLVSQRTGIINQIRAFLLERGIAVRQGQRFLREELPHLLAAPPEVLSPRMVLIIEGLASDWRQLDTRIKDMSAEIEDLASRDAGCERLMSVPGIGPIISSAMVAAIGTGDGFSKGRDFAAWLGLVPRQISTGDRTILGKISKRGNRYLRVLFVQAAWVVLVKVKPDRWEGHGLKPWIEAAKKRLHRNVLAIALANKLARIAWSVLARGRAFEASKLQVA

SEQ ID NO: 40594 - protein, 348 aa, unidentified
MERYIGLDAHATSCTFAVLSERGRRLDSAVVETNGRALVKFLRGVPGHTHLCLEEGTQSAWLYAVLQGHVSELVVTHAYERKRGPKDDQRDAFHLANSLRLGAVSPVYKDGGQMGELRAHADVYAKLVTDVVRAQNRLKALFRSRGVQVVGGAVYTQRDRQAYLQKLARPYRGSAELLYSELDALRTIKKEAEKQLIAQSHKHSISAVLQTCPGMGPIRVAQTIPILVSPHRFRTARQLWSYSGLAIVMRSSSDWVKTPQGWERAQTVKTRGLNRNYNRRLKNIFKGAATTVITQRLEPMVGDYQRGLEQGTKPPMAKLTLARRISATVLSMWKNKEVYHPERTRLTP

SEQ ID NO: 40595 - protein, 432 aa, unidentified
MSHRNFVAEKDNFMAKRIHANGKASVQARYNITGGCDTDKNIIVAAIYHAETGNLEAREFKQHKADALRAAEWFRSQEVELVIIESTANYHMLYYDTLREEGINIAVINPIVVKALLRVEGKSDKGDAMTLARLAANFDLKTSNMPDSQQRELRLLFKRIDSWKQQRTQVTNRANGILTGYGFTVFRLVTLNTPAGLNILQGIIDRRTPEEIAALHRNRNKRPEIVKCAEVPLPDYILPYLEEVLGDVTMLNDRIKQAEFEILDKISLSNLEKQVDLMTTVPGVTSMLALRIIAELGSNYHQRYCTAEAFSKAIGVVPANEVSGGKLLKRRSSHGNARVKFHLLSASKAFAIHGKGPLKAWFDQYRSRVHYYKATSALARRIAEGLWWVMVKNEPYRYKLDHVENIESRPILVNNRLIDPATGEILKSFVEE

SEQ ID NO: 40596 - protein, 396 aa, unidentified
MNKRVHYLGLDVHKETIAVAIAPGGDSEVRLYGIIGGTLDALDKLIKKLQLPGVELRFVYEAGPCGYVICRHLKKKGLHCEVVAPSLIPRKASDRVKTDRRDAQQLARLYRAGELTAIYVPDEEDEAVRDLVRARNAAVIDQRKARQRLKGFLLRLGFRYTGKSSWNDAHQRYLARLTMPRPQQQIVFQEYIEAINVESQRLERLTRAMENALPGWKWEPVVRALMSLRGVQIIVAMTLVAEAGDLSRFDDPRQLMAYFGLVPSEHTSSDKRWLGGITKCGNGACRRVLTEAAWQYRLAPKVSPQLRVRQEQQPKVIRDLSWKAQQRLHQRYKVLSAHRKKTGVVVTALARELTGFVWAIACQLGAPHKLKERKPIQPAATSGRDYKLNPQKKFKK

SEQ ID NO: 40597 - protein, 349 aa, unidentified
MSATRFVYCEQTIKAVFQVHAVDGAGKAVMRRKLRRSELIPFFEQQEACTVVIEACGAAHHWARLLGGLGHEVRLIAPEAVKPFVKKGKRNDAADAAAICAAASRPEAKFVPVKSLEQQGTLALHSARSLLVKQRTMLANALRSLAAEFGLTVPQGIGRLDELRTLVEEDETFPEPARRVFARLLEHCRATAEGIEALEAGIVAHARRDDTARRLATIPGVGPITASLIAATVGDIGAFESARHFAARLGLVPRQRSTGGRTRLGRITKTGNREIRRLLVLGATSMVYRAEHWSSAAGAWTRGLLERRPVRLVTVALANKMARIAWALMTRKEVYRAKGRAAAATEAVA

SEQ ID NO: 40598 - protein, 330 aa, unidentified
MKKWNVILGVDVSKKTLDICWAERRLPLRIDNNSEGFSKFKKWCKENEIDLRETFIVLEYTGGYEYRFIQFCESIGIAYCRVPGLEIKQSMGMIRGKSDKADAFRIGRYGEEKIKRLEPSKPLDNNIIELKMALSFRKRLVREGAGYESTIKERKHMYEVDKEDMIICIAQEKISANKQYVKQIEERIMELIKSNASMLLNYRIITSIKGIGPINAWMTIAYTENFTSFPDARHYAVFVGVIPFEHTSGTSIKGRRRTSHLAHKELKQKLNMAARAAIEHDPEIRAYAERKLQNKEYGLVLNNVKFKLILRMFSLVKRGVMYVENYRRAA

SEQ ID NO: 40599 - protein, 413 aa, unidentified
MSYRIAGIDVHKKMLAVVVAKVDGNRIEYLSERFGTTRQDLDQLAHWLHQQQVTEVAMESTAQYWMPVWLALEEQFTLYLAQPRSTAAPKGRKSDWADAQRIVRRLLAQDLTLSYVPGREQREWRTMTRTRVEMSAQQVRLRNQMEGLLEQAQIKLSSVLSDLLGVSGRRILREMVKGETNPACLASLADKAVKASEKTLQEALGGKLTATHRLLLKMYLEQWDLLASQIDQLNTRMAQALSQHQAAVHRLVEIPGVSLTAAQQIIAEVGPEARAFAAPQKLASWVGVCPGQHQSAGTEYSHRSPKGNRMMRRVLVQCAWASVKVKGSIFHQKFRALVPRLGPRQAIWAIAHRLLRIIWKLLHDQVNYVERGLDTNPAAVQLRIKRHLKELQRLGYAVNLSALAAIRPQEASV

SEQ ID NO: 40600 - protein, 275 aa, unidentified
MSEVTTIGLDLAKNVFQVHGVDAFGQVVLRRQLRRSQVLPFFEKQAACVVGLEACATAHHWAREIAKLGHDVRLMPARYVKPYVKRNKNDAADAEAICEAVTRPTMRFVAVKTEEQQSVLMLHRTRQLFMRQRTTLINAIRAHIHMAKFGIVAGVGRNGVERLLRLIDERADDRVPPVARECLQALRAQLVLVKRQILEADRGINAWHRSNELSRRLEMIPGVGPLIATALVASIPDPHAFGSARDVPAWIGLVPKQNSTGGKERLGSRPHMAHS

SEQ ID NO: 40601 - protein, 342 aa, unidentified
MPKLKQYVGLDVSLKETSIAVIDENDRLVWRGSVPSTPEAIAEALRKHSPCAERIGLEAGQLSSWLYHGLKAGGWPVICVDARHAKAALSLKVNKTDANDALGLAQIMRVGWYREVTVKGHGCQAVRALLVARAQIVSQVTTLKNCVRGILKTFGHVLPKKLRATYITSVGQIIEGDTTLEPILTPMLRLLAATMEQLQVYDRAIHCFARGSETARHLMTAPGVGTVVVLTYMTGIDAPARFPRSSAVGAYFGMTPRRYQSGEVDQAGRVSKCGDGMVRSLLYEAATVLLSRSAKPSDLQTWGHSLTKRIGKRKATMAVARKLAVILHRMWTTGEPFRWTAA

SEQ ID NO: 40602 - protein, 339 aa, unidentified
MTVKTVGLDLAKDVFQVHGISENGRVIFNKAIKRAKLLSFFETLAACTVGMEACGSSHHWGRQLRKLGHDVKLMPAGYVKPYVKRGKNDAVDAEAICEAVRRPTMRFVEIKTEEQQAILSIHRTRDLAVRQRTQMANMIRSLLREFGHILPIGIEAVTAFAKRHLNGDHPDMPEIANSMLGIQCYQFIGLNERIDGYSKMIEQHALLNADARRLMRMPGIGPITASAIVATIGDAHQFRTGRDLAAWLGLTPLNKSSGGKERLGKITKKGDRYIRKLLVVSMTSRAVMAKRSPEKVDLWTAKTIADKPFRLATTAMANKAARIIWAMLTKKQEYRQPAF

SEQ ID NO: 40603 - protein, 393 aa, unidentified
MVVSVGIDVSKNKHDCFIVSSEGEVLADVFTIPNNMDGFDALLEKIRACTTPQDKIKVGLEATGHYSYNILGFLLDNGLATYVLNPLRTNLYRKSLSLRKTKTDRVDARTIAAMLLSDVGLKPYTNTAYHNEELKSLTRYRFDKVKERAKLKSSISRLVCILFPELEKLVSSLHLATVYALLEEFPGSKQIAKAHLTRLKTLLGNASKGRYGRDMAVTIRNAAQNSVGSCMPAKSLELQHTIRLIRELDAEIAEIEAEIETMMDKIQSPITTIPGMGSRMAAMILAEIGDFSRFESPDKLLAYAGMSPSTYQSGQLKNCYPHMEKRGSRYLRYALYNAAKYVCHWDPTFAAYLAKKRDEGKHYNVALSHATKKLVRLLFALERSRQPYCSLAA

SEQ ID NO: 40604 - protein, 342 aa, unidentified
MKQYVGLDVSQRETAVCVVNETGQVIFEGKAKSNPGVLTDLLSKHAPHAERIGFETGAMASWLWHELRGVELPVVCIDARHAHAALSVRMNKSDQNDARGLAELVRVGWYREVKVKSEESQKIRAILVARSRLVSMRRDIENQVRSLIKECGLLFPRAIGQQFRNQVSELLGVDHLLLSVISPLLSIHENVCQQQGKFDNEVRRLAKLDETTRRLMTVPGVGVVTALTFRHTIDDPSRFRSASTVGAYLGLTPRRSQSGETDTNGKISRWGDRLLRTYLFEAATVLLYRTKKWSSLKAWGMKLAKRIGMKKAKVAIARKIAVILHCIWVDGTSFDWGQPKPI

SEQ ID NO: 40605 - protein, 401 aa, unidentified
MISVGIDVSKGKSTVCILKPYGEVIASPFEVVHTESELKNLCQMIQRFDGEVRVVMEATGIYHLPVLLALQEQGLFVAVINPFEMKEYASRGLRRVKTDKKDSIIISNYGIDNWYRLENHRGRDDVYSELKLLGRQYCHYMELHVKALLELTHMLDYTMPGVKKEFRSWNESNGKDKLSDFVERYRHFDNITVMNKDEFIDDYIVWAAEKKYHQNQPKAAELYDLASDGIPTLSANTPSTKMLVLEAIRILREIDSTLFKIITRMKELTKSLPEYETVRSMGGVGDVLAPKLIAEIGDIRRFHNGKALIAFAGIDAPPYQSGQFTGTNRKISKRGLKVLRKIGYETMRVLKTHKAPEDDAVYRFILKKESEGKSKRQAKIAGLNKFLRIYYARVNEVYQRV

SEQ ID NO: 40606 - protein, 439 aa, unidentified
MEVVAPHCAGLDVHRSMITGCALLSEERGRARQVKSQFVTTRAGLERLAVWLRGLGVTDVGMESTGVYWMPVFAVLEAAGGFELLVLNPEHVKGIKGRKSDMKDAEWLADLVRHGLVRGSFVPPKPIRALRDLTRYRRTLVENQGSERRRLIKLLEAADIKLAGVVSDIFGVSGRAILRALIEGGLSAVEMSKLVRGRLRQKRGLVIDALAGGLAEHQRDILAMQLARVEADEADIAALDRLIDERLAPYAPQMALLVTIPGIDRVVAATVIAEIGVDMSVFPSHRHIAAWGGTCPGNNESPTGPARGLKAHGKRKPIGARKEPAPAKAGGNPYLKTALCNAATAAARKRGSFFKAKYHKLKSRRGGGRAALAIAHKLLVCIYHMLSGNTSYRELGENYFDLRDTQRAARRYVRRLQDLGFSVILEASCQPQAEPANAL

SEQ ID NO: 40607 - protein, 354 aa, unidentified
MSSFIRPKKGIFIMKKNLFFIGLDIAAVDFAASIYQTPDQPIVTKEAIPNNPEGFDLLLLWLKKHHIDKTNSHICMEATGIYSQAVAYYLLFAGFPVSVEPPLKVKRAFDPVGHKTDPVDSKQIAEYAYRFQDELTSWQPRDEILEKIRQLLSVREQFTKQKVALKNAIQAYAKQRVQVVLIKKAHQETLAQIEKQITRIDQELAKLIKQDPEIFQKANNLDSIPGYGMLLAAHLLVITENFTKIQKPKRLAAFIGIVPYQHQSGTSVFKRAKIRHFGPGPSRKLLRLAAQSVATHDVTFRRYYLRKLAQGKAKALVLNNIANKLLKVACAIIQNNTRYIKDYRSIHPMYLKSA

SEQ ID NO: 40608 - protein, 340 aa, unidentified
MDNIGLDLHKRESQLCILTSDGEVVERRIQTSRERFTAVLGERAPARILVEAATESEWVAQHLEALGHEVIVADPNFAPMYATRSRRVKTDRRDARTLAEACQLAAYRRVHRLSPARRHVQVELTVRDALIRTRTRYVAVVKARVRREGLRVPGGDPEHTVAKLMALPLSVAVAAELAPLVALLEPLNAQIAAADGRLAALAAADAVVQRLMTAPTIGPVTAVAYVATLDDVGRFATARRVAAYLGLAPTERSSGEQQRRGPISKTGNPRVRCLLVEAGWRILRSTQPAAAPLRAWAERIAARRGRAIAAVALARRLAGILYAMWRDDVDYRAAAISAVV

SEQ ID NO: 40609 - protein, 371 aa, unidentified
MSTTSMTPQPVVIAIDPHKASWTAAVVDASLQPVATIRVPVSHDGYRALRRFADRWPDPTWAIEGASGLGAPLTTRLRTDGINVVDVPAKLAARVRMLSTGHGRKNDDADAVSVAIAARTAPRLNSAAADGTITALRAIVEHRDDLVKTRTQTVNRLHVVLTHLTPAGASRNLTAERAAELLRGIRPRDAAGKTLRSLAADLVTEVRQLDRRITKAAADIQAAVTESGTTLTDLCGIGALTAGKILDRVGTIGRFRSAAAFATYTGTAPIDVSSGDVVRHRLSRAGDRQLNLCLHVMALTQIRQDTPGRTYYLRKRTDGKGHKEAMRCLKRRLSDTVYRQLRHDADGPGAGPRGHSGAALQSSAASSNPAH

SEQ ID NO: 40610 - protein, 412 aa, unidentified
MQVMYAHCAGLDVHKKTVSACISVCEGKHTKQQQTRAFGTFTQDLLKLADWLKEHGVTHIAMEATGVYWRPVWAMLEGQFEQMLVNPHHIKAVPGRKTDTKDCEWIADLLQHGLLKGSFVPPTAIQDLRDLTRYRAELRQSQNRVANRIQKLLEQANVKLSSVVSDTLGVSGRHMLEAIIAGQNDPQQLAQLARGQLKKKIPQLQQALEARVREHHRFLLAEFLNEWDALEERIRRIEAEIDTRVHPFESAVGLWQTVPGIDRVTACSLVAEIGVEMKQFPTAQHLASWAALCPGNHESAGKRKSGKTRDGNKWLRRSLCQAAWAASRTKDCYLATQFKRLAARRGLKRGLMAVAHTLLVIGYYILKTGEGYRELGAHYLEQSHKEQLQRYFVKRLQRLGLRVSLEPLSTAA

SEQ ID NO: 40611 - protein, 342 aa, unidentified
MSEVTIIGIDLAKRVFQLHGARQDGSVVFRKRLSRGQLLAFVAEQPRCVVAMEACATAHGWGREFEKLGHDVRLIPPIYVKPFVKRQKNDVADAEAIVEAALRPTMRFVAVKTEGQQVRAMLFRTRQMFVCQRTQMINALRGHLAEHGLVAATGTAQLKRLADAIEDSATALPEGVRDLGLMYLAQIAGLNARVAELDLKMRSAAKEADVARRFQTMPGVGPITALAIETFAPDLISFRRGRDFAAWLGLVPKQHSTGGKARLGKTSKMGQRDIRTLLVSGAMAVLQAVERFGTPNTGWLTRLRARKPRMVVAIALANKMARGLWAMMTKQEDYRNPVAAMA

SEQ ID NO: 40612 - protein, 429 aa, unidentified
MEVMHERVAGLDVHKTTIVGCVRVQVGREVRRECRTFATTTDGLVALLAWLTASRPTHVAMEATGVYWMPVWKILSDGDFVLIVANAAHIKNVPGRKTDLNDAMWIADLMACGLINASFVPEEELQELRSLMRSRKQLTREQTRHVQRIQKTLTEANIRLDSVICDIMGASGRRIIEAMIAGVRDPHQLAALASKRVKATAQQLHDALHGRLTDHHRFLLKLHLGQWDGLDAAIRGIDVEVDARITRMDAQLKAGAGQGAKAVPFRELIRLLCTIPGVSVLSAIMILAEIGRDMSRFPTAGHLVAWAGMCPGQNESAGRRKAARLRKGDPWLKTTLVQCAWAAKRKKDSYYKAQFFRIQSRRGPQKAVCAVAASILTAIYHILKDGTEHRDLGADYFNRRSTAAQTTRLVAQLTKLGFEVQLQPIAKAA

SEQ ID NO: 40613 - protein, 411 aa, unidentified
MRIIRKRCLGLDLHKKQITGHLRVHRSSDQEPERTTIRFGTMPEELLRLRDWIVAHQVNDVVMESTGVYWLHMYEILEPVTTPAVVNAAHVKKVPGRKTDVTDAQWLSELHAHGLLRLSFVPPQQIRELRLITRYRTKLVAMRTSARNRTIKMIELAGIKLSSVVCDSFGKTGRALLDALAKGPVHASTVEEAAKGSLRKKTAELEAALRTPFSDNQREMLAMHLRAYDAIDAQVAQTEDKLMDRAKPYAAAIEKLDAVPGINPLAAITVLAETGLDMSVYRDAHHLTSLAGLAPGNSISADKRRRVGMPRGNRYLKRICVQIAWAASRKNNSFLRSRFIRLSFRIGRNKAIVATARQILIIIYHLLASDQQYKDLGPRFHDKRNRERSVKRFVERLEQLGYAVALKPTTE

SEQ ID NO: 40614 - protein, 353 aa, unidentified
MQIVSALDVHRRQITYKTLDLGSGEVRRGRVSPATRESVREWLERFAGLDAHFALEGTTGWRFLVEEIERAGHSAHLADPAETAAKRGRKRRAKTDNADCDLQLKLLLAGELPESWIPPAHILELRTRVRMRKTLIDQRTAWQQRLQAQLFHQGIPTGLKPRTRAGRDALAKAELSAAGRELVALALRMLDTIDRELVPLDRDLRAFARRHPGCRALISNLYGVGAITATAILAELGDARRFTSSDDAVRHSGLDVTVYQSDSKRAPGHLSHEGPELLRWALFEAAQSAARQTSPDHAYFLQVKQRIDHNRACLSVARKLCRRAHHILRQLGNDALAPLEELPAEKEVVRPAA

SEQ ID NO: 40615 - protein, 346 aa, unidentified
MLADQLDYVIGVDPHRDAHALAIVDVRTGGVVFEATAVADGEGYACVLRLVYQYAPGRRAFAIEGTGSFGAGLTRFLVGHEERVLEVGRLRRERQSGKSDALDAIRAARSVLGQTRPARPRAGGEREALRALTAAREGAVTARRAGLCQLRGLLVSAPEPLRAELRSLTRAQLLRRLAAVRPGRCQDPELRGTLLALRALARRVTALTVEERELAREIETLTRKLAPQLLDQPGVGPLAAAQVLISWSHRGRITSEAAFARLAGCAPIPASSGQTVRYRLDRSGDRRLNRALHMILVTRRRAHAPTIAYINRRIQEGKSRREATRCLKRYLARNLYRLLENAPMAT

SEQ ID NO: 40616 - protein, 296 aa, unidentified
MKFKDFVGIDVSKHTLDVFILNVKVHKQFKNERLGFQQLEQWVQRQTCLALSDLLLCFEHTGLYSLSLAQFLEEKRVLYAMVPALEIKRSMGITRGKNDRIDSRRIAEFASRFLDKIRLTTLPAKEILNIQHMLNLRERMARNLAGYIVSKHEIRNVFHAEELPHMFSCYDTMICTLKHEIKLLEKSIREILHGNKELWTTFELITTIKGIGLIVASHLIVYTCNFTRFDNWRKFACYSGTAPFEYQSGTSVRGRTEKVVASGGYLCDTYRYGDQSVLSAQVGRREKQDVSHQYCP

SEQ ID NO: 40617 - protein, 339 aa, unidentified
MQVTTVGLDLAENVFQVHGVSENGEVAFNQALRRAQMLAFFERLPPCLVGMEACGSSHYWARQLSKLGHDARLIPAMYVKPYVKRGKSDAVDAAAICEAVTRPTMRFVAIKPEEQQGVLFLHRARDLIVRQRTQLSNMLRGLLAEFGIVIAQGIGSTVRFAKGVLDGDKPGIPEVAIDVLGNLSNQLVALHLRVRWYEMRMQLQARQDPRAMLLRTIPGVGPVTASAIVATAGDASQFRNGREFAAWLGLTPLNRSGGGKEKLGRITKMGDRYIRRLLVAGMTSRPRQMKTHPDRVDPWSRALLERKPVRLATVAMANKTARIIWAVLTRNQHCRPHMV

SEQ ID NO: 40618 - protein, 400 aa, unidentified
MTDEFGIDVYLGLDVGKGEHHAAAVNRAGKKVFDKPLPNSEPRLRELFDKLRAKHGTVLMVVDQPASIGALPLAGARDAGCQVAYLPGLTMRRIADLYPGEAKTDARDAFVIADAARAMPHTLRAVDPADETVAELAVIAGFDDDLAGESTRIANRLRGLLTQIHPSLERVLGPRIQHPAVLRLLEQFGSPAQFRKAGRRRLVTLIRPKAPRMAERLVEDIFTALDEQTVVVPGTDAAALIVPSLASSLTSVLDQRKLLAARIEELLEAHPLSPFLISMPGIGVRTAARILIDVGDGSGFATAGHLAAYAGLAPVTRNSGSSIRGEHPSRRGNKQLKRAFYLAAFASLSQPESRAYYDRKRREGKHHVAALVALARRRIDVLFAMIRDGTFYQPPTPATA

SEQ ID NO: 40619 - protein, 332 aa, unidentified
MTQTTFVGIGVSKATIDAFINGFNEHKVFTNTFRGYDALLNWIGKHVPDSGCKELRVCFEHTGLYSIPLATYLAKASIPFCMISALQIKRSLGIARGKTDRIDTKIIADYAYTFREKLILTKLPDREIMQLHLLLSLRDRLVKTRAGFEAPKDEQKRFLMHSDVLDFSPVYSTLIEQIKVQEKQIDKTIQLIISRTPELKTTFDLITSIKGVGKIVGAYMIVYTHNFTRFSTWRKFACFAGTAPFQNESGTTYRGKTKVSSLANKKIKKMLHISSLCASRYDTELSAYYHKRVQVGKSKMATLNILRNKILARIFAVATRRSAYVDLNKYAA

SEQ ID NO: 40620 - protein, 351 aa, unidentified
MMIIGIDYHPSFQTIAFLIEETGQCGERELNHSDGQAEKFYRDLKQRGISVRVGMEATGYSRWFERLLAELGFELWIGDPAEIKAKRIKKQKTDRKDAQLLLRLMRENNFPQIWVPSPENRDLRQLLWHRHRLVQMRTRIMNQLQALAMNEGYRWKKKLFSEQGRAQLEKLTLGPWASRRRQELLELLDRMNPTIQELTAAVEREARKRPEAMRLMTHPGVGPLTALAYVLIIGTPSRFQRGKQIGTYVGMIPCEESSARKQRLGHISKQGNSLLRFLLVEAAQAAARVHPDWRRRYIHLAMRRHKSIAKVAMGRKLGVRLYWMWRNGCEYSPSLEFGSYAGQLGTVHGVK

SEQ ID NO: 40621 - protein, 414 aa, unidentified
MNKKLLHLYCGIDTHKRVHTAVIINCFMEKVGEFNFQNTAPSFDKMLEYVKGLESIASRDFPKENPVTCIFGLEDTNGLGRKLSMYLLDKQREVRFVNSTLSSQEAKKQTSFHKDDSYDSFCVAKVLFERLDTLPKARTKDDSLYILNQLATRRYQLMRDIISIKNQLHAQLAYHYSNYETFFCRVDMLSALEFWHKYPSPDLLNSTTPEELGEFLYIHSNRNFGIDRAQHILESVTKTGDIEKPGFELRNFLIQSYVDNLKHIAGEKAALDKKLKQIVSSLDYKLISMPGIDYVNAALLISEIGDINRFPAPENLASYSGWAPVTYSSGQKTKHFRNSRGNRQLNSIIFRIALVQIRTHSVTHKPINKRFYEYFHKRLTEGKTKKQAVACVCRKLVDVIYYMMKYKSEYRYTG

SEQ ID NO: 40622 - protein, 416 aa, unidentified
MDTMYERCCGLDIHKKTIEACFRSGKKKTHMSFGTTSAELRKLTMWLVENDCQSVAMESTGSYWKPIFNILELSGTDMKIIVVNARHMKNVPGRKTDVNDAEWIAELLQYGLLRPSFIPDREQRELRELSRYRKSLVGERAREINRLQKMLEGGNIKLTSVVSEVTGYSSRRLLDRLLRSDEPMTEEVISELVHTSLVGKSKELEIALDGLLSELQKELLIKVLDHIDDMSRRIADLDDFCRKQMDRYEDALDKLDEIPGIARRTAETILIETGLDMSRFPTAKHFARWAGLAPGNNESAGKRSSGRTTKGNPTLKSTLIQSAKVAARKKNSFFKARYQKIAAKRGANRASVAVAHSMLIAIYHILKSGERFKDLGEDYYNQFNREKKKNYYLKKLTKLGVNLKEATLSISIQTAT

SEQ ID NO: 40623 - protein, 284 aa, unidentified
MKQMIVGADIAKNVMQLHYIDAETGEIVNKPVKRAAFLEHFANRAPCLIGMEACGGSQYWARRLTAMGHEVKLMPGKFVKAFVMGNKNDAVDAKAIWLAVQHAERSVAVKTETQQAVLGLHRMREQLVKFRTMQINGLRGLLTEYGEVMGKGRAALDKAIPSVLERLVDRLPAILIDTLREQWNGLAELDKQIASIERRLQMWMREDKACKAIAAIPGVGLLTATAAVATMGDAKTFRSGREFAAWIGLVPKQTGSGGKVQLLGISKRGDTYLRKLLMTCGGIL

SEQ ID NO: 40624 - protein, 389 aa, unidentified
MQTARKTATHPIAPVECGAIFVSLELSRSFWLVTALATPVGSKMSRHQVRGGDMLGLLERFSDLQRNVQRRTGQVVPVIVIQEAGLDGFWIHRALVTEGIESHVVDPASIAVSRRQRRAKTDRIDGEALVRTLMAWRRGEPRVCSMVCVPTPGEEDRRRVCRELKTLIGERIRHVNRLKGLFFAQGIDGYEPRNKDRRERLEDLRTGDGRELPKHLKALALRELEIIELLNQQIEAVKAERNALLEKAPVSGSAPEPVRMLLELKGIGAGFAGALWSEGLFRKFANRRQVAAYAGLAPTPWKSGTINHEQGVSKAGNLRLRAIAVEMAWLWLRHQPDSALARWYHERVRRLGPRTRKVTIVALARKLLVALWKYATSGVVIEGARTKTA

SEQ ID NO: 40625 - protein, 343 aa, unidentified
MQTITTIGFDIAKSVFQVHGVDAAGEVVIRRQFKRRSVLAFFQKLPPCLVGIEACASSHYWSRELQALGHTVRLMPPAYVKPYVKRQKNDMADAEAICEAVTRANMRFVPTKTPEQQSCLMLHRTRHLFIRQQTAVINSIRAHLAEFGIIAPVGRKGVTELLHIVADPSDKRVSEVARACLAALGTQLLSLKQQIVEFDRMIMAWHRSSQTSKRLHYIPGVGPMLATALVASVADPRTFRSGRNFSAWIGLVPKQHSSGGKDRLGSISKQGDRYLRSLFVAGALAVIRYAKIHGTKHRPWLTALLGRRPTKVAAIALANKIARMAWAMMAKGERYRNPVALAR

SEQ ID NO: 40626 - protein, 367 aa, unidentified
MWQVVAGFQSFVGVDLHKCTVTLKAVNAAGEVAGHLTISTKSVEKIEAWLRALPRPVWLAVEACPFVEWFIERYRDVVDRIDIADATRLASCRGKRRKNDPNDALDIALRLARGECPLGFIAEAQLMQLRKLGRHWRQLSRLLARTKHAMKSMLNAANLHGPKFDGAGAQRWLLAHGTLLHPAQRQAFGNYLDVVLLVERQREVLRRQILMADRSPQFLDTQLILQSVPGIGDIWGLMIAAEIGPFDRFPNADALEFWAGLTADLKTSAGRSQSGNITKAGSAPLRWALCQAAVTLCMCDARQEEIRQRLIKRIGKAKANVAMGRRLLRTLYAMVRDQKPYRCEKPVDRTTRMNQAKAPRKTQQKVA

SEQ ID NO: 40627 - protein, 383 aa, unidentified
MLPAQDKDFTRNAVVLAVSLELSKGSWKLGLLDGTREKPAINTVSDDVPQKRLNEAVAVIEATKLKWHLLNDVRVVIVLEAGQDGFWIARELEKRGYEALVIDPASIPVERQARRAKTDRLYAIKLVMCLRAWLYGERNRMHVIRMPSKEAEAQRHLVRDRGEMQKECGQHRDRIRKLLRTVGCWDNVDGDFAERLAQGKVLCHDGTALAPELHARLTRECERLALAERQLRELEKVLVKQLPEPVQERITGLKQLKAIGDVGAMRLVLELFWRKFDNRRQLGSCVGLVPQPYDSGESRVDQGISKQGNRRVRALLIEMAWMWLRYQPKSAIAKWFEQRCGGSGPNKRNRRIAIVAVARRLAIALWRYLEHGEIPEGAEMKPA

SEQ ID NO: 40628 - protein, 410 aa, unidentified
MDVLYPNCAGLDVHKDMVVASRRRMVDGKVEREVQTVKTTTKELLKLSAWLAAAGCTHIVMEATGVYWKPVWHILSDGDFALVLANAAHVKNVPGRKTDVNDATWLADLLAHGLVRGSFVPDAQTQEMRNLLRTRKQLVRECTSHVQRLQKTLEDANIKLDSVITDIMGQSGRTMIEALIAGETDPDRLAALAHRRIKALPEELREALRGRVTKHHRFLLRLHLQQIDTLHVAIDEIDQEVDANVEPFLVLIRLLTSIPGISDLSARVILSEIGSDMSRFPSDGHLVSWAGLCPRNDESAGKRRSNQMRKGAPWLKTTLIQCAWAAARNKGSYLQAQFHRLRARRGAKKAIGAVAASILTTVYHMLKDGTLYQDLGPDHFDRRAKIAQTNRLIARLQNLGCVVQITPLAA

SEQ ID NO: 40629 - protein, 361 aa, unidentified
MKKPMHHLIAEVPRSSSKVERTIGIDLGDVWSHYCTLNPDGEVVDRGRFRTTPASVDKWFTDLPRTRIAMEAGTHSIWISEQLQELGHEVLVANVRELRAISHSDRKSDQVDAEKLARYARLDPEILRPISHRTVAQQEALTLIRARNLLVRLRTAAVNAVRGLAKPCGYRLPASSTLCFAKRCMEVLPPGLVQALGPVLEQIASLTVKIKHYDRLVKQLTETEYVETQALIKVYGVGELTALTYVLTLGNKQRFKRSRDVGCYLGLRPRRSQSGDRDPQLGITKAGNVYLRSLLVECGNHVLGPRGKDSTLRRWGLHLAERGGKQSRNRAIVAVARKLAVLLHRIWVTQEPYVPFYAEAA

SEQ ID NO: 40630 - protein, 442 aa, unidentified
MTTEKMKNKVSPDEIVAWVGLDWADSEHRISMYEVGTGQIEERVLKQSGEALQQWLAELQKRYAGGKVAVILEQSRGGVVYGLMGYDFIVLYPVNPQSLASYRKALYPSGAKDDPVDAALLREMVQKNPERFRQWAADDPETRSLRLLVEGRRKLVNEMTRLTNRLTSQLKGYYPQALEWAGELNSRQACDFLEEWPTLEAVKTARPARLRKFYLKYGRPRPETLDRRIESIREATWLTRDPAAVIAGSMMVQAIVKQIRPLIAAIEDYDDEIKRLFQRHPDRLIFESLPGAGPVLAPRLLAAFGADRDRWSLAAEVEMLAGIAPVREKSGKQCWIHWRMACSKFLRQTFHEFAASSIRWCNWAKAYYDYLREHGKSHHAAVRALAFKWIRVIFACWKNRTPYDNQVFLDALAKRGSHLALRAALAVPPCRAHRTVITVENL

SEQ ID NO: 40631 - protein, 457 aa, unidentified
MQGKQKQARGRSAGQLLTLNEHAAGLDVGSTFHVVAVRSDQDEEPVRTFRSFSGDLHRMADWLGSVGIKTVAMESTGVYWIPVFEILEARGFEVLLVNARDVKNVPGRKTDVNDAQWLQQLHQHGLLRGSFRPRDEVVRLRAYLRHRERIVEYAASHVQHMQKALMQMNVQLHHVVSDITGVTGMRIIRAIVAGTRAPEELAQHRDVRCAASEETIRQALTGNYRPEHVFALKQALELWDVHQAKIAECDIEIETVLKSLNEKRAAPEAPLPPVRHAKARNEPKFDVRPALYTLLGTDLSQIHGFGPYTVLKLVAECGDDMTKWPTAKHFTSWLSLAPGNKISGGRVLSSHTRRSSNRAAVLLRIAAVNIGKTQTALGAFYRRLAARTGKAKAVTATARKLAVLFYRALRFGMTYADPGAEYYEERYKRRVIDSLQRRAHGLGFKLVANVPATEGVS

SEQ ID NO: 40632 - protein, 288 aa, unidentified
MTHYVGLDVSQKLTAICVVDDSGRRQWRGQCTSDPEPIERTVRRHGGEDARIGIETGPMTPWLVHELRGRGLAVTCLDARHARAALKMQINKTDQNDAEGLAQIMRTGWYRSVHVKSFASHRARALLGARAQLVGMTTRLSNHIRGVLKTFGMLPGAGRGLAFDRRVETLLADRAEVAPIVRPMLAAWRQLRQQTAAFDKAVRVLVKSNPICRHLMGVPGIGVLSVLAYVGMVEDPARFGRSRSVGAHLGLTPKQYQSGEIDRSGRISKCGDILARTLMYEAAVVLAV

SEQ ID NO: 40633 - protein, 343 aa, unidentified
MEHVAIDLGSRESQVCVRDPQGSILLERKVPTAKLGAYLAKRPHSRVILETCAEAFFVADTASALGHQVRVVPATLVRQLGVGERGVKNDQRDARKLSEVSTRIDLPSVHVPSELSRERKRLCNSRSALLQSRVQLINFVRGQLRAHAVVVHKRNPSTFARTVRELLLERSEGIAAHIERVLAAIESINEQLKDADRELLQLAEQDPLCQRLMQVPGVGPVISLRFVAVVDQPERFPSAHHLMSYVGLTPGENSSSLRSHRTGITKAGASDLRHALVQGSWSMLRTKPREPMVQWALSLAARRNRQIAVVALARKLLGILWAMWRSGQSYRPELTACTNARST

SEQ ID NO: 40634 - protein, 356 aa, unidentified
MKQSNYLDFSNQHIYVGLDVHHKSWTVSIVINGTLAGRFVQEPDPGVLVRHLRKNYPNGIYHSSYEAGFCGFWIHEELRAYGVDSIVVHPADVPTTGKERDRKTDKVDSGKLARSLENNQLTPIYVHDLEHYEERSLLRRREGLVQNQTRCKNRIKGLMKFFGYKLDESKVGQHWSAKYIEELEQLHSQHHHAEETLKSFLEELRYYRKLLCDVSKKIKSLSETEKYRQRVELLVTVPGISTLSAMILLTELGEISRFQRFDDLCSYVGLVPYEHSSGENKENGHLTRRGKSIMKRIIVEASWTAIRKDPGLFMNYNGFCKRMKKNRAIIKIARKLLSRIQHVLKYKEEYKFLASC

SEQ ID NO: 40635 - protein, 361 aa, unidentified
MQHSMSLVGLDVHASQTHAAILDMATGELRGVKLRMAPVEVVGFLAGLPGPVRAVYEAGPTGFGLARAGVEQGIDVRVVAAGKVPRASGDRIKTDKRDAERLARLLAAGELRFAFVPTVADEQFRDVIRAIEDCRGDLMRARHRLSKLLLRRDIRWTGPGSTWTRAHMRWLGSLRFDDVCSQAVLVDYLAGVQMLVARRAALIAALEQVIPDTRHAATIARLRCFRGIDTLSAAGLCAEVGDWTRFRPKQLSGFLGIVPTEHTSDTKRRQGSITKAGSVHARRLLVEAAHHYRHRPAIGDGLARRQQAQDPRVIEVAWRAQRRLHQRWSVLRLQRRKPAGVVAIACARELAAFCWEAATLD

SEQ ID NO: 40636 - protein, 352 aa, unidentified
MSNVKYVGMDVHKKITVIVVLNALGHMESHSKVKTTAENICDFFRGLSGKVEVVFEEGTHSAWLHKLIKPLVASVTVCDPRHNKLIEDGNKSDDDDAETLALLLRIGAVKAVYKGDDEQRQLKEFCRAYENLVSDATRVKNRLQAIYRGRGLDPGRAIYRADQRQESLAKLDDEAMRFRAESLLDQLAALQELRKQARRRFVLQVRQHPDYRILSGLPGFGPVRVGQMIATVGTPHRFRTKRQFWPYCGLAVVTRSSADYQIVEGKIIKSQKKVSTRGLNRNHNPRLKQVFKSAALTSLRQEECKAYYQRLVAHGTRPELARVSVARKLASAALTLWQRKEEYDPKKFFATA

SEQ ID NO: 40637 - protein, 373 aa, unidentified
MLRVAKTLVTNKEETSMRFYTQQHPFYCGIDLHARTMYLCILDQAGETLLHRNMTATPEALLKAIAPYRDQIVLAAECMFTWYWLADLCAEQGIPFVLGHALYMKAIHGGKAKNDKIDAHKIAVLLRGGMLPQAYVYPAEMRATRDLLRRRMHLARKRGELLAHVQNTNSQYNLPAIGKKIAYKTNRDGVAERFADPAVQKSIEVDLALITYYDELLRDVELTIVKTAKHHDANTLYLLQTVPGIGKILSLVLLYEIHQIDRFPRVQDFASYCRLVKCAKESAGKRSGTSGTKIGNAHLKWAFSEAAVLFLRDNPAGQKFLARLEKKHSKGKALTILAHKLARAVYYMLQHKTAFDMPKFLNSSGRGVGQLDA

SEQ ID NO: 40638 - protein, 373 aa, unidentified
MANVEKDFAKGKPIYVGIDVHKRDWVVTVLCQGEELYQATVVPDPGGLVRLLRGFKASEVHTVYEAGPTGYNLHDALTEGGFDSIVTPPSLVPRVGGRVKTDHRDSRKLVSMLAGGFLKRVHVLMPEERAHRQLLRTRNQIQHHRQHTQNQIKSLLLFHGKRVPATLREHWSAAYVQWIETIEWDHPALKTSIGALLDLFRHLDGQYKALTREIEVLAATEKYQERVRLLTHIPGIGIFTAMAILIELQDIDRFRRADQLASYLGLTPSQRSSGERIRMGHITHCGNVHLRTRFVQSSWTLIRYDQAMRARYERIKHQTGSGKKAITAIARGLALRVRRVLLDKAEYKLNYRETLDNERARTGRFKRLVLRPA

SEQ ID NO: 40639 - protein, 498 aa, unidentified
MARKRKQDRAGKQTVMPVMRADAAGIDIGATEIFVAVPPDRDRENVRSFPTFTQDLYALAEWLKQCGVKTVAMESTGVYWIPLFQILEERGFEVYLVNARHVKNVPGRRTDVSDCQWLQFLHSVGLLRASYRPEQEVCAVRSLLRHRESLVQMAATHVNHMQKALDQMNLQLHHVISDITGLTGLAIVDAILSGEQNPQVLAKLRHERIKASEEVIAKSLVGDYRPEHLFTLRQSLIAYRSYQHLIEDCEGEIRRALEQFQPPNSPQVSTSDPAAGPPPPKTLSSDGVLRAELKHAFGIDLTQIPGIRTGIAQTLFGEIGPDFSKFRSASAFASWMGLCPDNEISGGRVLWVGTRKVNCRAATALRMAAQSLHRSKSALGDFYRRMRAKLGAPKAITAAAHKLARIIFHLVTTHQEFDDSHFAADQRCFINTRRLNSVPKREPSDSNLFPWNQQYQWFLKRVKANARFLPSLFPRVRPNPRLIPPFQPFSSPGCCTLS

SEQ ID NO: 40640 - protein, 344 aa, unidentified
MDHFGGLDVSVKETSICIVDDTGRIVKEVKAASEPQALLKVLGNAAYRFKRIGLEAGPLSQWLFSGLAEAGLPVICVETRHMQAVLKAQINKTDRNDARGIAQMIRVGLYRPVHVKTLRSQKLRMLLTHRKLLQSKAIAIENDLRGTLRNFGLKVGMVGKVRFEARIQELVENIPDLAVLVEPLLIVRRVLREQIVILHRRLLAIVREDEVCRRLMTTPGVGPVVALTYRATVDVPARFRKSKSVGAVFGLTCSRYQSGEIDWSGKISRCGDEMMRTMLYEAAQSMMHSKKWSWLKAWAMQIARRRGMKKAIVALARRLAVIMHRIWVDGTEFCWTREQATAAA

SEQ ID NO: 40641 - protein, 421 aa, unidentified
MDNRWYHVNLSDWRSLIMFNAVGIDVSKGKSTVSVLQPGGTVVKKPFNVVHSSRSLNDLSRFILHLDGQTRVVMECTGRYHEPILHALHDAGIFVSAVNPHLIKNFGNNSIRKVKSDPADSRKIARYALDNWASLRQYSDMDTTRTQLKTLNSQMDFFTKQKVAARTNLISLMDMTYPGVNSLFSSPARDDGSEKWLDYAESFWHVDCVRKIGLKAFTERYQAFCKRNGYNFQPGKPEELYLASKELVAVYPKDKVYKDLIMTGIEQLKSTTRHVEHIRHEMDALASTLPEYETVLSMRGVGKTLGPQLMAEIGDITNYTHREALTAFAGVDPGVNESGSFRSKSNPASKCGSSRLRKTLFLIMTSLLQTSPADDRVYQFLDRKRSEGKPYLVYMTAGANKFLRIYYGKVKACIASQSKAE

SEQ ID NO: 40642 - protein, 369 aa, unidentified
MARNRVLAKSRELQNNVQTTTEQITVGIDLGDSYSYCCVLGSSGDVLAEGRIRTTIDGMAGHFMNLPPTRIAIEVGTHSRWVSQFLTEWGHEVIIANPRRLRLIATSIRKSDQVDAQVLARLARVDPKLLSPVVHRSQESYPAVTHLKARDLLVRSRTRLINAVRGILKSLGLRLPASGTTTFAAKAQPYIPDELKSSLMPLLEIISQLSVQIYAFDKQIEALARKQYPETNRLRQVIGVGPITALQFVLTIGDPTRFKHSRDVAAYLGLTPRRRQSGEMDPQLRISKAGNKQLRTLLVQCAQYLLGHFGPDSDLKRWGTHLFQRGGKNGKKRAIVAVARKLAVLLHRLWITGEPYRPLHNAVMTCAGS

SEQ ID NO: 40643 - protein, 360 aa, unidentified
MKIVGVDLHAKQQSIAMLDNETGELTERVIRHEGNAVREFYAALEGPVVVGLEATGSMQWFLELLDELGIQYRVGHPAKIRATEPRKQKHDRRDARLILELLTAHHFPDIWMPSSEHRDLQTLLRDRHQWVKMRARLQHTLQSIALNHALRKGSSLWTAAGQDTLQRLPLPPYSSQRRNRLLSLYAELQKRIQELDRQVEEQAQQRPQARRLLTHPGVGPVTALATEVFLGDPSRFPTAKHVASYIGMIPGEYSSGPRQRLGKLTKQGNSLLRYLWTEAVLHAVRKDPELKRFYRRKLVQKGMGKARIAAARKLGIRLWIMLRDQVDYEEFCRRGKLRQNGEAHAGMPAFNSGPATAVTE

SEQ ID NO: 40644 - protein, 329 aa, unidentified
MKAIKQLTKLYCGIDVSGDTLDICYQTAEGVLEWCKCSNGVGGFTEIWKLTGKDYHFIMESTGVYQLPFCFFLESKKGMYSVVNALQIKRYIQMKLERNKTDKKDAFHICMYGVDHNPECYKMPSHLYFECRAINNAIETITTEITSFKNKLHSLSRLDIDNKVIVTGYKKILRNLQAELKKFEAELYKKLEAWQPELVKQVRSVVGIGKRATAILIVTTQGFKHTQTYQQLISYAGLSPKEYSSGSSIRGKVRICKQGGSLLRHTLYMCALNAKETNGACKALFDRLVAKGKNKKLAIIAVANKLLKQVFGMVKNECLFDRNYYKKIA

SEQ ID NO: 40645 - protein, 392 aa, unidentified
MIYVGIDVAKDKHDCFITNSDGEVLFKPFTISNNREGFETLFERISSVSDDLNKVKVGLEATGHYSYNLLGFLLDKGLPTYVINPLHTNLYRKSLSLRKTKTDKVDSRTIATMMMSDMNLKSYSNTSYHNEELKSLTRYRFDKVKERAKLKSSVSRLVCILFPELEKLVPTLHMASIYALLSEFPSADAVANAHLTRLSNLLSESSKGRYGKDTAVMFRDAARGSIGSHMPAKSLELKHTIKLIQELTIEINEIEAAIKRIMDEEIHSLILTIPGISYRMGAMIIAEIGDFSRFDSADKILAYAGMFPSTYQSGQLDNCYSHMEKRGSRYLRYALYNATKYVCQWDESFRVYLEKKRSEGKHYNVALSHASKKLVRLIFALEKSGQAYLPTT

SEQ ID NO: 40646 - protein, 355 aa, unidentified
MDSKKYIGMDVHKESISIAVRNDAGKIVMECVIETKASMILQFFDGLRGDVHVTFEEGTWAAWLYDLLKPHVTQLVVCDPRRNALLQEGNQNDRVDARKLAELLHNNQLRSVYHGDHGLRTLKELVRSYLTITQDLSRVMTRVKAIYRSWAIPCTGKQVYAPRHRGEWLAKINEPGVRRRAEFYYQQLDALRCLRQEVRRDLLAESKKHPAWKRLCGIPSIGPIRAAVLLGILQTPHRFRTKRQLWTYGGVGIQTSSSADHHVVKGQLERKKKHVEIRGLNRNYNHDLKNIFKGAAIVAATKPGPFAEFYAELVAKGMRPEMARLTLARKIATIVLIVWKRGVCFDAQHLKPQTA

SEQ ID NO: 40647 - protein, 468 aa, unidentified
MRLTNYYLGGDVSKGYCDFVILDDAKKIVEPNFQLDDTPSGHQGLNFVLKEFREKHPYAPIYAAVESTGGYENNWYHLLWEMREPLDLNVARLNPLGVKRHRDAKLQRVVTDKISARNIAEYLIAYHERVIYNQKDYFSPLKRQWKFVRMIKKQHAQLMSLLESLMYVAHPQMIKYCSEDVYDWTLAVLKQYPTAENLAHATVKTLSTIPYVTEDRARELIKEAKTSVASALEPGMASLIQATVEQIINLRKSISSQVNEMIDSYSHLFPEIEILTSFKGIAEYSAFGLLLEIGSIDRFPSVKKLASFFGVHPAYKQSGDGTPIVKMSNKGRKEPRWILFNVAKSAVVCNEMIKDLYNEYLERGISKMSAIGIMMHKILRIIYGMLKHNTKYDPEIDKAYRNRMKKRNKNDSQPYRSKPDKNRRYQAYDRNAPISKRQTKKRKQMKEKDQTQKKDENPHQSIGGKGNE

SEQ ID NO: 40648 - protein, 375 aa, unidentified
MTKIIRIGIDTSKSVFVLHGVDAAEQPVLRKKLRRSQVLEFFAKLEPTKIGLEACGAAHYWARELTALGHEVVLLPPQYVRPYVKRGKNDAADAEAICEAMSRPTMRFVPVKTVEQQAALMLAGTRDALIRRRTQLTNAIRGYAAEFGLTAAKGLDKIEPLLARIAAAAELPRLAQELFAGYGKEYAQLKVQIQKIEAKLMAWHKDNELSRRLVEVPSIGPIGASLMAMKVTDPHAFRCGRNFSAWIGLTPKDHSTAGKTRLGVITHAGDESLRSILVVGATSVIKQVRRGKGHPSPWLVELVGRKPPKLAAVALANKTARIAWKLMVSGERYNPAAAARAGRGSPLTRGCAPRPALAARIRSRSAALPAAGTEA

SEQ ID NO: 40649 - protein, 342 aa, unidentified
MKDMMIGVDLAKNVFQVHGALRTGEVQFRKKLTRKQFPTFLARQDPCLVIFEACGGAHYWAREMEALGHEVKLIAPQYARPFVKRQKNDAADAEAIVIAARQPEMRFVAPKTVEQQSRAAVFRGRERLVHQRTADVNALRALLYEHGHVFPAGIRYLDRMIALVEDETTELPALIREECQDLLAQIAEKTARIAERTTKLKVLASQSDRARRLQTMPGVGPLTAVAVEAFGPDMAQFKTGRDFAAWLGLVPRQHSSGGKERLGRMTKAGQADIRRLLIIGAMSRLNWLGQRTIVEGSWLSRMLARKPKMLVAIALANKMARQIWAMLTKNENYRNPALAVAA

SEQ ID NO: 40650 - protein, 402 aa, unidentified
MNCVGIDVSKGKSMIAVMRPFGEVVVSPFEVRHTANELSELAGLLKSLDGETRVVMESTGNYHAPVAWLLHDAGLYVSVVDAMLVHDYGNNSLRRAKTDKKDAVKLANYGLDHWLTLPRYIPEEDTRLMLKICYRQYQQYSKVQTMLKNNLISLLDTTFPDANRLFTSPPRADGSEKWVDFVATFWHCECVCGRSEKAFTTQYQKWCRKHGYNFSEDKALDIYASACRHFGVIPKTDTAKLLVEQAISQLQTTSSALAALKQEMQSLAASLPEYPVVMGMFGVGPTLGPQLLAEIGDVRRFHSKKALVAFAGIDAPPYQSGQIDVRSRSISKRGSASLRRTLFLVMSVILQCAPIDEPVYQFMDKKRSEGKPYRVYMMASANKFLRIYYASVKAYLESLEHD

SEQ ID NO: 40651 - protein, 647 aa, unidentified
MRLVLRLVETETDGPAEGVDVMEIRPPRDLGDIAHLGLTLSEAKQLLTRVQQAVVAAQAHDHAVLRPDCSSCGGRCQIKDWRLHQVATLFGAVSVRLPRFRCADCGHGESCFNWPSHCRSTPELDQLRAHLSALMPYRVAAGVLAHLLPVAAGKSPETLRGHTLKIGEQLRDAAAVKPAAAASAITITLDATFIRSCHDDERHLEVRVGNVETSDGRRQVFASVARTDTDIAVLIRRSLETVGRTADSESTAFTDGCPGLRSILAEAGITKPPIADCWCGRPPTASMCQNEVVADLRLRRPSVDQISRIGMDTSKHIFQLHGVDAAEAPVLRKKLRRKEMVAFFEKLAPTVIAIEACGASHHWARLLQSVGHSVKLIPPQLVKPYVKRAKNDAADAEALCEAMSRPTMRFVPVKTAEQQAALMLVGVRDRLIRNRTQLSNAIRGYAAEFGLTSAKGMAHLVPLLERIQADQSLPVLARELFAIQAEEYTELQTQIDEIDVKLAAWHRADECSRRLAKIPGVGPIGAVLLRMKTPDPELFRSGRQFAAWIGLTPKDHSTAGKVRLGVITRAGDEGLRSVLVVGATSVILQVRRGGRASPWLAELLKRKSPKLAAVALANKMARIAWKLMLTGETYTAKSAPAALAAAV

SEQ ID NO: 40652 - protein, 366 aa, unidentified
MRKVMAGMDLHGNNVMVGIVDDQGARLQHRRLACELPEIIEFLAPYKAELESIAVESTFNWYWLVDGLRAAGFPVVLANPAKIDQYSGIKHADDKNDAYFLAELQRLKILPTGYVYDPELRPVRDLLRRRMSLMRQRTTLFLSAKSLHQRTTGRGLELRRLKAMEPEEAAALYTHPANQLIAQIQKEHIDSLDQSIRQIEKAVLKVALQQPYYQRLQTIPGVGIILGLTISMEVGNVDRFAGPGQFASYCRTVDAKRISNGKTKGDNNQKCGNKYLAWAFVEAAHGARRFDATCRRWYDRKAGKKCTTVATKALACKLTKAAWYVMAKGTEYQAGKIFPGLTEPKAEEISGEQASASKGVGPNPED

SEQ ID NO: 40653 - protein, 355 aa, unidentified
MTSAKYIGMDVHKESISIAVRNSVGKVVMECVIETKASMILQFIDGLRGDLQVTFEEGTSAAWLYDLLKPHITKLVVCDPRKNKSMREGNQNDKIDARRLAELLRLDHLTPVYHGEHGLRTLKELVRSYLTITKDLSRVMTRVKAIYRSWAIPCTGKQVYARCHRAEWLAKISEPGVRRRAEFYYQQLDALRVLRQEARRDLLTESKKHKAWKRLCEIPAIGPIRAAVLLGILQTPHRFRTKRPLWNYGGLAIEMHSSADHHSVHGQLQRSRKNVLVRGLNRNCNHDLKNLFKGAAAVASSKPGPFQEFYTALVAKGMRPEMARLTLARKIATIVLIVWKRGVHFDAQYLKPQTA

SEQ ID NO: 40654 - protein, 331 aa, unidentified
MFPVGIDVSKETLDLCMLYDGMKGRVKTQNIRNDSSAVEHLLRWLRLQHCGPEDVHVVMEATGVYHERLATALHDAGFYVSLANPHRSREFARGMGIMTKTDKVDAYMLACYALLKKPHRWEPPAADIRHLSALLRRRDVILADAVREENRLEKYQSTETPADVVSSCIRMAQLLREEVRSIERQVKAHIQSSPELKRDYVLLTSIKSVGPQLGMHMLVVLRSHHFESADQAAAFLCVVPVEKSSGTSVRGRPRMSKIGPPQLRAKLYMSALCGKIHNKRMRNIYEEMCLRGKPKMVAIGVLMRKLVHWCYGVLKTGTAFCDGGPRAALDT

SEQ ID NO: 40655 - protein, 407 aa, unidentified
MVDTTAIDLFLGLDLGKEFHHAHGRTGDGRTVHDKRLPNTEPRLLELFTRLVAKFGTVLVIVDQVANIGALPLTVARAAGCRVAYLPGLSMRRAADLHPGEAKTDARDAFVIAETARTMAHTLRAVDRDDEVLAELTMLTGYDNDLAGEVNRATNRLRGLLSQIHPSLERVLGPRLAYPYVQALLQRHGSPARLRKLGRARCEALLKAHGSRKAHHLTTEIFDALAEQTLVVPGTEASALIVPGLAAQLAAAHTQRRATEQEIAALLEALPLFHLLTSLPGLGVRTTAAVIVAIGDGTGFPTPGHLASYAGLAPATKSSGTSIRGEHAPHRGNRLLKRALFQAAFAAIGCKADPSSRIYYDRQRARGKTHTQAILRLARQRVNVIHAMIRTGALYEARIPGDVDLAA

SEQ ID NO: 40656 - protein, 340 aa, unidentified
MTMVTLGLDLGKNWIHMVGLDEDGRIVLRRRVGRDRLLAQTGNMASCLIGVEACCGAHHLGRSLEAQGHTVRLMPPHYVKPYVKSNKNDYRDAEATAEAVQRPTMRFVPLKTEAQLDLQTIHRVRQRLVGRRTALINQLRAILLERGITVAQRRRVLETRLPAILADERSGLSPRIRYLIEDLRAEWRDLDGRIDAFDAEFTATARREDACRRLCEIPGIGALNATALVAAIGNGAAFDKGRDLAAWLGLVPREHSTGGKQRLLGISKRGNKYLRTLLIHGARAALPHVAARDDALGVWLRSLLARVHRNVAVVALANKLARFAWAVLTGERRYTETVGA

SEQ ID NO: 40657 - protein, 350 aa, unidentified
MSSRKTGQIAVIGIDIGKNSFHIVGLDKRGAIILRQKWSRSQVEARFANMPPCMIGMEACVGAHHLSRKLNRLGHDARLMPAKYVRAYSKGQKNDFRDAEAIAEAVQRPTMKFVATKTSEQLDLQALHRVRERLVSQRTGIINQIRAFLLERGIAVRQGQHFLRAELPRILGAPSAHLSPRMAQTIEDLAGDWRRLDGRIDGLSGDIEALARRDAGCARLMSVPGIGPIISSAMVAAIGAGEVFTKGRDFAAGLGLVPKQISTGDRTILGKISKRGNRYLRVLFVQAAWVVLVKPKIWERHGLKPWIEAAKKRLHHNVLAIALANKLARIAWSVLARDRNFEARSIAVNA

SEQ ID NO: 40658 - protein, 338 aa, unidentified
MPTDQTGQTYALFVGVDIAAQTAMVATQRPGAKASRSFTIEQTPEGYTSLLRQLQATGFVPGQVLVVMEATGSYWMSLATRLVHEGFAVSVMNPAQAHHFAKALLKRAKTDAIDAQTLAQLAMILQPEPWTPPPQIYYALQQRLAQRDDLLNLRQQVRNQLHALVQHPEVIAEVRARMESLLATFESQLTEVESEITAALSQDSAWAAAATRLQSIKGVGWVTAAWTLVTTLNLTSCDTVDALTAYAGLAPMPRQSGSSVWHRPSIGHTGNGRLRTAFYMATLSAAQHNPVIKTFYTRLREAGKPEKVARCAAARKLLHIAWAVVKKDQPFDPNYALG

SEQ ID NO: 40659 - protein, 408 aa, unidentified
MQVLYERCGGLDVHKKSITACIITPEGKETRTYSTMTRSLVSMVDWLLTKGVTHVAMESTGVYWKPIYNLLEQTGIQALVVNARDIKNVPGRKTDVKDAEWIADLLRHGLLRASFIPPRSQRELRELVRYRRSLIEEQSREANRIQKVLEGANIKLGDVATDVLGKSGREILACLVQGETNPEKLAELARGRLKKKREELAEALEGILGPHQRLMLASQLRHIDFLEQEIARLDREIEERMRPFAKALEMIDEIHGLGRRNAEEIIAETGVDMSRFPSQAHLASWAGMAPGNNQSAGKRLSGRTRKGNLHLRAALVRAARSAARTKGTYLSALYHRLAARRGANRAAVAVGHAILVIIYHMLNKGTRYQDLGPNHFDKLNERATISRAVARLEALGYKVILERRETAA

SEQ ID NO: 40660 - protein, 413 aa, unidentified
MKKNSNSQTKSRQKMKPTRARGPVQRDSKEVMAELVAKLSERLEQKPTREKAAEARPKSVPAPNRDRLTVGVDLGDQWSNYCILGLEGETLAEGQWRTTREDVAAFFRALSAARVIFEVGTHSAWVREVVVGCGHEVLVANPRRMDGTKRRKRKNDRIDANKLARLGRVDPQSLFPIEHRSREVRQDLVVLRARDALVSVRTELINTTRGLVKSMGTRLPKCSSPSFPKKVEEALPAEVREALLPLVGLAEALSDCIKAYDERIEKLGREKYEHTELLRQVKGVGPLTSLAYVLTLENPDRFAKSRDVGAYVGLVPQQEDSGDSQPQLRISKAGDGMLRRLLVGSAQYILGPFGPDTDLRRYGLRLCERGGKNAKKRAAVAVARKLAVLLHRLWVSGEVYEPLRHGAPAAEAA

SEQ ID NO: 40661 - protein, 331 aa, unidentified
MSCRFYLGIDVAKAKLDCLLLDMSNAKRKSKSIANSPDGVAALLSWLNKQEVAIQDVQVIMEPTGVYHERALFALAQAGLAVSLVNPAQLRKFAQGIGVKTKTDAADSAVLARYGAANHPPAWQPPSASARELRALLARRDAVAEDLQRERNRTEKAATAIDTPERVKQSLNEAITFLQKELAELQRAIDQHIDNDPELRRIWTLLHSIPGVGERVAGHMTALLAARQFQTAEQLAAYLGLVPVEWQSGSSVHGRPRMSKAGPAHLRALLYMPAVVAKTYNPHIRALYERLLAKGKPKMSAIGAAMRKLAHLCFGVVHSGQPYDANWAIKA

SEQ ID NO: 40662 - protein, 424 aa, unidentified
MEPIVERCCGLDVHQATVVACLLVGRADQRPRKEVRTFSAMTRSLIELRDWLASEGCTHVAMESTGVYWKPIYAILEESFELVVGNAHHIKNVPGRKTDVKDAEWIADLLRHGLIAKSFVPPKPIRDLRDLLRYRRKLVESRTAERNRLSKLLETANIKLSSVASDVFGASGMAMLKAIVQGAASPQQMAQLAKRRLRDKIPELELALDGRVEEHHRFLLNIQLCRLEQVDVDIKQLEERIEQQLTPYQQQRRRLMKIPGVDRIVAAILIAELGVDMSVFRSASCVAAWAGVSPGNNESAGKQKTNETRKGNVHLKTALVEAATSASRKKGSYLKDKFFRLKARRGHKRATMAIAHKILKVAYQILSTGTDYKDLGDAYLDQLDQKRVATNLVRRLERLGYKVALTEAALAPNTPPTTEEVSTA

SEQ ID NO: 40663 - protein, 472 aa, unidentified
MTRFVGGALQAQLMARVRDLDPARCLVVPVDIGKASAMALVADHYGEVIVEPFEFAMTEPGVSVLLGAIATAGTARQAGLCRVGVEATGHYHRVLVSRLGAQGLEVVILNPAAVKQARSQQLLRTLKSDARDLGAMAELMVRGWGRPPQARSQPIATQAAWVAHRRRKLAAHQALANQVQSQLDLVFPGLAACFADLLSAKGGRVILTEVCDPDRICRLGPERLRAFVARRGVRMTRPKAAQVVDAATQALRLPRDERHVLGAVLADDVALLGTLETELARAEAALAEVLPATPANILTTLPGVGVIRASSYGAGIGDPGRFPHAAAAYRASGLVPTEYDSAGKQRRQGQHISREGSTLLREAIIELGRGLTGHDPDFAAYRHRLIATEHKTAGIAAVAAGRRAHRLAFAMLRSQQPYDPARWHDAVTNAMAPTKATPRPARPSKRATKKSDNQAGSQPARAPRQGPGQTSI

SEQ ID NO: 40664 - protein, 388 aa, unidentified
MNVGADKSEPLTAIHTDLGAIFVSLELSRSSWLITSLSPGGGEKMSKHSVPGGDFARLMERFAQLQEKARLRTGQSFRIIVVQEAGLDGFWIHRALQNEGIESHVVDAASIATSRRRRRAKTDKIDGETLVRALLAYKRGEPRVCAMVKAPTPGEEDRRHLCRERKALTAERVRHVNRIKGLLFSQGISGYQPLRRDRRQRLEELQTGDGRAFPQHLKALVNRELDRLELLLKQIKTVEAARDALLAVGQTAKPAPAAMLLDIRGIGPEFAAILWSEGLFRHFENRRQIAAYAGLAPTPWQSGAVDREQGVSKAGNPRLRTTLIQLAWLWLRNQPRSALSLWFHERVSRNGGRLRKTTIVALARKLLVALWKYVTAGVVIEGVTMKVA

SEQ ID NO: 40665 - protein, 339 aa, unidentified
MLYVGLDIHTTHITMCVLNGDGKVVKRCQVRQVDQMMRVLERLAERFEVCFEASCSYGCFYELLTPIASRVVVAHPGLLKLIFRSTQKNDRRDAEKLAKLLYLGEAPAVHVPSSDVRAWRELITFRGKQIEKRTRAKNGIRGLLRTVGVRAPRRPGLWTKKGQAWLKQLDFAQPMHALRRDLLVEEVERLSAQVRRVEQELERFAKGNPAVWQLQSIPGVGLRTAEAVVAFLDDPHRFAHSKQVGAYVGLVPRQDQSGHTNRLGRITREGSARLRHLLTEAAWQAARRSPTVKAYFTRIQRDDPSRKKKAVVATAHYLVRVMWAMLKQGTLWKERVLVA

SEQ ID NO: 40666 - protein, 313 aa, unidentified
MMALPDVFVGIDVSKDRLDVHVRPLGQGFSVSNEAAGHAALIARLRPLRSKRIVLEATGGYERALWLALSEAGLVAAVVNPRQVRAFARAAGRLAKTDRLDAAVIAHFAETFVPRLGKPDAVADRLGEHVLYRRSVQDELVGLEHQLRRLETPALRQRAERRVAVLRAEVKELEREMRAIVDSDPAKKALFACLTAPKGVGLILACTLIANMRELGALSRHQAAALIGVAPLNHDSGVRRGYRAIAGGRRRVRNVLYVATLSAVRCNPTIREFYRRLAAGGKPAKVALVACMRKLLVMLNGRVRDQLAVTVSP

SEQ ID NO: 40667 - protein, 412 aa, unidentified
MEVVHSTCAGMDVHKKDVKVCLVTRDPHGRRTQEVRTFSTLTKDLLTMRDWLQDHGCPVVALESTGVYWKPIFNLLEGDFQVMLVNPTHIKRVPGRKTDVKDCEWIAQLLEHGLLNASFIPPLEIRDLRDLTRYRRQLVHEHTAEVNRLQKVLETANIKLASVATDVLGQSGRAILHALLAGVRDPEQLAELSKGRLRNKKAELALALEGRVRPPHVRLLTRILAHLEFLEQSIADCESDIEELCRPFQHEIELLDTEPGVDLRAAQDLIAEIGVTMGQFPSHKHLCAWAKISPGNNESAGKRHSGRTGKGNKWLRSILVECAHAAGHSKDTYLGAQFRRMAGRKGKKRAAIAVGHSILEAAYFILRDQVPYHELGSNYLDKLNQAHIIRHYVRRLESLGLKVEIQELPTAV

SEQ ID NO: 40668 - protein, 272 aa, unidentified
MEQIIRIGMDTSKHFFQLHGVNAAEKVVLRKKLRRKEMVAFFKALAPTVIGIEACGASHYWARLLQSFGHEVKLIAPQLVKPYVKRGKNDMADAEALCEAMSRPTMRFVPVKTAEQQAALMTVGLRDRLIRNRTQLSNAIRGYAAEFGIAAAKGMAHLDPLLDRIQADESVPVLARELFAAQAEEYAQLQAQIDEVDAKLMAWHKADECSRRLAKIPGVGPVGAALLMMKTPAPEMFRSGRQFAAWIGLTPRDHSTAGKVRLGIITRAGDEA

SEQ ID NO: 40669 - protein, 315 aa, unidentified
MRAVPCCGGLDVAKAQRDMALRPSGERWAVPNDASGGTTLVDRRQARHPTLMVLEAPGGLERAVTGALATAGLPVVVGHPRQVRDGARATGQVATPDAWEARALAHCADVLRPPRRPLPDAQTPEWRALLGRRQPLSVLRTAAPHRRTGTRERLTTDMAAPIPWRNERLATRDDALETVRRASPLWRDNDALLQRAPGMGPVCARTFLRALPALGTRTRQQSAAVVGVAPLHGDRGTLRGRRPMWGGRAHVRAVWSIGTLVATRDHPRRKAFSERLLAAGKGKKVALTAWRRKLLTSLNAMLKQWTPWQAQEVEG

SEQ ID NO: 40670 - protein, 396 aa, unidentified
MESAVYLGVDIGKSGHYAVAVDASGKPIYQTAVPNDEAALRKLVIWAKEHQATVVVDQPGGAAAVLLKLCWASEVRIGYLHGLAMARARDFYAGESKTDPKDAFVLADVARAHPSRVVWLEPSSEALAHLELLCGYDADLRSDANRLTNRLRALLVTHWPALERALGERLDTRGVLAVLQHYPSGPALKDAGVEQLVAALKAQRVHRAEAFAKHLHQAALAQTVTISGSATAAGLISELAVQLAAILARRVELEKEIEQGFFALPEAPILRSLPGIGPRLGARIAVELGSISRFRTPGHLAAYAGLGPTPWKSGTSINANRPSRCGNHRLKNALFLAAFASLRHEPSRSYYDRKRAQGKRHNQAVLCLARRRVDVLHAMLSRGVPYRSPVPLAAAA

SEQ ID NO: 40671 - protein, 323 aa, unidentified
MNKDIKYFGIDISHLVFDVTDSEGNYYQFKNNGSGFQKFSKLLDLDSHCVMEATGYYHYQLAYYLLESGIKVSVENPLAVKRFIQMKLSKIKTDKSDSRLICEYAQQVELKLWKGNSKDELECLQITRALAIYTKQSTMLKNKLHGEDVLGNPSKAVVRSLKRNLKQLNKEIETLENRLLILVKHTHQDLLTRLQTIPRIGRKTAIMLVVLTGGFERFTSASELCSYAGLTPVIRQSGSSVKGRARISKIGNQKLRNLLFMCSFNACKYNKACRDLYERIVAKGKSKKLALIAVCNKLLKQAFAIAKSGLIYDDTYRSTLVKN

SEQ ID NO: 40672 - protein, 367 aa, unidentified
MSGASASRRRPSVVNTRASEGSTNEKGGPNVERQYVGIDLHRRRSVIVRMTPEGEKLDVVRIENDPVAMALELAKAGPDPEVILEATYGWYWASDLLQANGATVHLAHPLGNNWGHRRVKNDERDATDLVDLLRLGRLAEAWIAPPELRELRELVRYRAKLVALRSGLKAQVHAVLAKEGVRVPMTDLFGVAGRALLDSCELGRAYATRVESLRDVIAVFNREIEMLEGLVGRQLAGHAGYRAIQAICGVGPVLGAVFVAEIGDVSRFPGPDRLACWAGLTPRHRESDTTVRRGPITKQGSKLVRWAAIEAVSRQRGGTFLQAHYHRIAERRANRNIARVAAARKLLHLVYFGLRDGEIRCLAEKAG

SEQ ID NO: 40673 - protein, 326 aa, unidentified
MQGKVPSQQSAAAPVYIGIDVCKARLDVHIHPVGESLVLPNDAGGLKRLKKILARYDVVLVVMEATGKFHRLAHRNLHASGFKVAIVNPLRSRRFAEAIGTLAKTDRVDARMLALMGESLKPEALEPTPELMETLQELARGRESAVDSKTAIVNQIQTSNSKVLVRELKRQLSAVETAIENLEAELERQIDADPVLARRFEILTSIPGIGLVAAVALIVELNEIGRLSSKQAAMIVGLAPIACDSGQKTGTREIRGGRKHLRTALYMPANSAKQHNPDLKIFYDRLIKAGKLAKVAITAVMRKLLVLANTLVREDRLWQPRAVIAK

SEQ ID NO: 40674 - protein, 458 aa, unidentified
MIPAVIERCAGIDVGKKLVAVCVMVGTADGEPRVERRMFGTFNAELERLRQWLASEGCTHAVMESTGSYWKPLHAVLEKSVEVIVANGEDVKPRKGHKTDWKDCQWLAHLLRHGMIRASFIPPGGIRELRDLTRRRKQLLKAATAERNRVQKVLEEANVKLGSVLSDVFGVSGQFMLEALLEGKASVEQIADMARRRARQKIPEIIQSLEGHRMTDHQRRLIRMSLDHLAFLEKQIQQLDDLILSQIEQEGYQPQFELLQSVPGLAPDSAASILAEIGPNMEQFPTAGHLSSFAGVCPGNNRSAGKSKGSHTVRGNKWLRTALVECAWAAAAKKDCFLKDKYWRLAAGKQKEGRKKALVAVAHLVLVLIYRTISSGRAYQERGAIELSEAKRERLIQHHIRRLGRLGIAVCSARPARAKLPPQPRVNPEAKMVFPDQKSAKRTQGGAKPSRNKKMKAT

SEQ ID NO: 40675 - protein, 414 aa, unidentified
MSEFEFAALVGLDWGDTSHEIALWDEQRQTRTRERVEHTPAALHRWVEAVHARFGGAPIAVAIEQSRGAVFDALGGYPFVTLYPINPRSAARYREVFHPSGSKDDPTDAASLLDLLRKHRAELRAFVPDDASTRLLRLLTEDRRELVDQRTQHVQRVTDRLKTYYPQALRWAGALTTSQACDFLERWPTLHAIQSTRPSAIRAFYERHRHAAAWIDQRLAQIRAEVAFHHDPVITETAALLVRSEAAQIRALNASIAVYDQKISAAFATHQDAPIFASFPGAGEQLAPRLAAAFGTDRNRFDGAVAVAAFTGIAPVLHRSGKTVTVHMRWACPKFVRQTFHEYARVSIGQSAWARAFYKQQRARGHGQHEAIRTLAYRWIRILYVCWKNSTTYDDARYLQQLASRGSTLVKAAA

SEQ ID NO: 40676 - protein, 369 aa, unidentified
MKPIAYVGVDYHIKSVTIAVYLPDEKAFYDTIRLTNKDSIIRKYVNKLSEQFDLKLCYEASGSGYVFQRKMQVLGYHCDVIAPSLILKKSGNRRKNDYRDARNLAQQYAGGQLTVVHPPSEKQESVRNLMRCRMALKESQKRVKQQINSFVLSRDCRWGKSKWTIQHRTWLSGLFLSDSCAHSVLQEYLGLLDYLESRIKHLDQQIELLAQSEIYAESVKRLRTLKGIGTLTAMVLITEITDFRRFSTPRALMSFLGLIPGEKSSGETNKPVPITRTGNHRCRTLLIESVYHYIKKPRIGPKMKEAFGHVDPKTAMVATKCMHRLHKRYWALALKGKTQQKARGHCQRICGFYLGYHAATRAFSYSITL

SEQ ID NO: 40677 - protein, 420 aa, unidentified
MTVDLERGYKHRELCGSKQYLNLLLRSVLMIYVGIDVAKDKHDCFITNSEGEVLFPVFTIQNNRNGFDDLFSKIQSISSDASNIKVGLEATGHYSYNLLGYLIDKGLPTFVINPLHTNLYRKSLSLRKTKTDKVDARTIAMMLMSDVNLKSYSDTSYHNEELKSLTRYRFDKVQERAQLKQSVSRLVTILFPELEKLVPSLHLASVYTLLSELPSATKIASCHLTHLTKLLENASKGRYSREKAMEIREAARVSIGSDMPAKSLELRHTLRLIGELDSEITEIESEIKRIMDQISSPILTIPGIGYRMGAMILAEIGDFSRFDSPDKILAYAGASPSTYQSGQLESSYSHMEKRGSRYLRFALINAAKYVCHWDETFGAYLQKKISEGKHYNVAITHATKKLVRLIYAMEKSGKPYIKTA

SEQ ID NO: 40678 - protein, 345 aa, unidentified
MEQISRIGMDTSKHFFQLHGVNAAEKVVLRKKLRRKEMVVFFEALAPTVIGIEACGASHHWARILRSFGHEVKLIAPQLVKPYVKRGKNDTADAEALCEAMSRPTMRFVPVKTAEQQAALMMAGLRDRLIRNRTQLSNAIRGYAAEFGFTSARGMAHIDPLLDRIQADESVPVLARELFAAQAEEYAQLQAQIVEVDAKLMAWHKADECSRRLANIPGIGPIGATLLLLKTPAPEMFRSGRQFAAWIGLTPKDHSTAGKVRLGVITRAGDEALRSALVVGATAVIQHVRRGGRGSPWIVGLLKRKPPKLAAVALANKMARIAWKLMVTGNSYAAKSAPAALMGAA

SEQ ID NO: 40679 - protein, 416 aa, unidentified
MKLFVGLDVSSDKLDACFLTDTLTILHQGSYANDIEGATQIKETIVNMFEQFAFDKVVIGMESTSMYSAHPLIFFHEDEDLKNMHCVVTIEDPFKIHNYAKVFNADKTDTNDAFFIADFLRSERYSHSPLKEEQFLSLQQLTRSRMQLVNMLVETKQHFIENLYYKCNTLSRELRDEESLSTTVFSTSIIELITSDMGLDEIAQLPLNKLAETLQTLGRGRFKHPEKLAKTIQKAIRSSYRLSPTFETSIDIVLATLVGQMRSLEASIKQLEKGIERIVKAMPEYQCLTSIPGVGLVYAAGIIAEVGQIERFENQAKLAKYAGLHWKKSESGNYKSENTPLTKRGNRYLRYYLIEAANSVRRHLPEYNEFYRKKYQETPKHQHKRAIVLTARKFVRLVDTLLRNHQLYTSPRSVES

SEQ ID NO: 40680 - protein, 467 aa, unidentified
MSATNKSMYVGIDCSKGYADIIAFGSNKEIAEPAFRLYDITEGYRQLQSLIARWLDIGFEHIYCGVESTGGYENNWVNYLQQMGKNDPVHIARLNPKGVKSLGEARLTRTITDSVSAENIALYLMDHPGKVHYLKPSQTSKAYSEGRKHNSFIRMLKKQRNQLGNQLEKLLYEQLPPLMCYCRHGQPLWLLLMLEKYATAASIKKAGVSKLSKIKGISEEKAKSVVAKLTGSDIQSSDHIGSIIKSTAAQILHLEGSIKKEKLNLYSRFKHTEEAVLLTSITGIGEQSAVEILVEIEDINRFETAKKLGAYFGTHPMWKQSGDGTWGNHMSKKGRSEIRGVLYMCGMSAVRHDEMFKGIYARARAKGKNHFSAMGVVMNKMLRIIYGVLKNKTKYNREIDYKNQQNAQTKQKQQEQKQEELKQEKQTKLERYNLREVSEMPVSKRYAKKKKQSPKLQPEECTGSSAS

SEQ ID NO: 40681 - protein, 304 aa, unidentified
MNGIGIDVSKRQLDVGTTDGETLQVCNNRSGFSELDVWLKKRPVSQIVLEATGGYERPVLDFLHAVGHPVVRANALRARRQAQGMGQMAKTDRLDAYALAQMAALVKLPAYQPLEPWQQKMREFVRARRQAMHALTIARQQLEMVGDRELRRLLQANITRLQTLVERLGKQIAEQVTQQPQLAVLKSMKGVGPGLQAVLASYLPELGKISGKAIASLVGVAPMSHDSGTMRGKRSIHGGRAEIRQVLYMASMSAMRHEPQLRDFYQSLRARGKEGKVAIVAVMRKMLVILNARVRDAENGLVPA

SEQ ID NO: 40682 - protein, 365 aa, unidentified
MEEYIALDVHKHYTLAEREPVAGGRAQQCRIPHQRGCIARYLAGTEPGTTVALEATGNWYWLVTEIEQAGCTPALVHPRKAKLMLGSINKTDRLDVHGLNRLQRVGTLPCVWIAPAATRDLRELPRTRMFLAQQRTRLKNRIHANLAKYGLGVRDCSDAFGLRGRRQIDEQLSQLPPQTRLTTLELLGQLDLVQQQMAQQERRIEELVSLTPAMQRLMSLPGVGRILAVVLALEIGEVSRFASAERLASYAGTTPRVHASGDKQRFGRLRPDVNRYLKWAYVEAANCVQLHRAHYPQRHVTQLYERIARRKGHPKAIGAVARHLAEASFHVLSRQEDYREPTLNRRSETRATQARSPHGPVRSGE

SEQ ID NO: 40683 - protein, 323 aa, unidentified
MTRIICGVDVASKSLEARIGQQGATGSFASDAEGINALGDFCRTHQAELVAMEATGGYEQQAFAQLSGQGLAVAILNPRAVRQFAQSMGSLEKTDRIDAGMIAWYAEVKKAQPVCLATENQQHLRALVTRLRQLTKMRAIQLNQQRLVTDRKVQASFKKLLALLARQIGELEQGIAALLEKDPLWHELDQAFRTIKGVADRTVARLMAEMPEIGTLSNKTISKLAGVAPLANDSGKHQGKRAVRGGRAAVREILFIVASVVGRHEPDFIAFRERLRAIGKPPKVVRIALAHKLLVRLNAKAREVRLRMVTLQPNPAVLLAESR

SEQ ID NO: 40684 - protein, 454 aa, unidentified
MREKTSAGEQLMSLEVVHPNAAGIDIGNAAHYVAVPPDRDAEPVRRFDCFTQDLHAMADWLKRCGIATMAMQSTGVYWLPVYEILVERGFEVFLVNARHTKNLPGRKSDVQECQWLMKLHTYGLLNDSFRPSEEICVLRTYWRQRDDYVKAASASTQRMQKVLTEMNVQIANVISDLSGVTGMAILDAILAGERDRYKLAELAHPRIQASKEEIAKSLEGNWRRELLFVLRQERDVYREYQKHIAECDEALQAHLKTLEDKAEPGTKPESPKPGKRAGGNAPRFDLRSELYRISGTDLTRIDGINVMIAQTIVAEVGLDMNKWPTEAHFASWLGLCPDNKITGGKVHHRGTRHVENRAATALRMAATSLWRSKTYLGAKFKRLRTQLGAPKAITAMAHTLPRLVYRMLKYGQDYVDKGMAFYEQRYQHQQINWIQKKAKELGLLVTATSALEQC

SEQ ID NO: 40685 - protein, 322 aa, unidentified
MLNSEMNEKTVFVGIDVSKRQLDIAVDQEGSEWSVNNDKKDIDQLIARLQGVNPTLVVVESTGGLEHPLVTALYEAKLPFARVHPGRVREFARSIGLLAKTDRLDARLLARFGEAVKPPETRLAGEAEQQLSALMTRRRQVVEMLTAEKNRLATAPTSTQDRISQHITWLKDELSTLNDDIDDFIDQLPTFRHKQEILTSTPGIGPVASAILISDLPELGLYSRQKIAALVGVAPFNKDSGRRRGKRRVKGGRVEIRSVLYMATLSAIKYNPVIQSFYQDLCSRGKEKKVAIVACMRKLLTILNAMIRDDQPWRDQQSVKMS

SEQ ID NO: 40686 - protein, 385 aa, unidentified
MPKPNDLSRSFTAFEQDSTLIAVIEMSLTSWLIAGILPGIERHPLKKLDVDEEGLLQLLHRWRDEAINAGREISRIVLAFEAGRDGFWLARWLRARNIEAYVIHPNSVAVSREHRRAKTDRLDTELLKRAFLGWLRGESDHCSMAAIPTLEEEDARRPNRERENLLGERTRIVNRMKACLVRFGVRNFKPTLRKAPERLKTLRTPEGGPLPPNSFAELRRDMARLRFVMEQIREIEEARLQRLEHSPNEGSHPMVRLLARVIGVGIETADMLVHEILSRNLRNQRAVARYAGLTGSADESGKRRREKGLARAGNARVRRGMIQLAWRFLMFQKDSALVQWYRSVTNETRGARKIMIVALARKLLIALWRLVKTGEVPQGVAFRSA

SEQ ID NO: 40687 - protein, 321 aa, unidentified
MKTVLGIDLAKKKFDVALLNNDKCKSKVFENNPAGFSSLLTWLAKNDVQSVHACMEATGTYGEALAKFLHDAGHSVSVTNPARIKAFGQSELLRTKNDKTDAKLIARFCEKMEPTLWQPSPAEIEYLRGLGRRRDALINMRTQELNRQESSNETVNTSVKTVLECLDKEIELISKLIRDHISKHPELKHKHDLLDSIPGVGSATIEAILSEINAFEGFETIEQVVAYMGLSPKEHTSGTSVKGKSAICKIGNSRLRKALYMPALSAIVHNPIVRALYLRMKAKSKNGLVIACACMKKLVHLIYGVIKTNKPFDPAYALKTA

SEQ ID NO: 40688 - protein, 354 aa, unidentified
MKLYIGIDWSQNKHDLCYLNQAGSCLAQKVIPHSQEGFWQLEKLRQQLGVAAQECLVGIETTHNILVDFLWDQGYTRVYELHPNLVKSSRGRLRQSAARSDPTDAWLLADILRTDHHRLQAWQPDRLLTRQIRVKVKFMHFLTRELVRVTNRQRALLLRYYPAGAELFSSLKTAIAQHFLLAFPSAQTEGKLDREQLEAFLRQHHYVHVRKVPQLLARLQQAYPQADAEIVVACQAETQSLAHILLELTAAKKAAQGEVRALFAEHPDRHIYASLPGTGEYLQPALLAKFGDDRMRFPSSRRLQALAGTSPVTLSSGKRKRVRFRKACALGARSFSRRELNGDHDYILPPLGPP

SEQ ID NO: 40689 - protein, 383 aa, unidentified
MRIVCGLDVHKDSVFVCILSENGDKFESKYGVLTPELEELHQLLVNHGVKEVTMESTSIYWHPIWRILEDIEELKLVNPYFIKQLPGRKSDVRDAAWIAECTMKDLIRGSFVPAPLVQRMRQYNRRIFDLNKEKVYKLTKLDAVLQRCNIRISNYVSSTDSKSYKEVVRLLSEGVTDAVLLADAIHGRTVNRVGKDVIIASLTGVVSEVDIDLIRQYREEIELDDRHLQECQEKLTAICKKEFPKEFENLQTIPGVKERSATSILSEIGADMKMFITASALVSWCGLKPRNDESAGKIKSRKIMHGNKYIRKTMIECAWGASRTQDCFYSQFSYIQTVVRRKNAMKVKVAVARKMLVAVWHVLNEGVPYRDYKMLQAQACGNS

SEQ ID NO: 40690 - protein, 349 aa, unidentified
MKKIIVGIDVSKEKIDASAIFVTVNQLGMQKLDYQTFENRPMGFRRMVVWARHLVKGITLDEVMFCCETTGAYDHKLCDYLFARGLDIWRESALQIKKSSGLRKGKDDKTDSLAIAEYAMRHADKAVYYVSQSQDIRELKELLLYRHKLEQEKASTTVRVAGLKATAGKSPSRNFILRDAQKRIKQLEKSIKECEKQILDIYERNEEMKKSYTHITSIKGVSIVNATAMIAYSNNFKNITSSRKLASYYGVAPFREKSGTSVDKKAKVNCYSNSMLRSYLTMAARHTIKANGIYFDYYNRMIAAGKCYGVAINNVKNKLLNLSISLVKNDMDYEACHEYKRLQGKAELA

SEQ ID NO: 40691 - protein, 392 aa, unidentified
MIYVGIDVAKDKHDCFITNSDGEVLFKSFAISNNRNGFETLFQKIEAVSDDLNKVKVGLEATGHYSYNLLGFLLDKGLTTFVINPLHTNLYRKSLSLRKTKTDKVDSRTIATMMMSDMNLKPYSDTSYHNEELKSLTRYRFDKVKERAKLKSSVSRLVCILFPELEKLVPTLHMASIYALLSEFPNAVAVANAHLTRLSNLLSESSKGRYGKDTAVMFRNAARSSIGSYMPAKSLELKHTIKLIQELTVEIDEIEAAIKQIMDEEIQSPILTIPGISYRMGAMIIAEIGDFCRFDSADKLLAYAGMSPSTYQSGQLDNCYSHMEKRGSRYLRYALYNATKYVCHWDKSFGEYLAKKRSEGKHYNVAISHAAKKLVRLIFAMEKSGKAYLPAA

SEQ ID NO: 40692 - protein, 359 aa, unidentified
MMLYLAIDQHRKQLTVCVRNEEGDVILRRQVSTEWGRVRAFFAGMSEEAGANGFVAILEVCGFNDWLVKLLAEYDCRELIVVQPEKRSKKKTDRRDAGALCEILWLNRQRLLAGKRVQGVRRVQLPSQEDGDARQVTELRQRLGQLRTRTINRVKHLLRKHNLEQECPTKGLDTIRGRKWLGELALGRMDRLEMDLLLKQWTLWDEQIDELQPEIGTRQAKHKTAAVVATIPGCAAYSSLALASRIGSIERFPRPGSLANYWGLTPGCRNSGQATDRLGSITKQGSAMARFILGQLVLHVLRRDQAMKAWYQRIKKRRGSKIARVAVMRRLATIIWHMVKYHEPYVIGGPPPRKLRPAT

SEQ ID NO: 40693 - protein, 437 aa, unidentified
MRVDEMTDEPLYRNRVCGIDIGKAQMVATIRVPSDRDPARRAAETRTFATTKRGVLALADWCRSWQVPAVVMEATGDYWKGPFYRLEAEGLECVLADARQVKNLPGRPKRDPADSRWLAACFERGAVTSCFVATPEFRIIRLHTRYRRDLIEERTRDKQRAEKLLESAAIKISSVVSDLHGVTGRDIMDHLIAGERNPKVLAQLARTAARRKIGQLEEALEGAEFFTAEHAGLLTAMLERIDRVTAGIARLSEVIEQLLAPYEEQLQQAESMPGWRRRSAEDAIAETGADMTRFPTGAHLASWGSRAPLDHQSGTRKGRARSKKGNRYLAGVLGETAVAAGRTQTREGARYRRLARRLGRPKAQVAVGNTQLKVLHKLLSNPGMRHEDLGPDYYERRASLRRQIHHHVSHLESLGFEVTLCRTPDPQPGPAGQAHAV

SEQ ID NO: 40694 - protein, 318 aa, unidentified
MRVRGFFGVDASQKSLMIAEHGRSATQEIGNSTRAISAWLKALEGPCAIAVESTGRHHRLLATLAIAAGHTVYVVNPRDIKHYGKALGRRAKTDRVDALLIARYLAQEHDSLRAWVLPSKTQELLSSALARRGVLVGVREQIRASCEAHEAQLTQLGATLEQLARLIEEVDEQLEQLSAADPVIEAIKRRLLGIPGIGPVVSTALANLLSRYQFRNADALIAYVGLDPRANDSGQHRGRRKLSKRGPAELRRLVFNAAMSGARTAAWRGYYRCYRERGLSGTASFVILGRKMLRAVFSMVRHNTEFDPIRVQGACAKP

SEQ ID NO: 40695 - protein, 407 aa, unidentified
MIYGGIDVAKHSHEVCLVNDSGDIVLRMHLDNNHKGMNKLLQALERLGLKPDDVKFCLEATGHYWLPIYCYLTNQGFELHVINPIQSDALRNLYVRKTKTDQKDALLLADLLRLGRAPETRLPSETTLKLQSLSRLRFEFVRQVGGLKNRVLGILDRIFPEYPDCFSDVFIRTSRELLKSYPEPEELAEVDLSELSAFLKEHSRGRFGEERAKKIQSLAKGTFGITMALDAFTLQLRLLVEQIEFIEEQIRVIEDAINEVMEELRPSKDTPYRHVIETIPGIGPVLAAAIIGEIGDISRFPNPRALVAYAGLDATVRASGLFEGTRNRISKRGSPVLRNSLWLAAVSARRFNPELRAYYEQKRSQGKHSNVATGAVARKLVHLIYSLWKDNRPYDPDYQWSPPGKNA

SEQ ID NO: 40696 - protein, 341 aa, unidentified
MSIVGAFDVHRRQLTFEYLDTATGELKRGRIMPADRPQLRAWLARFASQEDVQFALEGCTGWRYVAEELLAAGITPHLAEPADTAALRGKKRHAKTDKTDTRHLRVHLMAGDLPECWIPPEHVLEARAAARLYKDLVDERGAWHQRVAATLFHQGVPAAVSVAKPDGRAAAERAFLSPAGRQAVQTGLRQIDRLTAELEPLRRQLDMLSRRQPGCAALRAAHFGIGAVTSVAIWAELGDVRRFGNSDNVVRHTGLDITVYSSDGKRSAGHLSRQGPELLRWALYEAAKCAARPAAPDYGYYTAARNDRGGGRATLSVARKLARRCYHTLRELGEDALAPAA

SEQ ID NO: 40697 - protein, 347 aa, unidentified
MKKALTIGIDFHKKNTQICVMNSQLEIVEEKRISSEDKSLRKFFVNYPKSLIGIEISGGVFHVAHLLKECGHEVKILKPDAAKPFRRAGQKSDRIDARALATALLSGTCEEIYFKEEGVRLLKALLSSREMLIKQRVMLVCHLRGLLREFGITMPKGISRFFAQAGEKLMEIESDVLRNQLCQTYQQIESLKCEEKKLDRQLEEVYGGDDRVKRLRTIPGVGPVTALCLLTTIGSAERFYDGHQVSSYLGLAPRQKSSGEKKRFGAITKAGCGLTRRNLIHGARAVLFLSKKEDPMINWAKNIRNSQAPTNVKVVALASKMARVALALLKNNSAYDPHFGKTSTKAA

SEQ ID NO: 40698 - protein, 341 aa, unidentified
MSAIGIDTHKDSLAACAVDELGTVLAEAEFANDPAGHAALAAWARTVAAGATIGVEGSSSYGAAAARYLDDRGLPVREVPPHLSRRERRRTRQAGKSDPGDALAIARVTAREADLPPIRRVDPTTDLGLLLAARDDLVGEATRVRNRLHADLVVLVPGYGGRVANLVSERHLVTAGRSLRGRPGVHAELARDRLAELRRLQARIRSLASRIERLVVGHPLLALPGVGSLTAAALIAETGDVGRFRSADAFANLAGVAPIPASSGQVQRMRLNRGGNRQLNRAIHVIALVQARIHEPARVYVARKRANGQSWRDAIRALKRKLVRAVFQLLLEGAALQAATA

SEQ ID NO: 40699 - protein, 344 aa, unidentified
MQITTVGLDLAKNVFHLIGLNQAQKEVIRKRLRRAHVKRYFANLPPCRVAMKACGSAHYWGRELRQLGHEVKLIPAQAVKAYVQGNKNDYNDALAIAEAANRPKMRFVRIKTTEQQDTQALHRLRDGAVSHRNKVCNRIRGLLAEYGILMARGVVTLRKAIPELLGDGDHGLSDNFRRLLQQAYRQLQELDAHIHTYDHAVKQQARENEAAKRLMSIPGYRLVVSSVYLSAAGDGSAFRRGREVSAYIGLVPRQHSTGDKSVLLGIRKRGHRQLRTLLIHGARAVVRYAPEKDDALSRWVTTLVVRRGKHKATVALANKLARIGWAVLTRGEVYQPTRGSASSA

SEQ ID NO: 40700 - protein, 326 aa, unidentified
MEHELHYICIDTAKEKLDVDVLRPDGRHRTKKFANTTKGHDELVSWLKGHKIDHAHICIEATGTYMEPVAECLYDAGYIVSVINPALGKAFAQSEGLRNKTDTVDARMLAEFCRQKRPAAWEAPHPLERALRALVVRHQALTDMHTQELNRTETAREVQRPSIDAHLLWLEAELKRLEKQIKDLTDDDPDMKHRRKLLESIPGIGEKTSAVLLAYIGLKDRFAHARQFAAFAGLTPRRYESGSSVRGASRMSKAGHVSLRRALYMPAMVATSKTEWGRAFRDRLAANGKKGKVILGAMMRKLAQVAYGVLKSGVPFDASRHNPVAA

SEQ ID NO: 40701 - protein, 368 aa, unidentified
MSARLTNSSRDMRLKGGAVQKIYIGVDFHARQQTICYLTTDSGELRLHQLLHQDKAAVRAFYAQFSGSVVVGLEASGYSPWFERLLEELGCEVWLGHAAEIRRRARGRHKNDRRDAELILDLMLHDEFPRLYLPPLPSREILRMLRYRQKLIKMRTIGKNSLQALALQSGLAKGPHLFTKAGLQELRTVAMSPAMQWQRDQWLQLLEPLNQRLLETMLWLKQQSQADQRIHRLRTHPGVGLLSALCLVHSLEPVSRFANTRKVTAYAGLDPLERSSAERQRFLGISKGGSRVLRFLLVEAAHTALRKDAELKRFYQRLAERHGRPKAKVAVSRKLLIRAYIMLRDEIDYAEFQRRAVAARPAPPAHGH

SEQ ID NO: 40702 - protein, 355 aa, unidentified
MSQEKYIGMDVHQATISVAVLDSRGKLIMESILETKAATILEFIQGLHGSLSVTFEEGTSAAWLHDLLKPHVTRLVVCDPRKNALLKDGSKSDRIDARKLAELLRGNQLTSVYHGEHGMRTLKELGRSYVTMTKDLARVMSRIKALYRSWAIPCSGTSVYAPRHRAEWLDKIPEPGVRLRAERLYQQLDLLQPVRQQARRDLLTESRKHHAVKLLRQIPSIGPIRAALLVAQLQTPHRFRTKRQLWAYSGFALETHDSGEYRYVRGKLQRNRERMTVRGLNNNHNPEVKNLFKGAAISASTHPGPLYDFYVALLEKGMRPTMARLTLARKIASITLTIWKKGADFDATQLHRQEA

SEQ ID NO: 40703 - protein, 427 aa, unidentified
MNLTQNKKLMQITPETIVVGVDIGSEVHYARAFDFRGFEFSKKALAFSNTREGFENFDRWITDLMKKNGKTHAFVGMEPTGHYWYGFGCHLQNIGVKYGMVNPFHVKRSKEMDDNSPTKNDRKDPKTIAMLVKDGRYHIPYMPEGVYRELRNLMELRRQCVVQIISIKNRVKRWQDIYFPEFCKVFKKWTGKAAMLSLRHFATPQRVLEKGEDEIVATWKKEVKRAVGNKHAKKLIKAAEDSIGLKHGLESAELEIETLLDEYLIYEQRYQRIMSKVEKQVEQVPGSTNLLGIKGVGIVAVAGFLAAVGDIKRFDAPEQIVKLLGFNLRENSSGKHKGKTTITRRGRSDGRYAIFQAVLPLVAKNSEFRKLHQYYINRENKPLKKIQSVVALCGKLIRVFYAILKTGSQYSAEKMLSDIKRPMSMVS

SEQ ID NO: 40704 - protein, 390 aa, unidentified
MPDVRSSVSAKTTRTWVALDVHKDSIAAGILSVAGGPPEVVQFENSERALRRFARRLGDPGELAVCCEAGPCGYDLYRLLTSIDVACDIIAPSLTPVRPGDRVKTDRRDAVKLVRLYRAGELSFVCPPTPVQEGLRDLVRCRDDLRCARTAARQRIGKQLLRYRRIFREGRGHWTQRHGVWRRAQRLDDPLAQTALEHTLCHLGALDAQLLAIDAQLDEIAREEPWREAVEALTCFRGISTLTALSLLAEVGDFHRFASARELMSFLGLTVSEYSSGARRTRGSITKTGNRHARRLLVEAAWHYQHPPRLSVRIRAHEGVVAPEMLARAWQAQIRLHHRHRHLTGRGKPATVATIAVARELCGFLWAAMTDQPPQDARPEQRTGKQRSAA

SEQ ID NO: 40705 - protein, 558 aa, unidentified
MRIVGRPVAQTGVKDGRRWLSDHREVAAGLDHLQMNRESEILQHLAVVGSRPARFGELGGPDGDLAVRRMGLFNQPLSVCHVVRIEHKPLVAGHPWRQDLGGREEFVSIDPPEHRAVNREVDGDPHPDNQMRQIALDVHKTFCEVAIREGTKTYSAGRVATERETLELFAESLCPTDEVVMEATGPAMEIARILTPHVARVVVANAQEVRAISHARVKSDRFDARTLANLLGAGMLEGVWVPDAETQGLRRRVARRASLVRQRTRAKNEIHAALSRSLLGRLPVADLFTAEGRAWLQAQELGAEEAETVEGCLRQIDFLDAEVAEIDTKLAKWAVSSAEAKRLMSIPGVGAGVAVTLMAAIGDVSRFSGQRQLVAYLGLDPKVRQSGEEAPRHGRISKRGNGQARSALVEAAWMALRQPGPLRAFGERVRARKGAQVAAVAVARKLACIAWQLLTKEEDYVFAQPSKVRAKLRGAELRAGAPKLRRGHSGPRISATPAERESERELVQRGEVAYRRLIADWKASGPAKKGAGATPGRASSGPSTGQAARQAQAPGPAL

SEQ ID NO: 40706 - protein, 346 aa, unidentified
MNSMNYIGLDIHKKSISCCVRQADGTIIQESTITATRHALDEWMRQLPDPWIAGMEATLFTGWIYDHLISGGAVVKVAHPAMLQAIAVGKKKNDRVDARKIADLLRCDYFPECHMAPRDIRDRRRVLRYRNLLVRQAVQMKNKVSGLLMEAGVPYNQQKVHQKKYFAELLQKQKKDMPPSMPELLRLSRSTVEALTGMQRQLIRALESDALLAARVERLASIPGVGRVVALTWALEMGDISRFASVKKAVSYCGLCGAEKSSGGKTERTPISKQRNKHLQTMLIEAAKLAPRWNAELALVYDREKQRGNRNRATLAVARKLVAYLMAVDREERLFDTQVRVAGNAA

SEQ ID NO: 40707 - protein, 386 aa, unidentified
MQKLNDLSRSLTALEPDGTLIAVIEMSLSSWLVAGIVPGVERQPLKKLAVDESALLKLLHRWREEAKKVGRRIERIAVAFEAGRDGFWLARWLKAHGIEAYVIHASSVAVSREHRRAKTDRLDTELLKRSFLGWLRGERDHCKMVEIPTMKDEDAKRPNREHDSLIGERSRIVNRMKAALVRLGIRGFNPKLKRATTRLDGLRTPEGEPIPPNALAELRRDMERRRLVNNQIRQIEEERLERIEQAPCDGPHVMVRLLARVMGIGIETADMLVHEVLSRNMRDRRAVARYAGLTGSPDESGRRRREKGLARSGNVRVRRGMIQLAWRFLLHQKNSALTKWFRSRTGNARGTRKPMIVALARKLLIALWRLVREGIVPDGVVLRAAQ

SEQ ID NO: 40708 - protein, 356 aa, unidentified
MSNSSTIAPAEGMTVGLDVGDREASAAMVNAKGKVMEEVRLKVTEPALRAYFSRKPRCRVVMEAGTHSPWVKRLLVSLRHEVMVLNPHRVRLIAESRQKTDRIDALTLAELGRIGTHLAQNVAHRDEQTQLDLALLRSRAIAVQTRTKLINHIRSSVKTAGGRIGKCRAETFHRRAQQDIPETLQDALLPLVLQVADLSHHVQAYDRKIAELIAARYPEALRLMQVPGVGPVTALTFVLTLEWPGRFRKNRQVGKYLGLAPGIRQSGRRRQFLGITREGDRELRRLMLQASHSILVHASADGDLRRWALAKGAANKVAKKKAAVALARKLAVLMLALWRSGEEYRPFRVPTEEVRA

SEQ ID NO: 40709 - protein, 412 aa, unidentified
MEVLYRCCCGLDVHARTVVACLIKDGKKQTRTFSTMTDELLVLLDWLSAEDCTQVAIESTGVYWKPVFNLLEGVVEVVLVNARHVKAVPGRKTDVRDCEWLADLLRHGLLKASFIPPLEIREVRELTRYRQTLVREQASVANRVQRIIESGNIKLGQVASNALGVSGRLMLRALCDGETDGAKLAALARGQLKKKESELRRALTGRLSLAQRFVLRELLDRYEELEAALARASEEIKREVAKCADPFVAEAVELLQTIPGVGQRVAEVIVSEIGVDMRRFPSDRHLASWAGMCPGSNESAGKRKSGRTTKGSVYLRNALVQAAWAATHTKETYLAAQYQRLAKRKGKNRALVAVGHSILVIIYHVLLRKESYSELGGDYFDQRNVEVQRHRLVRQLERLGVKVTLEALPVAA

SEQ ID NO: 40710 - protein, 336 aa, unidentified
MKHWIGIDVSKATLDVALLDERGTLTAEIKVENTTRSVKALLRRWTKEYTLVKGEYLACLEPTGYYGHALLEVLVELEIPTWLAHPNDIKQSIGMTRGKSDRVDALRIADYARRFQDKSRLFTADQLKMNKLKQLLSKRQNYVMRKTMHQRQIKDMNKLMDKGLRGPFTRFDKAQIKALDKVIKELEGMIEDTINAEPELSKRFELLKSVEGVGLILGSHLLALTDGFTRFTSPRQLACHAGCAPFENRSGTSIRGRTRVSHNANHTLKALLHVSVVGLIRFPGEFRAYYDRKVAEGKHKMLVFNAMRNKLIHRVCAVIRKGVPYEIRTPLAHVIE

SEQ ID NO: 40711 - protein, 427 aa, unidentified
MNQNKSATNFAATLGLDWADKKHDLWIQASAGGKPEHWVIDQTPEALHEWVAQMRARFPRGRIAIALETSRGAVISALGAYDFIVLFPINPSMLCSYRESFCVSGAKDDRTDAMLLEEYLRFHMAKLRPLEPDTELTRQLAGLVENRRGLVDERTRLVNQWHSLLKTYYPLMEVLFENMTLPLAAHFLLKWPDLASVQKAGPAALRKFFYGHNCRSDKAVEERLQAIGKAQPLTQDPALIVPAVLKAQALAGMLKALHQSIEQMETMIEQTTEAHPDAALFRSFPSAGPAMTPRLLVAFGTNRDRFASAQEVQQFYGIAPVKKQSGQSKVIHMRHRCPKFARQTFHENASHAVRTPGWAKTFYDQQRARKKGHHASVRSVAFKLMRIYFRCWKDRKCYDANLYEKALEKHGSPLASQMKKEAAAKGK

SEQ ID NO: 40712 - protein, 474 aa, unidentified
MIFSVGIDFHKDQHRARCLDERAQSCDSFNFQTTPDGLARLEERVFRDGANPIIVFEPAGLAWLVVAVYLRSRHPDCRLVKAKMQKIAALRRYLRGSAKSDRIDALTLAKMPFIDPEQLYDIYLPPTEVHALQRLTRQRKRIEGDITGRKIRIGATTDGYLPGVRQAFTDRWSHQARAFLRSRLNPFAVVRDGEEALHTFLSKATRRGKGSRVESHLVFLACQSVVALYELSRSVETISEEFFIELQEEVARELRLMEMDEAESESLARRITELYHRLHPSDNLRTIPGVGEHTAPIFLSAVGDPTRFRSQSAFANWEGVVPGARQSSNVEAKGLRMTKAGPSIVRMGLYQAGDIGRRWDPQLAAVYYREMVYHGKNHLQAMGAVMSHAGARVLAVLKENRPYELRDAEGKLISKDEARILILSKYQVPEEIRQERRRRKSVKVRRKEREMVTYRTNEAAKAPQPVGVMAISRK

SEQ ID NO: 40713 - protein, 371 aa, unidentified
MQTSSIDVFIGIDVGKSDHWATALDRDGERLFDKALPNDETRLRDLYERLSHHGRVLVVVDQPATIGALAVAVAQDMGITVGYLPGLSMRRIADLTPGNAKTDARDAAVIAQAARTMPHTLRAINGSDEDAAALSMLTGFDLDLARQVNQTSNRIRGMYTQIHPALEKVLGPRLEHDAVLEVIASWPTPAALRKAGRARINAKLKAHGARHHEAWADEIISALKAQSVVVAGTDAAGIVLPHLARQLIALHAQRSDVAAKVEALVEAHPLYQVLTSMPGIGVRTAAVLIAETLGRDFATGAHLASYAGLTPVTRRSGSSIRGEYTSHAGNKRLKRAMFLSAFASLRSDPASRAYYDRKTPRASATTRPSSP

SEQ ID NO: 40714 - protein, 483 aa, unidentified
MVTIPLRRLRYSSPAPVTLIITEKVVEDKMAKRKQRRKGLAVTDLPEHLQHVNLNAAGIDVGSDRHVVAVPAGRDEVSVREFEAFTTDLNALADWLTKCDITSVAMESTGVYWIPLFELLEQRGFEVKLVDARQVKNVSGRKSDVLDCQWLQQLHTYGLLAGAFRPPDQVCVLRGYMRQREMLVQASSMHIQHMQKALQQMNLLLHNVVSDITGVTGMKIIKAIITGERDPQVLARQRDQRCHSSAATIAKSLLGNYREEHLFALSQAVSLYETYQAKIADCETAIARYLGSQPTRTDEEPPPGDKSVRNRDRLRGGVDVRSQLYKMTGVDLFNLPGLAADTLLTLGGEVGFDMTPWRSEKHFTSWLSLCPGTKKSNGKVLSRKTKRSANRAAAAFRIAAASLTRSQTALGAFYRRIRARVGPAEAITATARKLAVLYYSLLKHGSAYVEIGQTAYEQKYQQRRLNSIQKQALAMGYQLILAT

SEQ ID NO: 40715 - protein, 407 aa, unidentified
MKDSGKRYIGLDVHKHYLIAVGVDTDLNVVLPARRVELSRLEAWMKKTLTKQDEVVLEMTTNTWQLYDELVEYTGCVMVVHPPHVALITRAQVMNDKIAASILARLLAKGLLVGIWIPPQEIREARGLVAQRQKMVRLTTQAKNRLHAVIQRHHLVAPAGNPFGAGNKAWWQSLTIGKLEKLNLQSDLETLQFGEKQVKNMTEIMEGMAAEQEEIGGLLHLAGFGVVTAVTVWAAIGDIGRFVEPKYLVGYAGLGTRIHDSGMTMRSGKITKAGRRDLRTVLIEAANVAANNHPHWKAELARLEPRLGRNKAIVAIARKLLIAVWYVLQGKTDKYAEPEAVAQKMLRFAYAVGKANRPKGQTAAQFARVRMDALGLGSELTSISWGSKKPIPLPRSKLKERSDVPNS

SEQ ID NO: 40716 - protein, 408 aa, unidentified
MNAVGIDISKGKSMVAALRPMGEVAFLPREFLHAGVGLEQMAYAIIALGEDTRVIMESTGRYHEPVAAALHEYGIYVCVLNPLLIKQSGGGSIRKVKTDKADAMKIAKYGLDNWADLREYTPMDTVRQQLKLCSRQYDLYMKTVVSLQNNLISLTDKTFPGVNELFSSPERADGHQKWVDFAMTFWHCDCICRVSEKAFTERYRKWCKRKGYHFSAEKASDLYASSCGHFTTLPKNENTKLLIVTAAQQLLAGKATLAALRAEMTRLASQLPEYETVRAMYGVGEITAAQLMAEIGDVRRFPRRSSIVGFAGVDPGVDESGKHSAKSVPTTKRGSPHLRKTLYQIVCTYLKKSPADEPVYQFLDKKRAEGKPYFVYMTAAQNKFLRIYYARVKECLEAFDAQQDISQG

SEQ ID NO: 40717 - protein, 444 aa, unidentified
MACSGMILIREVADAPVIMGISKPAGLKSPCREVKIVNPLFVGIDVSSRSNVAYLMNPDGSKHSSFSVQNNLGGAKLLSEKIVSALRSMQLSDVVIGLEATSIYGDSLVYALREDGGLGRFQRKIHVLNPKQVKKFKEAYPDLPKNDFVDAFVIADHLRFGRIAKEVYMDDYRYQALRTLTRARFDVIQNLTREKQRFANYLFLKCSGMAQAKDIRNTSATTIALMESFETVDDLANADLEKLTAFIVEAGRGRFADPDATAKAIQAAARGSYRLPKTVNDTVNQAMSVSIASMRAMKEQVKVLDKAIEQQFEIIPNTLTSIPGIGKVYSAGIIAEIGDIHRFNSQASVAKFAGLVWHKNQSGEFEAEHSQMIKSGNRYLRYYLLEAANSVRRCDSEFRRYYNLKFKEVNKYQHKRALALTARKLVRLVFRLLKDDRLYIPSEG

SEQ ID NO: 40718 - protein, 390 aa, unidentified
MFYLGIDIGKFHHAAALVTDEGKVIATVPSFSNTRAGFEVLLTLITSHLPRGEQLRIGMEATGPYWIPLAEWLHTHGWPPVVLNPIKTSSLRNYGVRGSKTDNIDSVLIACALRFEGDKPQQVSPKHSEELCHLTRLRADIINDRTRVALRATSLLDRLFPELLSSFSKTLSPSCLALLSQAPTPTRVLALGEEGLTALLRKASRGKLGVTRAREIVDKAAVSVGVTSKALEEILPLLLEQIDLLDSQLTPLDHRISESYDQAGLYFTSIAGVGTVTAGTILGEFGSVERFKQAQQMVAFAGVDPKLRESGQHRGAVHISKRGSRYLRRALYLTCQGVVRKDDYFNAIYQRHRDNGKSYKEAIIAVMNRFIHVIYAIWRDNRPYYPLTPV

SEQ ID NO: 40719 - protein, 425 aa, unidentified
MTACNLQYLGCDRSDTHLDLTLLNADLPPESLRLPARAASVETWLGQWRRRFPGHQLCVCFEQPAANLIVLFSRFAFVRLYPVNPATLKSYREAFVLSRAKDDPSDGYWLADLVRTHRDQLPSWQPHSPAVRQLAALVEGRRDLVDQRTAWSNKLTSLLKSYFPEALELIGEHAASALAVALLRRWPTLQTLQAAGWPAVERFYRQQHCVRGTALAHRREIIAQARPLTDDPAILDPATLRLEAILGQIEPLLAAVERYDQQIAAVFAAHPDRAIIASLPGVGPILAPRLLAALGDDRARFPDARALQCFSGIAPVLIRSGQSTVVSRRYACPRFLRQSFHEHASESIRHSRWARAYYQQQKDRGKKHHTITRALAFKWQRILIRCWHDHIPYDEMTYLRSLKDRNPSLYQLALTTKLPREQLAA

SEQ ID NO: 40720 - protein, 425 aa, unidentified
MPLSSNLLKRDEAMLKIVYPICCGIDVHKTFVVACIAATNEKNITTYKSKRFSTYTKNLRELAAWLSENSCRDVCMESTGKYWHPVYNILEASCNVVLAHPKYLKAIRGKKTDKKDAKWIADIFKHDLVSGSFISPADIRQLRDLMRYRSKMTDYTTGEKNRAQNCLTTSNIQLDHAFSDVFGKSATAILNHLLEHPEDKGFDVSPFVDGRCKTPVEEIQLAIDGEISPGQTEKLKVIRVHMNTLELCKANLESVILTLAQPYLLQVNLVSTVPGIRNFSAVAVISEIGTDMSVFPTAKHLCSWAGLAPQCNESGGKRKSSRISRAGVYIKPLLIQCANAVVTSPKHPEIRNRYLAIKKRRGHKKAIVAIARMLLTAVYHVLKKAEPYNPELCHGADVAPASHEQKAIRLLEKKGFVIIKPPVSA

SEQ ID NO: 40721 - protein, 344 aa, unidentified
MVIIGCDFHSGFQQLAIFDNQTGEFQERKLLHSGEATEFYRSQPEPVWVGMEAGAPCQWFRRLLEECGHELWVGDAARIRAAEVRKQKTDRRDAELILRLLREGRFPRIWIPTEQERDVRQLLMDRHHRVRARTQMKNQLQSLALNQGLQKGTKLWSEAGREQLCALPMMEHAARRRDDLLRRVGELDREIAQLDVLVRREAEGRADARRLMTHPGVGPQTALAMVLTLGEVSRFASAKQVASYLGLIPGEYSSGNKQRLGHISKQGSSLMRFLLVEAGQTAARNDAQLRRAYARLAAKKCRAVAKVMIARRLAVRLYWMLRNHWTYAELARHAGEPGSFCGEQ

SEQ ID NO: 40722 - protein, 411 aa, unidentified
MDVVKPRCAGLDVHKKTVVACVREPGQRRGERRGETKTFATTMRGLGELRDWLLGPEVTDVAMESTGVYWRPVHAVLEGTVEVVLVNARHVKMVPGRKTDVKDCEWLAQLLECGLLRGSFVPPQPVRDLRDLTRLRKALIRERSHHVNRIAKTLELAQIKLGSVITDIMGKTGRAIVYALSTGIDDPDQLVACAQGNVRKKRATLREAVVGRLTPHYAFLLQQHLSLIEALDTHIATLDTRIEAGMAPFAAELALLQTMPGVAKRAGEAILAETGVDMTQFPTAGHFASWARLCPGNHQSAGTRYNTTTGKGATWLRATLQEAAWAAARSKNSYYRALYHRIKGRRGAKKAIVAVQHAMLVALWHMLKNRVAHHDLGVDYFDRRNTERVRRHHVRRLEHLGYDVVLVQKAA

SEQ ID NO: 40723 - protein, 373 aa, unidentified
MKKAITGVRRFVGLDVHAETIAAAMAEKEEAVRDLGTIPNREESVRKLVKKLNEGGAWGACYEAGPTGYTLYWQLTKLGVPCMVIAPTLVPTKAGDRVKTDRRDAQRLASSFRAGELTPVWVPDAAHEALRDLVRAREAAKQDQLRARHRLGKYLLRHGKRPPQLLRAWTQNYLGWIKREVRFDQRPQQMTLEDYLNEVEHSAVRIDRLEKAIDEAVEQAPESMRELIQALQALRGVARVGAVTIVAELGTLTRFEHPRQLMGYSGAVSSEHSSGGKTRRGGITKTGNAHLRRVIVEAGWSQRYKPVLSLAMRKRQEGLSAEVQEIASKARHRLHSRYVHLLRKGKTKQEVVTAVAREMLGFIWAIGVSVERA

SEQ ID NO: 40724 - protein, 344 aa, unidentified
MDYYAGIDVSLECSSACVVDASGKIVRETKVASEPEALVDWFRSLGLDLARIGLEAGPLSQWLYPAMKKAGLAVELLETRHVSDAFKAMPVKSDRNDARKIAQLMRLGWFRPVHCKSMGAQEIRAMLTARKLIQAKLQDTENSLRGILRGFGLKVGKTTKRSFATRIGELVTGHPALETIAAAMLAVHMVLLREFNGLEKRVRATSRLHEKARLLMSTPAVGPIISLTFACAIDDPSRFTSSKRAGPHFGLTPKKYQSGETDYTGRISKNGDASVREALYEAAHLMLTKPIRGCAQLKSWAMRIARRAGMNKAKVALARKLAVIMLRMLKDNVPFNPAAKAAMV

SEQ ID NO: 40725 - protein, 309 aa, unidentified
MEKVYVGIDISKDSLDVAVHACDKQWRFSNDRAGITSLCKMLMKLKPILVVFEATGGYEMPLYFSLDEAGLPAAPVNARQIRDFARSTGKLAKTDTLDARIIAHFGYAIQPVPHPVPDTQELKIAQARRLQLLEMITAETNRLRGAPKALKRRIEAHIAWLEQELADTDRDLKEMIENAPVWREKDSLLQTTPGVGPTLSATLIAQLPELGTLNRRKIAALVGVAPLNRDSGVFHGRRTVWGGTANVRAVLYMATLVATRHNPVIRSFYLRLCSAGKTRKVALTACMRKLLTILNAMLKHNAPWSYTPC

SEQ ID NO: 40726 - protein, 430 aa, unidentified
MKSNTQNAKIEAITEKTLVLGIDVGSEMHYARAFDYRGIEYSKKPFKFSNTEAGFVTFKEWILDLKERHEKDKVVPGMEPTGHYWFNLGKFLQDNEMKPVLVNPHHVKKSKELDDNNPTKNDRKDPKVIAGLVREGRYMIPYLPEGVYADLRTASNIRFQLQAELTRIQNRISRWFNIYFPEYKTVYGKPDAKSGMLILKAAPLPEDILTLGIDGVNQIWRDAKLRAVGKARAKTLIEAAEHSVGSKEGAVSARMEIRMLLEDYESRNTRLQEVMVLIEELVRKIPMAEKLLEIKGVGIRTVSGFLAEVGDISRFNNPKELQKLAGLALVENSSGKHKGETTISRRGRKRLRYLLFEVAMSLVAKNSEFRELHNYYTTRRLNPLKKMQSLMAIAAKLIRVFYAMLTKGVDYDPKKMVSDIKRPAVYLQAA

SEQ ID NO: 40727 - protein, 415 aa, unidentified
MHIVYPRCCGLDVHKASVSACILITEPAQTQRYRCRFTTMTWDILSLGDWLIENGVTHLAMESTGVYWKPIWNLLEGRVEMLLVNAQHIKAVPGRKTDLKDCEWIAELLQHGLLRGSFVPPPPIQELRDLNRNRAILVQQRATVSNRIEKVLEDANIKLASVASHVLGQSGRAMLQAMADGEVDPEKLAGMARAKLRNKIPELRLALRGRFEERHRFQVKELLDQLHFLDTTIAEFGQQIEQRSRPFAEKIARLMTIPGVDEITASSLLAEIGDNMTQFPSAGHLASWAGLCPGNNESAGKHYSGKTRKGNVWLRRVLCQAAWAASHTKNTYLGALYRRLASKKGKQRAIVALGHSILVAAYHMLSRNQDYQEAGGDYFERVNPDSLRRYLVRRLERLGHHVALSPATVAGYPRA

SEQ ID NO: 40728 - protein, 390 aa, unidentified
MKEDITYVALDDSKNSIVVGILRPRATEPELRPLPNEPRHLRRFFARLQREGPVAVCYEAGPSGYDLYRQLPALGVPCQVIAPALTPRKPGDRIKTDRRDAAKLVRLFRAGELTPITVPDEAAEAARDLVRCREDVREDLLRWRHRLVKFLARHGHVYRDGRHWTQRHWTGLRGQRFALPALQRTYAEYRFTVEQLLARVAELDREIATLAETAPYRERVGRLRCFRGIDTLAAMILLTELGDFARFEHPRRLMAYLGLVPSEDSTGGRERRGSITKAGNLHARRILVEAAWHYRHPPRLGSALARRSQGQPTAVLAQAWEAQRRLHRRYRHLVGHGKRPPVAVVAGARELVGFVWAALTQAAPRTMNPPPEATGARRSMQARLESPRLH

SEQ ID NO: 40729 - protein, 347 aa, unidentified
MIIIGCDYHPSWQQICWIDTLTGETGERKLEHAQGEAEKYYRSLPSAALIGMESTGNCQWFTELMASLGHPLWIGDAARIRAAEVRQQKTDRRDAALLLKLLLEGRFPRIWTPTVEERDQRQLLLHRHKLVEMRVRVKNELQHLAMNRGITKGRRLWSKAGERVLCELPLAPWASRRREDLFRLRKMLDEQITALDEAVKKVAERNDRARLLMTHPGVGPITSLAFVLTMGDVNRFPRGKQVGSYLGLIPREHSSGGKQRTRSISKQGNRFMRTLLVEAAQSVVRYEPEFRKEYLHRCHRSEKGVAKVAAARKLAIRLYWMLRSNTAYPEIVRVESSSRVPLDSSPA

SEQ ID NO: 40730 - protein, 332 aa, unidentified
MNAVSTLGIDLAKNTFCVHGVDAEGVVTVRRTVSRAKLGELVARLPACLIGMEACSGAHEWARRFCATGHTVKLMAPKFVTPYRKSGKNDGNDAEAICEAVCRPNMRFVPIKSVQQQCDLSLHRVRQGFVEERTATLNRIRGLIAEFGYVLPLGAEQLRRQVSDLLDRLPTPVGCCVRDLLDHAERLRSKALEYEREIRMSVQHNELARRAHTRPGIGPITASALVATVGNGHDFRNGRQFSAWLGLVPRQYSTGGKTRLGHITKRGDPYLRTLLVMGARSVLQRAYRQTDPLSRWALALQQRRGYHRACVAIAAKNARVAWALLAKGIAAA

SEQ ID NO: 40731 - protein, 327 aa, unidentified
MTKSALGIDIAKLKFNTCLINQSGKLRHKVFPNTTTGFEQLLDWLSTQGVKQIHACLEATGTYAESLALFLHQAGHAVSVVNPAAIKAFAGSRLSRTKTDRVDAELIARFCQAQAPLAWTPLRQEVRELQALVRRLESLVEMRVSEENRLSSIIAVEVVRHSVEEHLSYLIEQVKRTQELIRNHINSHPTLKQQSRLLDSIPGIAETTAALLLSEITDIIQYRSARQVAAYAGLVPRERRSGSSVRGRTRLSKIGNARLRKALYFPAITALRCSPFFQAWAKGLRERGKCKMSVIGAAMRKLIHLAYGVLKTGKPFDPDWTKEAQNA

SEQ ID NO: 40732 - protein, 425 aa, unidentified
MNYKQNEKINQVKESTLVVGIDIGSTTQYARAFDWRGIELGKVFPFSNSREGFESFKAWMQHLQDKYKKLDAIVGIEPTGHYWFDLGAYLEDEGILLVMVNPYAVKQTKELDDNSQSKNDRKDPKVIAKLVTEGRYSAPYTPDGVYADLRIMVANRKRLIREMTQIKNRFARWFAIYFPEYTDVFGDYEAQSSMLLLKKVCTPEAIVELGAEKINQIWRDAKLRAVGMKRATTLCETAKRSIGLKKGSSAARYEMKLLLEDYEYKKAQLDAVMEEIEKLCRKIPESEQMLAIKGIGVITVAGFLAEVGDVRRFESPRQIQKLAGLSLRENSSGKHKGQTSISKRGRSKLRAVLFNAAIPLIAKNPEFKSLHEYYTTRANNPLKKKQSVIAISCKLIRVFYAILANGVTYDAQKMLSDIHRQPQAA

SEQ ID NO: 40733 - protein, 345 aa, unidentified
MTVYIGVDFHARAQTISYLTTEDGEIRRAQLDHGQPQEVRKFYEQFAGQQVMVGFESSGYAAWFEELLEELGCEIWIGHATAIRLFARRRQKNDRRDADLILDLLWRGDFPRIHRYSPESRAVLQQLRYRQRLVKMRTMVVNSLVFMASSRGVSLRTQLKSRRGIERLQQIALPQPLIEQRDEMCQMLQELKTKIDRVESWLAAKAETNVSVQQLRTHYGIGPLTGLCLVHTLEGVERFANARKVTAYVGFDPVEDSSGERRRIGSISKQGSRLLRFLLVEAGQIAIRKDQDLAQVYQRVLVRRGHAKAKVAIGRRLLVRAFIMLRDEIDYAEFQRRGVAARSSR

SEQ ID NO: 40734 - protein, 344 aa, unidentified
MKKVVAGIDLHSNNVVIGIMDMDGKRVASQKVSCELKEVAKFLAPYEKRLEQIAVESTYNWYWLVDGLRALKYPVVLANPAGMQQYNGIKHADDTNDAFFLAELLRLNILPTGHIYDPELRPVRDLLRRRLMLVHHRTALMLSFKSLYTRTTGQELALGKLKDLEVQEAQELYEHPANQLIAGMQVKHIEQLTESIEKIEQAVLSCARELPCYSKLTTLPGVGRILGMTITMEVGEVKRFAGQGNFASYCRTVEAKRTSNRKKKGENNSKCGNKYLAWAFVEAANFARRYDEQCRRWHDRKAAKTSKVIATKALACKLAKAAWYLMAGDVAYDAKRMFGPATTK

SEQ ID NO: 40735 - protein, 368 aa, unidentified
MRKNSTDVNSLRASFIGLDLADKESTFVGIDGRAKLVEEGKVATTPCGLRKVFAGRDRCRITLEVGTHSPWVNRLLSEMGHEVIVANPREVALIYRNKRKSDKLDATTLARLARSDPELLHPVKHRGKQAQIDLAVLRARDGLVAARTQLVNLVRGSVKSYGERLPKCSTASFPAKAAAALPADLSPALTPVIEQIAALTKKIDQYDEEIERLAAERYPEARGLRQVKGVGPITSLAYILTIEDPGRFPTSRDVGAYLGLTPGRRQTGETDPEMHITKAGDVFLRKLVVQAAQYILGPFGSDCDLRRWGLRLAGAPARSDGQPGKGSKQRKKRAIVAVARKLAVLLHALWRNGEVYEPLRWASKREAA

SEQ ID NO: 40736 - protein, 355 aa, unidentified
MNKINSNFDGQTIHVGMDIHKVSWNLGIHLNDMFVKNVHQKPNPKIMADYLKQHYPGAHYKAVYEAGKFGFWIQRQLTALGIECLVVNPADIPKSQKDTLQKTDQRDARNLGMRLQSGVLRSIHIPDEQQEADRVFFRHRKRIWKDLTRCKNRIKGMLAFSGIDIPEQYDNASWSHNFINWLKAVDCKQQSRRRSLDYMITQMEFLRRELLSISNAIRKMMREQRYKTNYYLLRTIPGIGPLTAASLLVEIGDVKRFETFYHLNSFVGLLPMEHSSGQSENKLSLTVRKHRQLRSDLVESAWTARRTDPAMALYFQEQIKRKDSKIVIIKIARKLLSRIRYVLINQQPYEFGIVK

SEQ ID NO: 40737 - protein, 374 aa, unidentified
MDTIYIGVDFHARQQTICYLKTETGELVTCELKHQDKQQVRAFYEQFAGSVIVGLEASGYSPWFERMLEELGCEVWLGHATEIRRRARWRQKNDRRDAELILELMLHDEFPRLHRGAVQSREVMRMLRYRQKLIKIRTMSKNSLQALALQAGVARRSHLFTREGKQELTAALMSPAMQWQREHWLQLLEPLNQQVLEAMVWLKAQSKGDVYVARLRTHPGIGLLTSLCLVHTLQPLDRFRNTRKVVAYAGFDPVERSSAEHKRFLGISKAGSRLLRHLMVEAANVAVRRDEDLKCFYQRLADRRGKPKAKVAAARKLLIRAYIMLRDEIDYAEFRRRAVAARLARLGHGPKVPEVVIGQPASAERQEPTHNRKK

SEQ ID NO: 40738 - protein, 345 aa, unidentified
MPIVGGLDIHRKQITFDYLDTVTGQVCRGQVSPADREHLRAWLARFADREDAAFAVEGCTGWRYVAEELAAAGVTAHLAEPADTAFARGRKRHAKTDKTDCRHLRMLLAEGRLPECWIPPGRILECRALLETYHDLRAEHTAWVQRIHAVLFHQGAPALGEGALRTGQGLAELRAAAAVRLSPAGQLQVATALDVIEALEARMHELRHQLTDAARHLTGAKVLAARLYGVGPVTALALTCWLGGAGRFSSSRQAVRFAGLDVTVWSSDRKGPPGRLSRQGPPVLRWAVYEAGKAHARASAPDHAYYAQVKERCNGKRAALSEARKLLRQAHHILAELGDDALSAA

SEQ ID NO: 40739 - protein, 369 aa, unidentified
MDVHSTNYTLCAMEPIIGEDDRIFATVDVTPDYKNILMFIENLKMKLGVDNQYDIQCGYEAGCLGYSLYNQLTAANVKCVILAPTTMLTPQGVRVKTDARDARMIAQCLSYGGYHAVYVPTEDDDSVKEYIRMRDDHKTALKKIKQQISAFCLRHGHHYAQSKWTIAHWKWLKKLELSALYREVLDEYMISYEEQTAKIDRLDQRIEELAAQEKYAEKVKKLECFLGIQTHTALSLIVETGDFKRFAKGNIYAAYLGLAPGEDSSGPKTNRTSLSKAGNSHLRQLLVEAAGGICKGTIGHKSKALKARQNGNTAEVIAYADKANTRLRSRYYKFIRHGKARNVAVAAIARELACFVWGMMTDNISVRAV

SEQ ID NO: 40740 - protein, 319 aa, unidentified
MKKIELNLSAKPVIGIDVSKDNLEVFNDVSFNRIVCPNKTRDLERLAKGLKQIAPNLIVMEATGGYETQAAVAFSKAGLPYAIVFPRRVRQLAHGVGLIAKNDQVDARVIAYYGRVGGVQPKPLESNELRELEALTTRRSQLVQMRQMEENRLDTTHPSMRKEIKDHIAWLSRRIDKLNKEIDRRIELSEVWNEKRKLLMSVPGVGPVLASILITELPELGLLSNRRIAALVGVAPFDRDTGKTHGIRFCKGGRNSVRRVLYMATICAARFNPVIKTFYDRLCEKGKRKKVVHIACARKMLVMLNAMTRDGLEFKPSGA

SEQ ID NO: 40741 - protein, 354 aa, unidentified
MSQKLSSEIAVIGIDIGKNSFHLVGQDRRGALVLRQKWSRGQVEARLANLPPCLIGMEACVGAHHLSRKLGSLGHDARLMPAKYVRPYCKGEKNDYRDAEAIAEAVQRPTMKFVATKTAEQLDLQALHRVRERLVSQRTGIINQIRAFLLERGIAVRQGLHFLRVELPGILAKRTDVLSPRMLRVIEDLAGDWRRLDERIESLSAEITRLVEQDPACQRLMTVPGIGPLTSSAMVAAIGTGDVFSKGRDFGAWLGLVPKQMSTGDRTILGSISRRGNRYLRKLFVQAAWVVLVKVKPQQWERYGLKSWIEAAKKRLHRNVLAIALANKLARIAWAVLHNGRAFECVKTNAPRPA

SEQ ID NO: 40742 - protein, 310 aa, unidentified
MKEEGKVYVGVDVAKGHWDAAVGMEEKRFSNDARGLKGLLSWLRSKGAAVQVICEASGGYERRLVQGLQAAGVMVSLVQASRVRQFARASGLWAKTDRIDARLLCAFGEALGPAPSRVWSAEQEKLRELDRQRRHLSRLLVMEQNRHGQLQEKVLRQLGQRLIAQIKRQIARVDELIGELIGQSAELRAKAAKLVAVSGVGARTAALLLAQMPELGELNRGQAAALAGVAPFNRDSGKLSGRRSIYAGRRAVRSGLYMAALVAARHNPILRVFYQRLRAAGKPPKLALTATMRKLLLVLNTALKPIPITT

SEQ ID NO: 40743 - protein, 419 aa, unidentified
MLLRLVVVSMQEERHMVYLGIDWAEAHHDVCLLDEAGTRLDKARVPDGIEGLARIHELIGAHTSNPETVVVGIETDRGLLVQGLVVTGYQVYALNPFAVSRYRDRHTVSRAKSDPGDAKVLAELVRTDRQNHRPLAGDSELAESLKVLARTHQTLVWARVRHANQLRSALREFYPAALDALGTDLAGRDALAVLGRAPTPEQGRRLSLTQLRTVLERGGRQRGVAARATVLQRALRTPQLQPPPRLASAYGSSVRALVHVLGEFNAQIASLEAELAEAFEDHPDAEILRSLPGLGVVLGARVLAEFGDDRTRYENARARRCYAGSAPITRASGTRLVVLARVARNRRLADALYMWAFCALTQSAGAGAYYAAHRARGHTHHQALRALANRLVGILHGCLDHRCCYSETVAWPSAAQAAA

SEQ ID NO: 40744 - protein, 336 aa, unidentified
MFQLGIDVSKKTLDLCLLREGVKGRVKTRKLQNDINAVSAVIAWLSKQHCKPEDVHIIMEATGVYHESLAYGLHKAGGRISLANPHRAREFARGMGMLTKNDRVDAYMLACYGVLKAPEPWLPPPEEVRHLSALLRRRDALVADSTREKNRLEKYLATDTPSVIAESVEAMIGQLNAEIKRLDRLIRSHLNQHPELKKDFDLLTSIKSVGYQLGLNMLVILRSHDFATAEQAAAFLGVVPVEKYSDTLVRGCPKLSKIGPPEIRAKLYLASLCGLRFNPLMKAMYERLCLRGKAKMCAIGALMRKLVHWCYGVLKTQKPFDVGYLPSYARSACKAA

SEQ ID NO: 40745 - protein, 366 aa, unidentified
MKKISTVQVFGNEILKEQKLTIGVDLGDRWSFYCVLEEAGQIILEQKVPTTPEAMKQTFSRIPQSRIALETGTHSPWVSRLLTELGHEVIVAHAQKVQLITKSNRKDDRHDARTLARLARIDPELLGPIRHRSVQAQIHLTVIRARAELVSARTALVNAARGLVKSYGERLPKCGTQQVSRELAAALSTELRDVLEPLLKEIESLNEGIKEYDERMEKIAKEVYPEVSLLKQVKGVGTQIALTYVLTIEDPHRFLKSREVGCFLGLKPGRRNSGESEPQKSISKEGDRYLRTMMVQGAHYILGPFGADSDLRRWGLKLAERGGKNAKKRAVVAVARKLAVLLHRLWVSGEVYEPLRNSQKAMRAVA

SEQ ID NO: 40746 - protein, 354 aa, unidentified
MCATILAVDLGKFNSVLCWYEPASRAVAFRSVRTGTAELRQELNRQLVTVVVFEACSQAGWVHDLCEQLGLAALVASTTGTAWQWKRVKRKTDRDDALKLARLAAVGEIDGVPVPPRAIRQWKSLIGLRKRLVSERVRVQNRIRGLLVCQGLPAPIGAKAWTALGLAGIGRLSRPLAECAPDELWRGELHLLLERLRSHDVQARQVEAKLDALARSDSRVSLLETVPGIGPRTAEVIAAYLPDAKRFRSAGEVSAYAGLVPRQYQSGETDRRGRITRRGPKLLRAALVECAWCSLRYNRWARDTWLRLQANGLSKKKAIVALARKLLVRCWAILRTGHPWRNPIREGTAIPTGD

SEQ ID NO: 40747 - protein, 348 aa, unidentified
MVVGIDVHKRSHVAALLDERGGEIGTLSFTNSPEGMRRLQAWLVAHDAGEAVVGVESPAGYGRLLVASLEAAGHEVLNVPAWRTHRERRRHGPGKTDPGDAIAVAQVVLRKRAELGPALEPELVRALALLELQRRRLVRDRTQAIQRLRADWNQVDPVGEARVVNLSRQRELHRLKRINFGDSLVEQVAARCIRDLARDIEDLNQRIAVLDGEIAQLLQEHGNPVGDLHGAGPQVAAAVIAHAGDVRRFRDAAAFARFCGAAPIPCGSGQTAGRHRLHRGGNRQLNAALYRIAIVQARHHPPARAYLARKIAEGKTPREARRALKRHLANVIYRRLHAWAETTPALNT

SEQ ID NO: 40748 - protein, 382 aa, unidentified
MENPRPHEPAFTRSAREVAQGRGAEASLIQIVRADMTKTATEVQVFAGVDVSARELSVAMRSATMDREEVQSFSNNAAGHQALLGHLLRGKGRARVCLEASGNYSLDLALTLHANRRAEVSVVNPRRARRFAESLGKRNKTDPVDAHVLCQYAVRMPWEPWVPPSALALRLRGLTRAIEALGVTQTQEKNRQHSLRASRALPTFVIRELQRHLEYLQLRITRLRREALRLIARDPELDRRFRLMLTTPGIAETSALQILGELAALPATLDARQWVAFAGLDPVRFSSGTTVDKKPRISRGGSRHLRRALYMPALVAIRHEPHLRAFFQRLVAHGKAPLQAIVAVMRKLLHAFFAMFRSDHSYDGSRLCLVEVASNPVAMCAA

SEQ ID NO: 40749 - protein, 349 aa, unidentified
MPSLAERVDVVIGVDTHKNTHTAAAVAAATGGKLDELTIATDSDGYAALLTWAQSHPGDRVWSLEGAGGYGAGLARFLAAAGEVVLELDRPVRAARRNGAKSDPLDAVRAAREALSREHLAEPKTDGPRAQLAALMAARRSAVEAATLAQHQLHALVIAAPDALRALFRGQTTAVMLATAAKLRPHTGWDPTTVTTAQVLRRLARRSNDLTEEAVEHEKAITTLVKAWRPDLLDQPGIGPIVAAQVLTAWSHQGRIRSEAAFAMLAGTAPIPASSGMLTRHRLNRSGDRQLNRALHVVALSRTRYDQRTRDYIERRRAEGKTDREIRRCLKRYISRQLYRQLEHGGRLA

SEQ ID NO: 40750 - protein, 347 aa, unidentified
MDQQCHYVGLDVSLETTSICVIDDAGAIIWRGKCRSDPDTITAIVRQHAPGAVRVGLETGQLSNWLTLSLRRRGVPVVCMDARHAKAALSLQINKTDANDAFGLAQVVRTGWYREVAVKSMDAHTLRMLLVARSRLVSQRQATANTIRGLLKTFGLVVARGSKGLFPVRVREQIAGNPTLIAIIEPLLAVWHAIRDQVAMLDRQMLARARNDQVARRLMTIPGVGVVIALAYTAVIDDPARFRRSVSVGAYLGLTPRRYQSGEVDTTGHISKCGDSLLRGYLYEAAAVLLCRDARASILKSWGLGLAKRIGMRRAKVAVARKLAVIMHRIWSDHGEYRWTAIPPTAA

SEQ ID NO: 40751 - protein, 337 aa, unidentified
MSVYVGIDVHRKRSQVAVVTEDGTVELNKNVVNGSEPMLRLIGDLPSGTPVAFEAAFGWGWLVQLLEDYGFEAHLVHPLRCKAIASARLKNDKVDAAILAQLLRADLLPEAWIAPPQVRQLRALLRHRASLVRVGTQQRNRIHAVAADHGYDRSASYWTGPGRGWLAELDLPAASREIVTDCLAVIDGLAPVIDRIDGELHAHAKADPRVKVLRTLPGVGEFTALVMVAEIGDITRFPSARKLASWAGPTPTVRGSDLKVRHGHISKQGSAWLRWVMNQAAQTAKRSPDFAVTYSSITKRRGKKIATIAIARKLLTRAWHLLAELQAADASTPPRRP

SEQ ID NO: 40752 - protein, 329 aa, unidentified
MKKNWYVGIDVSKKWLDAAIFVENSDLKGYVHTQVNNDRQGYRELLRWLKEHDVDASSCMYGMEHTGFYSDGLQHFLDKKGYRYTMLEPAVIKHYPIQPREKNDRLDAAKIADYLFRFKDTVKLSRVPDKTMEELRSLHRERKFYVEDRVCYLNRKQVVGKEEAKRLDRMITMLDKQIDSIEEKIREIIRSDESLMENYLYLTSITGIAFVNAVNAIVITRNFTAFKTARDYASYLGVAPHTKTSGTTVRWKPKPHKHCDLTAKADISQAAKIAVVHDVELKRFYERKLGGKEDADTIRKAMNAVKFKLVLRMFAVVKQKHTYRQFTTI

SEQ ID NO: 40753 - protein, 320 aa, unidentified
MRNAVGLDISKLTFDASAMVGKTEHSAKFDNDSKGLDQFSDRLKSLGYQNLHICMEATGSYYEEVADYFAQYYSVYVVNPLKISKYAESRFKRTKTDKQDAKLIAQYCRSAKESELVKRQKPTDEQYRLSRMTAAYAQIKSECAAMKNRHHAAKDEEAAKAYAQIIKAMNEQLEVLKEKIKEQTEKPNCKEGVKRLETIPAIGRMTAAVLFHHLTSSKFETSNKFAAFAGLSPQQKESGTSVRGKGKLTKFGNRKLRAVLFMPAMVAYRIRAFPDFIKRLEEKKKPKKVIIAALMRKLAVIAYHVHKKGGDYDPSRYKSA

SEQ ID NO: 40754 - protein, 329 aa, unidentified
MQNFIIIGTDVSKLTLDHGLHTAMAHHKTTNNEKGFEDWLRWALGFGSKEQLWIILEHTGYYSYQFEIFLHQHQIRYTKVAALEIKRSVGLVRGKSDKVDALFISRYGWMNRDRLAPQELSAAIITELKDLVNLRDKLVRDRSGYKARMKEQAATRKYGKTHIQNKIQTRMIKELTQDIKQVEAAIKELIKADAALLNNYKLLVSIKAIGFVTAVYMLAYTENFCKFLNSRKFACYAGLAPFEHTSGTSLRGKNRVSHYANKKAKCLLNLAASVAIQHNPEMKAYYQRRVAEGKSKMGVLNIIRNKLVDRMFAVIKRGTGYQEVLNIAA

SEQ ID NO: 40755 - protein, 348 aa, unidentified
MTIVDAARPVTGGVDTHLDLNVAAALDPVGGLLEVAEFPATSGGHRRLLGWLAGFGPVTRVGVEGTGSYGAGLARYLRAAGIEVVEVDRPNRQARRRAGKSDPLDAIEAARAALSGRACGVAKTRDGNVEAIRALVVAKRSARATKIKSLNQIRHLSYTAPDQLRERLKGVSRQQLAARAAALRPSQREGADPVLVATKTALRILGRRVLALDEEKACIDALLSELVTQTAPQLLTLHGVGIDTAATLLVTAGDNPGRLRSEAAWARLCGTAPIPASSGKVTRWRLNRGGDRQANCALRGIVITRLSNDPRTRAYMARRLAEGRSKPEVIRILKRYVAREVYRHLPRP

SEQ ID NO: 40756 - protein, 342 aa, unidentified
MKSTTIGLDIAKNVFQAHGVDAKGNVVLRKVLKRRQVLEFFANRAPSLIGMEACAGAHYWARELGKQGHEVKLISPQFVKPYVKGNKNDANDAEAICEAVGRPNMRFVPGKSAEQQDVLALHRVRSGLVKERTAQANRLRGLLGEYGIVIGKGLAQLRKRLPEILEDAENDLSDLVRALFADLNGRILALDQQVAAYGDKLKALNQMSAVCRRIGQVPGVGPITATAMAASLGDGQAFETGRQVSAWLGLVPGQDSSGGKPKLLGISKRGDTYLRTLLIHGARAVVRAVAKKHDAQSRWINALVQRRNANIAAVALANKNARVIWALLRRDEDYRAPVCANA

SEQ ID NO: 40757 - protein, 388 aa, unidentified
MNYMGIDVSKYKHDCFILSCFGEVVNEGFSFTNDADGFKQLERELNLCGKGNVRIGMESTGNYGINLKLFLEKIGFEFMEINPLLVKENIRGKTLRRTTTDKLSAKAIAEYMFSKGYHPHQTEFYSKFALKQLTRFRSRLVSIRSSYLVKMTNVLDCIFPEFKPLFDNKFSVTALYILANYPTPEAISNMNSRSYDILRRKSRGNFSMDKFVTLKHLAKNTVGVYDKCYGSQLETLLDLHSQIDCKIDEVEAEITRIVEGLNPPTLSVKGIGAVSAAAILSEFGDISRFENPNKMLSFAGLEPGYFQSGTSEHQGHMVKRGSPHLRSTLLNCCRALRLHNETFAVYYRKKVSEGKTESVALSHMAKKLVRLIFALETKGELFDPSKLR

SEQ ID NO: 40758 - protein, 443 aa, unidentified
MINPDAAGIDIGHREHWCAIPADRAAKPVQQFGTFTEDLEKLADWLKECGIKTVAMESTGVYWIAAFQILERKGFEVRLVNARQVKNVSGRKTDVLDCQWLQRLHSYGLLSASFRPADQMCVLRSYLRYRDELVCARSAQCQHMQKALQQMNVQLHQVLSDITGLSGLRMIEAILAGERDAQKLANLADRRVHASKATIQKALKGDYRSEHMFLLKVAFELHGTYERKIRECDEQIITEMAKLPTRVDPKQKPLPPRKPGRALIHDLVAGKDLREELYRWTGVDLTAIEGIGVLSAQVILSEIGTDMSRWRTEKHFTSWLGLCPDNRISGGKILSSHTRHVINPVADALRIAATTLERNKSALGAFYRRMKGRLGPASAITATAHKLARLIYRLLKHGDAYVRQGIELYEQRYRERLIYNLKKTAASFGFQLTQTKELTQGVS

SEQ ID NO: 40759 - protein, 350 aa, unidentified
MSGAYEGRQIVGMDLHRRRSVLVRMTETGQRLETVRISNDPEYLRAVMTRAGEAPDVVLEACYGWYWAADTLAELGATVHLAHPLGVKMFSLRRVKNDERDAADLADLWRMGRLPEAWIAPPACRELRGWVRHRAKLVGLRSNLKCQVHAVLANAGVQVGMSDLFSAGGQDLLARVALTPESRARVDSALRLISGLDFEVELFGKLVANRLRSDRGYLAIQAIPGVGPVLAAVLVAEIGDIGRFARPEQLASWAGLTPKHHESDTTVHRGPITKQGSRLVRWAAVEAVQRVGGHTRLGQVRDRVGQRRGRNIGVVAAARELTELVFYGLRDGRLRCLTTPSASNTANPAA

SEQ ID NO: 40760 - protein, 455 aa, unidentified
MAKKNPTTRQSQGKVRQNILERINLHAAGIDIGANFHFVAVGEECTEENVRKFDAFTSDLHRMADWLSEHHIQTVVMESTGVYWIPAFQILEQRGLEVKLVNAAHVKNLPGRKSDVSDCQWLQQLHSFGLLNGSFRPKDEVCVLRSFLRLRDTLVKDSSSHILRMQKALTQMNIQVHRVITDITGYSGMAIIRAILDGERNALKLAQMKHPLVKAPTEVIVEALQGDYRTEHLFELQTALDLYDVYQGKILECEAQVEQHLQQWETKVDFEQALAQTAALQTRSASVRLELHRQAQLLSVCGVDLTRVPGLSTLAVRTIIGETGLDMNCWKSEKHFCSWLKLCPDNRISGGKVLSSRARRTRNRATAMFRLAAQSAMRSQTAIGAFIRRIKARLGAPIAINAGAHKLAQLFYRMLKFGETYVEQGQTYYETKYKERLLRNLNRRAKEFGLQLAPS

SEQ ID NO: 40761 - protein, 410 aa, unidentified
MSRVVIGLDPHKRSATIEVLDSNEQQLTAGRFGTDSESYQRLLAAGRQFPRRIWAVEGCQGVGRHLAQRLVADGETVVDVPAKLSARARVFSTGQGRKTDATDAHSIAVVALRTRSLRQVRADDQTVALRLLADRRDELGAARTLTLNRLHRLLVELVPGGAKKALTARQARALLTDVPAGDVVRETCRQLAAELVDELEVIDTRIKTAKKQLAALVAETGSGLMRLNGIGPSGAARLLGDIGDVSRFPTKGHFASWNGTAPLDASSGEQTRHRLSRAGNRRINRALHIMAVVQLRHPGTDGRRYYDRRVAEGKTPMEAMRALKRRLSDVVYRQLVNDQRAQHATDGEQDTAAQRTGPEGHLGATTKSSAAGSNPNAGASDKSLTEPANPDATPTPDASPDRTSTCLHRL

SEQ ID NO: 40762 - protein, 419 aa, unidentified
MSFKILKNNCCGLDVHKTWIYACIGITDSNGRTEYKQARFSSFTKGLQELCDWLVKYNCNDVCMESTGKYWIPVFNILEKNNLWVTLSHPKYTKPQKGNKTDRKDAKWICDLYMCGMVKPSFIPPADIRQLRDLVRYRFKLTCMITGEKNRAQNCLTVSNFKLDDVFSDVFGKSSRSITEQILQHPGETFDVAPFVDGRCKTPIEEIQAAVDGAISMEQAVKLRQCLNHIDELEKHQAEIEREIFRLSDKYESILNLIRTVPGFDKNPLTAIQVLSEIGGDMSVFPTAKNLISWAGCCPRNDQSNHKIKSTRISRAGSYFKPVLVQVANALIKSKKHPEFTTRYRRIKARRGHKKAIIAICRMILTAIWHILTDLKPYTPEGFLESRPVNKEKVLTISQALNLIKQRGYIIKDDVGPVT

SEQ ID NO: 40763 - protein, 366 aa, unidentified
MKQQHQDSEVTIGLDLGERGHRFCALDGRGEVVEEGSLLNDRASLARLTGRYRGALAVMEAGTHSPWVSRYLEGLGWEVIVSNPRKVRAIYQHERKSDQRDALMLARIGRMDRALLYPVRHGSEQAQQDLLRIKLRDSLVRARVALINSVRFSLKSLGYAVRNPSSERFHKVAMERLPERLQQMIAPSVQALAELSTRIAVLEREINVLARTKYPQTLWLQQVPGVGALTALYFVLKIEDPQRFENVRDVGAYAGLCPRRDQSGQSDPQLRISKRGDPYLRRLLVSAAQYILGPFGPQSALRAYGLMLAADGSARARKRAVVAVARKLAVLLLSLWKNRSHYEAFPHWQTIEDKRSGTIAMHRVEA

SEQ ID NO: 40764 - protein, 340 aa, unidentified
MSIVCGFDVHRQQITFDLVDQVSGEVQTGRVTPATREGLREWLALIDASRLRVALEATTGWRFVIEELERAGAVAVLAEPAETRALRGPKRRAKTDRADARHLRELLERDGVPCSWVPPTHLQELRVLVRLRHSLAGERRVWLQRVQAQLFHRGAPPVSGRLLGPGGAAAEAMLSPAGRELVDTADRVCAQLEREIGELDRRLAVWARRHPACRALQRLYGVGPTIAVALYAEIGDARRLSSSRRLVRLAGLDVTVSESADKRSPGRLSRQGTPILRWAAYEAALSACRRSSPDHTDYQLLRAQIGHGRATLTIARRLLRRAHHVLVAVGDDLLAPLPQP

SEQ ID NO: 40765 - protein, 390 aa, unidentified
MKSDGSKIKNFTIPNSKDGARNLVKEILAALTGFALTDVVIGMEATSVYGDNLVYFLREDASLVPYNRKIHVLNPKQVSKFKEAYNDLPKNDNVDAFIIADCLRFGRINKEIYLDDYRYKALQNLTRARFFAVQNLVREKQRLINVLFKKYSSLAQEKVFADTFGATALAVYETFDSADTLAYMDLQELTTFLRENGKNHFSDPEKVAQSIQKAARSSYRLPKTVNDSVNQVLSISISSIKALESQIKEFDKAIAEQMQLIPNTLISIKGIGPVYSAGIIAEIGDVNRFPNQAALAKYAGLAWKQHQSGDFESQNTRLIRTGNRFLKYYLGEAAMSLVRCDTGYSRFYHLKYNEVNKYQHKRALALTARKFVRLVFRLLKDNRLYIAPLA

SEQ ID NO: 40766 - protein, 343 aa, unidentified
MKSTTIAVDLSKSVFEVAISEHAGKVRQRERLTRARVAPFFAELQPATVLMEACGSAHHWGRRFQEMGHSVVLMPPHAVRPYVPRNKTDRADAKGLLEAYRNEEIKPVPVKSIDQQAITSLHRLRAAWMATRTARMNTLRGILREFGLTIPVGARNVLPHVEAMLNDGIAPQLLAPSLMTVCAEIKTLEDQVETVERQLSVLGRQIPTLRRLMTVPGIGLLTATALYAGIGDARRFRSGRHLASFLGLTPRERSSGAKRVLTRISKKGDTYLRMLLIHGARSVLVALSKRKTPRCDRLSVWALDIQNRRGHNKAAVALANKLARRAWAVWSHDLDFQEEEAIA

SEQ ID NO: 40767 - protein, 367 aa, unidentified
MKKISTAAAKQTRNFQDQKLTIGLDLGDRSSWYCVLDGAGEVLLEQKLGTTPKAVKEVFGGMPRSRIALETGMHSPWVSRLLSELGQEVIVAHARNVRLIGESRKKDDRLDARTLARLVRIDPQLLAPVKHRSAQAQAHLMVIRARAGLVRARTSLINTARGLTKSYGERLRGCNPRNMNPEKAQGLSPELRAALEPLLGEIESLSERIGEYNEQIEHMGKESYPEVARLKQVQGVGTLIALTYVLTLEDAHRFGKSRDVGCYVGLQPGRRNSGQSEPQLHISKEGDAYLRTLLVQGAHHILGPFGADSDLRRWGLKLAERGGKNGKKRAVIAVARKLAVLLHRLWVSGEAYEPLRNHAQVGLATAA

SEQ ID NO: 40768 - protein, 346 aa, unidentified
MRYFAGLDVSLEETAICVVDENGVIVKEVRATSEPEALIVALREVGLPLERVGLEACSLTAWLYEGLRQAGFSAICIETRQANAAMKTMPNKTDRNDARALAQIMRTGWYREVHVKSRQCRLWRSLLVTRRTVLNEMRSIENVVRAILREAGIKLGTPTRTAFADRVRELAGTDASVMPLVEPLLGILATMLREFARLTKQVLDIVRTEMVCRRLMGVPGVGPITALTFRATIDHPDRFRRSRQVGAHLGLTPARYQSGETDVQGKISRCGDELTRTALYEAAHTLLVRSRKWSSLRAWGMKIAKHRGMARARVAVARKLAVVLHRMWRDQTEFRFGKEPGISATV

SEQ ID NO: 40769 - protein, 367 aa, unidentified
MKKISTVTTKKVEKNASQKLTIGLDLGDRFSWYCILDEAGEVVLEQKVATTAKAMKEVFSGMPRSRLALETGTHSPWVSRVLSELGHEVIVAHARHVRLIGESRKKDDRLDARMLARLVRIDPQLLAPVKHRSAQAQADLMAIRARAGLVRARTSLINTARGLTKSYGERLRGCNPRNMNLEKAQELSPELKTVLEPLLGEIESLSERIGEYNERIEQIAKQSYPEVARLTQVKGVGTLIALTYVLTLEDAHRFGKSRDVGCYVGLQPGRRNSGQSEPQLHISKEGDPYLRTLLVQGAHHILGPFGADSDLRRWGLKLAERGGKNGKKRAVIAVARKLAVLLHRLWVSGEAYEPLRNQRQVALPVAA

SEQ ID NO: 40770 - protein, 360 aa, unidentified
MTSTTVAHTPPVVTVGVDTHSDLHVAVALDQLGRRLGELTIPTTPSGYRRLEQWAQELGDLSALGIEGTGSWGAGLVRHLRAGGHRIVEVNRPDRSARRRQGKNDTLDAEAAARAVLAGTATSVPKAGEGHVEMIRSLQLVRRSAQKARSQATNQLRALLVTAPAGLREELRSLTLTELLRLAARWRSGAEPGTHLAVCKHALRSLARRHQQLTEEITDLDHHLTRLVTEVAPNLIAVKGLGPLTSAALLVAVGDNPDRLRSESAFAHLCGVAPVPASSGKTSRYRLNRGGDRQANYALYILAVTRMAWDPRTRAYAARRRSEGKTTKEIIRCLKRHIVREIYRLLVPSPPAAATATTPA

SEQ ID NO: 40771 - protein, 385 aa, unidentified
MSQLSGSTQAALDYNSTIIGALELSEKKWVLAVQLPGVSRHSRHVLEACGDGLASFVERLKGRCAAGGRRIARVILTHEAGRDGFWLARFLARRGIEVHVIQPSSLPVDRRARRAKTDIIDVEMLLRTLMAWLRGEPRVCSMVPIPSEADEEARRAYREREDLTGERRSIVNKIDGILATLGVKGYKALRRDRREQLTAVRQPDGDPIPQKARARIERLLDRLDLVLKLIEQVESARDAVLKKDAPADEAERMIRSLTDLRSIGPDFATLLVREAFVRQFRNRRALGGYVGLGGTPFSSGGSEREQGIGKDGNRRVRAAMVELAWTWLRWQPDSALSVWFRARVGAMGGRIKKIMIVALARKLLVALWRYVKDGVIPDGAKLKAA

SEQ ID NO: 40772 - protein, 438 aa, unidentified
MWWNSQWLLSIFQKGALPMKVVYQTCCGVDVHKSFLVATIIKTTSGVQPSYQKKRFSTFNNSILEFKKWLLDNSCRDVCMESTGKYWIPVFNLLEDELNVTIANPKWVKAVKGNKDDTKDSKWIGDLFRLGLVPGSYIPCKPIRILREFTRYRYKLTSCRSSEKNRFQNALTVCNVALDSVVSDIFGKSATSVIDYLLQQSDNSINHEEISSRLLRSLKKKSESVIESIEGYQMTESQKYRMRLVHAHMDYITSTISDIDSMIDSLVEPYENAVQLLCTIPGVDRNSAITIISEIGTDMTQFSNSKRLCCWAGLTPGNNESAGKKKSVRITRAGVYLKPALVQVAHAAVKSNKSPYYKAKYERIMKRRGKKRAIIAVARMILTAVYHMLSTGESWNPTDLYKIDMPEPLKNKQKEKAVKQAMKLLIAEGLIKESQLTS

SEQ ID NO: 40773 - protein, 482 aa, unidentified
MKKRTIYAEQSQELLRLFEEAGNNAKIMCVPIDYAKKDNVVMFCNGYGDILRKPFSVKNSPEGIEYLSDQVTRSCLSRSINPNHVFFGGEDVGSYAENFANALRAKGWFVGGVNAHDAKKQRANTQASTDRLDLMGIAIMLINRRANCSPAQSGIYLNLRNLVRHRASLVKLSTKVRNQIHTAVDRLLPGFLDEKKTGIAPFSKSSLYLMKDRFSAARIRRKKTDTLTEILRRYGTQNPERAASKLKQYAKAVLNPPNAYIGTLQVSLAQHVRHYQCIRENIEQLEKEIALWLAQTQGAFLTTVRGIGIVLAAGVTAEIGDPNKQKPLNNLVSYAGIIPRVKQTGGPEGNTYTGKVAKRCNRLLKNYVVQSGLHLGLHGPDDLMTDYKRREASGQHADFGIARRYLRMGMCLMRTSQIYLPQRLRNRNTEPKERANYYLMIWPKLRDKWSKLDALNAAFAKDRPLGKWRNMVQELYGITLKR

SEQ ID NO: 40774 - protein, 448 aa, unidentified
MEPQEIDDEEHEQVLERVAAVDVAKASGMVCTRVPHQSRPGKRRTRVWPVDATTNAVLELADHLVAEGVEKVTLESTSHYWRIWFYLLESAELDVQLVRAQDVKQAPGRPKSDKLDAVWLAKLTERGMLRPSFVPPAEIRRLRDYTRLRADLTCERTRHYSRLEKLLEDALIKVSAVASSLAAKSVRDMLEALIGGERDPKILASLARGRMRAKHDRLVQALAGRFDDHHGELARLLLDQIDTLSAQIGRLTTRIEELIAAIPPAQGIDADGTTGPAAGHGKNAPVLPAVDRLDEVTGIGRGGAQAIIAEIGLHMSVFPTAAHLVSWAKISPQTIQSGTRSRAGHTGKGNPYLRGLLGEAAAAAGKTDTFLGERYRRLVKRRGKLKALVAIARSILVIVWHLLDDPAARYHDLGAGYYASRVDKNRKMRNHVRQLEALGYTVTLTQAA

SEQ ID NO: 40775 - protein, 338 aa, unidentified
MAILTVGIDLAKNVFAVHGINEAGKAELVRPTVPRDKLHELIAQLPPCTIGMEACSGAHHWARLFLDCGHTVRLVAPKFVAPYRMSGKRGKNDAADAAAICEAVQRPHMRFVPIKNLDQQSRLMVHRARQGFVEQRTATLNRIRGLLSEFGIVLPLKATTVRRRACECLEDLPGYANTVIGDLLSEVTRLDERIAQYDQHIQAMARQDARAKQLMKLSGVGATTATCLLAMIGNGHDFDCGRQFAAWLGLAPGQYSSGGKTRLGRITKAGDAYLRSLLVLGARALLAAAKSKTDAVSRWATALAERRGYWKAVIAIAAKNARMAWAVLHRGEAFVLPA

SEQ ID NO: 40776 - protein, 344 aa, unidentified
MNYYAGIDISLELSSVCIVDATGEIVKEAKVESHPDALVKFFKAFGLPLTVIGLEAGPLSQWIYAGLTEAGFVTTLMETRHVKAALSATTVKTDRRDARGIAQLLRMGWFRPVHAKSAGSQEVRALLVARKQLQHKLKDIERSLRGILRGFGLKVGKVTDKTFEARIRELVTGHPMLEQIAEAMLAARATLLEQFKKLHKAVLKIVRHDQVCRRFMTTPSVGAIVAITYKSALDDPGRIKKSRNAGPLFGLTPKRYQSGETDITGGITRVGDEMVRTALYEAANVLLSRVTRFSALKRWGLEVAKRRGMKRAKVAVARKLAVILHRMWIDGSTFRWTKTEAAHA

SEQ ID NO: 40777 - protein, 461 aa, unidentified
MKKNKPTGQQKESAGKKTDWKALDIVHPDAAGIDVGGSEHWVAVSPDRDPEPVRPFGCFTADLREMAKWLLDKGVRSVAMQSTGVYWMPVFEVLEQHGLEVYLVNARHTKNLPGRKSDVQECQWLLKLHAFGLLNNSFQPTNEIRIARTLWRQRGSLVAEAGSTIQRMQKVLTEMNIQLSNVLSDLSGVSGMKIIGAILEGERDPWELAALARPEVKATEEDIAKSLEGNWREELLFVLEQEVELYRFYQQKIVDCDLQLRKHLESFGSTVDIQAQPIGPKPKGKKGSRNAPQFDLRTELYRITGIDWAQINGIDVLTAQTVIAEAGADLSAFPSEKQFASWLGLCPTNEQSGGKILNRRTRKVVNRATVAFRNAASTLLRSQSYLGAQYRRLRTRLGAPKAITAMARKLACLFYRLIKHGQQYVDKGTEYYEARYREQQIRSLVKRAQKLGLQLVFPQPA

SEQ ID NO: 40778 - protein, 331 aa, unidentified
MSNCIGLDISKRLIAVHIPINNSDIEINNNITSMKKLSSKLKKLYKREYDDLVFIYEPTGNYSSVLTKYCHTKNIRCFIINPSQFSNHAKALGQRVKSDKIDAQVLSKALHLARDGEVKVPPYNEVVEEIKELMGYYRFTTKLRVQNSNHLEALDAKNGSTYAMNDLKKNIEKLRLKEKEIIANIKAIIATDDKLLKGYDNIRTVTGIADIGGIALLHLFIKYPDANQRQITSLAGLDPIDKSSGTSIHSKSKISKAGSVLYRGSLFLGTLSAIRYDENFTKLFERLTSKGKHTTVAQIAVMRKMIIIAHSLYKNDKVYDKELYKKRPENI

SEQ ID NO: 40779 - protein, 315 aa, unidentified
MDQHTPTFAGIDVSKATLDVYLHPEGSHRQFKNHKTGWRALRGWLNAAHPDGVVYEATGTYHKGIERYLGKHGFPIARLDPRRARKFAQALGISAKTDPIDACGLAQFGAFLKPPTLSLPEPALEQLKELVAARRGLMQQRTRIINKSKTASVPLLKRQLRLSKQQIARQIVQIDTACHEIVNSEPTLAQRLIILKSIPAIGDVTAMTLLAEMPELGELNDKQAASLLGVAPMARDSGAWQGKRFIRGGRATVRRAVYMAALSAMRFNADMKRKYDALVTAEKPPKLALTAIMRKLIILANALIRDNRQWSEVRP

SEQ ID NO: 40780 - protein, 374 aa, unidentified
MEKYCVGIDVDKHTFKACLMVQSDRKKVLSSRSFKNVFSGFTGLLLWVEKWCKDHQVNFVMEATGVYHEYLAYFLHDKNQVTHVVLPLRSKRYMQSLGIRSKTDPIDAKGLSMMGLEQDLEQWIPASKHLLELRSLTRQIETLQAHGTAFKNQREGAKHTKVLHRSVLKSLEKMITEVQTQIDKLEKQVEKLIFNDPVLKQKYDQLTSIKGVGLMSFAVVVAETNGFLLFKNHRQLVCYAGYDVVENQSGRRVGKTKISKKGNAHIRRILNMSSWAVVRYKIEPFHSLFNRVYERTKMKMKGYVSVQRKLLVMMYTLWVKGEKFDPKYGSSGNQELMPLFSVGSTGTRKATASINVEAALDGLPCNQSPKPSFR

SEQ ID NO: 40781 - protein, 344 aa, unidentified
MEAIVTIGLDIAKSVFQVHGGDADGAVVVRRRLTRAKVLSFFERLPPCLVGLEACATAHYWGRELRKLGHDVRLMPPSYVKPYVKRQKNDAADAEAICEAVTRPSMHFVEIKSPEQQSIMSLHRVRQMLMRQRTQVSNAIRGHLGEFGRVAPIGRNGLAQLIAIVADENDNTLPDDVRAAVAMLAVQLRIVNDQILELDRRVRASARATDVGRRLMEVPGVGPVLASALVATVPDASAFKSGRNLAAWIGLVPRQNSSGGKERLGGITKQGNRYLRQMLVVGALAVIRYAQRHGTRRPWLVHLLARRTTKIAAVALANKTARMIWAIMTTGERYREPSAASAAV

SEQ ID NO: 40782 - protein, 347 aa, unidentified
MTIVESTRPITGGVDTHLDVHVAAAVDANGGVLGVESFATTPAGYGELHGWLAGFGTVDRVGVEGTGAYGAGLARHLRSRGLVVIEVDRPNRQERRRNGKSDELDAIEAARAALSGRASGIAKSADGDVEAIRALLVARRSGRNVRIKYLHQIRHLGFTAPDELRERLRDVRTDQLAATAAALRPTAGSDTVVYATKLAIATLRRRVVALDADGRRLDDVLDTLVRRRAPSLLEVYGVGTHTAAILLVAAGDNPHRLHNEAAFAHLCGVAPLPASSGKTQKRFRLNPGGNRQANHALWRIVFTRMSSDERTRKYVARRLAEGRTTREIMRALKRYVARELYPHLAGA

SEQ ID NO: 40783 - protein, 412 aa, unidentified
MDVLVERCAGLDVHRDSVMATVRVPAGRRRQREQHTRRFGSTIGGLEALADWLAGFGVTLLGMEATGVYWKPVFDVLEPRFECWLLNAQHLHNVPGRKSDVIDSAWICQLVEHGLVRPSFIPPPLIRELRDLTRLRTAQIEERTRTLQRLEKVLQDVGIKLTSVASSGYSVSARAMLEALLAGATDPAELAELARGRLRAKIPRLQEALRNRFRVDHHGVLVAGLLAHVDSLERSLARLDARIEQHTAPYAEVVELLCTIPGLGKRTAQVLIAECGLDMSVFPTVGHLASWAGICPGTNQSGGKRRSGRTSHGNRWLRAALTEAAKAAARSKGTYLASHYWQIRGRRGDAKAIGATRHDILVAYYHIVRDRVPFRELGADWLARRYSPEHRARRLVRQLEALGYTTTIEAAA

SEQ ID NO: 40784 - protein, 337 aa, unidentified
MRFCGIDLHSNNSVVVVTDETDKVLVSRRCTNDLAKILALLAPHQSELSGVVVESTYNWYWLVDGLIAAGYAVKLANTVAMKQYDGLKHSDDETDAAHLAHMLRLGILPTGYIHPPAERALRDLARKRVQLVRSRTQHVLAVENILARSLGLGLSAAAIKRLDTAGTDALGLAADVTLAVQANLAVITTLNLEIGKLEARLLESVKLRPEYVHLLGIPGIGKVLATVIMLETGDVNRFAQVGNYASYARCVSSIRISNGKKKGEGNTKNGNAYLVWAFVEAANFARRYSEEAKSFFDKKKARTNSIVATKALAHKLARASYHMLKEGQPFDVKRCFA

SEQ ID NO: 40785 - protein, 433 aa, unidentified
MLLPVGGREAGLLEETHDSEEIIARVAALDIGKAQLVCCVRVPSPDTPGKRLQEVKSYPTMTRSLLVLAERLGELGVTRVVMEATSDYWKSPFYLLEAHGFEVWLVNAKDVKHLPGRPKTDRLDAVWLCKVAERQMLRPSFVPPPEIRRLRDLTRYRADLVAVRTAEKQRVEKLLEDAQIKLSVVASDIFGVSGRAMLAALVAGERDPKVLAQLARTRMRAKLGQLEEAFTGHFSDHHAFLLARMLGRIDQASADIAELEAKIDQEVAPFAQAVDRLDEITGVGRTAAQVIIAEVGTDMGRFPTAGHLASWARFAPGVKQSAGKTKGKATTGHGNPYLARVLGEAAVAAGRTNTFLGERYRRLAKRRGTKKAIVAVGRSILIIIWHLLADPTARFHDLGPGFYDTRVNAERTKRNHVRQLEALGYRVTLEPAA

SEQ ID NO: 40786 - protein, 347 aa, unidentified
MEIIGFDLHKRESQLCRRHPDGRISDERIPTTRARLTATFGGLAPARILLEASTESEWVAAYLEQLGHTVIVADPNFAPMYATRTRRLKTDKRDAHALMEACTVGAYHPAYRLSAARRHLRAELIVRDALVRHRTRTVAVVRTLVRRDGLRIPSGASATFGARVGALDLATQAPTLGAELAPLLALLPALTTAIAAADARLAALAAADSVIRLLATAPSVGLVTAAGVVAVLDDITRFPSAHAVEAYLGLVPREYSSAEHQRRGGITKAGNSRARWLLVEAGWRLLRSRAPEAAALRAWGRGIAARRGSRIAAVALARRLAGILYAMWRDERAYDAPRLGRPRSRRA

SEQ ID NO: 40787 - protein, 343 aa, unidentified
MQVTTVGLDLAKRIFQVHGVDAAGKVVIRRRLQRSEIAAFFADLPACLVGIEACATAHHWARLIGASGHQVRLIPPSYVKPYVRRSKTDAADAEAICEAVGRPSMRFVPVKSAHQQAALLHHRARDLLVRQRTMLINAIRGHLGEFGIIAPAGRRRVADLVNLLQGADDAEVPALAREALQSLFAELSALEIRIKVVEAVIMREHRSNAVSRRLTTIPGIGPITASALAGTIADPLAFKSGRELAAWIGLVPRQHSSGGKQKMGRVSKQGDRYLRRLLTVGATAVMRRLPGKTDGLSLWVRALLDRRPFRLVSLALANKMARIAWAIMVRPETYKASAMTAAA

SEQ ID NO: 40788 - protein, 458 aa, unidentified
MMRRGKPRRKRVRMQVVNPNAAGIDIGSEVHYVAVPPDRDPEPVRSFKCFTADLNALADWLDECGIETVAMESTSVYWIPLYQILETRGFEVILVNARHVKNVPGRKTDVLDCQWLGQLHTYGLLRGSFRPEDRVCVLRSYIRQRDNLIKSAGAHIQRMQKALEQMNIQLHKVITDITGVTGTRIIEAILDGERDPIKLAQLKHPGVKSSHETIAKSLEGDWREEHLFSLRQEFELYGIFRDKIIECDRKIEACLGSFENKVDPDQKPLPTYKHGRKKAQGNQPTLDLRNPLYRMIGVDLIAIDGFDVLTIQSIISEVGLDMTPWPTEKHFCSWLGLCPNNKVTGGRVKDSRSKKVVNRASCAFRMAAQAAGKSHSALGGYYRRMKIRLGPSKAITATAHKLARIFYRMLRYGTDYVDPGLHYYEQKYRQRVLNNLKKRARLLGYELIQNHELSPAVS

SEQ ID NO: 40789 - protein, 378 aa, unidentified
MDRPCSNRVNGNAAEAQLIREKERAMTDIAMHNDRIATIGMDLGKRSFHLIGMDARGKVIMRQQLSRGRFERHLANLQPCLVGVEACAGAHHIGRRLSAFGHNVRLIPAQYVKPFRKGQKNDYRDAEAIAEAVQRPTMRFVPIKSAEQLDLQALHRIRSRLVGHRTAVINQLRGFLLECGVIVPQGPAMLRKILPSVLAQRTDVLSPRMIRLIEELADDWRRLDDRVDAVTSEVQALARQDEGCRRLMSVPGIGALTASAVVATIGNGAAFTKGRDFGAWLGLVPKQLSTGDRTILGRLSKRGNKYMRTLFIIGARAVLAKPSSWAKFGLEGWLVAAAKRLHHNVLAAALANKLARIAWSVLYHGRSFARDFEPQSVS

SEQ ID NO: 40790 - protein, 421 aa, unidentified
MKFKAQDKQNQLIENITSTHLVVGVDIAQETHVARAVSYRGIALGAPIDFGNHDEGFRLFGRWIQDLLTSYKLNKVIIGMEPTGHYWLSLARWLQAKGIEAVLVNPHLVKKNKENRDNTPSKSDRKDALVIADMVKNGYYSPVRFNSEAYEELRILMANRDTVTKRLNSAVNQLHRWVDIVFPELRQVFKVLTCISAIATLRLFALPKEISKLTPEQVISGWKQYVKRHAGLRRAEQLIALAKRSVGAVQALHAYKLHLSQLLEEYDLATRQLELIENELRLVLGRIPYANKLLAIRGVNATSLAGVLGESGDLSGFAHGNVLLRHAGLNLAEASSGKWKGKMVLSKRGRPRLRRFLYLMTMCMVMTNPDVKALHQHNVREKKLKKMKSIMKLCGKVARMLVGLAKSSEAYSSAKVFPQAA

SEQ ID NO: 40791 - protein, 415 aa, unidentified
MNDSLQTFERYLALDVHKHYVVGGGVNAEKKVILPPRRLDLGEWAVWHTKHLQPTDAVVLEATTNAWTFYDQVAPRVGRAVVAHPGLVKVIASARVKTDNRDVLQLARLLAANMIPEVWVPPLEVRELRALLSHRRRLIKMRTMTRNRLNSVIHRYNLIPPRGELFLLKHRAWWFGLQLSPTEKLRIRQDLATLDHLEPEIVEVEEELFRLSTAAPWAEHVPYLMQLPGFGIIVAMTVLSAIGDVTRFPSAKKLVGYAGLGASVHDSGETHRTGRITKTGRKDLRWIMVESAHIAVLYHEYWKREYAKLEKRMDSNKAIVVIARKLLVGVWHVLTERVADRHVTPEMAASKLMVWSWNLTDEQREGMPSRQFIRYHLMQLKLGDDLTHFPYGGRARPLASVDEVLALHPELKSND

SEQ ID NO: 40792 - protein, 420 aa, unidentified
MNKEVRAWIGIDWADEKHDVSLYEVATGRQERLEVKQSPEALAEWIGQLRTRYGNAGQVAVVLEQGRGALLNVLMGCEFLVLYVINPKSLSCYREAFYGSGAKSDPVDAELMREMVRQNPERFRAWHPDDVLTRSLRLMTEGRRDLVNQATAVTNQLTALLKGYYPQALRWIGALDTHWACDFLDQWPTLQALQSSSRRQILRFYEKHPRHHLDLEQQIQQFHQTLPLTGDQAVLEYSTLMVQALIPQLRTLLDSIDEFDRKIAEVFRKHPDRPIFESFPGAGAALAPRLTAAFGADRDRYAAASEMQQFSGIAPVTEKSGKQHWVHWRMACPKFIRQTFHEFADHSRRWSAWAKAYYQLQIERGKKHNAAIRALAYKWIRILFRCWKQRVPYNEQVYLASLLKHQSALLLKAAPAVEKL

SEQ ID NO: 40793 - protein, 427 aa, unidentified
MAKVEHTSDARVLVGIDISKHRHEVLIAVPGKSRRRRLTITNSTDDFMRLIAILRDYGLPVRIGFEATGNYHRVLMYHLGTAGFDLKLVSSVALARTREALHNSWDKNDPKDAQVILHMLQIGAVQIFQDPMVAGTNDIQELSKTHDAVSRAKTELWHRILTHYLPLYFPEADRFHRSSRTDWFLAFLEMFPSPHMISALTKEEFTRAAWEVVGRKVEKSLMLSDIYETAKVSAGLPVSPESDAIRMFRLMLAEGRSLIRQRNAIEDRAIDLLGERPDYQLLRTIPGIGPINALTILAETGDLRRFHHHRQFLKFCGMDLATVQSGMFRGRSKISKYGNARLRRTLWLAGQTAVLKKANSFRDKFERYIAQDRHNPDLRRKAYTAIAAKMARTIHAVIKSGEPYRPFFEGTSPGGRTPLCRAVEAGS

SEQ ID NO: 40794 - protein, 342 aa, unidentified
MNYHIGIDAHHCCSFFQHMDTEGAIGLSERVATDPDSINELLAQLDEPTTITFEAGRNYWWLHEFFANHPMVSQVNVVDPRRSRKLASELSVLSGYGRAKTDFIDAEMLAEQTRRGLAPTIHVPTAEQLEKRTMCRHRFNSVMNRTRAKNLIHAILDLHGYSAKIAGLLTPSANRDQFMASLPPYVAFIVEQFVARIKLFDHQIASCETQLDRLLPESHPQMKIVMSAPGFGIVLGRMVHTEILDIAYFKEPKYLISYSGLAPIENESAGRKGSIKLNKHCNYYLKYAFVEAAHNAREHPRYRRKYDLDVKRHGKIIAKLNLARRLAKTVYWMLTRQQLYRA

SEQ ID NO: 40795 - protein, 314 aa, unidentified
MANSEECFVGIDVHQDTLEVHVDSREEQWECLNDEAGIEQLLTTLRDLSPTLIVVEASGGYERRLVAEGFAAGLPVVVVNPTRVRRLAQALGIIAKTDSIDAYVISRFAAMVRPPVREPKSAEQQQLNALVTRRRQLVGIRTAEKNRLSTCPELMHTDIEEHVAWIESRIEQLEDEINDMLTNNPSWRERAALVRTVPGIGKVTAATLMAELPELGTLNRQKIAALAGLAPYNKDSGPRRRKRRIFGGRASVRCVLYMAALSASRHNPVIKRFYQRLIDSGKKEKVALTACMRKLLVILNAMVRKQEAWSYDPA

SEQ ID NO: 40796 - protein, 395 aa, unidentified
MFIVGIDIAKRSHEAIIIAEDGQVVRKAFSFRNNCTGYNLLLEPVRRLTLVKSQIVFAMESTAHYWLALYARLLKDGYAVMVLNPIQSHSLRELYIRKAKTDARDSLIIADLVRFGRCKASNVPQDKILALRELCRSRAYLVDMAADLKRKLIALLDRIFPEYESLFDSVFSKASIAVLSKYSTPQKVKNANLGKLTDLLMESSNGHFGEWKAHQLKEAACSSFGIDDSGGVYSTLLGMFLEQILSLTAQADSLEKQISVFFQEFNNPLTSIPGVGTVLAATILSEIGDITRFSSADKLLAYAGLDPSVKQSGEFKSNQNRMSKRGSPYLRRAIWLASTVAVHRDPMFQTYYEKKISEGLHYMNVIGHVSRKMTAVIFAVLRDGQPYQPILQSAG

SEQ ID NO: 40797 - protein, 395 aa, unidentified
MKKIVHYIGLDVHKDSIAVAIAPQNSTEVRRYGIIGGTLQAVDNLLKRLAKPNLELRFVYEAGPCGFVLCRHLRSKGIHCDLVCPSLIPKKASDRVKTDRRDADQLARLYRASELTPIHVPDQEDEAIRDLIRARTAAVCDQRRARNRLKGFLLRLGFRYTGKTSWNDAHKRYLSGLLMPRPAQQIVFQEFIHAINDAAERVARLNTAVVDALPGWKWEPVVHALMTLRGMQELSAMTVIAEVGDLSRFENPRSLMHFFGLTPSEHTSANKRVQGPITKCGNPHCRRVLTEAAWHYRLKPLVSEAMQKRQEHQTKEVRMLAWKAQERLHKRFKHLAAHKKSVVALTAIARELVGFVWAIACKVKPAQKPPAPEVIRTCQGKVYRLNPQKKMPKTQ

SEQ ID NO: 40798 - protein, 327 aa, unidentified
MITMIGIDVSKDKNDCTWLKDIETGKVKTKVLKNTPAGFQALIDWTIKNTGQPIDAVHFIMEATGIYHEALAYALHEAGATVYVVNPAHMHSYAKSLGTRTKTDKKDSVIIARFGATQSPRPWKPEPGEIRELKALIARYEAIDKDCQRESNRLEKAEVTQVSVAVIESINTVIQELTKEKARIKQLIDDHINHHPQLKKDRAYLESIPSVGPVVSQYMVAFIRSRDFISAKECSAFIGLNPVMHESGTSVRARPHLSKMGNAKIRAKLYMAAVVAIQHNPDIKRQYERLLKNGKSKMSALGAAMRKLVQICFGVVKHQTPYQPQVE

SEQ ID NO: 40799 - protein, 342 aa, unidentified
MQITTIGLDIAKNVFQVHGIDATEKVVVRKQLRRGQMLAFFKALAPCLIGMEACATAHYWARELTKLGHQVRLMPAKDVKAYVKRNKNDAADAEAICEAVRRPTMRFVPVKSAEQQARLMQHRARDLLMRQRTQLINALRAHLAELGIAAAQGREGIKELLAIVAQDGDTRLPVDAHASLIVLAAQLQAVQTMIGSIEKRIVAQHRSSEENKRLQTIPGIGVLGASTIVAVVPDPKVFRSGRDFAAWIGIVPREDSTGGKQKLGPISKQGDQYLRRILIVGAHSVLRRARQQPEKYPWLTQLLTRRPFKVVAVALANKMARIAWALLAKGGTYRAPALAAAA

SEQ ID NO: 40800 - protein, 393 aa, unidentified
MRKPKQQTKPLNDLSRSLTPFDPNQTLIAVLELSNESWLVAGIIPGVERQPLKKLEPNENELLKLLERWRTEAEKSGHKINRIAVAFETGRDGFWLARWLRARGIDAYVIHAASVAVSREHRRAKTDRLDTEGLKRAFLGWLRGERAHCKMVAIPTLAEEDAKRPHREREMLVGEQTTIINRLKATLARLGIRNFNPKLKKAPERLEHVRTPEGEPIPPNTLAELMRDLERKRLVHEQILNIEKARLEQLKRAPKVGPNLMVLLLMRVIGIGIDTADMLVKEVLSRNLRDRRAVARYAGLTGSPDESGKRRREKGLARSGNARVRRGMIQLAWRFLAFQKDSAQVKWFRARTENAPRLRKKMIVALARKLLIALWQLVRDGVVPEGVVLRPAH

SEQ ID NO: 40801 - protein, 442 aa, unidentified
MTTDKETRLERRSDRRLLVMPRVVTTHTRGRWESVLLVGIDWADKEHVYCLMDDAGTTLATGTVEHTAEGLERFMNAVRARVQTPNDILIALETPHGPLVGALLDQGFTVYAINPKAVERHRERFRVAGAKSDLRDAWVLAALLRTDRALYHPLTPDSDVAQELRALTRDRADLVRTRTMLSNQLTACVKAYFPEFLTLFSDPDRPVALALLQAFPTREHLQAAPRAELETFLRRHRCPHSRKRAAAIHERMQAPGFHIASPIVRAKARLAATLVAQLQTLGEYLDAYEREIQRVLTLHPDGELYLSLPGAADVLAARMVGELGDNRDRYRDPNIAQCEAGTAPVTKKSGSTRTVHFRRACIHPLRETLWQFAFSSLRRCGWAHAYYNQARKRGKKHAEAIRMLGNVWLRIIIAIRRNRRPYDEEVLQKARLRHGTPGLCFA

SEQ ID NO: 40802 - protein, 353 aa, unidentified
MEQFIGCDAHKKFSVFVAVNEKGQAGEALRVAHDRQLYREFLARLPGHSAIAVEASGSYSWLVDEMERSGHHPRLCDPLEAKRRMGLTNKTDKLDARGLAILLRNGTLPEVWIPPAEVRDQRELLRLRIFLVRLRTRVKNRIHGTLARHNVQVPGADLFGVAARLELVARLPELPVHSREAVEQKLTTLDFLETQIESAERRLESIMKMSVEADLLKTLPCVGKILSMVLMLEIGRIDRFPTAAHLASYAGLVPRVRSSGGRTHMGQICGNVNRNLKWAFVETGNLIVINQRRFAGTHVVRLYQRIKRAKNHQKAVVAIARHLAEAAWWVLTKQEVYREPPGPRQQALSSTHG

SEQ ID NO: 40803 - protein, 412 aa, unidentified
MVINLKVIVKKTAGLDIHKTIVVCTVRHLQDDGETVIKETKDFRTFPDDLVELGRWLESRGIEVAVMESTSVYWKPVYTAIEDLSFRVMVVNARHVKAVPGRKTDVLDSEWLATLVGYGLLRPSFIPNKDFREIRIITRYRRKLSQMLGSEKNRLQKILEDCGIKLGCVVSDIDGVSAREMIASIIEGDHSPEEIALLAKGRLKNKVDDLKLSMNIKISDRHRFLLQQIQGHMAQISEELEIINDQVVASMMPYQEEWQLLQTIPGIDKMGAAMLLAEIGINMNQFGSKDRFCSWAGMCPGNNSSAGKRKSGRTTKGNTYIKSLLCEFANSARKTKTQFKSRFDGLVIRRGYKKSIIALGHRILEIVYILLKNKIPYKEPSVNYEELIVKRNAPRWIKKLKEFGYISKNQTP

SEQ ID NO: 40804 - protein, 408 aa, unidentified
MSRAKKRGPGPSHLLITPDHAGNVVGVDPHKRTLTATVVDPRGGVVASEHFKVSAGGHRALEAWARQFGQIARWGIENAAGWGRHTAIFLAGRGHDVRDVCANRTPRQDRARQRGKSDTLDSERIAREALAHPLLPKAFKRAGQDQGPDELHQLLALWHNRRRSILTSRQHLVGEAEQLLCELPLELREQLPDSKAVRPRLAALTRRNRRRRYDAPTRLRLALLDGYHAQITALDREEKQVVAHLDALVRESGSTLGELCGLSTRSVAELLVETGDPRRFTEGGFRRFNATAPLPASTAEGPGEPVRHRYNPGGNRRINAILHRMAVTQLRCEPRAQQVYANARANHHTKKEARRVLKRHLSDVVYRRMIRDLATASHPPAQPSSLPNPARTPRSQGWPDRAERQRAA

SEQ ID NO: 40805 - protein, 401 aa, unidentified
MPSDKQGDAMQISVGIDIAKEIHWVTAIDAGGVVQVDRKLLNTPAGIATLVDELTALRGTVRIGLDVIGGIAGLAEAMLGDAGFALVHVPGIAVNRARQGTVGGENKSDPRDARTIAEQVRTRSDLRPIEPATELDLEIRLLVGRRSDIVQAQTQRLSRMRDLLVGIFPGLEACLDLKTKGPLHLLTKFVTPAELRDAGKKRLVRHLQAAGGVPKVEDLADRVLTVATEQRIAVPGERTTARLIRELAVEALASRTRLTELDRELEALLARHPDAALIRSLPGMGAVLTAELIAEAGNLARFRSADALASAAGMAPVLRQSGRSRFLRRPSGGNKGLKRVFYQSAFCSLAHDDSRAFYERKRREGKRHHQAVIALARRRVNVLWAVVHSRTPFQTAFKTAA

SEQ ID NO: 40806 - protein, 378 aa, unidentified
MPSTPIIWIGMDVHKDTVMLAVFEDGRREAEIVQQLPNEDRKLRRFFERWSERGDIRSCYEASGAGYVLHREIREWGHACEIVAPSLIPIRPGERRKHDRRDAMQLARLYRAGELTAIRIPTPTEERVRDLVRCRQCLQREVLRSRHYVLKFLARRGFVYRAGTNWTHGHFDWLRSLLRDGSLGPEDCSVFGEYFALLEYKISRRDDLDSQIEKLALRPAYKPWVGRLCCFRGINTLAAMTLATEIGDWRRFERPGQLMAFLGLVPSEHSSGDRQHRGPITKAGNSRCRHVLVQAAWTYRHRPTIGVGLKKRQQGQPAGVAAHAWKAQHHLHKLFHRIAARKSSRIAAVAVARELVGFLWAVMRDLEAEQDHLLNEAA

SEQ ID NO: 40807 - protein, 453 aa, unidentified
MRRDKSQVRAWEGLKVVHPHAAGLDIGSEEIWAAVAPAGNKEPVRKFGTFTPDLHALADWLLACGVDTVVMESTGVYWIPVYEILEARGLQVFVVNARHVKNVPGRKSDIQDCQWIQGLHSVGLLRGSFRPAGEIVALRAYLRHRAGLIEHRAAHIQHMQNVQLTQVVSDITGMTGLAIVRAIVAGQRDPQQLAALRDRRCKKSVREIAKALTGNYRPEHLFALQQALALYDFYTAQMAACDAEIERQFANLKPASDDLPPLPPSQKLNSHSKNTPTYDARSHLYRITGVDLVAATGLNESTVQTIVAETGSDLSAFPSEKHFSSWLGLAPHNDISGGKRLRSRTLPTNNRAGQAFRMAAQSVSKSPNSAFGAFYRRMKARLGAQQAIVATAHKIARAYYHMLKHRTPFHDMGGEEYERRARQREIRNLQKRAAKLGLSLVETPTAAALAGSF

SEQ ID NO: 40808 - protein, 417 aa, unidentified
MSVEQMMGVRRAPTEVMGRVTAGIDWASEEHSVAIVDDQGRPVDRFCIVHTGPDLRRLIARLRRWGVTEVSIERPDGPVVDALLEAELTVFVIDPKQIKNMRGRYGSAGNKDDRFDAYVLADVLRTDRARMRPLTRDSEQTITLRMTVRARQDLVHARVAMANQLRAHLQTTLPGAIGLFRDIDSAITLRFLTRFPSQDKTDWLSRIRLGNWLRSIGYNHLANLDRLWAHLRDAPRGTTGSQAANRAEITLALVAGLSSLRTQIKTLEHQIADQLAAHPDAAVFTSLPRSGTVRAARLLAEIGDARGRFPTPEALTCLAGATPSTKQSGKVKVVTFRWAVDKQLRGAVMDFAGDSHHANPWAADLYAKAIARGHDHPHATRILARAWLHIIWRCWQDGVAYDPAKHNALQRLQRQAA

SEQ ID NO: 40809 - protein, 387 aa, unidentified
MSTTSVSNILYVGLDVHKEWIVIAVLPADAERPTQVDKVPNEPKALRKYFARLADRGAIRACYEASGAGYVLQRAMREWGYPCAIIAPSLIPQRAGHQRKHDRYDATQLARLYRAGELTSIRIPTEAEERVRDLVRCRGTFQREVLRARHYVLKFLTRRGVRYTLGKCHWTRAHHMWLDRLTREDGLIAEDRVVFQEYLALLRYALQRRDALDQEIERLAIAPALAAAVGVLGCFRGIKTQAAMTLATEIGDWQRFATAGQMMAFVGLVSREASSGQTEKRGGITKAGNSHCRHVLIQAAWAYRHAPRVGAALARRQRGQPAAAITHAWKAQHRLHKLYRHLAYRKRPQVAVVAVARELIGFLWAAMRESPAVSTATTAPTFTQEAA

SEQ ID NO: 40810 - protein, 412 aa, unidentified
MTAINQFAAHVGLDWADKKHDVCIQYESGERRFQVIKHTPEALDSWLKELHKQVKGKIAVALELKKGPIVYALQKYPFVTVFPVHALSLARYRQAFWPSGAKDDPLDAELALDLMLRYPKKIKAIEPSNSDIRLLQQLVEQRRLLVEDKRRFVNRIINTLKQYYPQPLEWFSHRDSELFCDLIIRWPSLQQLKRARAHTVRLFLNAKGGTAVAHTEQRIELIVNAVPLTTDVSIIQANALMAVALAKQIKLVAENIKAYDERIEALFDTLPDAALFKSLPSMGPCMGPRMLAALGDDRNRFNSAEEIQNYAGIAPVTERSGQKSWVHWRWQCAKFVRQTFVEWAAKTVYSSYWAGLYYQQQREKGKSHQSAVRALAFKWIRIIYRCWKTRTRYDEAKYLKALRERQSPLLMA

SEQ ID NO: 40811 - protein, 310 aa, unidentified
MDAIYVGIDVSQARLDVHVLPSGEAFAVARDGKGLEELIERLRAFSPQLIAVEATGGFETIVAAALAGAGLPLVVVNPAQIRHFAHALGKRAKTDPIDAAVIAHFVEAVKPELRALPDEAQRLLAELVGRRRQIIEMMVAERQREKRAANVRVRKSILRHIRVLEKELPEIDEDIGTLVRGSPVWRKKEDLLVSFPGIGNTLARTLLAEVPELGELTRREIASLVGVAPFTRQSGRWKGKSMIGGGRGSARSALYIAALVASRHNPGLRTFYRRLLAAGKPKMVALIAVARKILTTLNAMLRDKRKWQPA

SEQ ID NO: 40812 - protein, 353 aa, unidentified
MKKIAIGIDFSKKTFDATIVRRDADTYIELAYSKFNNDVKGFKALEKFVKATLKGSPEAKDKSSWIFCGEHTGTCSIPLCDFLAKKQYFMWLESALIIHRKCGIVREKNDKVDSKRIAEYALRNFSTDIKPYELDSKDFKKLKSLYAAHDMLTKDKVAKINQLKSGTLDSSTAAKHEIDRQLTSIRKSLNEIDDEIKRLLAESEEFSHNFKILNTFKGVGFLTITCLIIKTRNFKDMKDARELGCYIGVVPHRQQSGTSIDKPSRTSKYRDKNANALLSTCVQSALRNGNPIIRPYYDRLVKRGVNHYKALNNCKFKIINVLLAMLRNDTRFSMDIHGKSRAQWGADRISVAS

SEQ ID NO: 40813 - protein, 411 aa, unidentified
MNAVGIDVSKGKSTVAVIRPYGEIVRNPFDVKHTPKELSELANFILSLEGESRVVLESTGKYSDPVVKVLSESGVFVCAVNAKLIHDYGGGGDTIRRDKTDNIDSLKIAGFCLDKWVKLGRYTPEDELRKTLKTFNRQHDEYMKVKVMLKNNLISLTDQTFPGINNLFTSTARDSDGHEKWIDFLSRFWHCECVTSLAEDVFAERYQKWCKKNGYNFASSKAKEIYESALNQQVTLSKNDFTKTLITQSVSQLNSLCVTIAKLKSEMTRIAKMLPEYETVMGMHGVGKALAPQLMAEIGDIRRYPKRSSLARFAGIEPPENQSGAYNQYSRRISKQGSPQLRKTLFQVMRCVLQRGNAEEDTFQFINRKRSEGKPFKVYMIAGANKFLRIYYARVKECFELSVQPSLVVAA

SEQ ID NO: 40814 - protein, 348 aa, unidentified
MRFYTQQHKHYCGIDLHARMMYLCILDGAGALLLPRNIECNPKAFLAAVKAFRDDLVVAVECMFTWYWLSDLCARAGIGFVLGHALYMRAIHGGKAKNDRIDAHKIATLLRGGMIPQGYVYPPEMRATRDLLRRRNHLMRKRSELIAHIHNTASQYNLPAFETRRIQKPSERTDVLAHFPDPQVRNSVALDLAMIEQYDALLPKLERHIRACAKQHDRKAFVLLRSIHGADLIIPLVILYEIQDVGRFPRVQEFLSYARLVKPTRESAGKIQGHAGGKIGNAHLKWAFWELATTFLRANAPAQQLHERLKKKHGKGKALSVLAAKLARAVYFMLSRGQVFDAHKFYQD

SEQ ID NO: 40815 - protein, 393 aa, unidentified
MICVGIDVAKDKYDCFILSSEGEVLADVFTIPNNAEGFDTLLQTIRRCARPEDKIKVGLEATGHYSYNILGFLLNEGLDTYVINPLHTNLYRKSLSLRKTKTDRVDARTIAAMLMSDVDLKSYTDTAYHNEELKSLTRYRFDKVRERAKLKQSVSRLVTILFPELEKLVSTLHMASVYALLSEFPGGKQVSEAHLTHLKAVLYDASKGRYGSDMATTLRDAARCSVGSVMPAKSLELRHTIRLIHELDAEIEDIEAAIQSMMDEIQSPITTIPGMGVRTGAMILAEIGDFSRFDSPDKILAYAGMSPSTYQSGQLSLSGAYSHMEKRGSRYLRYALYNATKYVCLWNPTFAAYLAKKRAKGKHYNVALSHAIKKLVRLIYALEKSKRPYSTAA

SEQ ID NO: 40816 - protein, 452 aa, unidentified
MEEPQEVQDEEYERVYQRVAAIDVAKASGVVCTRVPDESRPGRRRTKVWTVIATMNAVTELADHLRCHQIQVITLESTSDYWRIWWVVLEAAGLKVQLVNARSVKNVPGRAKTDKKDAVWLAKLTERGMLRPSFVPPPEIRRLREFTRLRADLVHERTRYWARLEKLLERALIKISAVASSLDTLSVRAMIEALIAGQRNPKALADLARGRLRIKRAQLAEALDGRFEPHHGELARIILDQIDALTAQIDQLTARITELIAATPAAQGIDADGTTGPDAGADPGAPVLPAVARLDEITGCGVIAAQAVIAEIGLDMTVFGTPGRLVSWAKRCPQTRQSGTKTSAGKAGKGNPYLNGVLGEIAASAGRTDTFLGERYRRLARRRGKRKAVTAVARSVLVVIFHLLADPQARFRDLGPDYHDNRISRDRKIANHVRQLQALGLTVTLTPAEEAA

SEQ ID NO: 40817 - protein, 418 aa, unidentified
MRNSWTPYKFTFGGTRMYNAVGIDVSKGKSTVAVLQPAGVIIRKPFNVNHTSSELDELAKYIGSLEGETRVVLECTGRYHEPVVKTLSEAGLFVSAVNPHLIKNFGNNSIRKVKSDPADAKKIARYTLDNWIELRQYSSMDNTRTQLKTLNSQFSFFMKQKVAAKANLIALLDNTYPGVNKLFDSPVRDDGSEKWVDYAYSFWHVDCVRKIGLKTFTERYQAFCKKHHYNFQPAKPAELFLASKDLIAVFPIEASYKQLIQQSIQQLNLASSHVEELRSKMNELASTLPEYATVMGMYGVGKTFGPQLIAEIGDISNFSHREALTAFAGVDPGVDQSGTHNSKSNKASKCGSNHLRKTLFQIMSTLLQTAPEDDKVYQFLVKKRAEGKPYYVYMTAGANKFLRIYYGKVKECIHNLEQ

SEQ ID NO: 40818 - protein, 421 aa, unidentified
MERVTKPRWASVDWGNERHAVCVLDAEGKEVEAFETPHTAEGLDEMIGRLRRAGTIVGVAVETTRNLVVQKLLEAGFVVYPINPKLSHAWREGWKVAAGKDDRSDAWVLAEGLRQHHDRLRPFQPDDPRTRELRLLCADESRLIADRTGLVNRLQAALKEYYPQGLAWFEDWSKPTAWDFVLAFPTPEALGRAGRKKLYGFLKSHCIGLHPIWQERVEARASGPAWPSDPATVEAKSFLAVALAKELRTLQGSLDLYRERIEKLYGDHPDSSLFSSLPGAGPKLAPRLLIHFGTDRRRYDSAQSLQQLSGTVPVTVQSGRSKRVRMRRECQRDFRNTLHLFAFLSLKRSTWARAFYDRCRRGGQSNALALRNLARKWIRILYRMWQDRVLYDETRYLASLIRRRSPLVQEIMSQQPLTTGA

SEQ ID NO: 40819 - protein, 348 aa, unidentified
METVTIQKNFYCGGDLHAKTMFLSIMDAKGEILFHRNIPNNPPYFLSVIQPYRHSIAVGVESTFNWYWLADTCQKENIPFFLGHALYMKAIHSGKNKNDRIDATTIANLLRCNMFPPAYPYPKEMRGTRDLLRRRYRYVTLRAESYTHIQGTFNQQAIDGVGSSDVKRKSSRADLPNHFDHPDIAMSVNCDIELSNALDPIIDKIEKQVYARAKYHDHNALSILMTTPGIGKILAFTILYEIHTINRFPSVQNFSSYCRLVKCERTSNGKYTGGGNNKIGNPYLKWAFSEIIIHAQTHSPNIKKYYERLISKHGVGKAKSIMAHKFAVAVYFMLKNKEAFDEKRFLSY

SEQ ID NO: 40820 - protein, 417 aa, unidentified
MTQYAALIGIDWADSKHDISLIEMATGEQEAAILRHCSKSIDEWATNLRARFGGEQIAVCLEQSRGPLIFALMKYDFLTLYPINPQTLAKYREAFSPSRHKDDVTDAAYLAELLLHHREHLRAWQPDSEQTRTLRYLVEHRRRLVDDRTRISNRLTALLKLYFPQVLEWFPDIRTELVCDFLLRWPSLETLRKVRRATLLKFFRDHNSVRAETLDKRVAAITASQPLVIDRAVINSSAVMCKALVSQMKTTLNAITEFDAEIKAICAVHQDFALFKSLPGAGNIYASRLVVALGSDRERWQSADDVARLSGIAPVMERSGKSCRVRWRYFCPKFLRQSFHEYAGESVRHSFWARAYYDEQRAKGKSHQAAVRALAFKWIRIIYQCWKTRTAYDEVKYLDGLRQKGSSLLNYAANNPA

SEQ ID NO: 40821 - protein, 402 aa, unidentified
MAGITAGIDWASEAHEVCISKEGEVLERFSVAHDERGIAGLARRLTKLGVARAAIERPDGILVERLLAAGLEVLAIHPNQVKAARARFAVAHGKSDRFDAYVLAELARTDAHRFRALVPDSEETKALKTLTRAREDLVGVRVELANQLRAQLQAFWPGALLFAVLDSPISLAFLKRYSSPAEARSLGQGRMAAFLAREGYSGRTDPDELVARMRSAPQGTAGPAEQEARRAVVLGLVSALEPIVSEIAALDAQIRERFVAHPDAAIFRPLFRDRRTTICPATLIAELGDCRGRYPTEAAMAADAGMSPVALESGKLRVATFRRACDKRLRLAVATLADSTRHWHPWAKEVYRRARARGQDHPHAVRTLGRAWIRVLWRCWQDRVPYDATLHGNSRRLQPAGG

SEQ ID NO: 40822 - protein, 496 aa, unidentified
MNRNKSKPKIDRAMPMVHPNAAAIDIGATMHMAAVSADRTPEPVRSFGTFTTDLHRLVDWFKECGVETVVMESTSVYWIPIFELLDARGFTVFLVNARDAKHVPGRKTDVSDAQWLQRLHSYGLLRASFRPKGQIAELRAYVRQRERLLEYAASHIQHMQKALTEMNLQLHHVVADITGATGLRIIRAILAGERDPKVLTRLRDYRCHSSAETIEKALTGSYRAEHLFALEQALALYNVYHEKTSACDTRIEAVLKELSIDRSRRSDSLPSSGRPRSDQVNALAFDVREALFALLGKDITQIDGLGPYLSLKLIAECGDDLSAWPSAKHFTSWLGLAPSNKISGGKILSSRTRRCGSRASALLRLAAVTIGRTDTALGAFYRRLSARIGKAKAVTATARKIAVLFYNAVRHGMEYVDPGASYYETRYRTRVVNNLHRRAKAFGFVLQPMEPTPGVVSSPILACSDFTSTAGVTGAGLPVPNTLEAPPSSWAFQAVT

SEQ ID NO: 40823 - protein, 342 aa, unidentified
MVSAVTMGLDLGKSVFQVHGVDAGGAVVVQRRLTRGKLLGFFAKHPACLVGMEACAAAHHWGRELRKLGHAVRLMPPNYVKPYVKRQKNDAADAEAICEAVGRPNMRFVEIKTCEQQGTLVLHRVRLMLMRQRVQLSNAIRGHMAEYGLVAPVGRNGLQRLIAILGNPDDERVPAVARASLAPLVCQFGLVNDQVLENDRRVRASARSTELGRRLMEVPGVGPVLASAMVATVPDPTVFKSGRNLAAWIGLVPRQNSSGGKEKLGGITKQGDRYLRQLLVAGALAVIRYAQRHGTKRPWLVRLLARRSPKIAAVALANKMARMIWAMMMTGERYREPVVAAA

SEQ ID NO: 40824 - protein, 426 aa, unidentified
MRFYTTPHRYYCGIDLHARRMYICVLDAQGKILVHRNGPATPEHFLATIAAYREDVVVAVECIFTWYWVADLCAQEGIPFVLGHALYMKAIHGGKAKNDKIDAHKIAVLLRGGMLPMAYVYPRAMRATRDLLRRRCHFMRKRAELITHIQNTASQCLLPRFGKKIAYHGNRTDLAEHFTDPEVRKSIETNLALLDHYDRLLTDLELHLTRSAKVHDPNAFYRLRSVPGIGQILALVLLYEIHDIHRFPRVQDFASYCRLVKCAKESDGKHYGYSGTKIGNAHLKWAFSEAAVLCLRRNPAAQQYVARLAQKHGKPKALTILAHKLARAVYFMLSRGHAFDATKFFPASAAHGRAVATTDRTPDTPSGAASLVRRAVGHDDAARAGAPRPVREGGRYLMTPEIDPATEEIALAVNDEEVSMLSTIRD

SEQ ID NO: 40825 - protein, 347 aa, unidentified
MVTLGTDSHKQSHTVVAVDENGRQLAELRVAATPSGHVQALVWARQWPERRWAMENCRQLSRALERDLLSAGEQVQQVSPKLMGASRRTGRELGKSDPIDALAVARVALREPHLPVARLEGRSREFKLLVDHREDLVGERTRTQNRLLWHLHELEPGWVVASSGLTRGVVLGEVARRLQAHSGLVAEIAGELVERLAELNASVKRLQQRIEAMTAELAPSLLALPGCGGLTAAKLVAETADVRRFHSKDAFAMHNGTAPIPVWSGNQQRHRLNRGGNRQLNAALHRIAITQLRLGGQAAAYVARRMSQGDSKTEAIRALRRQLSDEVYRRLRLDALEHAPASASVAA

SEQ ID NO: 40826 - protein, 336 aa, unidentified
MNGSTGRWVGIDVAKSKLDVALLDERGKVKSHVFANDAKGHAALIAWLHQRGGSPELVRVCMEATGCYSEAVAIALVDAGWRVSVVNPARIKGFAQGELLRNKTDQADAALLARFGLALQPEPWVAPPLELRQLRALVDRLQSLKEMHQQEANRLEAAMNQAGMRDSIESHMQWLQESIRQLERQIDDHIDGHPGLREDAKLITSIPGVGNTTAAKVMAYLGDVRRFRNAKALAAFIGVTPRLKLSGSSVRGRSMISRSGHAAIRHSLYMPALVALKHNPIIKTFGARLKATGLAPKAVVAASMHKLVHLIYGILKSGTPFNPNFMAARLDIQDGI

SEQ ID NO: 40827 - protein, 416 aa, unidentified
MLRIVYPVCCGLDVHKSFVFACIAATGENGVTTYQDRKFSTFTKGLRELADWLLRNNCRDVCMESTGKYWYPVWNILEPTCNLVIAHPKYVKAIRGKKTDKKDAKWIADIFKHDLVSGSFIPPADIRQLRDLTRYYRKLVGFNTGEKNRAQNCLTVSNIKLDDVFSDVFGKSATAITDHLLEHPGVAFDVAPYVDGRCKTPIPEIQAAIDGSICQEQAEKLKIIRSHMGNLETCKAELESVVLGLAVPYLPQLELLLTVPGIKDMFTAISIIAEIGTDMSVFPTAKHLCSWAGLTPQNNESAGKKKTTRISHAGTYIKPLLVQCAVAVSKSEKYPEITNRYLSFRKRRGHKKAVIAISRMLLTAIYHILKKNEPYNAELYRKADRPPESRQVSVNEAIYILQRQGYFITAPQSVIE

SEQ ID NO: 40828 - protein, 338 aa, unidentified
MELYAAIDLHSNNSVLVVTDAEDHVVFAKRLRNDLQMIVTALRSCSGDIRAVAVESTYNWYWLVDGLREVGFDVRLVNTAAVKQYEGLKHGDDFSDGKHLAQLLRLGILPQGYIYPPEQRAVRDLMRKRSQLVHQRTAQILSIHNLLARNLARSVKGDDIKRLEDSEIEGLALLEDQRRALRANVAVMRCLEEQIRLLERAILAKGRLRQEFHGLKTVSGIGDVLALTIALETGDIQRFASAGKFASYARMVDSRRESNGKSKGVGNRKCGNKHLSWAFIEAAHCAVRYDPSIRRFYQRKRAKGLAVVAIKAVAHKLARACYHIMRDGVPYDGTRAFA

SEQ ID NO: 40829 - protein, 354 aa, unidentified
MKKIFIGIDFSKEKFDATLIKAEGLKECAPSVHEVFDNKTSGYRRLVKWVKAHAEGLAADAWLFCGENTGGYSIGLSNYLYASGYDMWLECAYKIKHSAGIQRVKNDKADSRAIAEYAMRNYDKMILYKPQSASLTCLREVFLYRHSLVRQRVALQVRRDEKRLTQEKSDVRAFMSFTSKHLVTEVNKAIAKCDQKIKDIIAADDELREIFDIITSMPGIGVQNATCLMVYTDNFQKFDLDSRKIACYYGIAPFGRQSGTSVNSRPQVSPFANRMIKSLLSQAALAAIKFDMNLHGYYQRLIERGKHPLLAHNNIKNKMLHILVAMVRDRVKYNPDNVYRTSNEVSLAPQVLNI

SEQ ID NO: 40830 - protein, 402 aa, unidentified
MNAVGIDVSKGKSMVAIMRPFGEIVSTPFEIKHTTSDIRSLVELINSVEGESRIVMEHTGRYYEVLAHQLSEANLFVSAINPKLIKDFDNDSLRKVKSDKADAVKIARYALDKWQNLKQYNVMDELRNQLKTMNRQFGFYMKHKTAMKNNLIGILDQTYPGVNTYFDSPARSDGSQKWVDFASTYWHVDCVRKMSLNAFIDHYQNWCKRKKYNFSLSKAKEIYGKAKELVPVLPKNAITKLIIKQAVDQLNSASTTVESLRTLMNETASKLPEYPVVMAMKGVGISLGPQLMAEIGDVSRFTHKSAITAFAGVDPGVNESGSYEQKSVPTSKRGSSDLRKTLFQVMDVLIKTHPQDDPVYQFLDKKRAQGKPYYVYMTAGANKFLRIYYGRVKEYLSSLPES

SEQ ID NO: 40831 - protein, 553 aa, unidentified
MAMKVLVKAAATSSIPFGRLHSFLLQRPDRGGGINSRQEQPQHRLMKTKPTRAKPPGPTSTSAKRKLRLEKVTKAGKGRVVDVTALDHMKQINFHAAGIDLGAAENFVCVPATSSALGESPVRAFGVFTEEMDALVEWLRVCQVTSVAMEATGIYWMVLYDKLEAAGMEVVLVEPGSVKSVDGRKSDVLDCQWLQKLHTYGLLSRSFRPDAPVRRLRTLTRHRAILVECGTDHLRRIEKALVQMNLQLNLVVSDINGETGLRILDAIVNGQRDPKELVKLRDPRCRKSTVAEMEAALTGHYTVDLMFLVEQNLAGWRFFQKQMEGCDREIEKALAHIPTAKVENIPPPPPKAVPAASAEEQAAHAKRKKKSAANRGNNALTLDAVSLCQQLQRICGVNLMNVCGLNLLSVLMIIAEVGTDMSRWRSAKAFCSWLGLCPGTKISGGRILSRRSRRVVNRASTILRMAALVVGRTDSWLGRFYRRKKAHLGAPKAITATARKLACVIYHMLKYRDEFVPLDVMVYETKAAEHRLRKLRRDAQAMGLELVKKEHAA

SEQ ID NO: 40832 - protein, 404 aa, unidentified
MVFLGVDWAEEHHDVCMLDEQGKVLGRAQVANSLHGVGRIHALVAERSEESGEVVVGIETDRGLLVQALLAAGYQIYAINPLAVDRYRDRHSVSGAKSDAADAKVLADLVRTDRNNHRPVAGDSAEVEAVKLLARAHQSLVHSRQRQVNQLRSALHEFYPAALEAFKDDLGGRDAVAVLEYAPTPSRGRSVSQAKLISALRRAGRERNLKARATELQGILQQPHLEQPATLVAAYGVIVKSCVRLIRELNAQTTELEQELTKSFELHPDAELYLSLPGLGFVLGARVIGEFGDDPNRYSDAKGRRAYSGMAPITRASGTRHVVLARYARNRQLADACYLWAFSSLKRSAGAHQYYRALRARGKSHAQAIRALGNRWVSILHGCLRHRQLYSEKVAWRAPVAVAA

SEQ ID NO: 40833 - protein, 409 aa, unidentified
MDVILDRVCGLDVHKDSIKACVRVPGEGRKRDQHIATFGSKTEDILALRDWLEQWKITDVAMESTGEYWKPIYYLLEDRFHVLLANAAHIKNVPGRKTDAKDGAWIAQLLECGLVAKSFVPPGPIREIRDLTRYRKTLIRQRTEEVLRLHGVLQRAGIKLSSVASNIMGVSGRAILKALVKGEKDPEAMAELARGQLRVKIPLLKRALEGQFTKHHGQLVSHMLSHIDYLEEMIADISKELAELLVPYEPQLALLETIPGVQRRTAEMIIGEIGVDMSQFPEDRNLSSWAGVCPGNRRSAGKRKAEQIRKGGQWLKPALTEATWAAVKENKSYLSAQYHRLVPSKGKKKAAVAVSHSMLVCVYHVLKKATAYRDLGSDYFLRRNQEATKRRCLRQLEQMGFGVTLQKLA

SEQ ID NO: 40834 - protein, 342 aa, unidentified
MQITTIGLDIAKNVFQVHGIDAKEKVVARRQLRRSQVITFFKTLPPCLIGMEACATAHYWARELTKLGHEVRLMPAKDVKAYVKRNKNDTADAEAICEAVRRPSMRFVRIKSAEQQGQLMQHRTRDVLIRQRTQIINALRAHLAELGLVAAQGNAGVNELRAIVTDEQDTRLPIDARASVIVLAAQLEALESVIGAIEKRIKMQHRSSEASQRVEAIPGIGVIGATAIVATVADPTIFRSGRDFAAWIGLVPRQDSTGGKQKLGPISKQGDRYLRRILVVGAIAVLRRAQKNPGKYPWLTQLLARRPFKVVAVALANKMARMAWALLAHGGTYRAPRLAETA

SEQ ID NO: 40835 - protein, 355 aa, unidentified
MIIIGADYHPGFQQIAFVDTDTGEFQERQLQHREEAEKFYRELAAQGQKVRVGMEASGHARWFERLLAELNFELWIGDAAEIQTKRVRKAKTDREDARLLLRLLLEDRFPRIWVPSWENRDLRQLLWHRHRMVQARTRIMNQLQAVALNEGLRAKKKLWRECGRQQLESFPLAPWANRRRQDLLALLDRLNPTIAELNQAVDQEVERCPAAQRLMTHPGVGPLTALAFILIIGEAERFGCGKQIASYVGLVPLEKSSGNRRRLGHITKQGNSMLRFLLVEAAQVTARSIPEWRSRYFHLRMRRGRKIAKVAMARRLAVRLYWMMRKQWDYEQLKKFGSHAGQPGTGDGVYKTPRN

SEQ ID NO: 40836 - protein, 356 aa, unidentified
MRAIPQPQKGTAVTIVEDARAITGGVDTHSEVHVAAALDPVGGLLGTREFPATRAGYAGLLGWLREFGDLAVVGIEGTGSYGAGLARHMAAAGVQVVEVDRAGRQDRRRKGKSDPLDAVSAARAAQSGRASGMPKGRDGAVEAIRALMVAKRSARNERTQAVNQARALILTGPDELRARFAGHCAAALAAGITALRPRPGDAADYSVRIALRELGRRVEFLDAQIERLDDLIVPLVTVRAPGLLSLYGVGPDTAAMLLIAAGDRPERLRSEAAWAHMCAVAPIPASSGKTRRHRLNRGGNREANHALWRIVITRMSAHPATRAYVKRRTAEGLSKKEIIRCLKRYVAREVYPHLRG

SEQ ID NO: 40837 - protein, 408 aa, unidentified
MNPLFVGIDVSSKNNVVCLMKPDGTKFSTFSVQNNLGGAKMLSERIVSALDKLQLSEVTIGMEATSIYGDSLVYALREDGSLGRYQRHIHVLNPKQVRKFKDAYPDLPKNDYVDAFVIADHLRFGRIASEVYMDDYRYRSLQTLTRARFDAVQNLTREKQRFANYLFLKCSGIAQDKDIPNTSATTLAILEHFETVDELAGCELETLTAFVSAAGRGRFADPEATAKAVQAAARGSYRLPKTVNDSINQAMSVSIASMRALESQIKVLEKAIEQQFEIIPNTLTSIPGIGKVYSAGIIAEIGDIHRFESQASVAKYAGLVWTQHQSGDFEAQNTRMIKSGNRYLRYYLLEAANSVRRCDPEFRRYYDLKFHEVNKFQHKRALALTARKLVRVVFRLLKDNRLYIVPES

SEQ ID NO: 40838 - protein, 343 aa, unidentified
MKAQVRKIDFTDQNIYAGIDVHLKSWKVTVMAEDIVYKTFSQPPNPEILFKYLKEHFPGGNYHTAYEAGYCGYWIHDKLVSLEVKSIVVNPADIPTTDKERVQKEDKRDSRKIARSLSSGNLIPIYVPSIKTQRDRSLLRTRAMLVKDLARYKNRIKSFLYFYGISIDESFKSPQQHWSNRFMSWLESIDMGEEGGEEALIVLISECKNLRTSILEITKQVRRLSQTEVYRNRVSLLRSIPGIGLLTAMIILTELETVSRFRNIDKMCGYIGLVPSTKSSGEKEKAGDITPRGHSVLRTAIIESSWLARRKDPSLMRSYLSFITRMNENKAIVKIAKKLLRGV

SEQ ID NO: 40839 - protein, 423 aa, unidentified
MEVMHKRVAGLDVHNTTVVACVRVQAGGKVTRECRTFATTTDGLMALLAWLVESRCTHVAMEATGVYWMPVWKILSDGDIALIVANAAHIKNVPGRKSDLNDAMWIADLVACGLIKASFVPEENMQELRSLMRTRKQLGREQTRHVQRIQKTLAEANIKLDSVICDIMGWSGRRIIEAMIAGERDPGKLAALASKRIKATPQELHDALHGRLTDHHRFLLQLHLRQWDGLDATIRDIDGEVDTRISRLDREAKAGQPPFRELIALLCTIPGVSTLSAIMILAEIGTDMSRFPTAGHLVAWAGLCPGQNESAGKRKSTRLRKGDPWLKTTLVQCGWAAKRKKDSYYKAQFFRLQSRRGPQKAVCAVAASILTAIYHILKNGVEHRDLGADYFNRRSTEDQAKRLVTRLSKLGFEVHLQRHTEAA

SEQ ID NO: 40840 - protein, 311 aa, unidentified
MKSYVGIDIAKGHVDIYDTATERHRQFENSRVGIKKCVEYVSSLNPQLIVLESTGGYEMDLVVALDESSLPVVVVNPRQVRDFGRASGRLAKTDKIDAILLARYAVVMNPPRRVLRDRQSLRMKALIARRRQLVEMRTAEINRREHIHDQLIARSIDAIIRIINREQQKVETELSRLIAEIPELQQRVEALLSVPGIGQTTAVMLVTEIPELGQLNRRQIAALAGVAPINRDSGTFRGKRMTGGGRREVRSRLYMSTIVACHHNPVLKLFYERLLQKGKTKMTALIAVMRKLITIINTMLAKKLTWKPKIA

SEQ ID NO: 40841 - protein, 365 aa, unidentified
MTTRQRSTSSSTDPPARGEIVLGVDTHGEVHVAAVVSPLGKVVGTESFPATAAGYRRLLVWARKRGTVRRAGVEGTGTFGAGLSRYLLAQHVEVIEVNRPDRTARRLLGKSDPLDAQAAARAVLSGRARAQAKAGDGPVHSARMLKLAKDSAVKARTQAINQLKAVLVIADPALRERLPSLGNADLFHTCARLGLRDGEGDDDVVAQATHMALRMLAERIEQLTGQIDELNQRITRLVERHAPQLLVPVGIGPDSAVTLLITMGDNPERLNTEASFAALCGVSPVEYSSGRRSTRRLNHGGDRQANAALHRIVFTRLRHDPRTQAYYERRTQEGKTRREIIRCLKRYAAREVFNLVRTVSSDPPL

SEQ ID NO: 40842 - protein, 318 aa, unidentified
MSTEIFVGLDVAKAQLDVAVRPSGEGWSTPNDEAGIAQLVARLRALRPALVVAEATGGFEHAAIAALAAVGLPVVVANPRQVRDFARATGQLAKTDQLDAGILALFAERVRPTPRPLPDAAAQLLDALLTRRRQLLEMLVAEQNRLGFAPKPLHRSISQHIRWLERQLDDVTTELAHRIEESPVWRAKDDLLQSVPGIGPIVSATLLGELPELGTLSHKQIAALVGVAPLARDSGTLRGKRMVWGGRASVRTALYLAALCGRRWNPQLRVFYERLRAAGKPKKVALIACARKLLTILNAMVRTNTRWTVPASSAQHSC

SEQ ID NO: 40843 - protein, 319 aa, unidentified
MGTVMNQTSSSLYIGIDVSGSTLDVAIHDTTEHFSVDNETAAIEQLVQRLIALGPTLIVMEATGKLELAVLRALCQAGLPAVAVNPRQVRDFARATGKRAKTDRIDAFVIAHFAAVIKPVVRPLNDVQTEQLQALLLRRAQLIDMLVAEKARLERAHAAAKESLNDHIKWLKQQLTVADRDIDSFLRASPAWRQKEDLLRSVPGIGPGAAATLIAFMPQLGSLNRREIAALTGVAPFNSDSGKHTGKRRIQGGRAIVRRALYMACIPALRFNPTIRAFYDRLRQAGKPFKVAMTACIRKLIVTLNAMVHNSTPWSPSTN

SEQ ID NO: 40844 - protein, 359 aa, unidentified
MRYVGIDYHKRYSVLCATDERGQELKQRRISGNSATGFAQFFSELGEESKVVMEACWNWGWLYDLLAKIDGIDEVMLAHPYKTRLIAEAQIKTDRLDAQMLAKLLRGDLIAQSHAPSAATRARKHLLRQRLFWVRLRTMLRNGMHAILDRQHGLERPQLKNFFSRRGQTWLEEVQLPCAEDQPLLTQDLEVAELLEEKIKQLDRSIGQSQSEEEKLLESIPGIGPLFSSVIATEIDGVGRFNSATKLAAYAGVVPTTHASGGRVFNGRLLWQCNKWLRWALIEASWSAIQFSGYFGSIYRCARARGKNKNIAITMVAHRIIKIIWLLLAERRPYTETLPDRSEDGMTVVVRRKVLGLAS

SEQ ID NO: 40845 - protein, 338 aa, unidentified
MKLYCGIDLHSNNHWLTIIDEADRRLFERRVPNDMAVTLRELEPYRGALESIAIESTYNWYWLADGLMEAGYPVKLVNTSAVKKYEGLKHADDRHDAFHLAHLSRLGILPTGSIYPKKERGVRDLLRQRSRLVQQRTAHVLNVKSTYARQLNIKAEKRILNGEQAAPWPEVSDPHIAMAIDVHRPIIVAINTQIDRVEREIRLQTKENARFALLQSVPGIGPILAWHILLETGEIARFADVGHFTSYCRLVPGVKISNGKKKGEGNTKNGNPYLAWAFHEASHTAVRHLPQAKRYYERKSRQRNRPVAMKAISHKLARACYFILRDGVKFDPDKLFTP

SEQ ID NO: 40846 - protein, 395 aa, unidentified
MEFLKYGLGIDMAMEKFDACISIIDKQQHVMIRAQCSFNNNKKGFETFILWVTKNTKLPIPAVYLMEATGIYYEQLAWFLHNKKCSVSVVLPNKAKKYKEALGLKSKNDRIDAKGLAQMACEQNNTIWKPLSGNLYVLRLITRQIQSVSEQSTVLKNQLHALEYCMYRDKAIEKMYAGQIDLLQKNKKSLQLRVEQIVEKDEILKKKFKNIGKIKGLGLQNLAVIVAETNGFTAFENIAQLVSYAGYDVVENQSGKRSGKTKISKKGNNHIRRCLHFPAFNMITYDVAPFKNLYERVYEKSKIKMKAYTAVQKKLLAFIYILWKKDEAFDPNYQDKESGDEESAPSFASVPQEPLIACGNEEKKLNLIKQKITPAITRVTQDKHSSKYRRMPSFA

SEQ ID NO: 40847 - protein, 351 aa, unidentified
MIAINTDIIIANIGVDIGKNAFHICAMNAKGTIVLRERLTRAALPKCLANIPPCLIGMEACAGAHHIGRKLASLGHDVRLMPAKYVKPFLKGHKNDYRDAEAIAEAVQRPTMRFVPFKSDEQLDLQALHRVRSRLVGQRTAVINQIRAFLLEHGVPVRQGPGALRQALPSILAQRTDTLSSRIIRLIEGLIDDWRRFDQRIADVTSEIEQLAKQSENCKGLMSVPGIGPMTASAMVAAIGDGSAFSRGRDFAAWLGLVPKQISTGDRTILGGISRRGNSYLRTLFIQGARSVLQRFEGWEKKSFGRWLIAASKRLHKNVLAVALANKLARIAWSVLYHARGYDAAPTPKAA

SEQ ID NO: 40848 - protein, 370 aa, unidentified
MNDTIFVGLDVHKATVAVAVAEGMRGGEVRQLGAIPHRADHIAKLAEKLAKGGRRLSFCYEAGPGGYGLHRQLTALGHECMVVAPSLIPMKAGDRVKTDRRDAVMLAKLHRAGELTAVWVPDSAHEAMRDLIRARATTVRVLGKARQHLQGFLLRHGRIYAGKRGWTLAYRRWLTTVRFDHPAQQVVLQDYIHAVADAEARVERLTRQIEDLVPQWSMAPVVEALQAMRGVAFIVAVTLAAEVGDFSRFDNPRQLMAYLGLVPSEHSSGATVRRGGITKAGNALARRALIEGAWAYRMQARISRKLHDRIETLPQAIRDIAWKAQVRLCGRYRRLAAAGKAKVVVTTAIAREMVGFLWAIARQVEVMPAA

SEQ ID NO: 40849 - protein, 347 aa, unidentified
MLHAGLDLSRKKLDVCLLSEAGEHLDQLVSPPDGDALRSLARRIEETHREPVCAVIESMTGARFVHDTLEQAGWEVEIADAQKVKGLAPLACKTDKIDSEVLAVLSHRDLVPAIWLPDPSVREERELARFRLHLVKHKSALKCRIHSTLINFGKPCPVTDLFGVEGRRLLERLQVPEPWRGNINASLKLIDDLEGQIAEINTRLKEGHADHPYIPLLMSAPGIGWVLAFTIAAEIGEIERFPSPEKLTGYTGLCPRVNQSGDKDRRGPLTKHGPTYLRWAMLEATMHALKHPAYSERYQRNKRRLGKQRGAKVAQIDIARRLTHAIWHMLSRKQQFAPRGAAFRLAA

SEQ ID NO: 40850 - protein, 345 aa, unidentified
MPIVGGLDIHRKQITFDYLDTVTGEVRRGQITPADRAHLRAWLARFAGRDDVAFAMEGCTGWRYVAGELAAASIAAHVGEPADTAFARGRKRHAKTDKTDSRHLRQLLADGRLPECWIPPAQILECRALLETYHDLRREHTAWIQRIHAVFFHQGAPALGEGALRTEQDLAALRAAATAHLSPAGQLQIATALDMLAAVEARMDMLRQQLLHTARHLTGAKVLTARLYGVGPLAALAMTCWLGGAGRFSSSRKAVRFAGLDVTVYSSDGKRSPGHLSRQGPEILRWVAYEAGKTHARASAPGHDYYAAVKDRTDGKLAALSQARKILRQACHILTELGDDALTAA

SEQ ID NO: 40851 - protein, 400 aa, unidentified
MRAVFGIDVSKVSSEVAILVNGEKVHGYTMPNDAIGFARLLGDLKTVHKPEIIFEATGVYSRRLQAFLEDNGYAYTRLNPLEAKKQLDSLRVRKTDQIDAEKLAQSQFVLNRKPTYVQEEVYQELRDLSRFYQNLTEDIVRAKNRLHKVLQVTFSELETILSTPTGEQYWNLVIAFPCKDFVLDLSKNELSKSIRQSTSKRISDKRVAYLAEKLTVLANQSYCAVKKTSPILEEVHYYAKELLRLSEQRQAVLDQMVELAQPLPEYDILLSIPGIAETTATSIIGELGDIRRFQSANQINAFIGIDLRHYESGNFLAKEHITKRGNPYARKILFKCIHNIASASHTNPCHIADFYEKRKRQSQTTSTKSHTIASIHRLIRTMYYLIMHNKLYDYASTQNR

SEQ ID NO: 40852 - protein, 343 aa, unidentified
MKLMRVGVDLAKAVFQVHGVDRNEKVTLRRKLTRANWLEVLLEAVEPGCVIGMEACGGAHHWARAFQAHGIAVKLIAPQFVKPYVKSNKNDANDAEAICEAMSRPNMRFVAVKTIEQQDIQAVHRVRFELSNQRKAKGNQIRGLVAEYGLVAPKELWHLRGAIPVWLEDAENGLSARFRHLLNGLWQDLLALDQRMTELDREIALIANADPVAKRLQQLRGVGPMIATALVATVGDAKQFANGRQMAASIGLTPRQNSSGGKERLLGISKRGDTYLRTLLIHGARSIVRTAKGKDDRLSQWVTRIAETRHYNVAAVALANKTTRIAWSMMKHGTEYQADQTAA

SEQ ID NO: 40853 - protein, 355 aa, unidentified
MDGLKHQKEKRSMDHFAGLDVSVKDTSVCIVDDTGEIVRELKVASEPEALLGVLRNAAYHFKRIGLEAGPLSQWLFSALGEAGLPVICVETRHMRAVLQAQINKTDRNDARGIAQMMRVGLYRPVHVKTLRSQKLRMLLTHRKLLQSKAIAIENDLRGTLRNFGLKVGIAGGTKFEARIKELVENLPDLAVLVEPLLVVRRVLREQTAALHRRLLAIVRNDEVCRRLMTTPGVGPVVALTYRATVDVPARFRRSKSVGAVFGLTCSKHQSGEIDRSGRISRCGDEMMRVMLYEAAQSMLRSKKWSWLKAWAMQIARRRGMKKAIVALARRLAVIMHRIWVDGTEFRWTREAVTAT

SEQ ID NO: 40854 - protein, 383 aa, unidentified
MDHKQGNQSREESAQVPGLYVAFELANSTWKLACSDGNKLRHVTVTAGDLAQVQGAIAGAMRHFGLGDKVHTVSCYEAGRDGFWLHRYLHSCGIDNVVVDSASLEVNRRLRRAKTDRVDAGKLLSMLIRYHGGEKQLWKVVRVPSREDEDARHLHRELEALKRERTRYRNRIHGILIQQGLRVRNPSTKKFVKELELMRTWDGRELPGEMKVRLAQVHERLRLAEDQINALVKEKMQRLKEENVRMVQVAQLLRLPGIGPVSSWTFVMEFFGWRRFRNRREVAALAGLTPTPYDSGSRLREQGISKAGNRRVRTLAIEIAWTWLRYQPQSKLSRWFLERFAGGGSRMRRIGIVALARRLLIDLWRFLEYGVIPEGAQVRPQTV

SEQ ID NO: 40855 - protein, 401 aa, unidentified
MGIDVAKEDHKAFFGTAYGKTLLKRLSFKNDIEGFGKLLARVREMKVKHSLNELVLGLEPTGNYHKPLGDFLIKCGHMVVLVSGVSVKRNRELLDGRWDKHDTKDSANVADLISQGKCLYYEYAPVLLKDLRGLLSLKRRLKKQEHGFRVRIRNSLLAQYFPELDKYYSKWEPEVLSVVRWCLDPSVIAGLEYDQFVSLVSPGSKTIRQQGRLEWIWKKAVESIGCDVGEAAEFEAKVMVEELRHIREIIKETDAKIKDVCIRFPEYDYLLTIPGFGPDVSSKVLAAIGNPFRFNSLSQVLKMAGMDLNANRSGKSSDTAVPVISKKGSAHLRFALYQGAFIASCKNKYFIKYYTNTLRGREREKGIKTKMRVKLAAKMLVVAWTLMKKREPFDAAYLKID

SEQ ID NO: 40856 - protein, 416 aa, unidentified
MLNSFEWYLGIDWGSEEHHLCLLNAGGGVCGTRPVAHTAVAVHDALQWVRAETGAAPETIAVGLETPRGVLVDTLIEQGFTVFALNPKQLDRFRDRFTAGGAKDDPRDAQVVADALRTDRRAFRRVRPDDPQIIQLRELCRIVEELQEQEGRLANRLRDQLYRVHAPWLTLTAAADEPWLWTVLADTPHPDEWRHLPRRRINAALRAHRIRRLNADDIVTTLRQPTLAVAVGVAEAVAIRIASLVPQLILVRQQRTTAERQIDRSLERLAETTDSELREHRDVEILLSLPGVGRMVTATMLTEATGPLADRDYATLRAYTGAAPVTKRSGKRAYFVQMRYACKWRLRQALYHWARTSIQRDNAARLYYDALRARGHHHARALRSVADRWLRILVAMLRTRTLYDPSRFVQAVAIPA

SEQ ID NO: 40857 - protein, 417 aa, unidentified
MNREPNSTPRRFVGIDLHKHFVVVAAVDAAQQVLLKPRRIALDDFSAWAEAHLSSEDAVVLEATGNAWYVYDLLTPLVGRCVVANPLQVKWIAAAAVKTDPHDALRLARLLAANLIPEVWVPPQHVRELRALIAHRRALVKQQTATKNRLHSVLHRQHLTPPAGDPFALHNRDWWRALNLSFSERLRVLQDLASLDHVQQQLAEVKAELHRLSTDTPWKGDVPYLIQLPGFGLLTAMTVLAAIGDVTRFPADKCLVGYAGLGAGVHDSGQTHRDRGITKQGRRDLRRVLVEAAWSAVTTHPYWKAEFERLTRRKHPNQAIVAVARKLLVAVWHVLSERAADHHAQPKMVAFKLMVWSWKLTDAQRGGLTSRQFVRYGLLQLDLGHDLTHIITGKATRRAIAPPEELLALRPELRPAD

SEQ ID NO: 40858 - protein, 315 aa, unidentified
MEEKETIFAGIDVGKYNVDMAFGGQGEVKRFKNDDDGIGQILGLLKGRQVGRIVLEASGGYQRQLLAALLGAGWPAVAVNPRQARDFAKALGRLEKTDKVDAHVLALFAEKIRPPVRALPDETLQAVVDWLTRRRQLVEILVAEKKRSHQAQGAVRRDIEQHIDWLKKRIHDNERDLPKLLADCPAWNARVQLLDDQKGIGRVSALTLVACLPELGTLSRKGIAKLVGIAPLSRDSGTLRGKRCCWGGRSAVRACLYMVTLVASRHHPVIRDFYERLVARGKLKMVAIVAAMRKYLTILNALTRDHLKAIAVQAK

SEQ ID NO: 40859 - protein, 357 aa, unidentified
MDGSKDQPKVTAGLDLGDNYSYLCLIDSESGEVIEEGRMRTTPETFRRRLASEGPMRIAIEAGTHSPWASRVLEECGHEVLVANARKLRLIYANKRKTDEIDAENLARLARLDPKLLYPLKHRSEDSQAHLAIIRSREALVSARTQLVNHIRGAVKSFGGRLPKCPAVSFHRRASEHIPEALLPALWPILETIGSLTERIRDYDRKLEAISKERYLETELLRQVEGIGALTALTFVLTLEDPYRFEKSRSVGAYLGLVPATDQSGDRDPQKRISKAGDQMLRKLLVGSAHYILGPFGSDSDLRRHGEKIASRGGKNAKKRAAVAVARKLSVVLHRLWVTAEVYDPLYNTRRRGGLAA

SEQ ID NO: 40860 - protein, 406 aa, unidentified
MADIFALDVSMGKSYCVWYRGKHCLKEFSLVHTKAEFNALRDMINKAQKPIIYFEATGIYSRVIEHFFETNGLRFCRLNPLELHLKSESLRRVKTDQKDAHRITLTVQENTFRLTVPWKKDYLQLHELSRFYNQLNADWNYRLNHLHTALEQFFPELKQLFVNKTSKLALNIVELFPHPALVRPYSRVKLKNILMASTDKRISKMKAYKYADRLIDLAQQSYPAVSSDAIQVDEVRYYTRQLIALARKKEEVIKRIESIAQLLPEYGLYYSFPGIGKQTAAQLMGELGDISRFDNSNQLNAYVGIDIRRHHSGTYVGQDHINKRENPIARKLLYFTIGNMIRQQHVNPNHIVEYYYRLKEKRPYPKLNKVAVVACMNKTLKCLLSMIKHHEKYHYRYTDSMVPVRA

SEQ ID NO: 40861 - protein, 321 aa, unidentified
MNRVLVGVDVCRDFLDAHARPSGLPKRFDNTPAGIEQLVAWLRSLAPERIIFESTGPYQKAAVGALLAADLPAVVVNARQVRDFAKGTGQLAKTDAIDASVLAHFGEVVATVVRPLPSQEILEFRELCDRRGQLVRMLASEKNHRHAAQGASPKVIKNIDKHIAFLQRQIDDLEERMDRIVADSETFKAKDEILQSIVGIGRQVSRVLLVHLPELGKGTRRSIAALVGLAPFADDSGASSRIRHIRGGRAKVRIALYQAAVAAIRYCPTMKSFYASLKARGKATRVALIAVARKLLVLANALLRTGIPYQRPTNSVCLKNA

SEQ ID NO: 40862 - protein, 316 aa, unidentified
METPQPFVGIDVSSQRLDVDSLPASHHFSESNTEDGIASLVLRLRKLNPQIVLLEATGGYEVPAAYALYEAGLPVVIMNPKALRHFAKAIGKLAKTDKLDAQVLALYAQSIRPPVRPLKDQEQLELANLMTRRRQLQGMIVMEENRRRTCTPKVSGNIDQHLAYLRQLLKDLDREIHDSIRRTPLWHENSEILQSFTGIGPKVSASLIANMPELGTLPGAKASALAGLAPMNRDSGQFRGKRKIQGGRPAVRQALYMAALVAAHHNPIIMDFYQRLRLAGKPAKVALTACMRKILVILNAMLKNRTYWNPQLPLAA

SEQ ID NO: 40863 - protein, 343 aa, unidentified
MGIVVLGIDLGKNSCSLAGLDASGRVVLRRRMRRGSLESFVGGLERCVVAMEACGGAHHLGRVFVGQGHAVRLMSPEYVRPYVKAQKNDELDAEAIAEAATRPTMRFVEVKSQAQSDVQALHRARERLVSERTALINHLRALLLERGIVVPQGRRKLEEEIAVFADEDAIEALSPRIRRLIEDLRSEWRTLDERIAAFDAEFVRMAREDEAVRRLITIPGIGTINATALTAAVGDARTFARGRDMAAWLGLTPRQMTTGGKPRLLGITKRGNRYLRKNLIHGARAVLPYLIERETPLGRWARGLLARAHKNIVVVALANKLARIAWAVLARGCTYEPGGAAAP

SEQ ID NO: 40864 - protein, 338 aa, unidentified
MKLYAGIDLHSTNNFIGVMDEQERRVFKKKLPNDMASVLYWLAPFKKELVGVVVESTYNWYWLVDGLMMNGYKTHLANPAAIQQYEGLKYSDDKRDSFWLAQMLRLNILPEGYIYPKEERPLRDLLRKRLYLVKQRTSHILSLGSMISRNLGLQMSAGQIKKLKEVDAEKLFHEQHLVMAARSSISMMRSLSEHIKMIEKEVKSQLKLKKPFQCLLTIPGIGDTLALTIMLEVGDIGRFPKVGNFSSYCRCVESKRISNGKTKGRGNNKNGNKYLSWAFVEAAASAIRHSACAQKFYQRKKAKTNSVVAIKSLSNKLARASYYIMRDHIKYAPQKLFG

SEQ ID NO: 40865 - protein, 477 aa, unidentified
MNEVLEKLCGEDGAEVKPLYDYGVGIDTHRDFIQVCVLVKSGAAIRKYESEHRTTWGGLVGAGEWITDTIKEKSMPTIEPGPLRYTIESTSTYHLPVIKAVKGKPCVVNPVLAGSTKKKTDVLDARLLSYQCMTGLWPESFVVPPEIEEFRLLMKQRQYHSRESGAITNRINNYILRFGHTLGSYKSVRSIENRALIEDMCKDGYVYKENCHGTEAGRFICPDGLPHEVKSILKDMFSEYDAHAEKVKHYQKLAMDSAKKINWETDSGHVKGDVLIKNLLTVPGVGDLTALIWLCEIMSPLRFETASHLAAYCGCDPSLKVSAGKVTAQTRRKGNANLHFQLSEIAGSCINRHSEPFGQWGYAISKKHAKGGYKKASGAVARRIAVSLYFVHKQNVPFSYDKYNFYKIDVPNVPLCDMGFSKRLENLLSSTGLADSKAIAQSYIIGKIYEIKGLGKKSATEINAWIQSNKNYKSKEI

SEQ ID NO: 40866 - protein, 405 aa, unidentified
MTDIEQHDSVQVFVGVDVGKGVHHAVALDRKGKRLLDSALPNDETKLRALLGKLKEHGRVLLVVDQPATVGALPVAVARDEGVLVAYLPGLAMRRIADLHAGEAKTDARDAYIIAEAARSLPHTLRSLKLADSQVAELTMLCGFDEDLAGQITQVSNRIRGLLTQIHPALERVVGPHLDHPAMLDLLERYPSPAQLAAASQKQLTNRLTKLAPRMGKTWAAEIVQALTEQTVVVLGTQAASIVLPRLAQQLAALRIQRDEVAKEVERLVLAHPLHRVLTSMPGVGVRTAARLLIDVASRAFASAAHLAAYAGLAPVTRRSGSSIRGELPSRRGNKQLKRAMFLSAFAALRDPVSRAYYSRKISQGKRHNQALIALARRRCDVLFAMLRDGTFYCPPAHTKPLTTT

SEQ ID NO: 40867 - protein, 348 aa, unidentified
MALTIVEDTRAVTGGAGTHAGMHVGVALDPVGGLLGVGEFPATAAGYARLLGWLGGFGTVCLVGIEGTGSYGAGLARHVTAAGIRVVEVDRSDRQDRRRQGKSDPLDAVSAARAAQSGRARGEPKGPDGAVEAIRALMVAKRSARSERTQTINQARALIVTGPDDLRARFARHTAAGLVSELAALRPRPGATVGYATRIALRELGRRAEFLDGQLGRLDELIVPLVTARAPALLALHGVGPDTAALLLIAAGDHPHRLRSEAAWAHLCAVAPIPASSGKRTRHRLNPGGNREASHALWRIVITRMSSHAPTRAYVERRTKEGLSKKEIIRCLKRYAARQVYRHLRPAG

SEQ ID NO: 40868 - protein, 339 aa, unidentified
MGLLKQNVGVDISKDSFVATFAIMTREQIIKNKRTRSFNNTENGIRGFIEWAEKLKEPNLDLHVTMEATGVYYEGLAYTLYEQDNIIVHVLLPNIAKKYFQSLNVKIKTDKVDSIILGQMGLERMLKPWVLSSKVYRKLRTLSREKEQLVKENTMVKNQLHAEVHTAEPMKRTITRYKNRIKYLDKQIKSVEQDIEKVVNSDDFVSAKVKKIKTIPGVSTATIVGVIAETGGFVNINSIKQLTSYSGYDVRIKESGKWKGKSSISKIGNSHIRGLMYMPTLSSIQHSKTYKTTYDRIKENKEFKMVAVVAVQRKLLGLIYTLWKNDTIYIENHQKAKVA

SEQ ID NO: 40869 - protein, 332 aa, unidentified
MVAGTHGSLNKAGATKMTQISTTAGIDTSKAKLDIAVHGRIEHWQVENALVGWRRLVAALTGAEVTRVGIEASGGYECGVVDYLRHEGFIVLVLQPTQVKAYARMCLRRAKNDKIDAVLIAACAAMIDQARIDPDHRLAKLAQRLTFVEQIEEDIARFKVRLEHVGDRRHRRMVVTDIARLKARREAELARIVTALRAHDDLAHRLDLVLSVPGIGERTAIALIVRMPELGRVSREQAAALAGLAPFDDDSGKHRGERHIAGGRSRLRRSLFAAALPAAFRWNKALIELYSRLTKRGKAHNEALIACARKLLIYANTVVQRGTPWTERPAAA

SEQ ID NO: 40870 - protein, 489 aa, unidentified
MGKGTSVYERLTQGNSKQRKDLNRRLYSDNPGLELVHPNAAGIDIGNESHYVAVPPARDGEPVREFGSWTADLERMAAWLKSCRIETVAMQSTGIYWFAVYDVLEKHGLKVFLVNASHTKNLPGRKSDVQESQWLMKLHTYGLLRNSFRPPDDIRPIRAVWRLRDRHVQEAARSIQHMQKALTWMNVQLANAISDIGGVSGQAIIRSILAGERDPRKLAQLRDRRIQASEEEVARSLEGNWQEDQLFELRQAVDEYDFRQTQLAECDRKLQAYLAVLPTRPVPPADNGKVPPPPAGATGRKKKRAKKVGGGNAPQSFDLAAELKRVTGVDALRVDGINLMTIQTVVAELGTDLGEWFPSEQHFASWLSLSPKRDISGGKVIRHTREKSCNRVAVVLRLAATSLLRSDSYLGARYRNLRARLGSPKAIKAMARYLACIIYRLFTKGQAWVDRGAEQFEQNRQTRDLAKLQAQATSRGFRLVPVTEQPHET

SEQ ID NO: 40871 - protein, 419 aa, unidentified
MSDDFLSTLFVGIDVSSKSNTVCALDFKGNKLLNLNVVNNRPGAESILVNILDCLEIHRLEFVIIALESTSFYSVHIANFLSSDNRLFPFHPFVYCLNPKTISNHRKSFVDMDKTDPLDAYVIADFARCGKISSSPWRGSQFLALKRLTRHRFHLVQLISREKVYMVSNVFLKFSELAVLNKKDLPFSNKYGATSKAVLTDFFSPDDIVYSSVDDLVEFIKKKGKNRFSDPVSVANILKQAANNSYRLDEVLYEPLNIAISSSLNVIKALENEIKLVENAIEKTIKGLNPNEYICLISIPGIGPVIAAGILAEIGSVSFFNSNNSLAKFAGLTWRQKQSGNYTSKITRLTKTGNCYLRYYLFEAANSVIRYIPEYKKYYEKKFKEPANCPHKRALVFTTRKLVRLIFGLLTKNQIYVNY

SEQ ID NO: 40872 - protein, 453 aa, unidentified
MGRKKKEQTSMPIVNPNAAGIDVGSRSHFVAVGQRADDVREFGVYSDDLQALCLWLKEKGVTAVALESTGTYWQNLFVALMDHGLNPVLVSGKFTKNVQGKKTDVQDCQYIQKMHTMGLLPASYQPSSEVEQLRQYTRHRQNLIERGADCIKKMQKAMRQMNIRLDIAISDVTGQSGKAIVRAIIEGKTDAKYLAGLANYKIQKSKEELERALTGIWKAEHVMELKHSFELYEFYHQKVAECDAAIEALLEKQIEDNERKDGEARAKMERTTRKKQNKNRPKMDIERLSFQLSGGVDLSQIDGVSGQTLLSIISEIGTEVDKFPTAKHFASWLRLAPNNRKTGGKVMSSHTPKHKNRLSLALQRAANVIGNNLKVGALHQFFVRIRIKKGYMEAVVATARKLAVIIWNMLSKKEQYQPTEDTAYTEKLRTQTIKNMQRKLKRLNISPEELIFN

SEQ ID NO: 40873 - protein, 345 aa, unidentified
MPIVGGLDIHRKQITFDYLNTVTGEVKRGQIAPADRGHVRAWLARFAGHGDVAFAVEGCAGWRYVAEELAAAGIAAHLGEPADTAALRGRKRHAKTDKTDARHLRALLAEGRLPECWIPPAQILEYRALLETYHDLRRAHTAWVQRIHAVFFHQGAPPLSEGALRTEPGLAALRAAAATHLSAAGQQQVATALDMLAATEAQLGPLRHQLRQAAAHLTGAKVLTARLYGVGPVTALALTCWLAGKDRFSSSRKAVRFTGLDITVHSSDRKGPPGRLSRQGPPVLRWAVYEAGKTHARASAPDHAYYAAVKDRKNSKRAALSEARKIVRQACHILTELGDDALTAA

SEQ ID NO: 40874 - protein, 342 aa, unidentified
MTFVGCDLHTRMQQVAVLDTETGEISERQLPHDGMAVEEFYAALPRPVTIGIESTGYATWFHTLIQRLGHTLLVGDAAKIRAMVVRKTKTDRRDALHLLDLLRHDRFPTIWVPDPATRDLRALLAHRMRLVRIRTMVKNGLHAIALNYRLARGSKLLRQAGLVQLHALALPPHTAQRRDQSLELLAGLTTQIRTLDDAITTAALAHPDGPRLITHPGVGALTALATIVVLGPVARFHDSKHVVSYVGLAPALNASADKHHLGHITKQGSPLLRFALGQAAAHAARMDADLKRTYFTLVHRRGRPKAKVAVARKLLVRLFIMLRDQIDYDEFCRRGRPAPVSA

SEQ ID NO: 40875 - protein, 352 aa, unidentified
MEYYIGCDAHKTYSVFAVMDEKGKIGLTKRVEHDRDQFRSFLEMLPAASQVGIESTGNWYWLVDEMEKAGLKPSLVNPHKAKARLGEVNKTDKLDAEGLAMLSRNGTLPTVWIPPGELRDKRELPRMRMALVSIRTKLKNRIHATFAKYGIVFNEVSDIFGGRGRRLLEKEVNKLPPETRYSVLEQLKLLDGVEESITQAEERIKEVIRENHTMQLLKTIPGVGPILSIVIALEVGDVDRFGSGERLASYAGKVPRVKSSGGKTFFGQVRPDVNRYLKWAYTEAANGIVLNQAKWADCHVSYLYWRVRKHKGHAKAITAVGRHLAEATYNILKNDVPYKEPKIRKIVLAEGR

SEQ ID NO: 40876 - protein, 327 aa, unidentified
MRLHKSLTEKVKTTVAFDVCKAALDVHIHVDAKAFQVPNTHEGFDQIALTLADYDVSLILMESTGGYEDAAACYFQSVGYDVAVINPRHARNFAKAMGKFAKTDRLDAAILADFAAVIDIRPDRARYIKPPTDEERKFLSQMVARRRQVVDLIATEKQRLAHADDYAKASINIIINLIESQLKEINSDISFYVKKNFSGLSNMLSEIPGIGELSVGLLIGDVPELGQIGNRQLSAVIGVAPFNHDSGKMRGKRCISGGRQNVRNVLFMGIMSATRFNPVIKAFFDRLVAKGKSKKLAYIACVHKLLRIINAMVRDGTSFNPDLHAVI

SEQ ID NO: 40877 - protein, 445 aa, unidentified
MHYKRLLALIDSVSSHLSVGLDVGADFTWMSIALPNGSFTGKPFKIVHSDPGSRDLAVAKIKEAQETYSLKSRCFLESTGIYHIPLLCFLRDKGFDCSVINPIITKNSTNINIRKLHNDKFDSKKAALVGLNVSLKTSIIPDDSVVDLRNLVRDYYYFKDLQSAVALKLTAELKVSFPAYAKVFSKITTQSSLKLLSAYPLAKDMLAASKDDIVEIIRSTARFGEAYALRKYNAIIAAAQDAAVFGRALPSNAVRIRLYIDTYQEYQKHLDALLKALHETVDRLQDTLVYDQICLLQSLRGIGFLSAVVLIAEMGDFKLFSSPKKLYAYFGLDPAVKQSGKLNGDKVHMSKRGSSLARRVLHMAALNNVKVDKRSGTPVNPVVYDYYARKCSGKKKPVAMGAVMHKICNIIFAMLRDNKPFEVIPPEEHCRRFAAEHPDKMRKAA

SEQ ID NO: 40878 - protein, 400 aa, unidentified
MRAVFGIDVSKASSEVAILVNGEKVHGYTISNDAIGFARLLGDLKTVHKPEIIFEATGVYSRRLQSFLDEHGYAYTRLNPLEAKKQLDSLRVRKTDQIDAEKLAQSQFVLNRKTTYVQEEVYQNLRDLSRFYQNLTEDIVRAKNRLHKALQVTFPELENILSTPTGEQYWNLVIAFPCKDFVLELSKDKLSESIRQSTSKQISDKRVAYLAEKLIALANQSYCAVKKNSPMLEEVRYYTKELLRLSEQRQAVLDEMVELAQPLPEYDILLSIPGIAETTATSIIGELGDIRRFQSANQINAFIGIDLRHYESGNFLAKEHITKRGNPYARKILFKCIHNIASASHTNPCHIADFYEKRKRQSQTTSTKPHTIASIHRLIRTMYYLIMHNKLYDYASTQNR

SEQ ID NO: 40879 - protein, 414 aa, unidentified
MAKVIIGVDPHKLSATIEVVDTHEKLLGAGRFSTDQAGYTAMRAYAKAWPERVWAVEGSNGAGRPLAQRLLEAGEHVVDVPAKLAARVRLFDTGHNRKTDARDAHSIAIVAVRTKTLRVLRPDGELEALRMLCDRREELTRLRVQTVNRLQRLLAELVPGQAKKDLTALQAKAVLATVRPRDIAGKTRRRIAGEELADLVAVEAKMKKATAELKVLVKARDSLLMDLPGVGPVVAARTLADVGDIARFADRNRFASWTGTAPLDASSGEQNRHRLSRAGNRRMNHMIHIAAISQIRLDTEGRAYFRRKLAAGKTKPEALRCLKRRISDALYRQLLADAARAVLASAPTGDGTGPGGHCGASQESSAVDLPPHIDTSDQPLPGPATPTLQPPRPTRKASELTHLKPPRNWIRCLI

SEQ ID NO: 40880 - protein, 345 aa, unidentified
MKDIKVLGIDLAKNVFQLHGINAKGKRVLKKRLSREKLIEFMAQLPPCLVGMEACGGAHYWARMFIGMGHTVKMMAPQFVKPYVKSNKNDANDAEGICEAVTRPNMKFVPVKKIEQQDVLLSHRARELVIKQRTAQANQIRGLLAEYGIVIALGISHIREMTEILENNKLKLTIKSEAIFKRLYEQFKVYDEQVKIYDKEIQQQADSDPMCLEVQKIEGVGPLTASAMVASIGDASVFNNGREVSAWLGLVPKQHSSGNKVRLGGISKRGDRYLRTLLIHGARSALTRCESKADKKNQWAADVKQRCGFNKAAVALANKNARTIWALMAHGECYRTSDIQESAAA

SEQ ID NO: 40881 - protein, 415 aa, unidentified
MDVVHERVAALDVSKKDAKVCVRVPGARKGTFTREVTTWGSMTGQVLELREFLLDKNVTLVVMEATGDYWKQFYYLLEDALPVQLVNAAHAKNLPGRKSDVNDAQWLAQLAAHGLLRGSLVPPPPVRELRDLTRLRSKLTNDRSKEHQRLEKLLEDAGVKLSVVATDILGVSGRLMLGALCAGTAGPEAMAELAKGRMRSKIPELREALTGRFTSHHAFLTRLHLQVIDGFDAAIAELEARIEVVMEPFRPLIDLLLTMPGIGEKTAQVMVAEAGAVIDCFPSAACFASWAGLAPGSNQSGPKTKPARTRHGNTYLKGALGIAALSVSRSRGTFLSARYHRIATRRGPMRALVATEHSMATAMWHMLTQGVPYLELGGDYYTRRDPERAKARITAQAEALGLAVTFSPIEPDTAA

SEQ ID NO: 40882 - protein, 412 aa, unidentified
MEVVYPRCSGLDVHKRFVVACLSIVEKGQRHKELRQFTTMTNEILMLKEWLKASGCTHIAMESTGVYWKPIYHLLEDSFEIVLVNAQHMKAVPGRKTDVKDAEWIADLLQHGLLKASFIPSSEQQAVRDLTRTRMRLIQERTRLVNRIQKVLEDANIKLASVVTDIMGVTGHAILTALVAGQEDPECLTHLARGSLVKKEDQLQTALQGKLTAHHQVLLEEPLQLIARLDHSIARLDREIAERLRRFDALIERLDAVTGLSRRSIEVLLGELGWDMSHFPDAAHAASWVGICPGNHETGGKSLSGRTRQGNRWAKTVLIQAAHAAGHTQTYLGEQYRRISARRGPKKAAMAVGHSILVIFYHMVKTDESYHEKGADYFTESHKQEIQQRLVRQLERLGNTVILQPKAETTLA

SEQ ID NO: 40883 - protein, 352 aa, unidentified
MNQLKYIGMDVHKAMTVISVVSCEGKELAEAVIETKSTTIIDFLRGQRGTLHVTFEEGTQAAWLYDLIRPHVAGILVCDPRKIVTQGNKADKIDARRLAELLRTKGLTAVYHGEQSTKVLRELTRSYREMHEDSTRVKNRLKALFRARGIDCSGSAVYSSDERKNWTEELEHAAARARASRLWEELDLLGKLCEEAENDLMTEARKHAAMKILRGIPGIGPVRAAMILGTASTPHRFRGKRQFWAYSGLAVVSKITSEYQLVDGRICRSKKQPLVRGLNRNYNRTLKEVFKGAAKTAASGPWKSRFHAIIANGQEPSLALLTLARQIASITLALWKKGERYDEKKLSIVHAA

SEQ ID NO: 40884 - protein, 348 aa, unidentified
MSQNHYIGLDVSARTVNLCVVDVDGGVAHERKLSSDPEEIAQHILTLPFQIVRVGLEAGMLSQHIYGRLAEARIPVVCVETRHMKAALSAQLNKTDRHDARGIAQMMRVGLFKPVHVKTPTSQRLRTVLTARQLLRNKLQDVENEIRSLIRNFGYHLSKVTARDFEPRVRELIAESELHIVADALLVARRSLREQFGRLDDLLVQLAREDEVTRRFMTVPGVGPLVALTFRATIDVPSRFTRSRTVGAHLGLTPRKQQSGEVDRTGRISRWGDAMMRSALYEAAQVLLTRVKRWSALKAWAAQVSRRRGHKKAIVALARRIGVVLHRMWVDGTEFDWGQRPEAAATSM

SEQ ID NO: 40885 - protein, 403 aa, unidentified
MTSFSYFAGIDWASQSHTVCVLDAAGRVELRLDLPHNKEGIERLIRQLKSFPGIVIAIERPSGLLVDALVEAGLRIVPIHPNVLKASRARYRGAGKSDPGDAYMLADILRTDGHRFRTLEPQSDEIRALRALVRTRDDLVAERVALANQLRSLLQSFWPGAVEIFAEIDSPIALALVARYPTPQSAARLGEKRLASFLAQHGYCGRRPVVALLERLRGAADGHAGELEGEARGELAHSLAAILERLVNELAKLSARIEHTVANLADGQIIMSFPRSGRICAAQILAELGSVRERFPTESHLAAEAGVAPVTYESGKHRSVVFRFACNHRLRRALTCFADQTRHAHPWAADVYLRARSRGCDHPHAIRILARAWVRVLWRAWFTRTPYQPHLHRSAAALQATMG

SEQ ID NO: 40886 - protein, 311 aa, unidentified
MTEHTIGVDISKSHLDVFDAERREAKRFENSISGFRAFEKWLGKAHIARVVYEPTGPYHRNFEERFCDKLPLVKVNPLQARRFAEACGTRAKTDALDARGLARMGVALELEPDIPVAKAARILKDLQVARAALIKERTRLNNRGYVQTNTVLKRQTKARLALVEKQLSELDREIDALIKADKTSARRREIVQSIPGLGSVASAAILTYLPEIGTLDRRQVGSLAGVVPYNRDSGQWKGKSFISGGRKPLRDALYMPALVAMRYNPDLKTKYEALRAAGKPAKVAIVAIMRKLIETANALVKADRLWVPKSS

SEQ ID NO: 40887 - protein, 380 aa, unidentified
MDSMTKVDRDVVVGVDAHTDTHDAAVLDDCGRLLATRTFQADPAGYRELLGWVQSFGRLVLIGVESTGSYAAGLTRYLRAAGVEVREVNQPHAHTRRRRGKSDPIDAEMAARHVLADHSIVVAKDTTGIVEAIRQLRVARDGAVKARSAALNALEGLTVSAPDELREQLVTRKTLRGRATLCSRFRPDQARLHEPIHAARAALRSLARRVIDLDAEIAVLDQQLKRLVAAAAPTTTARIAVSTGHAGTLLVCAGQNIQRMRSEASFAALCGASPIPVSTGRTDRHRLSYGGNRDANRALHMIAVCRLRYCQRTRAYAKRRTAEGKTKTEIIRCLKRYIAREIYHALLADLLPQADAPRRTDPIVSITCVAGPIGRTIRTA

SEQ ID NO: 40888 - protein, 350 aa, unidentified
MKKYIGMDVHKATTVIAVINELGRIITEAVVETSPAAILDFISSQRGCLHVTFEECAQAAWLYDMLRPHVADLLVCDPRKIARASNKGDKSDARRLADLLRTNALTPVYHGEQTTTGLKELAQGYTCLVEDRTRVKNRLKALFRARGIACEGSGVYSLDERKQWLAKLDSPAVRARADRLCSELDCLEWLSTEAELDLRAEARKHPAGKILRSIPGIGFVRAAVIIGVAGTPHRFRTKRQFWSYCGLAVRTVASSEYRMLEGKVVRSSKRPLVRGLNRNYSRALKSVFKGAAKTVASGQWSSLFEAMVANGTPESLAYLTLARKIASVTLALWKRGERYSQKKMKIVHAA

SEQ ID NO: 40889 - protein, 356 aa, unidentified
MIVIGIDPHMRTHTAVALERVTGEIVAERTVKARARGHGELVLWARALDAERVFALEDCRHVSGSLERFLIARGERVVRVPPKLMAGARAGGRERGKSDAIDALAVARAFLREPELPVATLAGFEREVRLLADHREDLVGERTRIGNRLRWHLHDLDPSLEIPAGALDRYRWLDRLQAWLKGRDEGSAQVRIARELVVRCRELTRRIKELERELEALLESEAEELLELCGCGTLTAAKLVGEVAAVDRFAGESKLAKYTGTAPLPASSGERQRHRLNRSGNRQLNCALHRIAVTQARVYPPARAYLERRQAEGKTRREALRCLKRHLARTVYRALRAMEDRKTTSTVEVAALADLT

SEQ ID NO: 40890 - protein, 454 aa, unidentified
MAQGSGLTRGDRNRNDRIAALRAVVRRDRAVLAIDLGEDKQAAALVDHEGRVLARRIVKAKAYQLGELLAWAAGKAAAAGFAGLTVACEPTGHRWKALMGLADAAGCGFVCVQSLAVARAREGDDYTRDKTDHRDAYLIGKLVIRLDCYLPERADEIWARLRHLGARRFALVADVISCMQQVSDLLACAWPAALGVAARPLEATTWLAAMGAVTDRCNGNPARLRTMGYDKFVAAVRRELPRWGAKNIYHKIVKGLWEALADPGGVIAQRRGALERVHLLMGDWRSLLARLADTEGRMTAVLDELGLTELVTSIDGLSAVGAAVILAETGELSRFSSARSVVKHAGLNPSEHTSATLAGKTRISHRGRPGLRTAAWRAVWGGMRHNRVLHARHAHLTGRPDGNRLSDGQARAACAATLLRWLYAVVTKGQMWDARIAAGTIPARRDAVTTPAAA

SEQ ID NO: 40891 - protein, 364 aa, unidentified
MAVSGLSPKELTKEAPNIMLHVGLDLSRRRLDFDLLCEDGSRIERGAAPPDADGLRGLVRRVDVYQEPVCAAIESMNGARFVHDRLEELGWQVELADAQKVKGLAPLACKTDRIDAWVLAELSRRDLVPAIWLPSPTVRQERERARWRLHLVRHRTALKNRVHATLIAFGKPCPVSDLFGSRGRQLLARLDLPDPWAQTVSGSLSLIEDLDVQITDCERELRVLGADHEYVPLLMSAPGIAWVLGYTIAAEIGDINRFASPTKLCGYTGLCPRVNQSGEHDHRGSITKNGPKYLRWALIEAAVHAVCSPVYRERYQRTATRLGRQRGKKVARVDIARKLAEAIWYMLTRGQSFAPAGATTPLAA

SEQ ID NO: 40892 - protein, 349 aa, unidentified
MGEVSTIGVDIAKSIFQIHGVDAEGAVVIRRRIGRAKVLEFFTGLPPCLVGMEACATAHQWARELKKLGHDTRLMPPTYVKAYVKRGKNDANDAAAICEAVTRPSMRFVPIKSVEQQSALMLHRTRDLLIRQRTQLINALRAHLAELGLVAAKGHEGLHQQVTAVAESSDELLPSNARFACQAIVAQLSAVQTQINGLDKRITQAHRANADSKRLEAIPGFGVILSTAVVATITDPKAFKTGREFAAWIGLVPRQNSSGGKERLGSISKQGDRYLRRLLVLGAISIVGTARTRPDKYPWVTELLGRRPAKVVAVALANKMARVAWAVLAKGETYRAPTRSSGAAIAVAA

SEQ ID NO: 40893 - protein, 362 aa, unidentified
MGFDSIIALDLGKFKSVCCLMDARARTHRFETVATTPAALHDLLVANAGPDPSRTVVVFETCDCAGWAHDLAAALGLQVRVANCCHESWKWRRVKRKTDKDDALKLARMVLLEQLPTVHVPPADQRQRRRLVQHRRSVVRRRTQCKNAVRSIFSQQGLTELLPRGNKAWTAAGVAQLRQHARPMGDCVELADLWRGRLHAELEILAAVDQQLRVLERKLDELAESDEKVKLLQTVPGVGPRLAEAVVLCLDDPRRFKSGAEVGGYAGLTPKLIESGQMSRVGRITRRGPSLLRGMLVEVAWVVWRKNAWAQAFVAKVSRGMKSRKKIAIVALARRLLVKLWAMLRTTTPWRDPGVAAAAAAT

SEQ ID NO: 40894 - protein, 290 aa, unidentified
MQAVTTIGLDIAKSVFQVHGVDAEGHVIIRRKLKRRYVAAFFQKLPPCLVGIEACASSHHWSRELHALGHTVRLMPPAYVKPYVKRHKNDAADAEAICEAVTRANMRFVETKTPEQQSCLMLHRTRHLFIRQQTAVINAIRAHLAEFGIVAPVGRNGVEALLDVVADSSDKRVPEIARACLVALGAHLRVLKTQILEFDRLQNSSGGKEKLGSISKRGDRYLRSLFTAGALAVIRYAKLHGTEHRPWLTALLARRPTKVAAIALANKIARMAWAMMAKGERYKEPVALAR

SEQ ID NO: 40895 - protein, 307 aa, unidentified
MTEHCYCGIDVAKDRLDVQVLPHRQRFSMDNNATGWDELVERLHALPIAAVGIEPSGGYERGIIRALLAAGLSVRRINPSKLRQFARARGILAKNDRLDAQLIAEYVSIMPTRVVQRAATAERLAEVVTMRRQLCDEHVTIENQAAILRRLNKRRLARLKADIHLLDKRMAEIVAADAILAQRYELLTSMRGVGPTLAFTLIALLPELGQMSRKQIAALVGVAPYDFDSGKLKGHRCIYGGRMPVRNILYMAALSAARYNPALKVFHNRLAAANKKPKVIIVAVMRKMITTLNAMVRDKAAWQPRAA

SEQ ID NO: 40896 - protein, 352 aa, unidentified
MKNFFGCDAHKKYSMFASINEEGHRAHCIKVKNDRHQFSCFLKTLPPGSPIAVETVGNWYWMIDDMEKAGHVPKLANAWKAKLMMGQINKTDKLDANGLALLLRNGTLPSVWIPPRELRDQRELPRMRMALVSVRTKFKNRIHATLAKYAILITEVSDIFGVRGRSLIKERLSELPPYTRRSVEMQLELLDQTVEHIKVCEKQIGEVIKKTPAIMLLMTLPGVGPVLAIVIALEIGEIERFARAENLASYAGTVPRISESAGRTRYGRVRPDVNRYLKWALVEAANTVVMNQSRWSERHVVRLYRRIRGRRGHAKAVVAVARHLAEASYWVLKKNESYKEPKRYEPISSTQK

SEQ ID NO: 40897 - protein, 367 aa, unidentified
MEKSSKVYVGMDVHKESIEVTLAEVGGEVRRLGQIGGDRGSLLKMVRKQQSKGGERVFVYEAGPCGFWIHRELAALGERCMVVSPALVPKRAGDHVKTDRRDSERLASLARAGELEAIHVPDIRDEAIRDLVRGRDDAVIAQRRVRQQLKALLLRNDIRYVGKTSWSGAHRRWLSELKLPEPAQQIVFEEYVDAITVATARIERLTRAIETEVLTWRFAPVVGALQAMRGIQFVHAVTLVAELGDLTRFASARQLMGYLGLVPREASTGEHRRQGSITKAGNSYARRALIEAAWAYRHPARVTRIIATRQTGLPKAACDIAWKAQLRLSAKYRRLNARHLNHNKIVVALARELSGFVWAIGQCVKPH

SEQ ID NO: 40898 - protein, 356 aa, unidentified
METAYDGRQVVGMDLHRRRSVLVRMTGDGRRLGTAKITNSPAELRRAIARAGKHPRVVLEATYGWYWAADVLAAAGAEVHLAHPLGVKAFTYRRVKDDVRDSADLADLLRMGRLPEAWIAPHEVRELRELTRYRIKLVRMRTSCKDQVHGVLAKLGVAVTCSDIFGVAGSAWLDGLRLPQPYAGKVTSLRHLAGELTTEITMLGEVIASLLAGDRGYQVIQQLPGIGPVLAAVITAEIGEVTRFRNAAQLCSWAGLTPRHRESDTKVARGHVTKQGSRLLRWALIEAIQRIPRDSVIGAVKDGIIGRRGKEAKNIAKVAAARRLLTLVYYGMRDGQIRCLSRPPAGPPVTETARAA

SEQ ID NO: 40899 - protein, 419 aa, unidentified
MRIIKTKKHKIVNGRTLLVAVDLGKSKHMGYYRCLDGTDIKPFEFSNNRPGHQKFYDRIYQAKAVHHLEEVVVGFESTGVYGEPLIHFLNNKGIKLVQVNPLHTKRMKELEGNSPGKTDRKDPKVIADIMELGHFLTVIIPEGVSAELRRLTQARERSVERRTTFYNQLQDLVFIIFPEFLEVMKDIKTRSAQYLLRHYPTPQAILQCGVDELSLVLRRVSCGKLGRQRAEALYEATGRSVGIEEGQRSMVLEIEEILLRIERDECFIAKLEREMDRLLEQIPYSRSILSVKGIKTVTAAGLIGEVGDFRKFRTISELLKLAGLDLYEISSGNQRGNRHITKRGRSLLRKLLFFASLNMIRKGGVMHESYQRYIGRGMPKHKALVAISRKLLGILFALVRDHTEYVVHYSERENLKLAA

SEQ ID NO: 40900 - protein, 405 aa, unidentified
MDIQPIFRCAVGMDVHLALICVCIIVAQPGLEPEVHRREFGGFQRDRRAMADWIASFNPEIVVMESTGIYWKSPYAALEKVGIQAQVVNAQQVKKVPGRKTDTSDAEWLAMLARAGLLRGSFIPPEQLRNLRQVSRHHQKITAMRAMEKNRLLKVLSDAGIRITAVVSDAHGVAATAIIDCLLAGGTPEQALTHAGRLQASPETLLASLQGELSAEHRFVAQTIRHHIHYLDSQLADLERHLLEALQPHEAAMQFLMTIPGIDRLAAAKLIVEIGVDMAAFGTAGRLCKWAGVCPGNDESAGKRRRGDTAPGNRYVRALLCQIAWAAVRTTSQFKGRFQSLVGRRGTKRAIVAIGHKVLKTVFVLLSRQVPYQDSTVDYEALAVQRHAPRWIRQLRKFGYLPKMA

SEQ ID NO: 40901 - protein, 366 aa, unidentified
MHLVGKNSIIVGIDVHKYAHQAVALGCFGQELGKLEFSNDEIQKCIVWLNTLGKRENIIVGLEDVNGLGIHLTRELQTAGFLLCYSPAVYTERERKHSSQQDKNDYLDAKRVGKVILTKSEETLPALHIVPQENIRTLDLLLQEREELVREQTALKNQLHALLHQYYGNAYKQSFREIFTQKAITWYRADLREEETQAMPDNRRFVSGSILRRLERLEVIMSQAKELLALISGTGGALSSVHKLTNALNGCGVLTAVKIVVETGDMRRFQTEAKPAKYAGIAPVQSQSGKNNRYHTNPFGNRKLNKAVHTIALSQIGKSGNKESKTYYQKKLAEGKSKLWALRCLKRFIIRRIYSTLRESVAKKAN

SEQ ID NO: 40902 - protein, 414 aa, unidentified
MKYNTQNAKIESITEKTLIVGIDVGSETHYARAFDWRNYEYSKKPLEFSNNEAGFVTFKVWMEELAEKYGKDVVIPGMEPTGHYWFNLGAYLQDNGMKPVHVNPHHVKKSKELDDNNPNKNDRKDPKTIAALVNEGRFSYPYIPTGVYAEIRSLSNLRLQAQEEITRIKNRIARWFSIYFPEIKDVYKNPGAVSGLMILNGVNQIWRDAKLRAAGLKRAKTLVTAAEHSIGSQEACDSARIELKILLNDYEIYHQREEELMELIEEKLSEVPYIDKLLEIKGIGMKTVSGFVAEVGDIKRFDNPKQLQKLAGYAIVECSSGKHKGESHISYRGRKRLRYVLYEAAISLIARNTEFKEIHRYYQTRGKNSLKKMQSVIAVACKALRIFYAILTKGVTYDGAKMLQDIKRPQLKVA

SEQ ID NO: 40903 - protein, 334 aa, unidentified
MNVTTIGLDLAKSVFQVHGIGSHGKTLITKQLRRGKVLEFFANLPACLVGIEACPSAHHWAREISRLGHEVRLMPPGYVKPYVKRGKNDRADAEAICEAVQRPTMRFVSIKSEEQQALLVLHRVRETLVGQRIQLINTIRGHMAEFGVVAAQGAANVQQLIIRLADPDDTCIPARARAVLLLQVDQLRDTERRIAELDDQVKEQAQQDEAVKRLMTIPGVGPVVATAITATLGDGRAFASGRHLAAWLGLVPGQRSTGGKERLVGITKAGDGYLRRLLVNGARALTRWWRSRSPWLMALLARRPVNVATVALANKMARVIWVVLVRGQVYRTAT

SEQ ID NO: 40904 - protein, 425 aa, unidentified
MDEVDEQELHVERVAALDLGKTVLEACVRVPHESRPGRRMQELRGFATTTSALLAMADWFRCWGVTRVVMESTSDYWKGAYYLLEAEGFECWLVNAREVKNVPGRAKTDKADAVWLAKVAERGMCRASLVHPKPIRELRNLTRYRRSLIRDRTREMQRVEKLLEDAQIKITSVVSDVFGVSGRAILHALIDGQRDPAVLAGLAVGRLRPKTAQLREALRGFFTDHHATILAMMLDNIDRLSAQITALDTTIGDAVDPFAHQVAQLGEITGAGRTAAQELIAELGVDMTRFPSDAHLVSWAKFCPQTRESAGKTKNKGRAKGSPWLAATLGNIAASACRTDTFLGARHRRIAKRRGTQKAIVATGNAVLVIAYHLLADPAVRYHDLGADHYDTRINKHRRARNLATQLQALTGQKITIRDGKAIIA

SEQ ID NO: 40905 - protein, 354 aa, unidentified
MSQKLNSVIAVIGIDIGKNSFHVVGHDARGAIVLRQKWSRGQVEARLANIPSCLIGMEACVGAHHLSRKLASLGHDARLMPAKYVRPYSKGQKNDFNDAEAIAEAVQRPTMKFVATKTAEQLDLQALHRVRERLVSQRTGIINQTRAFMLERGIAVRQGIGFLRTELPTILATRTDALSPRMLRVIEELAGDWRRLDQRIDGLSGEIEALARQDQACSRLMTVPGIGPIISSAMVAAIGTGDVFSKGRDFGAWLGLVPKQISTGDRTILGKISRRGNRYLRVLFVQAAWVVLVRIKNWERYGLKSWIEAAKRRLHHNVLAIALANKLARIAWAVLAKGRAFELTRTDDADVRPA

SEQ ID NO: 40906 - protein, 339 aa, unidentified
MNEIIRIAIDLSKGAFALHGVNADEDAVLRRELRRGQVLGFFAKLPSCMVGMEACASAHYWARAIAALGHRVVLIPPAYVKPYVKRGRKNDANDAAAICEAMARRSVTTVPVKTPEQQAALMLHRARKLLVGQRTMLANAMRAHLAEFGIVAPCGEKGLDNLIALAVDAADPALPPMAREALGMLAAQLRDAEVKIDALEREMLAAQRRDEASQRLTTIPSIGPITASAIAATMGDPRRFKTGRDFAAWLGLVPSQHSTGGKTSLGPITKTGDRYLRSLLVVCATGMLRHQTKSPWIKALLERMPARKATVAIANKLARIAWAILAHGGTYRSQAGLAA

SEQ ID NO: 40907 - protein, 351 aa, unidentified
MLIVGCDYHPSVQQIAWIDTESGECGESRLLHSNGEAERFYRTLKEQGANVRVGIEATGHARWFERLLAELEYELWVGDPAQITAKRVRKQKNDRQDAQLLLKLMMEDRFPRVWVPSVENRDLRQLLWHRHRLVQMRTRVMNQLQAVALNEGVRRKKALWCQAGRSQLESFRLGPWATRRRQGLLQLLDQLNSSIAPLTAAVEQQAAQHADAQRLITHPGVGALTALAYVLIIGSPQRFRCGKQIGSYLGLIPCEDSSASRQRLGHISKQGNVLLRFLLVEAAQAAVRANTDWRREFLHLAMRRERRIAKVAMARKLAVRLYWMWRKGWDYEQSLQFGSHAGQPVVGYGVK

SEQ ID NO: 40908 - protein, 377 aa, unidentified
MTQVILREENSAVLFVAFELSAKSWKLAISAGGRRAREVKLSAGDLAELREELVAAKKKFGLPDDAAVVSCYEAGRDGFWLHRYLLGLGVSNVVVDSSSIEVNRRARRAKTDRLDALKLLGMLMRYQGGDHDVWGVVRVPSAEDEDRRRVHREIERLKSERTGHTNRIRGLLNLHGVRMAAITSTFEAMLETTRLYDGSPLPADLRAELVREYERLVVVRRQLRDLEQARSTRVKEQAPCDGKVALLMQLKAIGMNGAWVLGHELFGWRKFKNRRQLAGCVGLGATPFQSGDSSRDQGISKSGNPRVRTLLIEIAWGWLRWQPDSGLSKWYMSKFGPGSGRMRRIGIVALARRLLIALWRFVEDGVVPEGALLKAEA

SEQ ID NO: 40909 - protein, 455 aa, unidentified
MMAKKIPKRPTMETVNSNAAAVDIGSRMHMAAVNPDVTDAPIRAFGTFTHDLHDLADWFKSHGVTSIAMESTGVYWIPAYEILEQHGFEVILVNARYAKNVPGRKTDVSDASWLRQLHSYGLLRRSFRPTAQIATLRAYLRQRERLVEYAAAHIQHMQKALMEMNLQLHHVVSDITGVTGMRIIRALVAGERDLDVLASYRDVRCHASVETIKAALNGNDRAEHIFALTQSLDLYDFYKTKMLECDRNLEAVLDVLAADQEHDPSQLPRARTKTKQVGTPSFDVRAALFGVLGIDLTQIHGLGPSLSLKLVGECGTDLRAWPSAKHFTSWLCLAPGNKISGGKILSSRTRRSSSRAATLLRLAAVTIGRSDTALGAFYRRLAARAGKAKAVTATARKIAVLFYNTLRHSMTYKDPGASHYEERYRSRVLGNLKRRAKSLGYDLQQLSVEADMAVS

SEQ ID NO: 40910 - protein, 402 aa, unidentified
MRFVGIDVGAERHTVAIVDESGVVILKATAFTEDSAGYGRLLELLGTATDCLVAMEATGHYWRNLYAALVTAGFAVALINPLRTSRFAEEELQRTKTDAIDALGIARFAAQKRPTITQLPEAALQELRELVRLKGQVLQQLGDRVRQLHRAVDLVFPEFTRHVRTLDSELATAILERYSTAAALRTVSARKLARLCYDGSHHVGEARARALIVAARQSVGAHHGEPYQLQVRYACEDIDLLRRRLRALEKDIEQRLEQIEVGKLLTTIDGIGPQTAACIIAEVGDPARFHSSRALASYVGVVPRLHHSGKRRFSTSAKVPLGNARLRRALWMPALTAVQHNPWLRAYYYRLREAGKRPKVALIAVIRKLLSAVYSIAKHRRPFVLAPIFSPVAGGAVVPTAR

SEQ ID NO: 40911 - protein, 367 aa, unidentified
MMGWMAPLRHLSAKLLCDRISSEWEPSMGEVTTIGLDLAKQVFQVHGVDAKGATVLRKQLRRAQVLGFFSRLPPCLVGLEACATAHYWARELAALGHELRVMPAQYVKAYIKRNKHDAADAEAICEAVVRPTMRFVPVKTADQQAAVLLHRGRERLVRQRTGLVNALRGHLAEFGVIAPQGLRNVGKLIAIVRDQTDARVPDLARQVLQVLAAQIEQLEAAVAAIEKQLMAWHKSNPVSQRLASVPGIGPIIATAIAATVVEPSGFRSGREFAAWLGLVPRQNSTGGKHRLGGISKRGNQYLRRLLINGASANLLRSKATNADPWVIGLRRRRPPLVVAVALANKTARIAWAVMHRHENYQRVAAAA

SEQ ID NO: 40912 - protein, 337 aa, unidentified
MKFCGIDLHSNNSVVVVTDETDRVLVSRRCPNELTPILSLLEPHRAELVGVVVESTYNWYWLVDGLKAAGFEVKLAHPVAMKRYDGLKHADDKDDAAFLAHLLRLGILPTGYIHPPQERALRDLARKRIQLVRSRTQHILSVENIMARQYGRRLSCNEVKGLSATSIDRLGLPTDVALAMKANVAIVQALQIQIDLLEERLLHEARLRPEFSLLKTMPGIGEVLATVIMLETGNIERFADVGHFASYARCVKSAHYSNGKKKGEGNARNGNAYLIWAYIEAANFARRFSEDAKRFFEKKKAKTNAVVATKALAHKLARASYHILKEKQPFDARRCFA

SEQ ID NO: 40913 - protein, 344 aa, unidentified
MKITTVGIDLAKSVFQVHGVDGHGKPALKKQLKREQMAAFFANLPPCLIGMEACGSAHHWARKLEGFGHTVRLMAPQFVKPYVKTNKNDAADAEAICEAVARPNMRFVPVKNMAQQAVLALHRVRQALVKARTAQSNQIRGLLGEFGLIIPKGIAHIGRRVPEILEDASNELPGSFRQLLKRLMDHLKDLDRQVGELEVQIQSWHRDNAASRKLAQVPGIGPITASALVATVGDARDFDNGRQLAAWLGLVPRQHSSGGKSLLLGISKRGDTYLRTLLIHGARAVIRASEHKTDKSGWLQALLGRRNKNVAAVALANKNARIVWALLAHDRNFEADYTSAGAPA

SEQ ID NO: 40914 - protein, 321 aa, unidentified
MKQVGVDISKRSFHIAVLVGEKQLNKAFENTPAGHRDLQSWLLKKGISQSNAHVCMEATSTYYEALALALADNGWRVSVVNPLQIKAFAESRLIRQKTDRADAHTIALFCAQQEPPLWSPPALEVRELQRLLARLEAVQSMRVQELNRLHEAQGVARESVERLLASLDEELRLLKKQIDDHIDRHPGLKQQTGLLKSIPGVGDTLSAYMTAWLPISRLDDVRAAVAFVGLSPKARESGTSLKGKAMLCKMGHSRLRKLLYMPAMNAMRFNPAASALAARLREAGKPGKLILGAIMRKLVHWIYGVLKSGQAFNVNLALAKA

SEQ ID NO: 40915 - protein, 405 aa, unidentified
MAKSELLGVVDDLQDSYEAGEGNITIGIDLGDRYSYCCVLSEEGNVLAQGRIRTNAETLERYFKEIPPCRIAIEAGTHSRWIYELLSSWKHEVIVANTGAIKIITSNNRKSDEVDAQMLARLARADPKLLSPIQHRSEVGYEDVVCMNARDLLVRTRVKLINAVRGMVKSSGGRLPTSSTECFVAKAAPCIPVTLRPALAPLLENIARLTEQIREFDKRIEQIGRTRYPETARLRQVNGVGPVTALKFVLTIGDPNRFHQSRDVGPYLGLVPRRHQSGAVDKQLRISKAGNRQLRVLLVQCAHRMLSRSGPDSDLKRWGIHIATRGGKSSRKRAVTAVARNSPCCCTDYGFHAKHIDRYSTQRPFNQNLWPERFLRSFRFEKRRPVLIDAVFPVTASFLVAFEAE

SEQ ID NO: 40916 - protein, 338 aa, unidentified
MMQFKFFVGIDVSKNTLDFSVVTEGKEISAFKIENSLRAIRAALVNLKRIKGYELSQTVFCLEYTGLYNNHITHCLHCAGAHIWVEKAIQIKRSSGLQRGKSDKVDAQRIAFYASRNQDKARLWVAPRVVIQQLKRLTGVRERLLIMVAQLNKPIQESKRFDSKEVFDVIKKSCQSSLKAIKADLKKVEKKIGEVIKADTSLSHLFELITSVDGIGSVIACEMILTTNEFKNINDPKKYACYAGVVPFEHTSGSSIKGRNRVSHFANKNTKRLLHMATLSIIRYHGELKTYWLRKLQEGKHKMIILNAIRNKLIQRVFAVVKRGTKYEKLYLHSLQGS

SEQ ID NO: 40917 - protein, 411 aa, unidentified
MLKIVFKICCGIDVHKDFVIACIAKTDDNNITTYQSKRFSTFTKGLRELREWLNSNSCKDVCMESTGKYWHPVFNILEDTCNVIIAHPKYVKAIRGKKTDKKDAKWIADLFKHDLVVSSFIPNLCIRQLRDLCRYYCKLTNFSTSETQRTQNCLTVSNIQLANVVSDINGKSSQRILAKILENPSDTNFNIEPLLHKSMLDKVEDIALAIDGVITQEQADKLKIIEQHYDSLQLCKSNLEKIILELAKPYEHEIALLQTIPGIDSKLTAIRIISEVSNDVSAFPTSKHLCSWAGLTPTNNESAGKKKSVRISKAGCYIKPLLVQCGLAALKSKDNPEISNRYKNLKMRRGHKKAIIAIARMLMTIIYHILQDKVCYDKELYSHYNQLPISKEITVEQAIALAKRQGYKLVC

SEQ ID NO: 40918 - protein, 337 aa, unidentified
MNAITIGLDIAKSIFQVHGVDAHGKPVLQRKLRRGEVLRLFANIEPCLVGIEACHSSHYWGRELSKLGHQVRLMPTQYVKPFVLGGKNDANDAAAICAAVRRPDMRWVAIKSAEQQSVQSLHRMRARLIQERTAKSNQIRSMFSEEGFVFARSIPQLRRSVVQLTSQENTRLTPILRRLAAMYLEQLDALDRWLAELQAQLRELFSQREDCRLLASVPGIGPVVATALVGTVGDPRQFRNGRQFAAWVGLTPKQRSSGGKTMLGGITKHGDTYLRMMFVQGAQAVLRFVDRRSDRQSLWLKQLLTRRHKNVVVVALANKLARVAWAVLAQRQAYKAS

SEQ ID NO: 40919 - protein, 354 aa, unidentified
MKRNSKYVGLDVHQAMTAVTVRGEGGRVIMRSVIETSERSITEFFSALGGTVRVALEEGTQAQWLYDLLSPRVGQVIVCDLRGERRSGNKGDRVDADHLSEQLLRGGLRSVYHGSGDRADLKELTRAYRNLVEDSTRVMLRLKALFRARAIRTIGGGVYKPTERAVWVAQLGGHGARLRAQTLYAQLDVLRTQRKKAKAAMVAEAKRDPAWGVLETIPYFGPVRISLLLATIGTPWRFRTKRNLWAYAGLAVVTRSSADYEFFDGRAHRRSRRPLTRGLNRNHNRVLKAVFKGAATTATGRAGPLQDFYHGMLERGMREELARVTLARKLAALTLRLLKTGEVFDPTQLSRPQT

SEQ ID NO: 40920 - protein, 344 aa, unidentified
MNKLSRVGIDLAKNVFQLHGVDRHGKAIWRRRLTRDKWLRVLLENIEPGCEIGMEACAGAHHWARELQAEGFTVKLIAPQFVKPYVKSNKNDANDAEAICEAMSRPNMRFVAVKTVEQQDIQAAHRIRSELISQRTAKANQIRGLVAEYGLVAPQQLARLRAAAPVWLEDAENGLTSRFRRLLNDLWDDLKTLDQRVAELDHEINMIAQSDPVAKRLQQLRGVGPMVATALVATVGNAEQFANGRQMAASLGLTPRQHSSGGKNRLLGISKRGDAYLRSILIHGARSVIRTAKVKDDRLSQWVTSLAERRHPNVAAVALANKTARIAWAMLRTGTDYKPDYIAA

SEQ ID NO: 40921 - protein, 415 aa, unidentified
METILACVAGLDVHKKFVMACVRKTDLKTGDVSEKVMRFGTMTGELRALTDWMAAAGVTHVAMESTGVYWKPVWNILEGRFQLLLCNPRELKQVPGRKSDVKDSQWIAHLLACGLLTASFVPGRAQRELRDLTRYRASLLDERTRLANRIQKVLEDANIKLASVATDILGLSGRDMLGALLQGETDPDVLAELARGRLREKIPQLKEALLGHFTGHHRFLLDHLLDHLQYLEGQLQDLNQQIESAMDPFLDKATFERLDAIPGVNQRTIENVVAEIGTEMSRFPTAGHLASWAGICPGNEESAGRRKRTATTKGNRWLRRALAEAARAAGRTKDSYFKAQYSRLASRRGANRAATAVAHSLLVVFYQLLMHPDATYKDLGPNYFDQLDPQRVARHLVKRLQGLGYEVTITQKSAA

SEQ ID NO: 40922 - protein, 373 aa, unidentified
MDSVSAETFVGLDVHRKSVVATAVDVWGHPVGQAKFGPTDRELVEFLRTLPGPARVALEACSVWQHFYDAAESTGASVVLSNPLKTRLIAEANLKTDRVDSEALATLLRGNLLPTSYAPPPETRALRSLVRERLFYRRKATSIMVHTYAVMLQRGVDYEDRILVHRRKRESLRELHLEEVDRALDTLTHLDTTCKDLDRRIHEAYLDSSDAQLLATIPGIGELTAVALAAWITPIERFPTAERLVSYLGLCPTTRQSAGSLYHGRLKKDSNELIRTLLVEASWTHRARVKRGTVAKKARRVSRRRGTTKGAVAGAHSLVKCIFAMLKRGEPFNPHAPGPSTAVQRLRHPRVTAMQCVQRTALESPTANSLPAP

SEQ ID NO: 40923 - protein, 393 aa, unidentified
MEPTRTNEFTPDSEFLGVSMELAVGKWKLALQDGKRPNATIRTVDAEEPAARLDAVLAEVDKIKVKWGLPADVRVVFLYEAGQDGFWIARHLIALGYEVLVCDPASLLVKRHARGAKTDRLDAIALVTTLRAWMGGEQDRMRAVRIPSLDDEARRHLVRDRGELQKETLQHRDRIGKLLRTVGCWESVGSDIGERLAGDRVRCHDGRPLPPLLRERLLREAERLAYTERQLTALEKDMVAQLPAATQERVARLQRLRGVGPVGATRLVLELFWRDFQNRKQVGAAVGLVPQPYDSGDSHVDQGISKQGNRRVRSLLIEMGWFWLRYQPASAISRWFADFTGDGRSKRCKRVAVVAVARRLVIALWRYLEQGIVPDGAQLKVTPRRARKAGVAA

SEQ ID NO: 40924 - protein, 430 aa, unidentified
MKNYTQNEKILQVSESTLVIGVDIGSRTHYARAFDYRGIELSTKVFVFDNDIEGFNRFYGWTRELKTRNEKDKVIVGCEPTGHYWFSFARYITEHEIKLVMVNPFSVKKIKELDDNSPKKTDRKDPKTIAKLVVDGRYSIPYMPTGIYAEIRDLVYSRDRIMKQSNISANRIQRWLAIHFPEYQGLYTRFDAASGLAVLEKAPLPKDIVALGADGIRKIWHEKRFRGRGVTANRAETLVEAAHNSVGLDGDVATKSELYMLLEEHRLWASQLETVDKVLEETILKVPHVEKLLAIKGVGVVTVAGFIAEVGDIRRFKSPKQIQKYAGLELVENSSGKHKGRSKISKRGRRKLRKILFQVTIPLLARNNEFREIYDYYVTRVKNPLKRRQAMIAVSCKLIRVFYAVLTKGVEYDRFKMLSDIHRNSEHIAA

SEQ ID NO: 40925 - protein, 438 aa, unidentified
MSNKVIFNLDELFISVGIDVGADFSWMSIALPNQQFVGKPYKILHNSIDSLTTAVSKIKEAEELYSLESRIFLESTGIYHYPLFCYLRDKGFNCSVINPIITKNSTNINIRKVHNDRFDSKKAALVGLKPDLKVSLMPSDLALNCRNLCREYYDLMDNRGAYVNKLQGELRMAFPQYLGIFSKVTINTSLTLLETYTSPSAFLKADKQEIIDIIKSTARFGLTYAQNKYNAIIQAATDANQFGYIIDSNIKRIRLYISFIRKYDEEINSILESLHELVDANEDSDFVKQIHLIETFKGAGFLSAVSIMGEIGDFSAFSKPKQLFAYFGLDPSVKQSGKFEGTKVQMSKRGSAIARRVIHTLTLQSISISRNREAKNPVLREYYLKKCDSKPKLVAMGAVSHKVCNMIFAILRDNKPFKIIAPQEHIQQYNAAKCDIAA

SEQ ID NO: 40926 - protein, 383 aa, unidentified
MEALLYCCCGLDVHRDLIEACILRGEGGEPETIRESFGATKTELKRLTLWLEQNDCYSVAMESTGVYWKPIFETLELRSEYLESIWVVNANHMRNLPGRKSDVGDAEWIATLLRHGLLEKSFVPPAAIRDLRECSRLHRSFVQERCRYVNRLEKFLQAHGFKFSSVMKDILCVSGRKLLDILRDTGSITQLDVIVNCRRLRRSPEEISAAVCGNLSPAEQRLLKHLLHKLDSCQEDIRSILEDMRLLSEQFQEQLAIIDSVPGFDAESAMEIIAEISAAPQEHFSSGEKLCRWAGVTPRNDESAGKVKSRKTLHGNPYVKAILCQAAWAAVKVRNSPFHDWFWAHQHKLGQKKAIIAISRKLLMLIYLLLQTNQPYRPPEKAA

SEQ ID NO: 40927 - protein, 344 aa, unidentified
MYHYAGIDVSLECSSVCIVDGTGKILRETKVASEPAALIAWFRSLGLVLERIGLEAGPLSQWLYAALRDAGLAVELLETRHVRDAFKAMPVKSDRNDARGIAQLMRLGWFRPVHCKSIAAQETRAILTARKLLQSKLRDIENSLRGVLRGFGLKVGTTTERTFAERIRELVAGHPGLEVVAQALLEAHGVLRREFNSLDKQVARLARSHPQASLLMTTPSVGPIVALTYASAVDDPKRFRSSKATGAHFGLTPKKYQSGETDYTGRISKIGDASVREALYQAAHVMLTKPVRNCAALKGWAMRIVRRAGMRKAKVALARKLAVILHRMLADATPFNPMAKAMAS

SEQ ID NO: 40928 - protein, 355 aa, unidentified
MNVSVNHYIGFDVHKKSISYCVKLADGRIVEEGKLAARRATLCQWASKRAEPWHGAMEATLFSGWIYDTLKPFAAKLEMGHPARMKAIGASKKKNDKLDARTICDLMRANLLPACWVAPSEMRELRRILRYRNLVLEQAVRMKNKISGLLMESGVEYNKKRLHGEKYFHELLENLAAEVPESVKDLLKLSRGWLESFQATQQQLLVKLQKHPILMERLKRLKSIRGVGEVTALTWALEIGDPHRFSSIGDAVSYCGLTSALVESADKQKRGPISKQRNAHLQTVLIEAAKVAPRWNPQLAELHQAEIDSGNHRNRATLEVARKLVAYLLAVDKSGKDFAVRTPSAQPEGEVKPAA

SEQ ID NO: 40929 - protein, 345 aa, unidentified
MKNTIVGVDLAKRVIQACVVKNNKVISNEEIVADDFTAWLANMKPTVVVFEACGTSNYWKQVALELGHDARLISAKLVSKIRQNQKTDKNDALAIAQSSQLADINFIQGKTFQQQELQSIMRMRELAVKHKIAIRNQLEALLLEFNIKVSPRAGGINGVIESVLEDAENGFCLSFREALNSTWKVYLQIVQDIKEKEKLLERVIRAHPECKKLLNLEGVSTINAVNLYLSIGCGDIGVFQSGRDAAACIGLTPLQHSSGGKTKIGTIGKGMKNISVRSYLVNGAMAVVQHVDKREPKTKKEQWIKQLLERKSKKCVAVALANKTVRTAFAMLTQGTNYHAEPLAA

SEQ ID NO: 40930 - protein, 388 aa, unidentified
MNVTADQPEAPTAIRTDLGAIFVSLELSRSSWLITSLSPGGGEKMSKHTVRGGDVSGLLQRFAQLREKARVRTGKVFPLIVIQEAGLDGFWIDRVLQNEGIESHVVDPASIATSRRRRRAKTDKIDGETLVRSLLAYKRGEPRVCSMVKAPTPEQEDQRRLCRERKVLTAERVLHVNRIKGLLFCQGISGYEPLRRDRRERLEELQTGDGRPLPQHLKAQVDRELDRLELLLKQIKTVEGERDALLAAAQTAMPAPAAMLRDIKGIGSEFAAVLWSEGLFRHFDNRRQLAAYAGLAPTPWQSGAVDREQGVSKAGNPRLRTTLIQLAWLWLRNQPQSALTIWFHERVRRNAGRLRKTTIVALARKLLVALWKYVTTGVVIEGATMKAA

SEQ ID NO: 40931 - protein, 457 aa, unidentified
MSIDTTDLSSDPVADRVVRVQVGIDAAVVANHQVTIRETTRDGQVQLSRFHASPTIAGLTRLSERLAAHPHVMAVAEPTSMTWLGLHVALQEAGCDLALVGTRHAARLRGAISGKNKSDVIDADVLAMAGDVFTLSPLRPPAPPQLALRRAVVRRGKLVIDGNRSRRRLISLARWAFPDVWQEFAGSWPTAVAVLTRWPDLTALASARRSSVTNVVAAHTRGVPDVDARAERIRAAAARTTAFWDGHLDLEALAWETSEHLRDIALAAEQIERATDQAHHYWAALYGDDPLLLSVPGMGPMTAPTIRAFFADASAFPTAKAAAAYVGLTPSTWSSGTVVQPSRAITKEGPAVLRLACYQAAGGARRVDPQLAEYYRHLMVERGHCHTQATVAVARKLVERTWTVLTRGQPFEYRDLDGTPLTRAAAKDAARALAVPKTVRARARARSAATHRSKLTK

SEQ ID NO: 40932 - protein, 275 aa, unidentified
MNSVRYVGVDVHRDTISVAVLDESGRLLMQSVVATRRAAVLDCIQGVRGTLHVTFEEGTHSAWLYDVLVRRVAKLVVCNPRKNALLKSGSKSDARDARKLAELLRAGMLSAVYHGERSGLEVQQIARSYTQLTEDTTRVMARLKAVFRGQAVSCVGKKLYGKRHREEYLAQLGGSGLRRRAEHLYEELDALQPLRHAVRRELMVECRKHAAARWLQSVPFLGPIRAALLIGRVQTPHRFRSKRQFWTYCGLGLETRDSGQYRVVNGGVERRASRR

SEQ ID NO: 40933 - protein, 385 aa, unidentified
MAPPARPEIVIGLDVGKSSHWACVVTREGELLASKPVLNRENAIDGLYAQYPGALVVVDQVRNIGSLALSRARLAGMPRAYLPGLAAHGASRLFAGDAKTDERDAMVIAKTALGIPDALLPVADRPPEIEAARSLAAQRDFLTCENTRSKNRLRSILLESCPEFEAHADLSDPATLKLMAAVGGPWSISEASPQAVGALTRGCGRAKVAALVESVGSSSRPHPAAVACEDRAVRLLARRISENAAEIESLTSEISALLSADETYRCLLTVPGIGPRTASELVISIDIADFPSHDRLASYCGLAPRNRRSGTSISSVSASRQGNKRLKNLLIFSCSCLARSRNRWGDYYARCRDRGMPHGKALKAVARKRLKVIYAIMRDKVPYAA

SEQ ID NO: 40934 - protein, 428 aa, unidentified
MAATGTPALHLCVGLDWATQHHALTVYTLDGAVVGRFQVPATPEGYAELVLRLRTLGGNRPVGLCLEASRGQLFSALLPQEFLYFYPLNPKCAARLRELFKADPGKTDPTDADLLGLFLVHNWRQLRPWGPEDPLTRRLQTLVEFDQTWIRRQTALTNQLRARLLLYFPQALAVSADLDSPLMLEVLHRWPSLAAVQRLGPAKLRRVLAQHLRHPAEVEGHVQALTQAVPLTTDPVIVEPLAEEVQALVGLLTAGCARLAALRRQIDQLFDRHPDAPIFRSFDGIGPKLGPRLLAYLGTDRTRFATAGDLLAFGGVAPVTEASGKRSGPRRLVRRRRGCHKALRHTFHLWARASVQGGGWARALFTHGLEEGMKRPALYRVLAYKWGRILFACWKHQTPYDPERYHQALRDHGSWLAAELAPAPAAAR

SEQ ID NO: 40935 - protein, 407 aa, unidentified
MVYVGIDVAKRSHVLSAVGADGETVIGSFKFANADAGFKKLADRLAKAGIEPGSSLFCMEAAGHYWVALFDFLSSRGFDAAVVNPIQTDAFRDVWTIRKVKTDALDAAMMADLARYKRYEPSALGDEATDELRALARYRMSLVERSTMLKNRATAILDRVFPELDGLFAGSFSQTQRALLKHAATPRQVLSTDVRTLARILGEASNGHCGRAKAEQLKAAAKSSVGVGFGSDTLAFELRMLMEELDFVRGRIDEVEAELARLLDATAGRWLLTVPGIGPALAATIAGEIGDANRFAGPGQLMAYAGMDPTRSESGETVASDGSMSKRGSAVLRWALMQAADCARRYDPYFGECYAKKKSEGKHHYVALSCVARKLMGVCLALMKEGRPYEPAPPARHRPGHLKEADS

SEQ ID NO: 40936 - protein, 347 aa, unidentified
MQFTATLPVIGMDIAKHVFQLHVVDAETGEVTRHKLRRDRVTTFFANRQKSLVAMEACGGAHHWARTLQTLGHEVKLLPAKHVRAFVLRDKTDARDAQAIWVAAQQPHIKAVLVKNEQQQACLTLHRMRAQLMKVRIMQTNALRGLLYEFGIVLPEGHRALLKLVQDALAKAQEQQLPEVVVVSIQDQLRRIDSLQCDIDQLDKRLASMVKQNQHMLALQAIPGIGPLTATALVSTATDLSSFESGRQFAAWLGLTPRQTGTGGKTRQLGISKRGDPYVRTMLMHGARAVIARSQRSGWIERLLLRRPYSVVVAALANKLARTVWAVLVKGKAFDQVKWNPVDLAAA

SEQ ID NO: 40937 - protein, 408 aa, unidentified
MKTLHQRCAGLDVHKQEVVACLRLVTQGRVHREVRRFPTTTRGLLELAAWLEAARCTIVAMEATGVYWKPVWHILDGSFELVLANAAHIKGVPGRKSDVNDATWIADLLAHGLIRASFVPPQPIQDLRDLTRTRKQLSREIVRHTQRLQAGLEEANVKLASVITDILGASGRRILKAMITGETDPSHLAELGSRRLGCSRDTLVEALDGRVRDHHRFLLDQHLKTIEQLEETVAAFDARIEAALAPFRDTVERLTQVPGLSTRAAEVVIAEIGLDMSRFPTAGHLLSWAGLVPALDESAGKRRSTRVTKGAPWLKPVLVQCAWAAANKKNSYFEAQFLRLKGRRGPKKAAVAVAASILTTVYHMLRDGTCYQDLGPNYFARRNPARTARKLADRIRSLGYVVEIRSAA

SEQ ID NO: 40938 - protein, 343 aa, unidentified
MQAVKTIGLDIAKSIFQVHGVDADGQVVIRRKLKRRYVLAFFAKVPSCLIGMEACATSHHWSRELQALGHRVRLMPPAYVRPYVKRQKNDAADAEAICEAVTRANMRFVETKTTEQQSCLVLHRTRHLFIRQQTSVINAIRAHLAEFGIVAPVGRKGLEQLLDVLANSEDKRIPQVARACVAALGAQLHALKAQILEFDRQIMLWHRSHETSKRLDEIPGVGPALATALVASIADPKAFRSGRDFSAWIGLVPKQHSSGGKEKLGSISKQGDRYLRSLFTAGALAVIRYAKIYGTRHRPWLAALLARRPTKVAAIALANKLARMVWAMMTRGERYKEPVALAA

SEQ ID NO: 40939 - protein, 373 aa, unidentified
MIVIGTDTHKKTHTCGAVDGSTAVSRGELTAPARKDTFGKLLVWARALDSERVWAIEDCRHVSGAFERFVVARGERIVRVAPRRMAGARRSARERGKSDSIDAFSVARAALEDGIENLPGAHLDGAALDIRLLVDHREDLIAARTSDQQRLRWHLHDMWPEFEIPDGALSTRSWLAKVSRRLARAVQTTRVRIARELVREIAQRTTRICELESELATLVAGYAPRLLAERGCGPLTAAKLIGEIAGADRFASDAKLARTSGTAPIPASSGNTQRHRLDRGGNRQLNCALHRLAVNKGKWDPEAAAYLQRKQAEGKSRREALRCLKRYLARRVWNLLKTPPALEITSAQNLTADKANSRGTIVGNAPYFMPCTR

SEQ ID NO: 40940 - protein, 357 aa, unidentified
MASLTPGATKASLRTIPAGDSAALLNHLRNLERKASERIGAPAIVRLCFEIGYDGFWLARLLRANDVDTYVLDPASFLVSRRGKRVKTDRIDAEAMIGILKAYLAGDRSVCRVVDVPTPEEEDARRIMRERSDLIHERTRIVSRIRGLLALHGIQSVKAIGGGDWSKQLDDMRTGDGRPLPPNLRRQVERCFGRLELLNDQLKCIEQDRADVVLNEASTFPCREKAVRLQQLKGIGANSAAMLVAEVFCRKFESRRHVASFLGLAPAPYSSGDVSRDQGISKAGNRGTRVQMVELAWCWLRYQPGSEMTRWYRERFKGNGSRAAKVGIVALARKLLIALWRFVETGLVPQGAELRAA

SEQ ID NO: 40941 - protein, 348 aa, unidentified
MTIVEPARLVTGGVDTHLDVHVAAALDELGALLGTESFATTPAGYVELFDWFESFGPLGRVGVEGTGSYGAGLARSLLARGVEVVEVDCPNRKARHRAGKSDTIDAISAARGALSGQAKGQPKGGTGPVEAMRVLLIAKRSARSERVRTLNQMRHLVFVAPDDIRARFHGLNVYNLTRQAAAMRPRPGNQVDYVTLMTLRELGRRALGLEDEIDRLDDLLEPIVADHAPGLLNMFGAGIFVAATLAVAAGDRPDRIRNEAAWAHLCGVAPIPASSGKTTGRYRLNRGGNRQANSALHRIVLVRMGHHEPTRDYFERRRAEGRTTLEIMRCLKRYVARETFKQLPGGSD

SEQ ID NO: 40942 - protein, 500 aa, unidentified
MATPTTRRKPASAAGAPRAQAQAHRPPEQRHKTRARPTSEAPGPGTAARVEALPVQHPHAAGIDIGSRSHWVCVGFSTDADAGSTREFPAHTAGLKAIATFLREHRVDTVALESTGIYWIPLYELLQAEGFEVLLVDPSYTHQLRGRPKTDRRDCQWIYRLHSVGLLAAAFRPDEQTCRLRAYLRQRANLVRAASRHVQHMQKALEQMNLKLTEVLSDVTGLTGRAIIRAILRGTRAPEKLAKHRDKGCKASEAEIAQALTGSYRDEHLFELRLAHDAWQFTLRQVEQVDGQIALQLGRMKGDRALPPLKPKPRPKRRANSPRFDVRAALYYVVGLDLTEIEGVSELTALTVIGEIGPGVSRFATVKKFCSWLGLCPNWKKTGGRVKSSRTRRGVNRAAQALRVAAQGLHHSKGALGGFLRRMKGRLGAQAALTATAHKLARIVYLALKHGMTYVRRGQEEYEARMKEKQVKALRRKARQLGLEVVEKAAGGAPAAPARG

SEQ ID NO: 40943 - protein, 314 aa, unidentified
MSSPSCYLGVDVSKDTLVVAGQNRRWQFANTKEGQRKFIVQIKKLSAAGHVVCESTGPYHLPMCLALQEAGIAFTIANAARIYYFGLSEGIIAKNDPIDAALIERFAQSKRPPADPPLCREQLALSESVTHRQQLVEMIKVLRTHRQQVLHAALVTDIDQSILVLEKRLAALDRQLRAKIDAHPLWKAKFERLTQTKGVGFVTALTLLAKMSELGTLNRGQCAALAGLAPYDNDSGKYAGKRTIHGGRQEVRRALYMAALSAATHNPILKTFYQRLRGQKKLFKVAITAVMRKLLLHLNTVLKTLTAPPQTAAS

SEQ ID NO: 40944 - protein, 342 aa, unidentified
MKQYVGLDVSQKETSVCVVNEAGRILFEGKAKSDPGALTALLRERAPHAERIGFETGAMASWLWHELRRVDLPVVCIDARHAHAALSVRMNKSDQNDARGLAELVRVGWYREVKVKSEESQKVRAILVARSRLVAIRRDIENQVRSLIKEYGLLFPRAIGLQFRNQVSELLGHDHQLIGVIAPLLSIHEHICEQQSKFDDEVRRLAKSDETTRRLMTVPGVGVVTALTFRHTIDDPSRFRSASTVGAYLGLTPRRNQSGETDTNGKISRWGDRLLRSYLFEAATVLLYRTKKWSSLKAWGMKLAKRIGVKKAKVAIARKIAVILHCIWVDGTSFDWGHAKPA

SEQ ID NO: 40945 - protein, 354 aa, unidentified
MLYAGIDYHKRYSQVHVVDEGGRTRASARLANDLMTVSRFFAGLGEPCRAVIEAGWNWGVMYDWLDTIENVSGVELAHPYRVRAIAAAQVKTDAIDAHTLAQLLRVNLIPRAYVPGSATRQLREVVRQRVFLVRMRTMVKNRIQALLARHHVPLPAVSDIFGKRGRDYLSKVQLEAAAQELLRQDLELLTALGAEIRATEKWLERATQGDRRVELLLTIPGLGALLAAVVALEIDQIARFESPAKLAAYAGLVPTTYSSGGHTFHGGLIAQSNKWLRWALVEAAWVAVRLDPYFRTHFANRRAHKPAQSAIIATARRLLEVVWHVLKENRPYQSRPPAGSRGGLQTSSAAFATS

SEQ ID NO: 40946 - protein, 378 aa, unidentified
MRIVCGLDVHKDSVYLCILSSTGEIVEKVFGVLTFQLAKMRDLMLKHHVQEVGMESTSVYWIPVWRVLEPHFKLKLVNPYFIKQLPGHKSDVKDAQWIAECMLKELVRGSFVPPERIQQLRQYDRRIFDLDDEINRKLSKLDAALQRCNIRLSNYVSNTDSKSYKEVVARISEGVADPKVLVEEIHGRIINRHGRKTIIAALTGVITQADSDMMRQIREEIDVAERHKQECIDKMQEICEKEYSGQLRNLQTIPGVKLRAATSLIAEIGTDMSHFETANHLASWSGLKPRNDESNKVIKSKRITHGNRYLRRTIVECGWAASRTKGCFFSRFSYHQTQVRKKTKMKVQIAISRKLLICAWHILSKNVPYQDFCEREIS

SEQ ID NO: 40947 - protein, 410 aa, unidentified
MEAIVERVAGVDVGQATVVATALVGAAHERARKETRTFRTVTRDLLALREWLLAKEVTHVALEGTGIYWRPVYEVLEDAFEMILGNAHHIKNVPGRKTDVKDSEWLADLARHGLIAQSFVPPKPFRRLRELLRYRCKLLESRTAERNRLLKLLETANIKLASVASNVFGVSGRLMLQALIEGAATPSAMAALAQGRLRTKVAELEHALEGRLDEHHRFLLQLQLRRLDHGDADLASLDARIDEALLPYRAPCEVLQQIPGVSRVVAAVIVAELGIDMTVFRSAQHAAAWAGVCPGNNESAGKRMRAGARKGNVHLRTALVEAAVAASHTKGSYLRDKFYRLRARRGTKRAAMAIGHKILIAAYHLLATGAPYRDLGPTYLDGLDKRHTTRTLVRRLERLGYDVTIAPKVA

SEQ ID NO: 40948 - protein, 402 aa, unidentified
MNAVGIDVSKSKSVVAIMRPFGEIVSAPFEIKHTASDINSLVELINSVEGESRIVMEHTGRYYEVLAHQLSEANLFVSAINPKLIKDFDNDSLRKVKSDKADAVKIARYALDKWQNLKQYNVMDELRNQLKTMNRQFGFYMKHKTAMKNNLIGILDQTYPGVNTYFDSPARSDGSQKWVDFASTYWHVDCVRKMSLNAFIDHYQNWCKRKKYNFSKSKAEEIYGKAKELVPVLPKDDITKLIIKQAVDQLNSASITVESLRTLMNETASKLPEYPVVMAMKGVGTSLGPQLMAEIGDVSRFTHKGAITAFAGVDPGVNESGSYEQKSVPTSKRGSSDLRKTLFQVMDVLIKTHPQDDPVYQFLDKKRAQKKPYYVYMTAGANKFLRIYYGRVKEYLASLPES

SEQ ID NO: 40949 - protein, 330 aa, unidentified
MKTWNVVLGVDVSKKTVDICWAEQKLFLQVDNKSEGFSKFKKWCKDNQIDLQKTFIVLEYTGGYEYRFIQFCESQSIDYRRVPGLEIKKSMGMTRGKSDKADAFRISQYGEEKIRRLEPDKPLDNNILELKTLLSFRKRLVRESAGYQSTVKERKHMYEVDDQEMITAIANEKMEANARYIRKVEERIMELIKSNESMHFNYLIITSIRGIGPVNGWMTIAYTENFISFPDARHYAVYVGVIPFEHTSGTSIKGRRRTSNLAQKELKQELNQAAKTAMQYDPEIKAYAERKMKSKDYGLVLNNIKFKLILRMFSLVKRGVKYVENYKRAA

SEQ ID NO: 40950 - protein, 374 aa, unidentified
MKGVGVDGPRRHRLCQNEVVADLKQRGPSVEQISRIGMDTSKHFFQLHGVNAAEKVVLRKKLRRKEMVAFFKALAPTVIGIEACGASHHWARILRSFGHEVKLIAPQLVKPYVKRGKNDTADAEALCEAMSRPTMRFVPVKTAEQQAALMMVALRDRLIRNRTQLSNAIRGYAAEFGFTAARGMAHIDPLLDRIQADENVPVLARELFAAQAEEYAQLQAQIAEVDAKLMAWHKADEFSRRLAKIPGVGPIGAALLMMKTPAPEMFRSGRQFAAWIGLTPKDHSTAGKVRLGVITRAGDEALRSVLVVGATAVVQQVRRGGRGSPWIVDLLKRKPPKLAAVALANKMARIAWKLMVTGNSYAAKSAPAALMGAA

SEQ ID NO: 40951 - protein, 344 aa, unidentified
MRIVEVTGGVDTHADNHMAAAVDHNGGLLGIESFPATETGYEDLLAWLVGFGEVSQIGVEGTGSWGVGLSRFLADHDVTVVEVDRPNRQKRRKHGKSDPTDAVAAARAALSGEASVTPKSRDGRVEEMRVLLVARRSARQQRIQSLNQLRHLVFTAPESIRVRFKDRPKAGLVSEPANMRPRKGSDPVTFTTYLVIRNLAKRIKSLDTEMRTIDQTLRSLIEETAPALLEMYGVGVDTAATLLVTAGDNPERLHSERSWAHLCGVTPLPANSGKTTTKFRLNRGGDRQANTALYRVVLTRMSSDEETRRYVTRRREKGLSTPEIMRCLKRYVARQTYKHLPHMI

SEQ ID NO: 40952 - protein, 438 aa, unidentified
MSNKAIFNLDELFISVGIDVGADFSWMSMALPNQQFVGKPYKILHNSIDSLTTAVSKIKEAEELYSLASRIFLESTGIYHYPLFCYLRDKGFNCSVINPIITKNSTNINIRKVHNDRFDSKKAALVGLKPDLKVSLMPSVLALNCRNLCREYYDLMDNRSAYVNKLQGELRMAFPQYLGIFSKVTVNTSLTLLETYTSPSAFLEADKQEIIDIIKSTARFGLTYAQNKYNAIIQAATDANQFGYIIDSNIKRIRLYISFIRKYDEEINSILESLHELVDANEDSDFVKQIHLIETFKGAGFLSAVSIMGEIGDFSAFSKPKQLFAYFGLDPAVKQSGKFEGTKVQMSKRGSAIARRVIHTLTLQSISISRNGEAKNPVLREYYIKKCDSKPKLVAMGAVSHKVCNMIFAILRDNKPFKIIAPQEHIKQYNAAKCDIAA

SEQ ID NO: 40953 - protein, 355 aa, unidentified
MHKITANFAGQTIYVGMDVHKDSWNLGIHLNDMFMKNVHQKPNPTIMADYLKKNYPNAHYKAAYEAGKFGFWIQRQLTRLGIECLVVNPADIPKSQKDTLQKTDPRDARNLALRLQSGVLHGIYIPDEQQEADRVFFRHRKRIWKDLCRCKNRIKGCLAFSGIDIPEQYDNASWSYNFINWLKAIDCKQVSRRTAVNYMIHQMEFLRKELLSISTAIRKMMREERYKKNYYLLRTIPGIGPLTAASILVEIGEVKRFATFYHLNSFVGLLPMEQSSGQKENKLTLTVRRHRQLRSDLVESAWTAKRTDPAMALYFQEQVKRKDSSIVIIKIARKLLNRIRYVLINQQSYEYGLVK

SEQ ID NO: 40954 - protein, 366 aa, unidentified
MREQQNNKRDRATIGVDLGDRWHRFCVLGGSGRVVEEGSVANNRVALSELSSRYPGALVVMEAGCHSPWVSRYLEQAGCEVIVSNPRKTRAIYQHERKSDRRDALMLARIARMEPALLYPVRHGSEEAQQDLLRIKLRDSLVRARVGLINSLRFMLKSLGYTIANPSTERFHKVVQSALPESVAQMIAPSVQAIEELSLRIKLLDREIRILARTKYPETIWLEQIPGVGPITALYFVLKIGDPVRFERVRDVGAFIGLCPRRDQSGENDPQLRISKRGDAYLRRLLVSSAQYILGPFAPPNALRQYGLALAAGATARAKKRAVVAVARKLAVLLLTLWKNKSPYQAFPQQREKMRTHDLERLRCIA

SEQ ID NO: 40955 - protein, 374 aa, unidentified
MSSKGITWVGLDAHKHSIQVAMLLPGHEQPLSWQEANEESAVRRLARRLNREAPGEVRACYEAGPLGYGLQRDLEAQGVICEVVAPSLIPIKPGERIKTDWRDARKLAELLRAGLLTEVQAPKEADEALRDLCRGRDTVRQDLMRARHRMSKFLLRRGYRYHDTQRHWGVRHMKWLRPLRFDHAAAQAIFDHYLLTVDHLDERLRQMDGQLEAFGGEDPYRQPVAWLRCFRGIDTVTAVSLVAELHDFRRFRSARALMAYLGLVPSEHSSGEQRRQGGITRAGNLHVRRLLVEAAWHHRHRPVLSQPLRRRREGQPAAIIALADRAQERLHARFVRMTRRGIHYNKTVVAMARELVGFLWAALYPRDVEAPPSV

SEQ ID NO: 40956 - protein, 350 aa, unidentified
MSIIGCDLHSRYQIIAGVGGGGGEVVTRRLEHENGEAKAFYAGLPRPSLIGIEATGYTQWFERLLAELGHELWVGNPAEIRARAVRRQKTDRGDAEHLLDLLLTQRFPRIWIPSVEERDLRQLLKHRDKLVRMQTSVKNQLHFLAMSQGLCRKGKLWSVRGRAELEGLELGPWASWRRQALREMLDRLKPQIEELHQAVAAEAERRPEVVQLMKQKGVGPVVGLAFVLTVGPVTRFPNSRKLVSYLGLNPSEDSTGGRQRLGGISKQGNEMMRWLLVEAGHMAAQFDPELRRKFQRLKFRRGPQVARVALARQLAVRLYWVLRQASVATPPVRMPGSPESRKVEATRSQL

SEQ ID NO: 40957 - protein, 342 aa, unidentified
MDSMVAIGVDTHRDSHVAVALDGLGGDLGSLVVGADSSGYARLWQWASELGSPLFAVEGTGSYGAGLTAFLVAAGGEVFECERPRRRDCRKGKSDLIDATLAAKRLLTGEPLGRPRGGGGVRDDLRLLLMERQGAVRARTAALNGLQAAIVTGPDTLRTRFGGLDGKQAAKQAARLRSRTDETAVTVSVLRRIALRVQHLDSEIDELDRQLETITSDLVPALLQECGVGPVCAAQLVVSSGDPGRMRSEASFAALAGTSPVQASSGQTQRHRLNRGGDRQLNRALHIIALHRSRWHPDTAAYHQRLLATGKTPREARRCIKRQLARHFYNQLKTTPPLNLTQ

SEQ ID NO: 40958 - protein, 383 aa, unidentified
MRHGGILIEANDSEGEAMKKHTTINQSLSADAAACTTVAVDLAKRVFQLAGEDALGQVLFEQRIKSREAFQAFLQQLPASVTVLVETGPGAQAWARLLQTQGNPVRILPAQLIANHRCGPKNDRNDALAILRAGRDCKISAVPVKSAAALAMQALHRARQGYVRRRTAVGNQMRGLLLEHGVAMAQGDVAISQLVPRVLEDATQPLPDLLRELIAELLGEWSQLGERVNVLTGRLETAAKADETAKRLMTVRGVGPIIATALLAKQTEPERFANARLFAAYFGLVPSQHSSAEKVRLGKMSKHGDAYLRSLTIQGAHAVLKQLRPDSQQPDDQRLLRWLTRLGRKEAAVRLANRNLRILWVLLQNDQTYRRQPGTAQEAAMSH

SEQ ID NO: 40959 - protein, 353 aa, unidentified
MEQFFGCDAHKKFSVFVAVNEKGHAGEALRVPHERDVYREFLARLPAHSAIAVEASGHYGWVVDEIERAGHRPKLCNPYEAKRRMAMTKKTDKLDAKGLAILLRNGTLPEVWIPPAELRDLRGLMRARLAFRSHTTVLKNRIHAALKRYGTLDAEPVSDLFAKKQRLRLSLAIGRLAEETRRASLHEWELLDEVERHIGELEVRIRERIGCIGWVRLLKSLPGVGEILGATIHLEIGDVKRFPTAAHLASYAGLVPTVHASGGKSFHGPTSQQANHYLRWAFVEAADCIVMHRQRYTGHHALRLYDRVKANKCHGKAAVAVARHLAEASWWILRKREKYRQPHAAVESSSHNG

SEQ ID NO: 40960 - protein, 282 aa, unidentified
MDQIIRIGMDTSKHVFQLHGVNAAEEPVLRKKLRRQDLITFFGKLPPTVVALEACGGSHHWARLLQSLGHQVTLIAPQLAKPYVKRGKNDAADAEALCEAMSRPTMRFVPVKTADQQAALMLVGVRDRLIRQRTQLANVIRGYAAEFGLIAPTGLCRIEPLLERIKTNETLPALARELFEVHATEYAQLQVRLEEVEDRLMAWHRAHEVSRRLARIPGVGPIGAAMLVMKTPAPEAFRSARHFAAWLGLTPKDHSTAGKVRHGVITRAGDEILRSVHRCGLD

SEQ ID NO: 40961 - protein, 324 aa, unidentified
MNTIGIDVSKEKLDCAWLREQDKLKTKVVINKPSGWQALLDWALKNTGLAVEQLFFVMEATGIYHEQLAMFLFNQGAKVSVVNPAQIKFYAQSLGVRSKNDKKDSVVLARYGLKENPAPWQPEAPEIHELKALLARFDALEKDLQREKNRHEKAEIALAPAAVTRSITQMIDALDIERQELDKLIEEHIKKHKQLKDNKDLLESIPAVGKVIATRMLMVIGSRQFDEASQCAAYLGLVPVQHQSGSSVQGRAKLSKAGNPIIRAKLYRAAVVAIRYNPDIKAQYERLTNKGKSKMSALGAAMRKLVHICFGVLKHQQPYQPQAA

SEQ ID NO: 40962 - protein, 485 aa, unidentified
MSYRNVGIDLSVTAKHEAQVKDEQGNKIVSQFSFYLSKDRLDALSQEALKGACQGTKLRFICEPTEMSWFPLAIYAKSNNHEIVRVKSHKTHDLRKYFARHKKNDKLDANVLTVMPMIDSKAIEEIYLPDAQIFALERRNRQKERITGQIAAIKNRLSSLYHWVMPGLLDCFESHFDSRAREFYRHFSNPFTAKNAGVCGIRKVLQPAGRQKMKNDLPEKLYSVACSACELYTRASDHVDFTEIQDEVHIELQLLEAQEKALAHVKERVESLYERVHPSKNIESLKGISENLGPSLIGIIGAPNRFSSQSKLRCFSGMIPKQDDSGETNKKGLSMTQEGPSRLRRDLFLAGDVARRWDPQLAKIYYEEMVNKGHCHTQAVCAVGTHLLNRALCVLKENRPYELRDPKGTPISPREAKQMIKQQFTVPEEIRQRTRSKRSRKNRKNKREERIRNLFKRQHNAPQNSYNIPPKDMLQNFEKFFKSTS

SEQ ID NO: 40963 - protein, 344 aa, unidentified
MEHDAAIDVSLEWSSVCVVDAAGQIVREAKVRSEREALAAFFTESGLAFARIGLEAGPLSQWLHAGLVEAGLPAILIETRHVKAALKAMTVKTDRNDARGMAQLMRMGWFRPVHAKAPMVQEIRALLTARKLLVAKLRDVESSIRGILRGFGLKVGAVSKGKFEARIRELVTGQVMLERVAEPLLRARAALRTEYTTLHRDLLGTVREDAVCGRLMTVPGVGAVVAMTFRSAIDQPERFAKSKAVGAHFGLTPKKYQSGEIDRTGRISKVGDAMVRTALFEAANVMLTRAVRFSTLKAWALRVAGRHGMKKAKVALARKLAVVMHRMWVDGTSFCWGEASVSAA

SEQ ID NO: 40964 - protein, 412 aa, unidentified
MDVVHERCCGLDLHKRTVVACLFVAGPRGKPQKEIRTFGTMTAELLDLADWLAEAGCTHVAMESTGVFWKPIYNLLEGQFTLLLVNAQHIKAVPGRKTDVKDCEWIAELLRHGLLRPSFVPERPQRELRELTRYRTTLGRERSAEVNRLQKTLEGANIKLAAVASNIVGRSARAMLDALVAGAAPPAGVAQLARGRLREKLPQLEQALEGRFTEHQRFLIAQQLAHLDYLDEAITRVSTEIGERLRPLADEIARLETIPGIARRGAEILLAEIGSDMRRFPSAAHLAAWAGMAPGNHESAGKRLSSTTRKGSPALRALLVEAGHAAGRTKSTYLAAQYHRLTARRGKKRAAMAVGHTILVIVYHLLKRGTTYEELGGGYFDERDRQAVERRLVRRLEALGNKVVLEPRDPAA

SEQ ID NO: 40965 - protein, 318 aa, unidentified
MAQKTRFVGLDVAKSKVDACIRSEGLRLSAPSTPEGRAGLVAWVRANRVGRAVMEASGGYERGWAEALRAAGVEVRIVDPKRVRHFAKAAGRLAKNDPIDADTIAWFAEAFPDREAQPHDPARDEIDRLVAARTALKDAEDRIKQQGEHRPPAVVAKALAAIAKTIRAELRKVEGAIAAKIKANPGFARRAEIIASVPGLAAQTAAGVIAWLPELGHVTNEAAAALIGAAPYDDDSGGRKGQRHIKGGRRKLRNLLYMPVMGAATRHNPMLKAHYQRLRARGKEAKVALIACMRKLIVILNTMLARDQTWNPPVRAAR

SEQ ID NO: 40966 - protein, 322 aa, unidentified
MPRTIIGVDVCQDYLDVHLRPAALKKRFPNTSEGIADFVAWVQPHAAERIVFESTGPYQKAAVGALLAQGLPAVVVNARQVRDFAKAMNLLAKTDRIDAGVIAHFGEVATTTVRPLESQEIRDFRDLNDRRSQLVRMLAVEKNQRHSATVAQASPKVLKSIDKHIDYLEKQIRDLEQRMDQIVESSETFRAKDEILQTITGIGPQVSRTLLAYLPELGQYSRQRIAALVGLAPFNDDSGTYAGQRHIRGGRSKVRVGLYQAAVAAIRHCPRMKAYYAALKAKGKASRVALIAIARKILVLANAMIRDMLPYNHPQTPFAKNA

SEQ ID NO: 40967 - protein, 354 aa, unidentified
MIYVGVDVAKHKHQVAIIDDKGEIHENNLVVVNNKSGFKKLYEILCRIESHTEQECQIAMEDTGHYNLPILQFLKQMNYRVYRYNPILIKEFSKVYTLRKTKTDKTDAMVIAKKWMSDFEKREQLSDRTSAELKELTRYRQRLGKHQALLKTQYTRILEKSFPELAAYGQIRYSKYMMELLKKYPSPKRIAAAYEKTLSRFLGVSSSQIRPDTIIQLANESIGYHSEITEFESTQTIEQMYLYEKQIKEVDKRIQEMMDTLDSPIVTIPGISYRLGSVIIAEIGNIHNFNNPGQLLAFAGMEPSIYQSGKYTGAGKMVKRGSPYLRWAMYHASRLVAIYSPTFKAKKALGRQAL

SEQ ID NO: 40968 - protein, 368 aa, unidentified
MIYSLGIDMSKDDFSACLQSYDLRSQSHQVISRKTFKNKPSGFKACMSWLARHTRKDPAPIRLTMEATGVYYESFALFIGEHHRQIHLSVVLPSQSKRYIESRGLRSKTDKIDAYGLALMGAERKLDAWKGIDPFWRKLRVHTRTRAELLDQRTQLRNQLHALDHSGVQACQAEQALRACIQTISSQIDELTKLIGKQLRSQKDLRTQIECLRSIPGIGTLTIACILAETNGFAEFHKISQLISFSGYDVKIKQSGKWTGQPKLSKQGSKYIRRAMFMPASAVVRSKQGPIYEFYQRLLGKHNIKMKAHVAVQKKLLSYMYFLWNRQETYDPEKIRRDKAIHQALQTQKKVASTNAEATVDTSLVVSQ

SEQ ID NO: 40969 - protein, 429 aa, unidentified
MSEEKSLELRVSVDVGYRRHSVAMGLSSGEVLEEFEIDHRIEGFQEFFSRIEKQRKKKDCEVAVAMEGYNGYARPLDSMVRQRGYRLYNINNLKLARFKEIFPGAAKSDRIDARKGLELFQLGDHLPLAKEVLQEVSGTPPANEVLKRLTRRRRRLVNERVRVVNNLQADLQAVCPGLLEITREASNQWFLNFLLSADTLPQLARLRRSTLLKIPSVGVKSAAIIEGWQKRSHFSQEVDWVGEMIQDDARRCLELDEKIKRLEAKIAEIAKDSKIAKTLRSIPGFGAVCTSELAGEIGTIERFGSEGSLSLYLGMSTLDNSSGKYQGTKAPKHVNTRAKAAMMIGVDRHRKYVPQSQRYYEKKRSEGKKHNQAIRALGRHLSRIIYKMLKEERDYEIRPEKGDTKTKVSLRSLIKTQIRRPKISVKGKK

SEQ ID NO: 40970 - protein, 343 aa, unidentified
MKLSRIGIDLAKNVYQLHGVDRSGKTVWKRRLKRHQWLKVLLDKAEPGCVMGMEACAGAHHWARELQSRGYTVRLIPPQFVKPYVKSNKNDAKDAEAICEAMSRPNLRFVTVKTVAQQDIQATHRIRAELITQRTAKANQIRGLVAEYGLVAPKHLSSLRAAIPCWLEDAENGLTADFRSLLHGVWNDLLALDDRVGEMDKLIQRLAENHADCVRLQQLRGVGPMIATAMVATVGDARQYHKSRQMAAAIGITPKQHSSGGKDRLLGITKRGDVYLRTLMIHGARAVVARAKHQDDPLSRWVTEIATRRHPNVAAVALANKTARMAWAILRNKTDYDPDFAMS

SEQ ID NO: 40971 - protein, 359 aa, unidentified
MSSIPVFVGLDYHQDSVQVCVVDESGQTLSNRSVANDVMAIERAVRRHGTPRRLAIEACCGAADLAERLAVERGLPILLAHPGYVNRLKRSPDKTDLGDAQLLADLTRVNYLPAVWLAPRNIRELRRLMRHRCQLVRRRKDVKLRIRSLLRENRVERPTANAWTKAWLAWMKHEAPLSDSDRWIMEDHVAELASLTCRIRAVEQRIRQAIQNDPIVARLMALPGVGLVTAATLRAEVGRFDRFVTGKQLARFCGVTPRNASSGARQADAGLIRAGNPELRTVLVELAHRLIRGLDPHWSKLAHGMLNRGKPRNVVIAAVANRWVRWLHHELRREPTASAQARQKGAAPTVSTIASTSRG

SEQ ID NO: 40972 - protein, 352 aa, unidentified
MAVTIVETRADIRAITGGVDTHADVHVAAALDPIGGLLGVQEFPATPAGYARLLGWLGGFGTVCLVGIEGTGSYGAGLSRHVTAAGIGVVEVDRSDRQDRRRQGKSGPLDAVSAARAAQSGRARGAPKGRDGAVEAIRALMIAGRGAIRERTRTINQARALILTGPDDLRTRFARHATAALVAGIASLRPRPGDVPGYATRIALRELGRRAVFLDGQLERLDELIAPLVAVRAPSLLALYGIGPHTAALLLIAAGDHPGRLRSEAAWAHLCAAAPIPASSGKVTRHRLNPGGDRQANHALWRIVFTPMGSDPATRAYVERRTGEGKSKAEIIRCLKRYVAREVYPHLRPADG

SEQ ID NO: 40973 - protein, 374 aa, unidentified
MVNKVLLYYHNNQKTNAMRTNRQSFLDFTGQTIFIGIDAHYKSWAVTLQSEEFELKTYSQPAITDVLFNYLQTNYPGAKYKAVYEAGFCGFTIQRALTLKGIECDVIHPADVPTSDKEKRQKTDKIDSRKLARMCKNNDMKGIYIPSIEQQEERNLLRARQKIVRDQTRVKNRIKSYLRFQGVELEGFEGRHWTKKYLELLRKTSFSTTAGTFAFKAYLDELDYLQQQASKLDEQIKLLSQSDRYKVNFSLLTSVPSLGLISAMTFLTEIGDINRFPRFDDLCSFIGLIPNCYSSGEVEKVGHITRRGNQHLKMILIECAWVAIRKDPALLQCYKELLPRMNGNKAIIRVARRLLRRIQHVLINKELYQKGYKE

SEQ ID NO: 40974 - protein, 353 aa, unidentified
MKTYYVGMDVHRASIVIVVLNGAGKIVMQSVIETGAERVRGYLKQLRGQVYVTFEEGTQANWLYEVVRPLVTEVVVCDPRHNKLMQSGNKSDRVDAQKLAELLRLGSLKAVYHGENGVGALKELVRSYDCLVSDTTRVMNRLKAIYRGRAIGCAGHDIYRQDRRQQWLDKLTERGAKERASFLYRQLAALKPLRHEAKRAMVKEARQQRAYPWLMSVPQFGSVSVAQLLAIVSTPHRFRSKRQFWTYIGLAVVTRTTADHEVVNGVLRRSRRPVSTRGLNRNHNHLLKRVFKNAANGACHSGPFKAAYELRVRQGMAPSLARLTLARQLAAITLAVWKHGEQFNPERMKQQAA

SEQ ID NO: 40975 - protein, 320 aa, unidentified
MTATSDRSPFVGIDVSKATLDVAIGDAEPFQVPNSREGIDRLLARLRLHAVALIVLEATGGLEALAAAALAAAGLPVAVINPRPARDFAKATGRLAKTDAIDATVLVAFGRGVRPEPRPLPDEATRELDALLDRRRQLVGMRTMEQNRLSGGVPAKVRRDLEAHLGWLDRHIAAVDKELEDRIRSSPIWREKDDLLRSIKGIGPVVSRALLAAVPELGRLDRRRIAALVGLAPMADDSGQHRGARRIQGGRLYVRSVLYMAALAARRHNPALRAFGDRLAAAGKRPKVVVAAVARKLLVIANAILRSGRPWDPEFAAADA

SEQ ID NO: 40976 - protein, 359 aa, unidentified
MIVIGIDPHMKTHTAVALDAATGRTIAERTVATDEDGHDALLAWARSLPGDHYFAVEDCRHVSGRLERHLLPRGERVVRVPPKMMAGARHSARSYGKSDPIDAACVARAALREPGLPEASLAGPEQDVRLLVDHRDDLVDERKRIQKRLRWHCHDLEIGLALPPRVLDRYVWLDRLESVLEALPESTRRRIALDQLGRVRELTKEIRSLERELRGRMHGLSPDLLAIPGCPTLCAAHLVGQTAGASRFSGEAAFAMHVGVAPLPVSSCQSNRHRLNRCGNRHLNSTIHLIAVTQARMHPPAMAYMERKQADGMSYREALRCLKRQLARVVFKTMLRTERATMGEVLRAEFTADSVAIAV

SEQ ID NO: 40977 - protein, 366 aa, unidentified
MKKIITVAKNRNEIFKQQQLTIGVDVGDRISHYCILDETGNVILEQRVTTTPKGIQQVFGKISRCRIALESGTHSPWLSRLLTQLGHEVIVAHARNVQLITESTRKDDRLDARTLARLARIDPELLGPVRHRSAKAQIHLTVIRARATLVSARTALVNAARGLTKSYGERLAKCGTEQMNREIAKGLSPELRDVLEPLFREIESLNERIAEYDRRIEQIAKEVYPEVALLQQVKGVGPLISLTYVLTLDDPYRFQRSRDAGCFLGLRPGRRNSGRSEPQMHISKEGDVYLRTLLVQGAHYILGPFGQDSDLRRWGLKLAERGGKNAKKRAVVAVARKLAVLLHKLWVSGEVYEPLRNNHQVVTAVA

SEQ ID NO: 40978 - protein, 400 aa, unidentified
MKTVLSVDVAKNKSMIMLMNNDGEILIDTKEIKHNLGEFEKVKEEIEEINPENLTVFMESTGTYHLPVERYFKENGFNTLVINSLTTKNNFDTIRKTKTDKKDCYRLAKLFFVNEVEYHEISKKDLYANLKAMTRQYFYLTQVNIRCKNRYKRLINICFPEFEGFFARNRIYEDTALNFIKAFPHAYIVREKRIDALYNNLRKVDARHDYYYKRLARQLKDTAMDSFPGVDKDHADVKNLSDMASILQENNKLIDEIRKNMIELAKQSPYFEIVNSFYGIGEVLAAELLGELGDITRFDNHKQLIAFCGLDPAIVQSGKSINVHGAISKRGDKYARWILFNISQMVVKLGHQYPSHPVYNYYLIKKAEGKHYYESLTACSTKTLRMLYFMCKNNKRFLEE

SEQ ID NO: 40979 - protein, 372 aa, unidentified
MEVVYPCCCGLDVHKKSITACVLWAEAKGKSRKEKRRFGTFTHDLLQLADWLGESGVTHVAMESTGVYWKPVWNILAEQFKVLLVNAQHIKAVPGRKTDQKDSEWIADLLQHGLLRGSFVPPQPTRELRDLTRYRVSLAQEINRIANRIQKVLEDANIKLASVATDALGASGRAILEAMLAGEQDAARLAELSKGLLRNKIPELKLALEGRMTEHHRFLLRQLFDHLRFTESKLSQIEQEIDRRMRPFQDEVIRLCTIPGVDQVTAWGILSEIGLDMNQFPSAEHLSSWASLCPGNFESAGKRLSGKMRKGNVSLRRCLSQAAWAISMTKNNYLSALYRRIAARRGAKRAIMAVAHALLVIVLVPITLTEST

SEQ ID NO: 40980 - protein, 352 aa, unidentified
MTYYAGLDVSLKEVSICVVDDDGQVVAQGTAPADPEGVAGWLKNWSLSPKRIVHESGQLSIWLQRGMVQLGLPAICIDARKAHKSLSARLNKSDRADAEGLAQLARMNWFTPVHIRSEESDLLRALVGGRERLIRLRKDLEGHIRGVMKAFGIRMTGIGQAQQRQGFRDQLAAAGETDPVLRVIADGFIAAHTTLCKSTADLDRALKEKSKSNPITRRLMTIPGVGPIVSLSFVALVDDPDRFSKTSDVGAFLGLTPRRHQSGEMDWSGRVSKCGGATMRGLLFEAGSCVIRQVKRFSTLKFWAVRLAGRRGFRKAAVATARKIAVLMLTLGSQKLTTNGHRRPLPDLNSRR

SEQ ID NO: 40981 - protein, 468 aa, unidentified
MGHNRSRSRQTRGKKTKHPSLLKRINRNAAGIDCGSETHFVAVPFERDHEPVRSFKTFTGDLHRLADWLDACKIKTVAMESTGVYWIPIFEILEGRGFEVVLVNARHIKNVPGRKTDVLDCRWIQELHSVGLLRGSFRPVAEIATLRAYLRHREKLVQAAATHIHRMQKALVEMNLQLHNVISDITGMTGMRILRDIVAGVTDPAALAAHRDYRCRASEEKIAASLTGNYRAEHLFALRQNLELFDTIQRQIQDCDGEIELLLQRLAPKQRKSAPALPPPRYKFRHCDNEPRFDVRDPLFRLSGVDLTQIDGIGPFTALQLIAEIGTDMTRWPTYKHFTSWLTLAPKNKISGARLISSRTQPSANKAAGLLRMSAMVLGRTSTALGAYYRRIAYRIGKPKAITATARKLAILVYRVLKGEIDYADPGASAYDEQHRERTLRNVRSRAKRLGFGLVDLETGELVQGAVT

SEQ ID NO: 40982 - protein, 426 aa, unidentified
MNANNDETPNDYAAFIGIDWADQQHVFSLQVAGQTQKETGSLAQKPEVIGPWVAQLRERFGGRSVAIAVEQSRGALIHALLSYDFLVIYPLHPTTVAKFREAFKSSGAKSDPLDTQQILEILTKHLDRLKPLNPDTEQTRLLGRLVEDRRKAVDLRTGHIQALLASLKEYFPQASELANGNLTSRLAGDLLKKWPTLPAFQQAKPSTIKRFYYGHNIRSPKVLEKVLLLAQRAQPLTTDPAIVESGSRLSQVHAQLIQTLNPLIEDYDRRIEKVFQAHPEAHLFRQLPGAGPALAPRLLSFFGTDRSRYETAQNVHSFSGIAPVTKSSGKTRVVYFRRACPKFDRQTFHEFARLSLVKCQWARNYVDYYQAKGKQYHTIIRALAFKWIRILFRCWQNRTPYSDDTYLKALKKRGSIFATLHLEQKS

SEQ ID NO: 40983 - protein, 415 aa, unidentified
MHYFVGIDIAKSFHVACVVDSDDKVVKKSLKFNNDEQGFKELLLLLNSIDDINKFTIGMEATNLFFENLYLYLKEKGFKVVLLNPYQTNRFREMDSMKKVKNDNIDALMIAALIKSGRYSKAYVSEDMYQSIKALYRHKQSLLDEIKKHKRQISTLLSVVFPEMEQVIKDPFNVTGLALLQKYPTAKHYEYASVERILKTFRGIKGNNFNEEKAKRLLELSKHSVYQGNGKDERAYVIQSHIRVIKLLQKELEELEGEMLRLFAQAPKLDKDEEQEVIDIIDNLRTIPGVNDKTIFALMSECGDLSRFKNASHFIGYLGLYPTLEQSGNKLVNGPLAKRGAKLAKKALYQAAIAAIRHNDELNKLYRDKTSQGRANKEAVVIVARKLAQIILAIYKNNVAYNPQRVFQAQKSKAS

SEQ ID NO: 40984 - protein, 343 aa, unidentified
MQTVTTIGFDIAKSVFQVHGVDAAGQVVVRRQLKRRQVRALFQKLPPCLIGIEACASSHYWSRELQALGHSVRLMPPTYVRPYVKRQKNDMADAEAICEAVTRANMRFVPTKTPEQQSGLMLHRTRHLFMRQQTSVINAIRAHLAEFGIVAPVGRRGVEELLRVVADPSDKRVPEVVRACLAALGSQLLRLKQQILDFDRMIMAWHRSNQTSKRLNCIPGVGPLLATALVASVADPKTFRSGRNFSAWIGLVPKQHSSGGREKLGSISKQGDRYLRSLFVTGALAVIRYAKIHGAKHRPWLTALLARRPTKVAAIALANKLARMAWAMMATGARYNYPASLRV

SEQ ID NO: 40985 - protein, 320 aa, unidentified
MPLPEDTMMTTRWIGLDIAKNTVVMAVAGEGTTTTFATSEEGLAALVAALRAQAPTGIVLEATGGYERPCVAACVTASLPVVVVNPRQVRDFARAVGRLAKTDAIDAHVLAMFAERIRPAMRPLPDDARQELEAIVTRRQQLVTMCTAERQRLAQARTPAVRRSLEAHITWLLHQIEGSDGQLDDCIRQSPVWREQDDLLQSVPGVGPTTARTLLATLPELGTLAHRRLAALAGVAPLNQDSGHSRGRRAPWGGRAEVRRVLYMATLTAVRFNPVLKAFYDRLVATGKRRKVALIAAMHKLLIVLNAILRDRKPWRAITA

SEQ ID NO: 40986 - protein, 384 aa, unidentified
MKVNKVETLHKRCAGLDVHSETIVACVLLGDSEAELERVIETFPTLTKDLFRLLKWLEEKEVTHIAMESTGVYWKPVYNILEDFFDITLANAQRIKNVPGRKTDVSDAEWIAKLLRHGLIEKSFVPPEDFRNLRDLTRLRKKWIGHMTSEKNRIQKVLETSNIKLSTVISDVFGVSGRKLLEQLISEGFIDQEEVEKKIHGRMAHKKQLITDSLFGTLNDHQLFLIQQSWMHITYLETLISDIEKRIDEILLDYQEEVQLLITMPGIKKDTAAVILAEIGVDMGQFPTSKHLASWAGLSPGNHESAGKRKSTRTVRGNPHIKSALCEAAWAVSRSRNKRLGIKYWSLAARRGKKKALVAIGHRMLTIVYHMLQNKKPYHELTSN

SEQ ID NO: 40987 - protein, 354 aa, unidentified
MIIIGCDFHTRYQQIAMAREETSELLLERRLDHESGEAAAFYRSLQSSQEPVRVGIEATGPIHWFERLLAELGHDLRIGDSAKIRASEVRKQKTDERDARLILDLMLAKRFPEIWVPTPAERDLRQLLWHRHKLVCLRTMLGNQLHFLAMSQGLCRKKKLFTKKGRAELAGLALGPWTRRRREELLKLLDQVDAPIAELDRAVLEEAQRRADAVLLMTHPGIGPVTSLAFVLAIGPVKRFPRSRKLVSYLGLNPSEDSSGQRRRTGAISKQGNTMVRWLLIEAVYPAVRKDLALRQDYQRLKFRRGHAVAKVAIARKLAVRMYWMLRSGAAYARLVRRQGSPGATLVEATPSLG

SEQ ID NO: 40988 - protein, 349 aa, unidentified
MAQPPRERTIPAGDVARLQQEIARAKQRFGLLADAHIMSCYEAGRDGFWLHRYLVAQGITNHVIDSASIEVNRRQRRAKTDRLDVRKLLTMLLRHSAGEKKVWSVVRVPSVDEEDRRQLHRELTTAKQDRTRVINRIKGLLAGHGVQLTLQGDVDAQLDQVQQWDGASLPSALRTRLKRAWQQVGFLTAHIQTLEAERRALLRRREDPVIAQVRQLFTLRGIGINSAWLYVMEFFAWRDFQTPKQVGALAGLTPTPYQSGQARRELGIAKAGNRHIRAMAIEIAWAWRRFQPDSALSQWYERRFGAGSARLRKLGIVALARKLLIALWRFVKTGVLPEGAVLKPAAPSR

SEQ ID NO: 40989 - protein, 419 aa, unidentified
MSNIKGNTKLFAGIDTSQKTNQCCVVDDRGKTILEMEVANSLSGANDLEVALEKQAQKLLTEELAVGTEATSLYDFHILEFLADSEVLAKYHLKLYRFNPRIIKAFKPSLMLRDKTDPDDAYAIAEYLRFRQESADEYRAKLDHLPLQRLTRFRWHLVSQLVREKSFFLNQLFLKFSAFGKGKPFSDSFGATASAVIQEFMNPDEIANTSDEELVNFIIQHGRNRFPNPDEIVQKLKYVARESYRLRPALAESVHRILCLSLANIRALKASLEELNQTITKQLNAFSITLTSIKGIGDVYAAGIFAEIGDINCFPSDAQIARLAGLAWKRHQSGNFQAETTRLDRQSNAYLRYYLVEAADSLRRHNPEYRAYYQKKYAEVPKHQHKRALVLTARKLVRLVYALLSTSKLYQPEMLSMTD

SEQ ID NO: 40990 - protein, 401 aa, unidentified
MNSVGIDVSKGKSTVAIMRPFGEIVSTPFEVNHSADELKQLAIKIKKLPGESRVIMEYTGKYFQPIANYLYKEGIFVSVVNAILIHDYSKSSIRKVKTDNKDSIKIANYGLDRWLDLIKYIPEEEIRQILKIYNRQYSQYSKLKVVLSNSLLTLIDQTFPNVNTLFGNTPRQDGHQKWIDFSLKFWHCDCVTSQSQSKFINQYEKWCHKAGYHYQSDKAINIYKSAHGAICSLPKNNTTKFLIQESINDLNSILDSLGRLRKEMNRLASLLPEYPIVMNMYGVGITLGPQLIAEIGDVRRFYSRKALIAFAGIDSCPYQSGTIDIKGRSISKRGSASLRKTLFQVMDCIIRQKPSNEQVYLFLDKKRSEGKHYYVYMIAGANKFLRIYYARVKEYLNSIEK

SEQ ID NO: 40991 - protein, 419 aa, unidentified
MAFKILRKNCCGLDVHKTWIFACIGITDANGRTEYKQARFSSFSNGLRELAGWLTKHSCADVCMESTGKYWIPVFNILEKTCWVTLAHPKYTKPQKGNKTDRKDAKWICDLYMCDMVKPSFIPPADIRQLRDLMRYRTKLTNMLTSEKNRALNCLTVSNLKLDDVFSNVFGKSSRSIVQHILEHPGEQFDVAPFLDRRCKHSVEDVQAAVDGAMSREQAAKLRECLLHIDQLNGHRETIETEILRLAQPYSHQLELLRTVPGFSAAPLTAVALISEIGVDMSVFPSAKHLASWAGCCPRNDQSSKTVKSTRISRAGCYLKPLLVQIANAVIKSDKYPECRERYRRIKARRGHKKAIIAVCRMLLTAIWNVLSKLEPYSAKGYLEDKLTEHSVVISKSQGLELLRKRGYIFKDEVSADSG

SEQ ID NO: 40992 - protein, 427 aa, unidentified
MELEEKELEQSIRAWIGIDWADEKHDVSLYDVASGEQEAVVIRQTPEALQEWLGQLRSRYEGGLVAVVLEQGRGGLLNALMGCELLVLYIINPKSLSSFREAFYGSGATSDPVDAELMRDMVRQNPARFRAWRPDDVLTRSLRLLTEGRRNLVNQSTALTNQLTALLKGYYPQALRWIGALDTAWACDFLEQWPTLQGLQASSRRQILRFYEKHPRASLDLNEQLQEIQHARALTQDEAILESSALMLQALVSQLRPLLSSIAEFDRKIATIFRKHPDRPIFESFPGAGAALAPRLTAAFGTDRDRFQAATEMQQMAGIAPVTEKSGKNKNFVHWRYACPKFVRQTFQEFADHSRRWCQWAKAHYELLRRRGKSHNAAVRALAYKWIRILFRCWKDRQPYQDEVYTKSLLKHGSPLLQLLAQPVENS

SEQ ID NO: 40993 - protein, 341 aa, unidentified
MKKFIRVGVDLAKNYFQIHALASEGAPAVTRKLKRSKMHEFFSQIEPCLLGMEACGSAHYWARELKGMGHEVLLMPPAYTKPYVKRGKNDAVDADAICEAMSRPGMRFVPIKSAEQQATLMLHKTRELLIKQRTMSVNALRGHLSEFGIVAAKGIGRVDELLDLAESDATLPAAAKASVNVLAQALEGLDKAIDDLEVEITRANAQNEMSRLLDKVPGIGKLIASVIAASVPDPSVFKSGRDFAAWLGLTPRQNSSGGKQTLGGITKQGNRYIRKLLVLGATSLLNVVGKRKGALRDWIVGLLAKKPARLVTVALANKLARILWAMMKTGECFRTEMFAKA

SEQ ID NO: 40994 - protein, 414 aa, unidentified
MEVIHGRCAGMDVSKRDAKVCVRIAGRGRRKTVETVRTWASTTNAILALREHLINEQVSLVVMEATGDYWKPFYYLLEDTGFELMLVNARQVKNLPGRKSDVSDAAWLAQLGAHGLVRGSLVPPAPIRELRDLTRARTIMTRERGRDIQRLEKLLEDAGIKLSSVASDITGVSGRLILQALIDGQRDPAVLADLAKRRLRHKIPELTEALTGRFVDHHAFLARMYLEAIDQRSRAITDLTTRIEVVIEPFRSFCNLIGTIPGIGVRCAEVIVAETGADLSIFPTAAHLASWAGTCPGSNESAGRIKSTATRPGNPYLKAALGAAALSIANTHGTYLAAKYRRIAARRGPKKALVAVEHATLIAIWNMAHTGAEYDDPGADYFTRRDPVRARQRALDQLQHLGYRVTLKPVAASA

SEQ ID NO: 40995 - protein, 415 aa, unidentified
MVDVIVERCAGLDVHRDTVVATVRVPGSGKSRRRRLQETRTFGTTIGQLERLSDWLAECGVTRVGMESTGCYWKTVFYALEDRFDCWLVNAKHLRNVPGRKSDVIDSRWCCELVELGLVRPSFVPPPEIRRLRDLTRLRSTQVQERTRAIERLEKVLQDAGIKLTSVASGVYSVSARAMLEALLAGVTDPAVLAELAKGRMRKKIPQLQEALASRFDIGHHGVLVAGLLAHIDALDQAIGNIEARIGIATAPYAELIELLCTIPGVGVRIAEILIAECGVDMSVFPTVAHLASWAAICPGTNQSGRKRGSGKTRNGDTWLCTALTQAAHAAVHTKDTYLASHYWQLRGRRGDAKAIGAIRHDILTAYYHIVRDRVAYRELGPDWLTRRHSPEHRTRRLVKQLEALGHHVTLQPAA

SEQ ID NO: 40996 - protein, 352 aa, unidentified
MTQNIILCVDYHDQNCVVRSFDEATGREQLQTVPTCPERLLALVGRAQRLARPRGARVVWIQESTTGWARVQALLGRQVVFQLANVLQLPLPPKARRRKTDKLDTARLQREYRDGQLPLAHRPPPWWRQVRRLVALRENLVSRRTALRNWLNRYLAHETWVDRDGLWSQRGRRRLQQLAEQAPRWDRLVWQTKLAELDQLQQHLARVEAAIHGVYQQWPRARRLDQIAGIGVIAAVSIAARIGPIGRFARAEQLIAYAGLAPGVQQSDQTRREGRIGGGGTDRHLRHYLIEATVWARHIPRYRPAYERTSRRRGPKIGRLTVARLLLRSIWRMLRRGEEFQPAAATQAKENH

SEQ ID NO: 40997 - protein, 351 aa, unidentified
MPRATSSTNLIATIGIDIGKNTFHAIGLDDKGAIILRQKLSRGQVYARFANIPPCLIGMEACVGAHHLGRQLRTLGHDTRLMPARYVRPYSKGQKNDFRDAEAIAEAVQRPTMKFVAIKTVEQLDLQGLHRIRERLVCQRTSVINQIRAFLLERGIAVRQGLRTLRTEMPIVLAKTDKLSQRMIHMIEDLCMDWRHLNGRIETVSKEIETLSEQDDGAKRLMTVPGIGPIISTATVAAIGTGEVFSKGRDFGAWLGLVPKQMSTGGRTILGPISKRGNRYLWMLFVQAARAVLLRPQSWEKHGLKLWIEAAARRLNRFKLAIALANKIARIAWGVLHGGRNFEVRPTNQAA

SEQ ID NO: 40998 - protein, 343 aa, unidentified
MTHYAGLDVSQKETSICIVDEQGRRLWRGTAPTDPEALAQILCRHGSDLQVGIETGPLMPWLVHELRRRGLEVICLDARHAKAALAMQLNKTDRNDAEGLAQIVRTGWYRSVHVKSFEAHRLRALLGARRQLVGMTTQLSNHIRGILKVFGLVVGPAHGRTFSERVETLVADQPAVAGIVRPMVQVWRELKDQIARFDKAVRQEVRQRAECRLLMSVPGIGALSVLAYVSAIEHPERFRQSRNVGAHLGLTPRRYQSGEVDRSGRISKCGDELVRSYLFEAAGVLLTRVQRWSPLKAWAVRLVQRSGFNKARVALARKLAVILHTIWRTGEPFRWTNLEAAAA

SEQ ID NO: 40999 - protein, 411 aa, unidentified
MHEKQKHLYVGVDLHKHDHVAVVINCWQEKLGEIKFENKPSAFSKFLQDIDKLLDDGLTPVFGLEDVGGYGRSLAQFLTDHGQVVKEVNPALSYAERKSHMTTQKSDSWDAECVARVLVNQLNQLPDAKPHDLYWSIQQLVTRRNALVKAQGALKNQLHIQLSHHYPSYKKFFSEVDGKTALAFWERYPSPSSLDGVSVKKLTTFLLEASNNACSVKKANDILRLVKEDGHTTKEHQETRDFLVRSIVRDIVFKKKEMNYVERELKELMSLLDFQLDSMPGIDLVTASALIAEIGDVRRFPNANKLARFGGIAPVYFGSGGKGKEQKSKQGNRALHALFYNLAVQQVQVAKGSKLPRNPVFHAYYLRKLKEGKTKGQALVCIMRRLVNIVYGMMKHKTAYKLPIVHEKEVV

SEQ ID NO: 41000 - protein, 356 aa, unidentified
MDRYIGLDAHAASCTLAIVSQTGKRLRDFPVETNGAALVEAIRAVAGHRHLILEEGTHSAWLYETLERHVDEIVVTGVTNSRGPKSDMRDAYALAERLRIGAVEQSVFKAPKQFAELRELARVHGMLVTDVVRVQLRLKSIYRSRAISTAGLAVYSQKTRGEYESQLPEAQRRATSKLYAHYDLLLDLKKQAEAELVAESKKHSITRVLQTAPGLGPIRVARMLPIVITPHRFRTKRQFWSYCGLGIVMRSSSDWVRSDAGQWQRAVVAKTRGLSRRHNHVLKDTFKGAATSVIQQGARVPIYAEYERLLEAGTRPNLAKLTLARKIAAIVLRMWKDEEVYRPDKSKNKTAAQSMH

SEQ ID NO: 41001 - protein, 348 aa, unidentified
MESIVKLPVIGLDIAKNVFQLHIVDAETGEIQRRQLKRAKVAEFFANCQQSLVALEACGGAHHWARTLQTQGHQVKLLPAKHVKAFLLRDKTDALDAQAIWVAAQQPHIKSVAVKSEQQQVCLSLHSMRQQLMKMRIMQTNALRGLLYEFGIALPVGHNKLLQSIQGELAIAQQHKKLPDIVVISVQEQLKRIDAMQDDIDQLSKRLSGMLKQNQQMLAVQAIPGIGILTATALVATVGDVSTFKSGRQFASWLGLTPKQVGTGGKTQQMGISKRGDTYLRTLLISGARAIVGRSTPTGWIERLLQRRHFNVVVTAVANKMARTVWAVLAKGKTFDQVKWNPTEATVA

SEQ ID NO: 41002 - protein, 330 aa, unidentified
MNYSHFVGLDVGKKSFDACLFSLDKELSHHTFPNTPGGIEELLHRVKQHGVEVETALFCAENMGSHVIDLCLSSYQFHFPLALECPLTIKRSIGLQRGKNDRIDARRIARYACLHYRKLSLYQLPDKDLVRLRNWMVIRDNLVKQKVSSRKLLELPRETSGLADLVTAMTFLEKQLSLVKEKISYVEQEMEKIISSNIALLTNYQLLTSIKGIGPINAIVLLCVTGNFHRFSDPRKFVCYCGVAPFEHSSGTSIRGKTKTSNLANREVKVYLTRAAITAISWDPQIKAYYKRKTGEGKHKASVINAVRAKIIARCFAVIKRKTPFVTLRA

SEQ ID NO: 41003 - protein, 345 aa, unidentified
MELHTIGIDLGKTVFHLVGLNRRGEVVVRKKFSRKQLLHFTANLQVELIGMEACGGAHFLGRALQEQGHAVRLMPAQYVKPYVKTNKSDYIDAEAIAEAVTRPRMRFVPIKSDDQLDLQSLHRVRERWVMRRTAVVNQIRGLLLERGITIRKGRCHVDAALPGILEDASAKLSGALRVLLAQLRLELDHLQTRIDEADAVIQQTAGENEACRRLVAIPGVGPVTATAIIAAIGNGAAFRKGREFSAWLGMVPGEYTTGGKQKLLGISKRGNTYLRRLFVQGARAVLQQSAKQSSGLSAWLTQLTARTHPNVAAVALANKLARMAWAVLAKNEPYRPPVLAEAATD

SEQ ID NO: 41004 - protein, 371 aa, unidentified
MRNNHRTKFVGMDVHQKSISIAIADDGPDGEVRLYGTIKNTVEAIGKVIRKLVSTGAELHFVYEAGPCGFALYRHLTGNGFCCIVAAPSMIPKKSGVRIKNDNRDAIALARLLRAGEITPIYVPDTEDEAMRDLTRARNDARIAARKAKQRLHSFLLRNECIYNGKKKWTKSHFNWLAQLTMKHPAQQVAFQEYIDAVNECTERMARLDEQILKAADEWRWAPTVKALQALRGVSLLTAVNMMAEIGDFNRFQNPKELMAYLGLVPSEHSSGDRIRRGGITKTGNSHARRICVESAWSYRYQARITQSLLKRHEGLPRDILQIAWKAQLRLCTRYRRLNARGKAPQVVVVAIARELVGFMWDIARRIPAVA

SEQ ID NO: 41005 - protein, 347 aa, unidentified
MNKKWFIGIDVSKKTLDVSIFVEDVVINMFPHIQVRNDKEGFKELLRWLKEQGVRPQDALIGLEFTGYYSDALELFLTRKKLCYTMLPTTVVKHYQRGTRDKNDKTDSAKIADYLFRFQGTECIKLRMLPSKAMQDLKALKSERKFYVRHRTDCENRQKVAKSKDEQKNLQKIIDLYDKEIERIEQKMADVVTSDEEIYLTYMRLMSIPGIGPVNAINTIANTQNFTAFETARQYAKYVGVAPSEHSSGTSVRWRGRPSPHCDLQAKADLSMAAMRAVEFSFEMNVYYERKLGNRPDDKDIKRKVLNAVKFKLIRQMFSVAKQHRSFKPLEQTQTQAEIHNTDKRVN

SEQ ID NO: 41006 - protein, 363 aa, unidentified
MSHYRVGCDAHRRYSQFAVLDQDGQLRQQTRVDHEPGAIRAFLENLPEGTPVALESVGNWYWIADEIEAAGCLPLLTHAAKAKVMMGNVNKTDKLDAKGLAKLLHLDSLPTVWLPPGEIRDERELHRTRMALSKLRTALKNRIHATLAKYGITSTEHSDIFAGKGRVWLDATLCRLPPETGRCVAQEIEALDGLQLQIAQLEDRIRKRIALAPSIQLLKTLPGVGDILAIVIEREIGSIDRFCTSGQFTSYAGLVPTVHASGGKTRFGHMRKPSNQYLKWAFIEAANVVVRHRHHPAWKVTYVCQIYDQVSQRKGHAVAVGAVARHLAEGAFWILKRQQPYRPPAIRQASPKQVRGRAQLVSN

SEQ ID NO: 41007 - protein, 351 aa, unidentified
MDYTGLDLHKRYFTLCILTSEGQVVADHRRLPAALEPLTTILEALDGPVTVTIEATLQWAWLHDRLAEAGIRVLVAHPQQVKLISHARCKTDPIDARKLAELTRVDLLPAIWVPTPEIRAWRQLLRGRAALVRWRTRAKNRIHGALAAENLRVAATDLFGAAGLAWLATAPVTPATRREITVQLAMIAALNEQIAGYDGAVKRLAQHPDAQRLMTIPGIGPFGAALLVAEIGTITRFHSAAGLAAYAGLVPSTRSSGDKTSHGGVGVANNHWLKWILIEAVQTLKQRPGPVQFHYERLLRAKGKPKATVAAARKLCLYIYWMWHDGLDYVTWLQGEAKRVGCSMQTLASPA

SEQ ID NO: 41008 - protein, 344 aa, unidentified
MKAVSIIGVDLAKQVFQLHGATADGEVVFRKKLSRKQFVAFMEAHPRCRIAMEACATAHHWARMLTGFGHEVRLIAPKFVKPYVKTQKNDMADAEAIVEAATRPTMRFVEIKTLEQQGLGMVFRSRELLVGQRTQTINALRGHLAEFGLIAGKGREKIEKLRSMLDHEDGAADLPAPVRQMARLCLDQIADLSRRIEEIDAQISAASRRSRFSARMQKMPGFGPVTAMALAAFAPPMENFRRGRDFSAWLGLVPRQHSSGGKQRLGRTSKSGQRDIRRLLIIGAMAVISGCKVRPPAENSWLGRILARKPRMLAAIALANKMARMLWAMIARNEEFRGGPLLAH

SEQ ID NO: 41009 - protein, 343 aa, unidentified
MEQYAGIDVSLESVSICVVDASGRIIREAKVASEPGVLITWFGRLEVPMTRIGLEAGPLSQWLYAGMQKAGLTVELLETRHVRDAFKAMPVKTDRNDARGIAQLMRLGWFRPVHCKSLPAQELRAILTGRKLLQGKRHDVEMSLRGILRGFGLKVGATTARSFEGRIRELVEGQPTLVAVADALLLARGTLGEQLGKLQKRLVSLARDDARARLLMTTPGVGVLVALTYVAAIDNPGRFKSSKATGAHFGLTPKKYQSGETDVTGRISKIGDASVRTALYEAANVILTRPVKASSLKSWAMRVAKRAGMRKAKVALARKLGVVLHRMLVDGTTFVAGKAAAAA

SEQ ID NO: 41010 - protein, 394 aa, unidentified
MSVKAGQAQRCRMNAVVIGMDPHKRSATIEVMAGDETILGGGRYPTDAAGYKAMLAHGRRFGQRTWAIEGCQGIGRHIANRLLGDGEQVVDVPPKLSARTRVFATGQGRKTDATDAHSVALVGTRMTGMRPVVNDEQLPVLRLLVDRRRALGEVHTRMISQLHRLLLELIPGGAQLSLSAAQAKALLAKVRPRDLTGKTGRCVAAELISDLERIYARKKAADKELKQLLAETGTTLTQLNGIGPSGAARLLVEVSDITRVPSKAHFASWTGTAPIDASSGDNVRHRLSRGGNRQINRVLHIMATVQLRNPTEDRAYFDRKKADGKTSMEAMRALKRRLSDLVYRQLLADALTPSATGPGGQPGTTLQSSAADSHPDIDTSDQSLPGPATGPDPL

SEQ ID NO: 41011 - protein, 343 aa, unidentified
MAHYVGLDVSLKQTSICVVSDTGSVVREGVVDSDPEAIAAFVRSRAPDTVRVGLESGPTATWLWTELKRMGVPVICIDARHAKAVLKMQINKSDRNDAVGIARIMQTGWFKEVRVKGLDCHAVKALLTSRALLVKIKRDLENQIRGLLKNLGRVIGRAKFNGFAARTAELIEDRPELVAVVTPLLKAREAIEKQIDDLDRKVLKLARHDAQIRRFMTVPGIGPITALCFKATIDDPARFKRSRSVGAYIGLTTRRHASGEIDWSGRISKCGDAMLRSYLFEAAGVLLTRVPKWSALKAWGMRLAKRNGLRKAKVAVARKLAVILHRMWIDRTEFTWSNKEAAA

SEQ ID NO: 41012 - protein, 433 aa, unidentified
MIDTVLSIDVSLDQLDVALRTTGSGWQWPHRAYDNNWPGYQQLKADLLAELAQRPDVQLTAVAESTGSYWLPFFYSLARDADLAPYHPRLALLNPLYVKRFRQASPEQDKNDLLDPQLIGRYYQASANDHFYQLNDRYLPLRFLTRAYERIVHELASEKAYLRSILSVSASDYQRLEPFSDLFGVTSLHILDEFDDIQALADLPLEALSDKLRTFSGNTFSNPKHTAEKLRQAAKQSYPLPKPLTAALHAIVQRSVERIRLLSDNQKTMRQLIEQQLQSLPEANLALKHPGLGSILVAGCLSEIQDTRRFITGTKFDRKLKRVRPRKYRDGQAAVAKLAGLWWPRNDSGRFQADDRSLAKERNTHLRYWLIQAAHTLQRYDPDYTAYYHRKFNEVRTHKHKRAVTLTARKAVRLIFALLHKGQRACLKEDAAT

SEQ ID NO: 41013 - protein, 343 aa, unidentified
METFVGLDVSLGETSVCILDKDGMRIFEGKVASEPAPIARLIRKRAPGVVRVGLESGPTSVWLTHALTAEGLPVVCLDARHAHAVLSVQINKSDRGDARGLAEMIRVGWFKAVQVKSLNAHERKALLIARHQLVDMRVRIDNQLRGILKTFGLVIGKCGRGQIGQRAQELSKGQPGIDGVVASMVAVRDSLLEQIIVCDRAIRRLAKKDDTARRLMTVPGVGPVVALAYISVIDDPKRFTHARDVGAYLGLTPKRYQSGEVDLTGRISKCGDAFARTCLYEAASVLLTRVGRWSPLKAWGVRLMKRIGATKAKVAVARKLAVILHCIWTDGTEFWWTKEAATA

SEQ ID NO: 41014 - protein, 407 aa, unidentified
MCGLKPDKSQVIKPVEFTNAPAGFDVLQEKLAQLAIPPEQVLIGLEATSRYGENLYYFLESQGYQLCLLHPRQTHQFAQQRGLRAKTDKLDATTIARVLLSGEARRGYVPTELIATYRELVRLHTQLSDEVARYKNEIQALLTVLFPEFSQVFADPCRATALALLKLYPSAQAIATAGVEAIAAKLHELAPRNYGHSTAEHLVQLAEHSVSRGFAVAARSTSLKIVCDQLEHTQANMAQLESEIDKLLKTDAGAKGLISVPEFGHKTVAVLRAELGDVTRFQRTDQVVAYAGLDIEVKQSGKWKGQAKLSKRGSGRLRRILYMATVRCIRLPGSAFGAYYHRLVARGMKKRDAMMAVMRKMLIVAYRLLRSEETYDPTKVCAVLVTQPVESPALHTPSSAKLVATGA

SEQ ID NO: 41015 - protein, 421 aa, unidentified
MARTVEIVYPVCCGMDVHKNFLVACIAVTDEHSHTEHHIKRFSTFTGDLRRLAVWLASYNCVDVCMESCGKYWIPVFNALEKAGINVCLTHPKYVKAIKGKKTDKKDAKWISELFKCDLVRSSFIPPPDIRQLRDLCRYYVKLTGFVSGEKNRAQNCLTMCNFKLDDVFTDVFGKSATRVLDALLEHGNSNFELDGLINGNCKSSPEKIRAALDGELDQVQSEKLSLIRQHISDINALRATLENLIYNLAAKYQLQIDLLMTVPGIISPLTAIRILAEIGADMSVFETAKQLVSWAGLTPQNQESAGKKKTTRIGRAGAYLKPLLVQIALAVSKSDKHPELKNKYLALKKRRGGKKAVIAIARKLLTAIWHMLSKNEGYNAKLYRKADKPPAVRVLTADQAIAFMRSKGFLIVDEETGEVA

SEQ ID NO: 41016 - protein, 323 aa, unidentified
MSAFVGVDMAKNTFDVATPLDNGKHRTKGKLSNDAKGFAEFESWLQKHATPDALIVIEATGNYHEALADFLFQKGYRLHIANPATTAAHAKSELSRNKTDKTDAKLISDFAMQKHRKLRLWVPEPQSRRRLRALVRRLEDLNEIRQMEKNRLEVASPNVVTSIESVIAHVSEEITETERAIKQHIDDDPDLRGKSELMTSIDGIGEKTAALILAELGDPLDYDGPKKLSAFAGLSPRQDRSGGYVGATRISRTGSSRLRGGLYMPAIVGIQHNEVLSEFAKRLKANGKAPKQVICAVMRKILHLVYGVLKSNKPFDPEIALAA

SEQ ID NO: 41017 - protein, 321 aa, unidentified
MANVRKIIGIDISKEKFDVCFSFDVEVFVSRSYDYDKDGIRSFLREVSTDCLCIMEATGVYHLSLAYKLYTCGISVSVVNPLSVKNFSRAVMCRTKTDKSDSRLLVEYARKMDLELWKPTSDNYVRIQQLYRSIDLFNTNITQLENQLEAISISPIQDRKLVRILRSQIKQLKKNIKALQTEIEALIKEEDADVIENISSIPGVGRKTAIALLTATKGMHGFNNYRQVSSYFGLCPRIYDSGKSVHGKAHICKMGMGWIRKLLYMCSISASRHNKACIALYDRMRLKGKNVKVALIAVANKLLKQIFAIVKNNCAYNENFA

SEQ ID NO: 41018 - protein, 360 aa, unidentified
MSFNGTSVGLDVHALSVVAHAVDEESGLVERARLCPDHGEVLRWLGQLRGPLRVAYEAGPTGFGLARALAEARIECVVVAPSKLIRPAGDRVKTDVSDAAHLTRLLRLGEITPVTVPEAGVEAVRDLVRAREDARADLMRVRHRLSKLLLRQGRVYSGGQAWTGRHETWLRQQRFTDAHTTAAFDHHFDAVLSATAARDRLDEQIVGVAASPRWADTVDRLGCLRGISALTGLALAVEIGDWTRFTGASIGAYVGLVPTEYSSGASRVLGSITKAGNAHVRRLLIEAAWHHRASYRHPGPTMRARWAKVDPALKARGHAGNRRLHQQWCRFLERKKHPAVANVAIARQLAGWCWSLATLD

SEQ ID NO: 41019 - protein, 385 aa, unidentified
MFQFSGSTQAAVDYDSTIIGALELSEKKWVLAVQLPGVSRHSRHALEACGDGLASFVERLKAKCAAAGRKIGRVILTHEAGRDGFWLARFLSRRGIEVHVIQPSSLPVDRRARRAKTDIIDVEMLLRTLMAWLRGEPRVCSMVPIPSEADEEARRAYREREDLTGERRSIVNKIDGILATLGIKAYKALRRDRREQLTSMRQPDGDPIPQKAKARIERLLDRLELVLKLIEQVEAARDAVLKKDRPADEAERMIRSLTELRSIGPDFATLLVREAFVRQFRNRRALGGYVGLGGTPFSSGGSEREQGIGKDGNRRLRAAMVELAWMWLRWQPDSALSIWFRARVGAMGGRVKKVMIVALARKLLVALWRYVKDGVIPEGAKMKPA

SEQ ID NO: 41020 - protein, 372 aa, unidentified
MSAEHITWVGMDAHKDSIKVAAFFPERPEPVEWTETTTVEAVRRLARKLQREAPGEVHCCYEAGPTGYALQRQLLATGITCTVIAPSLTPVKPGVRIKTDRRDARKLAELFRAGLLTEVHPPSETDEALRDLCRCRDDVRVDLLRARHRLSKFLLRRHCIYRQTKHHWGTRHWAWLEQLRFDDPMSQATFDSYQLAVQQLEERQRQLDTQLAEFGGQEPYREPVAWLRCFRGIDTVTAVCLVAELHDFRRFHSPRQLMAYVGLVPSECSSGERERRGAITKTGNRQVRRLLVEAAWHQRYRPALSAPLRRRREGQPARVLAIADRAQERLYARCRRMELHGKASPKIVVAMARELTGYLWAVLHPAAAATRV

SEQ ID NO: 41021 - protein, 448 aa, unidentified
MRQVRIIYKRVAGLDVHKKTVVATRMRVTDEDRLEWETKTFGTTTPDLLELNDWLLAWSLSHVAMESTGDFWKPVYNVLEGAFEVVLTNAQHVHNLPGRKTDALDSEWLAELMLYGLLKASFIPPKPQRALRDLTRYRTTIIQEHTRMVNRVQKLLEGANIKLSSIATDLMGVSARAMLAEIAAGQTDATLMAELAKGRLRNKIPELKKALTGSVEPHHRFLLAQQLEHIDYLDEKIEQLNEEIEGQLAAMSSPADGPRAPSGGTDKPEEPPASSETKDSLTWNEAVALLDTVPGINQRAAEDILAEIGIDMSRFPTDKHLASWSGRAPGNNQSGGKRFSGRRPKGNKSLSSVLTECAQAAARTKGTFLNARYHRLAARRGKKRALGAISHSIVVSIWHILTYREPYQDLGGDYFDQRKKEVKVSYLIRRLERLTGGSVSIEIQPTVA

SEQ ID NO: 41022 - protein, 347 aa, unidentified
MKHFAGLDVSLDETTVCVVDEAGGIVREARVSSEPEALVAFFRGLGLAMERIGLEACSLAAWLHEGLTAAGLPAVCLETRRAKAAMGAMPNKTDRNDARGIAQIVRTGWFRAVHVKSPACRSWRALLAARRLVLNKMRDLENGVRALLREAGLKLGRPARKELAARVRELVGADAVLSASVEPLLAIVATMAHELAQLTRRVLAIVRDEPVCRRLMGVPGVGPLTALAFRATIDRPERFRRSRDVGAHLGLTPKRYQSGETDVQGGISRCGDELARTALYEAAHSLLVRSRRWSSLRAWGMQVARRRGMARARVAVARKLACVLHRMWADDAEFRWGKQETASAVPG

SEQ ID NO: 41023 - protein, 390 aa, unidentified
MFYLGIDIGKFNHAAALMNQQGKVVATLPSFPNTRNGFQNLLALITAHLPPTEELRVGMEATGPYWIPLAEWLKAHGWIPVILNPIKTASLRNYGIRGAKTDNIDSVLIANTLRIEGEQPQPASPKLSDELRHFTRLRADMVKDRTRIGLRVTSILDRLFPELLSSFSKALSPSCLALLCEAPTPSKVLALGEEKLATLLHKASGGNLKTTQAKEIMDKATQSVGVPSQAMEEVLALLLEQINLINSQLKVVDHRITQLYEQAGVYFTSIGGVGTLSAATILAEYGSVTKFTQPKQMVAFAGIDPKLRNSGQHQGQVHISKRGPHYLRRALYLACQVVVRNDYYFHSIYQRHRDKGKSHKEAIIAVMNRFIHVLYAIWRDNRPYYPLTQA

SEQ ID NO: 41024 - protein, 348 aa, unidentified
MQFYTNLHPFYCGIDLHARMLYVCILDERGEILVHKKIKDSSEELLKLLSPYIGNIVVGAECMHCWYWLSDFCEHHNVDFILGHALYMKAIHGGKTKNDKIDAYKIAKLMRGGNFPLAYVYPKEKRAIRDLLRRRAHAVRHSAELKAFIKNSLSQYNLPVPEKSDLSYTTGRDAMRGYFPNPQVQRSIDMNLRLIEVYDHEVSSIECYVEKLTKHDNGRDYYLLRSLPGVGRVLALTILYEIGSIHRFDSVQKFASYSRLVKCKAESAGKAYGTQGTKIGNAHLKWAFSEAAVLFLKGNPSAQAYLLKLQKRMSKAKALSALAHKLGRCMYFMLKNQTVFDSERFLAG

SEQ ID NO: 41025 - protein, 398 aa, unidentified
MLSIGIDVSKGKSTVCGMKPGGEIVYTPFEIQHTREGMSELVSLLRGSGEEVRVVLESTGSYHCPVVAALLENGIFVSVVNSLRMKRFCSQSIRRVKTDQIDAMQIALYGLAYWQELQPTRLPENTYRELQLLARQYYQMTSMLIKAKVDFNALCDQVLPGMQELMNDHAGRHKLSDFVLRYRHTTHILEMGETRFRKDYCKWAEKKGYRNRERMAALIFATVQNGIPVLPNAPSTQIVITEAIRVLHTVEASRDAILTQMQALAKTLPEYSLVREMPCIGDTLAPRLIAEIGDVRRFHSKRALIAYAGIDAPPYQSGKFSANNRHISKRGNRYLRKTGYEVMQSYVMHKPANDPIFTFIEKKRSEGKSGKLAMVAGLNKFLRVYYGKVTELYRSLPQ

SEQ ID NO: 41026 - protein, 342 aa, unidentified
MPQVAIIGVDLAKRVFQLHGAAADGSVLFRKKLTRERFLSFLASQPLCVVAMEACATAHGWGREIERVGHMVRLIPPIYVRPFVKRQKNDAADAEAIVEAASRPTMRFVAVKSEAQQARAMLFRTRDLLVRQRTQLINALRGHLAEHGVVAAHGPAHVKRLADAIANGDSCLPIAVRELGELLLEQIAALNEKTRDLDKRLRDAAGRDGATKRLQTMPGVGPVTAVAVETFAPPMEVFRRGRDFAAWLGLVPIQRSTGGKPRLGKTSKMGQRDIRRLLITGAMSVVQAAGRSAPPENSWLAHMLGRKPRMLVALALANKMARGIWAMLTKGENYRDPVTTGA

SEQ ID NO: 41027 - protein, 411 aa, unidentified
MNPVVGLDISKGESQVQAFLDKGKPYQKSFKITHTVEGLNLLVAFLEDVKKESGQKPSVVLEATGHYQTPVVHYLEERGYLLIIINPLISYKARGSSLRKVKTDAIDAYLLCELFYKEELEPYKKRGVQLLNLRNLTRQHENITGVMIQTKLQFQAVLEQVFPEYKGVFGDLYSVVSLLTLLEFPSSEDILKASEEAITARIFKLCKSRSIKWANEKAIQLKAAAARNPFEKTVYQSHILSLGMYINILLQYKEHLSKLEAEIDALAKEIEEYTIIKSIPGIGEKIAATIISEIGEIDRFNHPKKLVAFSGVDPSVFESGKFTATKNRITKRGSSRLRHALYMAVRCAIRDCRKSKTTDEIIPRNKKLRVFYDKKREEGKPYKVAVIACVNKLLHWIFALLKNKMTFQDIV

SEQ ID NO: 41028 - protein, 346 aa, unidentified
MSKLYVGVDWHKRTSTWVAINEQREKVYERVWDCTPHAVQEAITSLPADPAETTLAVEPVCGWRWMSDLCEQTGIVVQIANTIKLRQIADSGQKTDKNDALTLAELLRADYLPQAYKVPDDIYELRMLVRERAHFISQSTATKCRIQSVCTARGSHITAEQPLHKAGWDTLYNQESGLYDMFLSLEEIKAHVTNLEGKIVKTITGTDTYTILLSVPGIGPVTAAAIYAEVGDFKRFHTPANLISYAGIYPKERSSGDNKRYGSISKAGSRVLRYSIIEAAMRIRDTEKSHNLHTHYLSAKEDRHKTPKQARIVVAHKLLTIVWYLIERGMMYDDHMVKPAQREMIS

SEQ ID NO: 41029 - protein, 338 aa, unidentified
MALYCGIDLHSTNCWITIIDEDRKVVRESKFGNDLAAILRFFEPYRAELEGIAVESTFNWYWLVDGLMDAGYRLHLTNTCAIKRYDGLKYTDDRHDARWLAHLLSLGILPEGYIYPKQERAVRDLLRRRAFLVHKRTSFLLSMRGAFECRTGMRTTSNDIKKWTPADVEQHIADPLQALGITCLLDPMTAMDGQIKILEKEALKRGNLRAEFRGLKTVWGIGKVLGLTITYEVGDIGRFAKVGNFASYCRLVKSNRLSNGKPKGSGNSKNGNPYLSWAFSEAAHFAVRNHEPAKKFVQRKRAKTNGIVAIRALAHKLARASYYVMKDNVDFDPDRMLQ

SEQ ID NO: 41030 - protein, 376 aa, unidentified
MNEKLRFLGLDVHAETIAVAVAEPNGEVRSLGTIANREDSIRKFIRKLGSPEHLRACYEAGPTGFVLYWQLTQLGVKCDVVAPSLVPKKPGDRVKTDRRDALKLARSHRSDDLTAVWVPDEGSEALRDLVRAREAAKQDQLRAKHRLTKFLLRTGQRPPLGVKAWTEKYVEWVQQVRYTHPAQEATLLDCLNEVQHMEERVKRLEQSIVEVIQLAPAPMQEVVRGLQALRGIAHISAVTIVVELGNITSRFESARDLMGYSGAFPSEDSTGKRIRRGGITKSGNAHLRRIVVESAWSYRHRPAIGARLRRRQEGLPAEITEIAWKAQNRLHKRYMTLMARGKEQRKTMTAIARELLGFIWAIGIKAEAACKQQMAA

SEQ ID NO: 41031 - protein, 321 aa, unidentified
MQKDLLYCAIDVSKDKLDVDGAALALPAQLGNDHASFRQLIKAAKKYPGPVQFVFEATGPYHLGLALALWEAQIPLSVLNPARVRYYAKAQGKAKTDPLDKQVIGDFARSFRPQPTPAPDPVRRELTELLQRRDGLISTRAAEQNRLGQCRHKIIKGQIRRLMAQLAEQIGQIDGLMKKLVNSSQELKAKVKALCQVKGVGHLTAVTLLITLPELGTLGRNRIVRLVGLAPLNDDSGTQKNKRYIQGGRARPRCALYMPALSASRHNPVLKEVYERLLKAGKLKKVALTALMRKLLICLNALLRKLADQHPSPQGLCLAKP

SEQ ID NO: 41032 - protein, 424 aa, unidentified
MTMMTAPPTAANPAEDAAPGRYAGVDTHKDTHHVAVVDELGRAVADQQFPATSAGYRQILDFLHTAGPIRAVGVEGTGSYGAELARVMTAAGMTVIEVMRPNRQHRRLRGKSDPLDAQQAALTVAAGRATVVPKSRDGQVESLRILLTERTSAAKARTAVINQIHALLITAPAAVRADYRRYHGSQLVAVLARTRPGAGHDPEQIARASLKRLAIRHRNLAEEIAVVDHQLEHIVAGLNPALLATHGVGPVVAATLLATVGDNPHRIRTPAAFAALCGVAPVPASSGRTHRHRLSRGGDRQANHALHRIVLLRMRTGEPRTMAYFLRRRAEGLADRDIIRCLKRHVANEVFAVLVHPTTEPLPGPLLRRQRQALGIRLTEAARTLEAPYQQLRRLELGTRSDPDLVHRCQHWLDETDRQRLKTA

SEQ ID NO: 41033 - protein, 412 aa, unidentified
MNPVIGLDVSKGESQVQAFLDKGKPYRKSLSITHNLKGLGCLLEFLQDVEKAAGGHQPSVVLESTGHYHIPVIQFLEEQNYVYIIVNPLISHRAKSSSLRKVKTDAIDAYHLCELFYKEELEPYKKRGVQLLNLRNLTRQQESIAEISAKTKIQLHSLIDQVFPEYRGVFGSLYSKVSLLTLLEFPTSKAVLSVSEKELTDKIASLCMSRSESWAKEKAQKLREAALRDPFQNNLYDSHIFNLEVLVKIVLQYQEHLSNIADEIDALACEIEEYEILQSIPGVGEKIAATIISEIGEIDRFNGAKKLVAFAGIDPSVYSSGKFTASINRITKRGSCRLRHTLYMAVQSGIRDARKKKTTDEIIPRNRRLREFYDKKREEGKPFRVAIIACVNKLLHWIYALLKSRSTFQVIA

SEQ ID NO: 41034 - protein, 341 aa, unidentified
MGIVGGFDIHRRQITFDYIDTDTGEVSRGKIAPADRAQVRSWLGRFAGRHDVSFALEGCTGWRFVVEEFQRVGAEAHLAEPADTAKERGRKERAKTDRTDARLQRELLRTGRLPESWIPPDHVLEVRSRVRLYKALADERRGWMQRIRATLFHHGVPALACHLLDVDGLAHLEEADLSSSGRLVVEVALRQIDHLEVELSALRRELVAFGHHQIGCRALQGHFGVGALLSVAIWEELGDCRRFSSSSDAVRHSGLDVTVWASDSQRARGHLARQGPEILRWALYEAGMSAAKRTSPDHGYYLQVRDRLGPNRAALSVGRKLGRRCYHTLRELGDHALAPVA

SEQ ID NO: 41035 - protein, 356 aa, unidentified
MTIVAHSHSFVIGVDTHAKSHTYAVIDAANGELLGCQLFPTTAKGMARAIAWAGRLSSGEATTLWSIECIATYGAKLARAVSDAGYEVVEAPRISTKSRRGIGKSDPIDAQAIATATRSLDDDQLRRPRADDGIRQALRVLVAAREQMAQEKTMNTNALTALLRVNDLGIDARKPLTLAQIGEISRWRSREEPIARVVARDEAIRLARQILAFQETLTTNQKRMIELIAQSPAAPLLEEPGVGAYTAAIMITAWSHPGRVRSEAAFAALAGVSPIPASSGNTIRHRLNRGGDRRLNRALHVIAMSRMQHHDNTKTYVEKRLTEGRSKREIRRCLKRYLGRHFYRTLNALHSAGSTT

SEQ ID NO: 41036 - protein, 399 aa, unidentified
MVSCLMGDSTALASAIVRCCPKFKHDCAIIDELCDTVMPSWSFSNDREGFSHFKALLDSLEGEKKIGLESTGHYGQNLKQFLESNGFTFMEFNPLLVSRFVRSKSLRNTKTDSIDALSIAQYVMTVEYKPYPSSFYHLDKLKSLTRFRNSLVRQRSRQLVELTNVLDKLFPEFKPFFKDKFSVTALYILAHYQTPERIANMNARSYEALRKLSRGRFTLSNFTQLKALAKNTVGTQSDYLLDQMNILLELYSQLDSKVDELDAQIKECVRGIDPPCLSIPGVGELSAAMILSEFGDFSKFQNPSKMLAFAGLEPGYFQSGQSEYTGHMVKHGSSRLRYALMNCCLPLISNEPVFAAYYAKKRSEGKPHRVALTHVAKKLLRVIYTLQTKNIRYDPTMIH

SEQ ID NO: 41037 - protein, 438 aa, unidentified
MACRYAGIDWASEEHEVLVADEAGAEVLSATYGHDEKGVSALCRMLVRMEVGLVAIERPDGLLVERLLDAGLRVLALHPNKVAAARDRFRAARGKSDRFDAFVLCELARTDHHRFRVLEPDSDQTKAIRALTRAREDLVQARTGLVNQLRAELERFWPGALRLFSHMDAEILLAFLERYPSPADAHGLGVARMHAFLKRERYSGGQHPTALMAKLRSAPRARVGALELAARRRLVLGFVAMIRTLNAQIKDLEREIRTQVRAHPDGQIFLSLFKSPASVITAAELLAEIGDCRERYPTRDALAADAGQAAVAKESGKSKTASFRRACNKRLRVAFCRLADSSRHWHPWAQDLYAQARQRGHEHPRAVRTLGRAWCRVVWQCWRNHTPYDPAQHRALKRHITVTIPSSSGPVPDLAATQRMAGTAVTQRAARTGRARRA

SEQ ID NO: 41038 - protein, 355 aa, unidentified
MKYYTSTTEFNCGIDLHARQMYVCLMDRQGTLLLHTNIRNNDFEFFLKRIEPYRHDLTVCCECMFGWYWLADACQAAGLTFVLAHALYLKAIHGGKNKNDRIDSEKLAHLLRTNLIPPAYVYPADKRPLRALLRQRLFFVWQRSALLARIQSHQLAHNRTPVKQTRRNRDPWATQLLAQEAHPLRQLALQNELALIGHYDQHITALEAQLHRLTKQTLPRQYALIQTVPGIGEHLGLTILYEIGDIERFPTVKDFVSYCRLVKGTVASAGKIKGLRGAKLGNPYLRWAFGEAAVIAKRDSHLIGPLAQRLEARMNGNKFKANTVLALKLARAVYFMLKNNTVFDPERLAMALAKG

SEQ ID NO: 41039 - protein, 313 aa, unidentified
MSDTLPQTIGIDISKATLDAHAYPAGRNRQFANTASGHKALIAWLGQWSVERVAYEATGAYHRELEQALADLPCVKLNPARARRFAQAAGTLAKTDRIDAVMLARMASTMQPPVRPAINLEQARLAELISARDGLMRDRTALKNQEKNLTIPLLKRQHKQRLNQIDQHITALDVELAASIAADPQLARRHEIISSIAGLGPRTANQLVATMPELGSLDNKQAASLAGLAPIARQSGQWKGRSFIQGGRANVRRALYMPALVAARFNPDLREKYQHLIASGKPAKIAIVAVMRKLLVTANALVKADRMWVEKHA

SEQ ID NO: 41040 - protein, 369 aa, unidentified
MTDLTLFVGLDVHKKTISVAVVEAAAGAVVRFYGTIANTPDSVRTLCRKLSKEGQQLHFCYEAGPCGYGVHRQLTRLGHRCDVVAPALIPRKVGDRVKTDRRDAMMLAQTLRAGQLTAVWVPDEAHEAMRDLVRLRTQAMRDLRKARQQLLSFLLRHGRNSPYGHWTKMHRRWLGELVFAHPAQHLALEEMLQRIERAEALCDRLKAAILELVPQWSLAPVVQAIQALRGVSLIVAAAIVAEVGCFSRFESPRALMAYLGLNPSEHSSGATIRRGAITKTGNTLARTCLVEAAWTYRFPPRVSQIIRDRLKELPEPIRAVAWKAQVRLSARYRKLTAAGKPEPKVVVAIARELVGFIWAIARMVEPKFA

SEQ ID NO: 41041 - protein, 410 aa, unidentified
MTVKQEGAGGVGKGRKSKKGGKKRKITKLDSLKQLNLNAGGLDIGAAEIYAAVPEGRDEVSVRQFDTFTADLKVLADWLEACGVDTVAMESTSVYWIPIYEILEERGFDLYLVNARQVKNVTGRKTDVLDCQWLQQLHTYGLLRGSFRPRQEICELRTLLRHRGNLIRWRAAHIQHMQKALNLMNLHLTNVISDITGVTGMKIVRAIVVGERDPKVLAQYRDPNCKNSEEVIAKSLEGNYSSEHLFVLQQALELYDIYTDKIRTCDVEVEKLYSTFEPQVDLVEEPLKQSKKNRRKNKNVPEYDLRTYLYQMTGVDLTAIDGLDVLTVQTIISEVGTDMSKWKSVKHFTSWLGLAPENDISGGKVLRRGTKKVKSRANLAFRQGAMGASRGQSVLGAFYRRIRAKHGHGS

SEQ ID NO: 41042 - protein, 343 aa, unidentified
MLYLGLDVHGKWTMIVGFDPDTGEVVEHKRVGNDPQEMGALLGSLPGPLHGAMEVGTNAWSMYRVLRPYFEELVVVDPAAVWDRRRERGAKTDRRDALRLAQLLARGELKGVWIPDEHTQDLRVLARGKVRASWWVTRACNEIGSLLRSWGHPVERSLLSRQGRRMLEEVQLPGHSQRVLELWVELLETAERMEAELERAVKEEAEQDPACQVLQSVPQVGPLTALMVRAEVGDVRRFRSAKALVSYAGLCPRVSQSGEQCRYGRLGKWGDRWLRYVLVLAANRLARQAKDTRLHRLYWRLCFRHNANDAKVAVARKLVQLMWRMLQDGRRWEELREAEAVST

SEQ ID NO: 41043 - protein, 343 aa, unidentified
MQTITTIGFDIAKSVFQVHGVDAQGNVVLRRQLKRRYVLAFFQKLPSCLIGIEACASSHHWSRELQALGHTVRLMPPAYVKPYVKRQKNDATDAEAICEAVTRPNMRFVATKMAEQQSCLMLHRTRHLFIRQQTSVINAIRAHLAEFGIVAPVGRNGVDQLLGVVADTLDKRLPEIARLCVAALGAELRMLKAQILEFDRMIRAWHRSSEASMRLDAIPGVGPALATALVASVADPKAFRSGRDFSAWIGLVPKQNSNGGKERLGNISKRGDRYLRSLFTTGALAVIRYAKIHGNRQRPWLTALPARRPTKVAAIALANKIARMAWAMMAKGERYKEPAALAA

SEQ ID NO: 41044 - protein, 340 aa, unidentified
MTMIGIDPHKATHTAVAIDDNEEVIGEYTLDASVDQVKHLTRWADGFTPREWAVEAANGLGHLVARQLVSAGETVFDVPPVLASRVRLMGSGRSQKNDPNDARSVAVAALRSDRLTTVAPDDHVTVLRVLVKRHRDLAQLRNKHCCRLHALVLEVAAGGIGTKISVAKACELLDRVNVADPATTFRVLIARELVDDITRLDQSLAASKKRIATQVAASGTSLTDIVGIGPIGAATIIAYTGDVTRFPTKGHYATYNATAPIETSSGSRTRHRLNPRGNRILNHAIHIAAVTQLRHDTNGRVYYDRKIAEGKTSKEAIRALKRRISDVVYRTLRLDAAANR

SEQ ID NO: 41045 - protein, 459 aa, unidentified
MTLKKKMEMEIINRNAAGIDVGSRSHYVAVGQSLEDVKEFGVYAEDLVALCEWLLSYGITSVALESTGDYWQNLFSESIKYGFEVTLCNGKFTKHPKGKKTDVKDCRHIQKLHALGLLTSSFLPEETTEILRTYCRQRNNLLHISSGISRKMQKYLKFLNFRLDVVVKDVCGLTGLAIIADICNGNLDPNSLAEHRHYNCKKSKEEIAKALHGNNREDYLFGLRQEYQSYLFYQKQIKACDKEIDNFIKNELKKSPEKAKLKTTDKPYKRQNKNAPAIKNFNQLAFQYFEGVDLMEIEGVSHSTILSVISEIGPGGFKKFPTSKQFVSWARLAPNNKISGGKVLSSKIPKGSNRLKIALRQAANAIGNLKDTHLSDFFRRVAYRKGRQAAVSATARKLGVIIWTMVTKKVPYSPPKEYLFLDQKRKLKMASRIKKNIAKFDLKPEDIGFGNSLNISIDF

SEQ ID NO: 41046 - protein, 343 aa, unidentified
MDHFAGLDVSVKETSVCIVDDAGKIVREVKVASEPEALLAVLKKPAYRFKRIGLEAGPLSQWLFSALAEAELPVVCVETRHMQAVLKAQINKTDRNDARGIAQMMRAGLYRPVHVKTLRSQKLRMLLTHRKLLQSKAIAIENDLRGTLRNFGLKVGVAGTVKFEARIRELVENFPDLAGLVEPLLVVRRVLREQISILHRRLLAIVRDDEVCRRLMTVSGVGPVVALTYRATVDVPARFRKSKAVGAVFGLTCSKYQSGEIDRNGRISRCGDEMMRVMLYEAAQSMLRSKKWSWLKAWAMQIARRRGMKKAIVALARRLAVILHRIWVDGTEFRWTRERAVAA

SEQ ID NO: 41047 - protein, 395 aa, unidentified
MFIVGIDVAKRSHEVCMITSDGQTVQRPFSIRNNCTGYNLMLEKIRKHTNIKSQIVFAMESTAHYWLALFTRLRKDGYHVILLNPIQTSAMRDMFIRKIKTDAKDSFIIAELIRFGRYAESNVAQDRLLALKELCRNRFYLVDMAGDLKRKLIALIDRVFPEYEAQFDTIFCKSSVALLKKYPTPQRLSNAHLDKLTELLWNSSNGHFGEWKARELKELARNSFGVEDCDGAYSTLILLMLDQIQSLSGKADALEKEISRLFQSFDTTVTTIPGVGPIIGAVILSEVGDISRFSSADKLAAYIGVDPSVNQSGEFQAAHAHMSKRGSPYLRRCIWMASQVAVQRDPMFRAYYEKKAAEGLKYMTIIGHVTRKMTAVVFAILRDHKVYEPVLPTAA

SEQ ID NO: 41048 - protein, 340 aa, unidentified
MSTIHILGIDIGKSTFHLVGHDSSGREVCRKKLSRPKIIQFLAKAESTTVAMESCGGSHWLARKCKEFGHKALLIPPQYVRPYVKTNKNDFIDADAIAEAAMRPSMRFVSVKTEASQVISVIQRIRSSYLKDRTACMSRIGSMLLEFGMAFPKSHSKMKKLFQWLAEHGEPIPPMLLLELRDHHDYYLKLNQLILTQDKKLKDIVLNDELAQLLKTIPGVGDLTASRCLSDISNAGDFKNGRHLAAWIGLVPRQHSTGGQTKLLGISKRGNKGLRELFIHGARAVLVRPEKAVASFGNWIVELLSRKPYNVVVVALANKLARIAWSILSTKQAFEVRVQA

SEQ ID NO: 41049 - protein, 344 aa, unidentified
MEHFAGLDVSVKETSVCIVDEAGKIVREVKVASEPAALLAVLKSAAYRFKRIGLEAGPLSQWLYSALAEAGLSAICVETRHMRAVLKAQINKTDRNDARGIAQMMRVGLYRPVHVKTLRSQKLRMLLTHRQLLLSKAIALENELRGTLRNFGLKVGMVGKVKFEARIRELVENLPDLAVLVEPMLMVRRVLREQIVILHRRLLAIVRDDEVCRRLMTTPGVGPVVSLTYRATVDIPVRFRKSKSVGAVFGLTCAKYQSGEVDWDGRISRCGDEMMRTMLYEAAQAMMRSKKWSWLKAWAVQIARRRGIKKAIVALARRLAVIMHRIWVDGTVFRWTREQTAVAA

SEQ ID NO: 41050 - protein, 377 aa, unidentified
MKATSTRPATVLGLDVGKSSHWACLVDRDGEVLASAPVRNREAELDALFSSAPAGTLVVVDQFRNIGSLAVRRARAAGLAVAHLPGLAASRAAGLFAGEAKTDERDAEVIARTALGVPDSLSGVPGRGEALEAARALSSQRDHVVACATRDKNRLRAVLLESCPALEAAVDLSDRRWLELLAGFGGAWGIARSGAGGPRAEAAGEAAAASTAPPPALVEAENRQVRFLAARISEALDEAGALEAETAALLEGDETYACLLTVPGIGPRTAAQLAVSVDIARFPDHDHLASYCGIAPRVRSSGTSVRSVRASRRGDARLKSLLIFSCNSLVRSSGRYGEYYRACRARGMGHGRALKAVARKRLRAIYAVMRDRVPYRE

SEQ ID NO: 41051 - protein, 414 aa, unidentified
MRIVYKKVAGLDVHKKLVVAATSVLEPDGRITQEKRNFETMTADLLGLSDWLMSHGITHVAMESTGEYWKPVFNILENNFEVLVVNAQHISKVPGRKTDQSDAEWISELMQFGLLKASFIPPVTQRELRELTRYRSTFIRERVNLVNRVQKVLESANIKLASVATDVMGISGRAMLEAIVQGNINPEAAAELAKGRLRQKREQLAKALEGRVKPYHQFVLSELLCQIDSLEETIARFDEQIEVYCRPFEEAVQHLDTIPGVSRQAAEVIISEIGTDMSRFETADHLAAWAGVAPGNNESAGKRYSGKTRKGNKPLGIILNQVAHAAVHAKNTYLSAQYHRLAGRIGKKKAIVAVEHSILIIAYHIIQRKEPYQDLGGDYFDKRRPEATAKRLIQRLEKMGYQVMLQQQPINSIA

SEQ ID NO: 41052 - protein, 438 aa, unidentified
MSNKVIFNLDDLFISVGIDVGADFSWMSIALPNQQFVGKPYKILHSSIDSLTTAVSKIKEAEELYSLESRIFLESTGIYHYPLFCYLRDKGFNCSVINPIITKNSTNINIRKVHNDRFDSKKAALVGLKPDLKVSLMPSDLALNCRNLCREYYDLMDNRSAYVNKLQGELRMAFPQYLGIFSKVTINTSLTLLETYTSPSAFLKADKQEIIDIIKSTARFGLTYAQNKYNAIIQAATDANQFGYIIDSNIKRIRLYISFIRKYDEEINNILESLHELVDANEDADFVKQIHLIETFKGAGFLSAVSIMGEIGDFSAFSKPKQLFAYFGLDPAVKQSGKFEGTKVQMSKRGSAIARRVIHTLTLQSISISRNGEAKNPVLREYYLKKCDSKPKLVAMGAVSHKVCNMIFAILRDNKSFEIITPQEHIKQYNASKCDMAA

SEQ ID NO: 41053 - protein, 361 aa, unidentified
MFTERTSVGLDVHARSVVAAAIDGGTGEVFRKRLTPGNDDVIGWVRSLPGPSAAVYEAGPTGFGLARAFTTAGIRCEVAAPSKIQRPAGDRVKTDARDAMLLARLLRLDDIVSVTVPSVEREAARDLVRAREDVRGDLMRARHRVSKLLLRQGIVYYGGHAWTGTHLVWLRKQHFDAPGLQLAFDAEHEAVLQAEARRNRLDKAIEAMAADSEYTPVVHRLGCLRGIATLTAFGLAVEIGDWDRLTGSSIGAYLGLVPTESSSGQSRSQGSITKTGNTHARRLLVEAGWQHLKPYRTPGARMKARWELAPAAARARGNAGNQRLHQRWMHFTERKKDPVIANVAIARELAGWCWSLAVMDP

SEQ ID NO: 41054 - protein, 353 aa, unidentified
MSEPAEEREVILGVDTHLDVHVAVLIDVVGRVVATTSVPTTALGYEQLIEWVRGFGRFTRAGIEGTGTYGAALARRVQEHGVQVLEINRADRSRRRLRGKNDPTDAENAARAVLAGEANAIPKAQSGVVEAMRAVGMARRSAVKAKTQAINQLRALLVTAPESIRATLWKVKPEHCVARCARLQSLGDTPLLKALTSTLRLLARRWMSLAKELHQLDAALAELTKRAGRRLLARFGVGPQTAATLLVTAGDNPDRLRSEAALAALCGASPLEASSGKTTRHRLNRGGDRAANNALWTISMVRMRSDPRTRAYVARRTAEGLSTKEIQRCLKRYIVRELYPLILADLADSVCLT

SEQ ID NO: 41055 - protein, 342 aa, unidentified
MIVIGIEPHRQTHTAAAVDGVSGQLLGELTLPASPEGAERLVGWVGRFGGDPLYALEDCRHVSRSLESFLLARSERLVRVPPKLMAAERRSDRRRGKSDAIDALAVARAALREQLPSALPDPAAREIKLLLDHREDLVGERTRLETRLRWHLHELELGLEVPQAALSRPLWQRRLASRLAGLEQTTLVVIAREQLLRISELTGRARQLEQQISRLVQRDGAALLALPGCGALTAAKILAEAGTVSRFHSDAALALHAGVAPLDASSGRQQRHRLNRSGNRQLNCALHRIAVTQARTYGPARDYIARKQAEGKTRREALRCLKRHLARVVYRALAATPTPALT

SEQ ID NO: 41056 - protein, 425 aa, unidentified
MSYRIAAVDVHKKMLAVVVTDVAGEGNYQFERRKFGATPGELHLLAQWLVQQEVEEVVMESTAQYWKPVWGALERYWKPARQKREGASKMCGTLHLCQAKSNHGPRGRKNDFADGERMIKRLVAQELVLSFVPDAEQRLWRTVTRRKHQLTRAKVGFKNQLESLLEQAHIKLSSLVSDLLGLSARRMLKAMAEGETDPAALAALADHRLRATSEQLRDALGACAQLNPVYRRLLKMALEELQLIETHIEQLEREAMDLLKEHQDVVQRVAEVPGFGIDSALQMIAEVGPKAAAFRSEKALSSWVGVCPGNEESAGESKSTRSPKGNRQMRRLLNQAAQSAVKVKGSILEVTFHRLLPRLGYKQAIWAIAHRLCRLLWLILHNGVRYEERGPAVSAKSKRTRAARMIKELQKLGYRVEGGPAGKQA

SEQ ID NO: 41057 - protein, 407 aa, unidentified
MVDTTGTDLFLGLDLGKEFHHAHGRTGDGRTVHDKRLPNTEPKLLELFTRLVAKFGTVLVIVDQVANIGALPLTVARAAGCRVAYLPGLSMRRAADLHPGEAKTDARDAFVIAETARTMPHTLRAIDRDDEVLAELTMLTGYDNDLAGEVNRTTNRLRGLLSQIHPSLERVLGPRLAHPYVQALLARHGSPARLKKLGRTRCEALLKAHGSRKAHHLSGEIFDALAEQTLVVPGTEASALIVPGLAAQLAAAHTQRSQAEQEIAALLEALPLFHLLTSLPGLGVRTTAAVIVAIGDGTGFPTAGHLASYAGLAPATKSSGTSIRGEHAPHRGNRLLKRALFQAAFAAIGCKSDPSLRIYYDRQRARGRTHTQAILRLARQRVNVIHAMIRTGTLYEPRTPDDVGLAA

SEQ ID NO: 41058 - protein, 318 aa, unidentified
MPSFLGIDLSKETFHAFLLGDRADAKKVFPNTPKGFEQLTTWLKNRHTDEVHFCMEATGAYWEALALYLHGLDQHVSVVNPARIKAFAQSELLRTKTDAVDAALIARFCKSQSPEPWVPPSPEIRVLQALMRHCDHLKKTRAQQSVYAQSSDSSVVTASIREVIATLDEQIVQVERTIRQHFDEHPDLKRRRDLLTSIPGIGETTAGSILSEIPHLDRFESAKAVAAFAGLSPRERQSGTSIHGRPRMCKTGNARIRKALYLPAMVAIRFNPTLRLFGERLSAAGKHKRLINGAVMRKLLVLAYGILRSGVPFDPNYA

SEQ ID NO: 41059 - protein, 379 aa, unidentified
MKQIVSVGIDVSKGKSTVCAMIHPNTIIKESFEVLHTVEEMSMLADYIGSLDGEIRIVMESTGHYHLPVAQFLYQKGFFICVENAYIIRQFSRIMLHGAKTDPLDAKKLAKYGLAYWSELKPYKFHPSCYTELSLLSKQYQTYIKLLIAAKQNVIHLMDEMLPGFKEALDTASSVQFSKVKYVDFAKEFYHVDMIKSMGKEIFRENYKQWCKEKGYRFQSEKADELFHLAEDGIPTLPTEFPSTRLCMEVATEQVSQLGYALEQILSQMQNLAKTLPEYQTIRQMGGMGEKLCVRFIADIGDVRRFHNGKALVAYAGIDAPPYQSGQYTGTKRRISKRGNSALRKTGYEVMKSLKSHPPKTDTRVYDLSLIHISEPTRH

SEQ ID NO: 41060 - protein, 343 aa, unidentified
MESYVGLDVSLEKTSICIVDGSGAVIKEGEVRSDPDEIARFVRAHASSVQRIGLESGPTSTWLWRELDQLGLPAICIDARHAKAALSMQINKSDRNDAIGIARIMQTGWFRKVQVKSERSHAIRGLLNSRALLVRMLRDIENQIRGLLKNLGGVIGRAKQGVFTRRVRELLDERPDMTFIIEPLMNARDDLARHLGEVDRTTKKLARLDHQTRAFMTVPGVGPITALAFMAAIDDPTRFRRSRNVGAYLGLTPRRHASGEVDWSGRISKCGDKIARSYLFAAAGVLLTRIGKWCKLKAWGMRIAKRSGGKKARVAVARKLAVLLHRMWRDGTTFQWNEEKHAI

SEQ ID NO: 41061 - protein, 458 aa, unidentified
MSRNKSTDTVRRTMAVVHPNAAAIDVGATMHMAAVNADRTPEPVRSFGTFTTDLHRLVDWFAECGVETVVMESTSVYWIPIFELLDARGFAVFLVNARDAKHVPGRKTDVSDAQWLQRLHSFGLLRASFRPKGQIAELRAYLRQRERLLEYGASHIQHMQKALTEMNVQLHHVVADITGATGLRIIRAILGGERDPAVLARMRDSRCHATVETIEKALAGNYRAEHLFALEQALALYDTYQQKASACDARIEAVLKELSARRGREAGPLPSPRQNRSRQQNSLLFDVRAALFALLGKDLTQINGLGPYLALKLIAECGDDLSAWPSAKHFTSWLCLAPSNKISGGKVLSSRTRRSGSRAAALLRLAAATVGRTDTALGAFYRRLSARIGKAKAVTATARKIAVLFYNAVQHGMEYVDPGASSYETRYRARVIDNLHRRAKAFGFVLQPINPTPGIAVS

SEQ ID NO: 41062 - protein, 328 aa, unidentified
MYVLIGVDPHKHSHTAAVLDQRGELLAQQRFPASREGHRALRRFAKRWPQRRWAIEGAAGVGRVLAQQLVTNGEQVIDVPAKLAARVRELSTGHGRKHDTGDAVSIALAALGSQRLHQVDVEDHATVLRLLSDRRDDLVATRTQALNRLHRLLAELVPAGADRHLTANTAAVLLRRLRPTSPPAKARRQLAVDLVRDIRALDQRITTVQQRLQAAVTQSNTTLVELVGIGPVLAAKFLGEVGDIGRFPTKARFAAHNGTAPIEASSGQVVRHRLSRAGNRRLNHALYLMAIVQLRHPTAGQTYYRRKLAEGKSPKEALRCLIGRVSVL

SEQ ID NO: 41063 - protein, 391 aa, unidentified
MTYFIGIDIAKYKHDCFIMDQDGSVIRDSFSFSNDSAGFCLFLSVLDSLDPSYEKRIGFESTGHYGLNLKCFLEEHDISFMEINPILIKRFSSATTLRRTKTDKADAALIASYLTTVEYITYPIQSYHIHNLKSLTRSRDALVKLRSGQLVMITNVMDKIFPEFKPFFNKSLKSSTAMYLLRNYTVPSKMASMNSESYRKMSSKLKKTISYARFSKLRELAKNTVGREDPCLTFELNTYLDIYQSLDFKIKEMEAHIEEEFKKIHSHIQTIKGIGWMSAASIYSEYGGIENFQTPNQMLAYAGLDPSRSESGEHAYKGHMVKHGSSHLRYVLLNCAEMVILHNPVFYDYYRKKREEGKHHRVALSHVARKLVRIIFFLEKNNVDYDPKKMR

SEQ ID NO: 41064 - protein, 480 aa, unidentified
MNVKATRIKKQVNVENQAIKLLSKEELGIKIEVIKKELRSYTWRDLETNGKFAKNDKLSFITDDMLIAGCDIGSETHYIRAIDVRGRELSSGAFEFSNTSEGFANAKAWVLALAAKNDKKQIVLGLEPTGHYWFALAAWMVSNGISVVQVNPYAVKQSKEIEDNSQLKDDRKDPKLIANLVKDGNYGMPYLPEKVYADMRRLSMFRDQLTEDRIRNINRLHRELKIYFPEYMDAFGKIDGAFTLEVLKVSAIPSDITALGAEGIKNIWHNEKLRGRGYSRANEIVSYAEKSVGLTDGTDAGRETVKWYAEQILKLDEQLAVIESTLHEKCREIPYAENILEIRGVGENILAGILAEMGDISRFDDVKEIQKLSGMGLVACSSGKHKGQTKISHRGRKRLRYWLFQAAKSAVSHADEFKQLHEYYTTRTNNPLKKMQSLVVIACKILRVSYTILKTGTTYDPQKLLKDIKRPTASQAPMAA

SEQ ID NO: 41065 - protein, 443 aa, unidentified
MKELSLEIFNPHCAGIDVGSRFHQVAIGQKKEHIRRFGIYTEDHRLLIEWFKEKGITSVAMESTGSYWQTLFDALQNAGFEVILVNGNQIKNVKGKKTDVLDCMWIQKLHSLGLLSASFLPNSELQKLRTYYNHRQYLVAQTSKYSNKMQKAMRLMNIRLDVALNDIMGKSGRNIVQAILSGERDPRKLSLLADYRVKKSKEEIAKSLEGNWREDLLYELKECLFLYDVYSNKIRECDQHINDRMSSLSNQYPEVNFNEKKKKPASKFSPEFDIEGIAQRYFGVNLFEIPGVSHNTVLCFLTHMGHDIYKFPSNKHFCSWLRLSPNNRISGGKILSSRTPKGRNKVALALRQAANSVGNQKKHPMTSFFRKIAFKKGRGAAVTATARKLAVIFYNMVTKKESYKPFDHQNESENFKTKQIKKIKMKLFAMKLGAEELKNIFEV

SEQ ID NO: 41066 - protein, 360 aa, unidentified
MRKRLSKKESWFKENNFTAEDEIYVGVDVHKVHYHISIWHNGRIGCVYSMLSDNNKLLRDLKRIRGSLKNIVYEAGPTGFALVRLLRSANLPAEVVAVSKTPRMADTSAKTDSLDCQQLAEYAAKGLLTFVAIPTEQQEADRQVVRLRDQLTSKRKRIMHQVKSFLLQHSISWPGGNWSKILIERLRQLDISSELRFTLAQYLDEYEFFCSKITETEAKLRHIFSSKRHSAAIEIFKSHPGVGNIVAWEYRAEMFNITRFSESKQISKYTGLCPRVSQSGKTCHQGPITKTGRRQLRAMLVQAAWAWYRRDPHARQIYNRLLHNTGNGKKAIVGLAKRIAIHLWRMRCDGCLYDANIVKG

SEQ ID NO: 41067 - protein, 391 aa, unidentified
MIFVGIDVAKDKHDCFILNSEGTVLADVFTIANNRIGFETLLSRIQSCSQGESKIKVGLEATGHYSYNLLGFLLDSGLATYVINPLHTNLYRKSLSLRRTKTDRIDARTIAMMLMSDVDLKSYSNTAYHNEELKSLTRYRFDKVKERAKLKSSVARLVNILFPELEKLVSSLHIAVVYALLSTYPGASYIANANTEELAETLCTVSKGRYTKSKTAEIQVAAGVSIGSKMPAKSMELKHTIALIRELDKEISEVESAIDKITSQMDSPTFTIPGIGRHMGAMILAEVGDFSNFASADKLLAYAGLSPSTYQSGQLQNCYAHMEKRGSRYLRYALFNAAKYVCLWCPTFSAYLEKKRSEGKHYNVAISHAAKKLVRLIFAMQRSGKAFLADY

SEQ ID NO: 41068 - protein, 422 aa, unidentified
MSDFLSAPLALFYVGIDWAAKTHAVCVLDDTGRVKSRFTIAHTADGFADLIRRLGRLGECVDVSVGIERPDGRLVDALLEAGHPVVPVSPNAIKAWRDGEVISGAKSDAGDALVIAEYLRLRQHRLRVATPFSDQTKAVRTAVRTRGDLVEMRVAATNQLSALLDMHWPGAKTIFADVESPIALTFLSRYPTPASGARLGEKRVAAFCAANGYSGRRPAAELLTRLRAAPAGTTSPALTDALKHAVLAMVTVLSALNAAVKDLDRTVVAHLGEHPDGQIFTSLPRSGQINAAQMLAEWGDCRQAYDSADAVAALAGLTPVTKESGKHRAVSFRWACNTRFRVAMTTFADNSRHASPWAADIYNRARAADKDHPHAIRILARAWTRVIYRCWLQATPYDPARHGNATALAARPAAATQTVVAA

SEQ ID NO: 41069 - protein, 373 aa, unidentified
MKDNTKFVGLDVSKERISVAIAEVGRGMPRYYGVIPNTPEAIRQLIKKLGNTENLQVCYEAGVTGYGLYRLFLKLGIECEVIAPGLIPQRPGDRVKTDKRDAIRLAQLFRAGELTSVYVPTEEDEALRDLVRAREDAKEDELRAKHRITKLLLRYSISPPKEVGKNWSYKYRKWIQTLTFKHSALSVAFQEYLQHINEIEERVKRLEKEIEQQSTQGVHAPMIQALQCLRGVALITATSLVAEIGSFQRFQSPKQLMAYTGLVPSESSSGDLRKQGSITKTGNRHVRRLLIESSWSYRYQPAVKGKLKKRIDGQPGSIQTISWNAQQRLHKKYFRLLLKGKSSGTAVTAVARELAGFVWAVAQEADEQTTSKN

SEQ ID NO: 41070 - protein, 347 aa, unidentified
MKYIGLDCHKQYDHATMIDTETGEIKVKKLAHIKEDFNDFIGDRAGTRMVIESCRDWSRTYELSEDLVEEIILAHPLKVKAIASAKIKTDAIDSRTLAQLLMADLIPQAHLRKRDNRVKQRVIRHRASMVVMRTRVKSRIHDLVDSQLLPPDVLKAKPRSLFSKKGMKWLTSLEWAKEEDKKIVESHLRVMEAINHEISITNDMVKQIYEKDRDAQLLATIPGIGVILAMLISTEIDGIERFSSVSKLCSYAGLVPSTHSSGGKTYHGKITSEGNRWLRWALVEAAVPASYADAEIKERLDIFRKKKSANVAKTAIARWLLKVVYHVLKERRPYITAYKTAKVGAAF

SEQ ID NO: 41071 - protein, 423 aa, unidentified
MNGNLDPAAFLEQFKLFVGFDWANDEHDLAVLDPSGKFIVDLTFQDTAEGWAVLRSKFVELAGPDLSKVAVAVETCNGPAVERLLAMRCRIYPLNPKAAKRYRERKVVSGAKSDRMDAWSFADALRTDGHGWKELIPDDPLTQELRILCRDEVCLIGQRTALVLQLTAALREYYPAALEAFETWTCPGTWAFVQKFPTPKALVAAGKRRWEKFLHTNRLCHKQTYQYGLDVFAKADQFAGPEPVANAKSRLALTLVAQLSVLEKQLQQYRKAIEDLFGRHPDRDIFGSLPGAGNKTAPRLLSEIGSIRRRFKDAQALQSYAGTAPVTMQSGKSRHVRFRRACNKYLRSAVNFLADNSRGQCAWAQAYYQHKMEQGMTRSCALRNLGQRWLKILWKMWQTNTSYNEALHAQNQVKHGSWIIQPG

SEQ ID NO: 41072 - protein, 343 aa, unidentified
MNEISIIGLDIAKNVFQVHGIDCSGEPVVRRQLKRGRVLGFFGKLSPCLVGMEACATSHHWGREIEKLGHDVRMMPPRYVKPYLKRNENDAADAEAICEAVQRPTMRFVPIKSPVQQSVLMLHRTRQLFVHQRTTLINAIRAHMAEFGIVAGVGRNGVEALLKIVAGSSDERIPPAALECLMALATQLELMKRQILEADRRVLAWRRSSKVSKWLEAIPGVGPLIATALAASIPDPGAFRSGRDLSAWIELVPKQNSTGGKERLGNISKAGNRYLRKLLVIGALSVIRRAKILGYTKHPWLVRLMEWRSTMIAAIALANKIARMAWAMMARNESYKTPLAQPA

SEQ ID NO: 41073 - protein, 345 aa, unidentified
MPIVGGFDIHRKQLTFDYLDTATGEVKRGQIAPADRAHLRAWLVRFAGRDDVAFALEGCTGWRYVAEELARAGVAAHVAEPADTAFARGRKRHAKTDKTDSRHLRQLLADGRLPECWIPPSLILECRALLELYHDLRAEHTAWVQRIHAVFFHQGAPALGQAALRTGRDLQAVRAAAACHLSPAGQLQVDTALEITGALEARLEVVRHRLLDAARHLTGAKVLAERLYGVGPATALAMTCWLGGADRFSSSRKAVRFAGLDITVWSSDRKGPPGRLSRQGPEVLRWAVYEAGKTHARAPAPDHAYYAQVKDRKDGKRAAISEARKILRQACHILAELGDDALTAA

SEQ ID NO: 41074 - protein, 372 aa, unidentified
MDVEGTRSVGGSIGVQEVVVGVDTHLDVHVAVALDQLGRRLGELTLPTTRRGYEKLLGWAEGMGPLRCVGIEGTSSYGAGLARHLVAAGICVLEVDRPKRRQRQRNGKSDPLDAEAAARAVLAGEAVGQPKSQEGRVEMIRALRSARRSAVKARTQAANQLKALLVTAPDELRHGLRGLSTRELVAVTARFRPPDDLVDIAAATKFALRSVARRYEALSREIAELQGQLGRLVAAVAPDLIALPAIGTNHAATLLVAAGDNPERLKNEASFASLCGVSPVEASSGKVVRHRLNRGGNREANCALHMICVVRMGMDQRTREYVRRRTAEGKSKSEIMRCLKRYIAREVYHSLVPAAQGRTGSRARTAVVTRHV

SEQ ID NO: 41075 - protein, 402 aa, unidentified
MTAGIDWARDDHAVAIVDARGQQIVRATVEHSDAGLRGLLRLLGKHGVGEVGIERPDGPVIDTLLDAGLTVVVISPNQVKNLRGRYGSAGNKDDRFDAFVLADTLRTDRAWLHPLTPDSPATITLRRVCRARKDLIAHRVGMANQLREHLKRVFPGAVGLFADIDSPISLAFLDRFDCQDRADWLSAKRLAAWLASVGYSGRTDPAVLHARLIGAPRGVTGEHGTAESHVTRALLTVLSTLTEQIKVLSAQIDEQLSLHADAHNFTSLPRAGRIRAARLLAEIGDCRARFPTPESLACLAGVAPSTRQSGKIRSIGFRWSCDKQLRDAVCDFAGDSRRANPWAADLYDRAIARGHDHPHAVRILARAWIYVIWHCWQDGTAYNPDQHGALQRLIQSRNATAA

SEQ ID NO: 41076 - protein, 327 aa, unidentified
MCVVNEVGQVLFEGKAKSDPGALAALLRKRAPRAERIGFETGAMASWLWHELRRVDLPVVCIDARHAHAALSVRMNKSDQNDARGLAELVRVGWYREVKVKSEESQKIRAILVARSRLVAIRRDIENQVRSLIKEYGLLFPRAIGKQFRNQVSELLGEDHQLLGVIAPLLSIHEHICEQQSKFDDEVRRLAKSDEIARRLMTVPGVGVVTALTFRHTIDDPSRFRSASTVGAYLGLTPRRNQSGETDTSGKISRWGDRLLRSYLFEAATVLLYRTKKWSSLKAWGMKLAKRIGVKKAKVAIARKIAVILHCIWVDGTSFDWGQAKPA

SEQ ID NO: 41077 - protein, 349 aa, unidentified
MAESRFSYTGERVYVGIDVHKATYTVTCVCQRRIVKTATVPADPASLAVSLPRWFPGATLSAAYEAGFSGFVLHRTLTQAGITNIVVNPASVAVAANDKVKTDRRDAKKLAIDLADGRLRGISIPTEAEELARLLPRTRAQIVAHRATLTRQSKAKLHQFGLLPPGSRRLMRRRYVREMAAWSLPPELQASLTLLAEQWRFATRQLLEMRRLLRRQAQAQEQIEKVYRSVPGIGEVVARTLATELGDMSRLTNERARFSDTGLTPSAYSSGASMRRGHLSRQGVSRLRPVLVETAWRALPGDPILHAMFERIAATRGKQRAIVAMARRLIGRIRACCRHGTTYAVGTAG

SEQ ID NO: 41078 - protein, 441 aa, unidentified
MAKRKVRDGLSENDSVIVTEDNEVYYERCAGIDVHSGLFTVCLRIGRRSEIREFGTTTGEIRVLCAWLKDSGCQMTAMESTGSYWKPLYNIFEQEGIPAMVCNAYHIKNVPGRKTDIADARWIARCLREGLLNPSFIPDREQRELRDMTRFLKSQTEERARNINRLQKFLEGANIKLSEHVSDIEGMSATELLDLVIGNPDFTLEDVRSLMHGNMKSTPEQLFASLQGYVTPIQRKFFVHVMHIIREQTRQIEETKALIDSILSDDYKSAIAALDKIPGIGEASALTIVAETGTDMSHFRNQHAFSKWAGVAPGNNESAGKAKKAKTTPGNKTLKSTLTQSAKTAARNKRSFFNAQYHRLVSHRGKNRATMAVAHSLAIAIYFVLSGQEFKDLGSDYYNLFNREKKINSHIRQLSKLGVSIYFSDDPIERAIEKPPDNSVA

SEQ ID NO: 41079 - protein, 363 aa, unidentified
MFTERTSVGLDVHARSVAAAAIDGVTGEIQQTRLTPSHEHIRSWISELPGPVAVAYEAGPTGFGLQRSLTEAGIRCVVVAPSKLQKPAGDRVKTDARDALHLCRLLRLDEITSVSIPSVAQEAARDLVRAREDCRGDLMRARHRLSKLLLRHGIVYYGGAAWTGAHDQWLRTFAAPQLRTPATRMAFDADYDHVLTMQARRRRLDAAIEEMAADGEFTAIVRRVSCLRGVNTLTGFALAVEIGDWNRFTGNTIGSFVGLVPSEYSSGSSRAQGPITKTGNTHVRRLLVEAAWHHKPRYHVGAVMRSRWDRASAAARARGDEGNRRLHGRWVGFLERRKRPVTANVAVARELAGWCWSLAVMDD

SEQ ID NO: 41080 - protein, 357 aa, unidentified
MRFYTNQHPFYCGIDLHARSMYVCILSQEGEILLHRNMNAAPEAFLKAVAPYREGLVVAVECIFTWSWLADLCAQEGIPFVLGHALYMKAIHGGKVKNDKIDAQKIAALLRGGMLPKAYVYPAQRRATRDVLRRRTHLMRTRAELLGHVHNTNSQYNLPEIAKKIAYKANRDGVAERFEDASVQKTIEVALALITYDDELLKELELCILKTARHHDPQTLYLLQTVPGIGKILSLVLLYEIHRIDRFPSVQEFASYCRLVKGSKESGGKRLGTSGKQIGNAHLTWAFSEAATLFLRNNPQGQKLLARLEKKHDKGKALSPLAPKLGRAVYFMLKRTVAFDMNLFLQSSGSRAAEPGA

SEQ ID NO: 41081 - protein, 384 aa, unidentified
MHQATTLPERTCSRGDCATLFVSLELSRSTWVATVLAPGSSKMSKYTLVGGDGHKLLALLARLKSRAEQRIAAPVKVVAIHEVGLDGFWIHRLLEANGVESHVVDPASIAVPRRHRRAKTDAIDGETLLRTLMAWQRNEPRVCAMTVPPSPSEEDHRRISRERATLLQERVRHTNRIRGLLFGQGITNYNPLHKNRRENLEALRTGDGRSVPAHLKSQIRREIDRLELVLRQIGEVETERDEMLLLAQPSSPAALLMRLKGIGAEFATVLYLEGLFRHFENRRQLAAYAGLAPSPWKSGSIDQEQGISKAGNPRLRTTMVELAWMWVRYQPASALSCWFRQRVGSERGRIRRISIVALARKLLIVLSRYVSHGEIPACAVMKAG

SEQ ID NO: 41082 - protein, 427 aa, unidentified
MAYRIAAVDVHKKMLAVVVADVAGEGEYQFERRKFGATPYELHVLAQWLVQQEVEEIVMESTAQYWKPVWGALERYWKPARQKREGASKMCGTLHLCQAKSNHGPRGRKNDFADGERMIKRLVAQELVLSYVPDPEQRLLRTVTRRKHQLTRAKIGFRNQLESLLEQAHIKLSSFVSDLLGVSARRMLKALAEGETDPAVLAALADGRLRATPEQLRDALGASARLSGVHRRLLKMALEELQLLETHIEQLGQEAMDLLQEHQEVVQHVAEVPGFGPDSAVQMIAEVGPRAASFQADKKLSSWVGVCPGNEESAGESQSTRSPKGNRQMRRLLNEAAQSAVKVKGSIFEVTFHRLLPRLGYKQAIWAIAHRLCRLLWLILHKGVRYEERGPAVSAKSKRTRAARMIRELRKLGYRVESVPLPAVLRV

SEQ ID NO: 41083 - protein, 356 aa, unidentified
MANSNRLDFTGQPIFIGLDVHKKSWSVSIHSAVCEHKTFTQPPEVDILVNYLRRNFPGATYRSVYEAGYSGFWVHDQLVEKGVACTVANPADVPTKDKERRTKRDRIDCRKLARSLRAGEIEGIYVPCRKNLEDRSLVRTRQSMVRKQTRCKNQIKGILFFYGIPLPEDWAERRWSGPFVRWLETLPMERASGEVALRMHLDELKHLRQILARLDREIRLLAQTGEYGVQVRLLKTIPGISTLTAMILLTELQKISRFRSLDELASYVGLIPDTRSSGETEHTGELTKRRHAQLRASLVEAAWTAVRKDPALLMAFQESCQRMRKTRAIVKIARKLLNRVRYVLKNQTPYRMGVVQ

SEQ ID NO: 41084 - protein, 344 aa, unidentified
MDHFGGLDVSVKETSICIVDDTGRIVKEVKVASEPAALLKVLGNPTYRFKRIGLEAGPLSQWLFSALAEAELPVICVETRHMQAVLKAQINKTDRNDARGIAQMIRVGLYRPVHVKTLRSQKLRMLLTHRKLLQSKAIAIENDLRGTLRNFGLKVGMVGKVRFEARIQELVENIPDLAVLVEPLLIVRRVLREQIVVLHRRLLAIVREDEVCRRLMTTPGVGPVVALTYRATVDVPARFRKSKSVGAVFGLTCSRYQSGEIDWSGKISRCGDEMMRTMLYEAAQSMMHSKKWSWLKAWAMQIARRRGMKKAIVALARRLAVIMHRIWVDGTEFRWTREQAAAAA

SEQ ID NO: 41085 - protein, 307 aa, unidentified
MNGIGIDVCKAMLDVAVHRGPFERFHNTPAGHRKLLSWLATQQAGQVVLEASGGYEQQMLDALFDAGHQVVRADAYRCQAFAAATGLPAKTDRLDATNLACMAATLELRAYQPMEPWRRKLREFVRARQQLVDLVTSAQNQLEQGMDTSLRRLLQANITQMKKHCVRLEKHIAEQVRQQPQLEAMRSFKGVGAILQAVIASYLPELGTLDGKAIAKLVGVAPIAHDSGTTRGIRRIGGGRIEVRNVLYMACLSAIQHEPRIREFYRSLRARGKPGKVAVVAAMRKMLVILNARARDALAGQAQAIPT

SEQ ID NO: 41086 - protein, 327 aa, unidentified
MAPAYLGIDIAKAKFNVCLLQANGKLKHKVFLNSSVGFQQLSTWLQRHQQPQVHACLEATGTYGEALALYLYEQGQCVSLINPAAIKAFAASCLSRTKTDRVDAELIARFCQAQQPPAWRPPAAEVRELQALVRRLEALIEMRVAEENRLAAGPAMPAVQTSLTQMLNFFLNQTATTEKLIRQHLDQHPDLRQQRDLLTSIPGIGETTAALLLAEVPHLKQYRSARQLAACAGLVPRERQSGSSLKGRVRLSKIGNARLRKGLYFPAVTALRCSSFFQQWASGLRERGKCKMSVIGAVMRKLLHVAFGVLKSGCPFAPELDQRVSLS

SEQ ID NO: 41087 - protein, 383 aa, unidentified
MKSVCGLDVHKDSVYLCILSEFGELIEKVFGVLTFQLEEMRDLMLHHHVVEVSMESTSVYWIPIWRVLSPHFKLNLANPYFIKQLPGRKSDVKDAQWIAVCTMKELIRGSFVPPEIIQQLRQYDRRIFDLNEEIVRKLSKLDAVLQRCNIRLSNYVSNVDSKNYKAVVRAISQGITAPEELVRLIHGRIINHHGIDVITASLKGVVSLAEIDMISQLRDELDMAEAHKEKCQARMLEICEREFPEELKRLQTIPGIKERAATSLIAEIGTDMNKFETANHLASWSGLKPRNDESNKKIKSRSITHGNVYLRKTIIECAWAASRTKDSFFSWFLYHQTQVRKKNKMKVLVAVARKMLIAVWHVLHDNTNYIDFTTDRKTSPTRG

SEQ ID NO: 41088 - protein, 353 aa, unidentified
MTLYIGVDLHPHQQTVAWCDTRTGEVETLDMGHDLEQVRRFYSSLPEPATVGIEASARVVWFEDMLFETGHKLFVGNPVLIRKRATSRHKNDRRDAELILELLMRDEFPAIWRRPRESDQVLNILALRHKLVRQRTQIYNRLQALAHSVGLPKGRIKTKKFREMLESVEMNEAARLARSQYLGLLCSLGERITELEQWLTAKAESNESIQLLQTQRGVGYLTALVTVHTLGDVSRFKKVGKAVVSFAGLDPLEKSSAGRVRFGSISKAGSPLLRYHLGQAAQIACRYDSKLKSFHKRLAKKKPKGVAKTAAARKLLVKLAIMLRDNISADEFDRRGRTVGNARLIQWPEMAVI

SEQ ID NO: 41089 - protein, 433 aa, unidentified
MEEVTDEPLYRDRVCGIDIGKAELYATIRVPSDTHPRRRMSETRAFATTRRGMLALADWLRCWQVPAAVMEATSTYWMGPFFRLEAEGFECVLADAKQVKNLPGRPKRDPSDSSWLAQCFERGAVRPCFVATKEFRVIRLHTRYRRDLINERTREKNRAEKLLETAAIKLSSVITDLHGVTGRDIMGHLIAGERDPKVLAQLARTRARAKITELQHALEGAEFFTGHHARLLKTMLERIDQIDAQISDLTAVTEELLAPYEEQLQQAESMPGWGRRSAEDAVAETGTDMTRFATGGHLVSWAGRAPLDKQSGKRKGPARHKKGNTYLGGVLGETAVCAGRTQTREGARYRKLARSRGKNKACVAVGNTQLKVYHTLLSHPGMRYADLGPDYYQRRAQTRRTIDYHVRELEALGLEVTLCRLPEPGQAATTPAA

SEQ ID NO: 41090 - protein, 454 aa, unidentified
MPGSKTTRGKSSGRLSTINPDAAGIDIGSTSHVVAVPPDRDDEPVRTFQTFSGDLHRLAAWLREVGITTVAMESTGVYWIPVFELLEAGGFEVLLVNARHAKNVPGRKTDVNDAQWLQQLHQHGLLRGSFRPRDGVVGLRAYLRHRERMVDYAASHIQHMQKALMQMNVQLHHVVADITGVTGLRIIRAIVAGTQAPETLAAYRDVRCAASEETIREALTGNYRAEHVFALRQALELYDFHQTKIAECDVEIDAVLRTLNAERAAPDEPLPSVRHAKGRNEPKFDARPALYTLLGADLTQIHGFGPYTVLRLVAECGDDMRKWPTAKHFTSWLSLAPGNKISGGRLLSSKTRRSSNRAAALLRIAAVNIGRTQTALGAFYRRLAARIGKAKAVTATARKLAILFYRALRFGITYADPGASYYEERHRQRVIHNLHRRARELGFSLVANAASGVS

SEQ ID NO: 41091 - protein, 403 aa, unidentified
MNSVGIDISKGRSTIAVMRPFGEVVISPFEVRHTDSELSKLARRLKSLNGETRVVMEATGNYHAPVAKLLHDAGLYVSVVNAKLVHVYGNNDLRRVKTDRKDAVKLANYGLDRWLTLPRYIPEEDTRLLLKNCYRQYRQYSKVQTILKNNLISLLDTVFPNVNRLFSSPARADGSEKWVDFVAEFWHCRCVSEKSEKVFTNKYQRWCRKHGYNFSEEKAHTIYVEASGHIGVMPKSETTKLLVEQAVAQLRATSAALAALKHEMQSLASMLPEYPVVMDMFGVGPTLGPQLIAEIGDVRRFYSKKALVAYAGLDAPPNDSGDVTGRHKSMSKIGASSLRRTLFLVMSVYLQNAPLDEPVYQFMDRKRAEGKPYRIYMMASANKFLRIYYATVKAYLESLEHTA

SEQ ID NO: 41092 - protein, 432 aa, unidentified
MDHRLQVGIDFSQKRADFCLLFPDGRSLESHTAVDNSFLGYSLAKQLLLDALDSYSFDGIDVSGEATGYLWLPFFLELAADPDLELHDLKLYLLNPRWVKWFKKCFAQDDKTDERDPFYIAERTRTRRPDVTWSAYPRSLALRFYTRLRFHLVQNLAREKCYFSTFLFLKASSYRRLKPFSDVFGVTSRLVLSQQPSLDELTALPVEDLAMQLHEMSGHHLRDPFKNARKLKQVSQESFPLDEHLTLPVQRILDLTLEHIRFLEGQVEQVDCWIASEIQAHPSITQLATIPGVGPVFSSGIGAEIDDTQRFLQGHKWDKKHKRHRPRNLRDAEDAVAKIADLWWPRSSSGDFEAEDRRMAKTGNRYLRYYLIQAANLMRRRIPEYTKFCDRKYHEASKHHHKRALVPTARKSVGLVVGLLHRNEPYRSLEHR

SEQ ID NO: 41093 - protein, 349 aa, unidentified
MRKLMAGMDLHSNNVVAGIVDQDGKRIAHQKLDCDLGKIIAFLKPFKKELVKIAVESTFNWYWLVDGLKAASYPVVLANPAKIDQYSGIKHADDKNDAFFLAELCRLEILPTGYIYDPELRPVRDLLRRRLSLVHQRTALMLSFESLFARTTGEKMGLGRLKKLDVPAAQKLYDHPANQLIAGVQMKHIEQLTESIEQIEKVVIKAAKQLPYYAKLQTLPGVGIILGITITMEVGDIKRFKDAGHFASYCRTVDSKCLSNGKKKGENNHKCGNKYLAWAFVEGANFAKRYDEDCRKWYDRKAAKKGTVIATKALACKLAKAAWYLMAQGVDYDRNRIFPELAGALSKRR

SEQ ID NO: 41094 - protein, 388 aa, unidentified
MIYVGIDIAKLNHYASAIDSDGVVLIEPFEFLNDNAGFYTLLSKLNSFELDDIIIGLESTAHYGNNLVSFLVTKGLHVCVINPIQTATLRKNNIRKTKTDKVDTLVIAKAVALMDHPRFVTLYNIALMQLKNLGRFRMKLVKQRSRTKIQLTAYLDQVFPELQYFFKSGIHQKTVYAILKEAPSATRIASMHLTHLKNLLVSNSHGHFKKETALELRVLAQKSVGTADRSLSIQITQSIAQIELLDSQLDAVESEMKDIVTSLDSVIMTIPGIGPINGGMIIGEIGDINRFSKPRKLLAFAGLDPSVYQSGNFIAKKTKMSKRGSSALRYALMNAAHNIVKYNQTFKEYYDSKRAEGRGHYNALGHCAGKLVRIIYKMLKDDVEFNLD

SEQ ID NO: 41095 - protein, 336 aa, unidentified
MDTIKAFVGIDVSKKKLDIALLRNSQVKPKAIPNTAAGFEQLEKWLVFQKVDLALVWICFEATGPYSDSLATWLDDHGFRVSVVNPARIKGYAQSELVRNKTDKSDAATIARFCQSTKPEQWHAPSAQIRVLRALVDRLDELKQTRQQELNRIEAYQSQQQGRLIDGVQKHIDWLSAEIDKLQSEIDDHIDNNPELKKDADLIQTIPGMGSISTAKFMAYVGDISRFDNAKALAAFAGVTPRNRRSGTSVRGRAMISRMGNAQLRTALYMPGLVARRHNPTLKVFADRLSERGMKNKAVIGAVSRKLVHIIFGVIKSGVPFDPKLGQVPLASQDGI

SEQ ID NO: 41096 - protein, 435 aa, unidentified
MAPNKGKGDCRMHEEQRWFVGIDWASKEHVVSLLDYGGRKIGQRKVAHGGAALAEMIAWLLKASGGEPGEIHVAIETPHGPIVEALLERGFNVYSINPKQLDRFRDRFTVAGAKDDSLDADVLGDSLRTDMRLFRKLSVAEPVIVELREWSRINEQLKRERIRLTNRMRDQLWRYYPQILELVDDDLAADWLLALWELVPTPEKAARVRETTIARVLKKHRVRRFDAAHVLSELRKPALTVAQGTIEAATAHIRVAIEQLRFIDRRITDTERQIDRLCEKLAEPVAGEDGVSARGQQLEQRDVAILDSLPGVGRIVLATLLTEAPEALQRRDYHALRTLSGAAPVTRRSGKSRVVLRRYACNRRLRNALHNWARVAIQRDATSRAKYDALRARGRGHARALRSVGDRLLYVACAMLKSGTLFDPSLASRKNAVGS

SEQ ID NO: 41097 - protein, 328 aa, unidentified
MLTPSGFMRTHTQKASAKELFEHLNKHYPNGSYHAAYETGFSGFSTYYALTELGIKCTVVHAADVPTTQKEKVSKSDPVDSKKLAKALMRGELGSVYIHSKDSLDDRALVRHRATIVKLSGGIRSRIKHLLYNNGVEYPEEYFRSNRHWTRSFITWLQNDVRLLSDTRVSLDLLIAEVLHYRERLLDVNRRLRSLARSDRYAEKYGILMSVPGIGSTIAMSLLTEIDDIGRFSNQRQFASFLGLVPMMSSSGDKEYVGEKTFRGNKFLGPKIVEASWIAIRHDAELSAKFGALCPRGMKAQEAIIRIARKLSNIIFSVLKSNRRYECR

SEQ ID NO: 41098 - protein, 414 aa, unidentified
MSKRYTTLEAAILVAVDIAKDHNEVLIELRHNQRRRFRVANTLEEYERLVAYVRQFDTPALVGFEATGNYHRPLAYFLHARGFELRLIPTMALARTREAMHNSWDKNDPKDAQVILHMLKTGLSQTWHDPLVSGTNDAQELSKTHHQVTLARTRVWHRLRNHYFPLYFPEIEHFIRSDHSDWLIQLLLRFPTPGSITSLAAENFAAQAWSLVGRKVHQAALLAEIYAAAQRSIALPVPPDGAAVAMLRLVLEEYLMLGRMRESIAQQAEIILASNADRRRLMTVPGVGPLTALTILAEAGDLRRFEHYRQFLKFCGMSLSTQQSGRFRGISRLSKYGNARLRTAFWMAAKTAVRMRENSLRRKFDRYVRANPLDADLRRKGYSAVAAKLARIVYGLIKNGTDYRPFFEEAIPGG

SEQ ID NO: 41099 - protein, 323 aa, unidentified
MDNAEPKVWVGVDAGKEVHWAHVLDASGTQVLSRRVENDEADLSLLIDEVLALSEEPLWAVDQPGGSAALLLALLWERAQRVLYLPGLAVERVREAYPGESKTDARDAYVIADQARMRSNLARLAPGEDALAEMQLLLARRRDLVADRTRCVNRLRDVLLSLFPALERAMDLNAKGALILVRHYQTPGAIRRVGQRRLAAFLKNRGVKGAEEIASKAITAAKAQSVSLPAENVAATICAELANEALALKESVAALDGELEKRFFARPEARILASLPGMGPVLGSEFLVSVGDLSAFSSADQLAAYAGLVPAAHDSGKRVGNHR

SEQ ID NO: 41100 - protein, 339 aa, unidentified
MGQYVGLDVSLKETKVHVLDEQGQRVWRGRCASTPEAIEAVIRKHAPQAVRIGLETGPLTTWLWQALTDVGLPMTCLDARKAKAALNMRTNKTDANDAEGLAHLVRSGWYCEVRVKGREAMLVRSLLGARTQLLGIVTELSNQIRGVMKTFGLIVPKGGGRIFEANVRRLLEGEAAVAGVIVPLLEAWRAVRERTAVLDRQLLAAARASATCRRLMTAPGIGAIVAAAFVAAVEKPENFRNSRAVGVWIGLTPRRYQSGEVDYDGHISRRGDARLRALLYEAAVSILTRVQSESTLRRWALALKAQVGFKRAAVALARKLAVILHAMWKTGTDFDPRAA

SEQ ID NO: 41101 - protein, 343 aa, unidentified
MDHFAGLDVSVKETSVCIVDDTGKIVREVKVSSEPEALLAVLKSPAYRFKRIGLEAGPLSQWLYSALAEAELPVICVETRHMQAVLKAQINKTDRNDARGIAQMMRAGLYRPVHVKTLRSQKLRMLLTHRQLLLSKAVAIENDLRGTLRNFGLKVGMVSKAKFERRIKELVENLPDLAVLVEPLLVVRRVLREQIGILHRHLLTIVRDDDVCRRLMTVPGVGPVVALTYRATVDVPARFKNSKAVGASFGLTPSKYQSGEIDRGGRISRCGDEMMRAMLYEAAQVMLTRTNKWSWLKAWAMQIAKHRGMKKAIVALARRLAVILHRIWIDGTEFRWTREVVAA

SEQ ID NO: 41102 - protein, 420 aa, unidentified
MKSASTTGSSKLPDQPINGVTAGVDWASEDHAVSIVNDRGQEIARKTVEHTAAGLRALVKFLGKHGVGEVAIERGDGPVVDALLEADLTVVVISPNRLKNLRSRYGSAGNKDDRFDAFVLADTLRTDRTRLRALVPDTDATIALRRACRARKDLVNHRVAVANQLRAHLRNVLPAAVGLFKDLDSAISLAFLTRFDTQDKIDWLTPRRLGDWLTKQGYSGKVDPTVLHGRILAAAPGATRTHGTAQAPITASYVALLSTLLTQIKMLEAQIDAQLDAHADAHIFTSLPRAGRVRAARLLAEIGDCRARFPTPESLTCLAGAAPSTRQSGKSRIVGFRWACDKQLRDAVTDFAADTRLVHPWAADLYDRARARGHDHPHAVRILARAWLHILWHCWQDNLAYDPTKHRALQRLTTPQNEAA

SEQ ID NO: 41103 - protein, 328 aa, unidentified
MKQIKYIGLDAHSSTCTFSVIDSNGIQLDNKTIVTNGRLLIDYIKSLGGTLHLALEECELSFWLFDIFKKHVTTIIVADPTENVQYKRVKTDKLDAYNLANLLRGKYLKPVFHNGSDREKLRMLISSYNDLNQEIVRIKNRMKSIKRRTRALTKRDLTDHASFIYEHLQSQLLQLLETKNTYTKKLIKHIRQFKETFYLNTIPGIAFIHAAIIIAQVIDPNRFSNKYKFFSYCGLVKHQRQSGGRNYGSKKIWGNRMLKCVYKRAAQSAIRSNSAFNCLYSHLRNKGLSEKNAHNAIARKIAVLSLTLWRNQQCFRNEIILENLPVED

SEQ ID NO: 41104 - protein, 344 aa, unidentified
MKTYYIGTDAHKYSTTLKVMNKNKIIRCEEFATEIPNFLSLFDELNGKIHMIIEESTLSGWLYCNLYDKVENFVVCDPRKNKAIFADGDKDDMIDAGTLAQILKDKTYRQVYHDSDADKIELKSWVKLYHSQVQQVVGCKNRIYSLGSKYGIIIPAIALNNKKYRIKWMSKLSSPSLYSQLVFMFKELDHKTVQIKEARVQLETLSQKFDIIKRWLRVPGIGLIRSVTIFVYIDTPFRFGNRSKVHKYCGVGLERSTSGKDKHGRPRPTKLKLPNQYNRHLKNVFMGGALSAIRSNNNMFKGYYESLIQEGKYVNIAKRCVARKLINTMMGMWKNNQSYIEGLA

SEQ ID NO: 41105 - protein, 410 aa, unidentified
MEITLERCCGLDVHKKTVSACVLIHQGTGWEKEIRTFSTMTADLLALHDWLQELGVTQVAMESTGVYWKPVFNLLEDSFQVLLVNAAHMKAVPGRKTDVRDCEWLADLLAHGLLRGSFIPPEPIRDLRDLTRYRKSLTEERVREINRLQKILETANIKLGAVASNVLGTSGRAMIEALIEGNRDAESLALLARGSLRKKLPLLRQALEGRFRPHHEFLLKQILSHLDFLEEMIEHVNEEVEHRLGPFSEEMELLKTIPGVNQRVAETIVAETGVDMSRFASARHLASWVGLCPGNNESAGKRLSGKTRKGDAWLKSALVESAWVNSRAKNYLGAQYHRIARRRGKKRALICVAHSLLVIIYHILKEGTPYHDLGEDYFDRMNLQVLKKRWVQRLEAIGFKVNLEPLPVAI

SEQ ID NO: 41106 - protein, 389 aa, unidentified
MIFLGIDVSKFKHNCFLSDGDNFDLGEHFEIENSREGFVFLLDKLSSYDRDNIRIGLEYTGNYHLNLSRFLLDLNFNIHFFNPFQTCLFRRADSFRNTKTDKVDAFFIAKLLKSSCDSNPTLFEFYHNYDLKSLCRYKSILKRDRSRLKNSIVSFLDIVFPEICNVCNDVFSKYVLAILYEFSSAYEISRANITRLSNLIRNASRGTYSKDKALVIRDAARNSIGYFSSSVSFQLKQSIDYLYFLDKKIDEVNVMIKPLLDDINSPIMSIPGIGIELGPTIISEIGDINRFDSSSKLLAYVGLDPSINQSGTFHSSFSTMSKRGSSYLRDSLFKAAFIISQIEPVFKEYYLKKKAEGKHHYVALTHVARKLVRVIFYLLKENEVYVSKV

SEQ ID NO: 41107 - protein, 365 aa, unidentified
MVMIAFDSHKHYTQASVQTEEGKILEEARIEHDRGNLCQFLERWEKGSPVAVESIGNWYWIIGEIEEAEMQPRLVHARKAKLLMGSYTKTDKLDARGLNRLQQVGTLPTVWIPPRELRDQRELPRTRMVFSAMRTRLKNRIHSVIDKYGFQGEFRDVSDMFSKKGRKRLEDCRRQLPEQTGYTVEILLHQLDRVEKQIAQLEQRMKEITQTSEELKLLMTLPGVGFILGVVILQEVGEVQRFASPERLAAYSGTVPRVHASGGKARYGRLRPDTNHYLKWAFSEAGNIVALQHKRSPQRHVSQLYQRIRQRRGHGTAVGAVARHLAEATYWMLLKKQPYLERGVSMFGPRKPKRVFVMSPSRLEE

SEQ ID NO: 41108 - protein, 462 aa, unidentified
MAVSKHKPLSPTPLPPHLNAVNLHAAGIDIGATEHYAAVPAGADPQPVRRFGACTADLEALADWLAACAITTVALESTGVFWIPLFELLEARGFEVLLVDPRQVHHTAGRPKSDVYDCQWLQRLHTFGLLAAAFRPQDEVCVLRGYLRQRGMLVTYAAQHLQHMQKALTQMNVKLQHVVSDISGVTGMAIIRAILAGQRDPAELAKLRDWRCGHDEAEIARALYGNWRAEHVFALRQAVELYDFYKRQVAACDREIARHLRTFADRSGGRALPPKARRRRRGDNRPAFEVRGALYRMSGADLTVIEGIEESTALVVLSEVGTDMGRWPSAKHFCSWLGLCPHHRISGGKVLSRRTKACGNRAAAALRLAASGLHRSQSALGAFLRRLKSRVGAPKAITATAHKLARLVYSLLKHGTAYVTQGMEEYEQRYRERAVKNLSRRAKELGYEVVQATEATAGNVNK

SEQ ID NO: 41109 - protein, 412 aa, unidentified
MDIVHYRCAGLDISKRDVKVCVRTQTPTQARAKSTVTTWGAVTSQVLALRDHLIAEGVTLVVMEATSDYWKPFYYVLEDGPFEVMLVNARHVKNLPGRKTDVSDAAWLAQLGAHGLVRGSFVPPEPIRQLRDLTRTRTTVIRERTREIQRLEKLLEDAGVKLSSVATQLTGVSGRAMLDALVAGERDPETLANLARYRLRAKLPELTEALAGRFSEHHAFLVKVHLDLIDQHTRTIEELTARVEVVMAPFREARDLLETIPGISTRAADVIIAETGADMTRFPSAGHLASWAGVCPGSNESAGRVKSTRTRPGNPYLKGALGIAALSAIRANNSFYAAKYRRLATRRGPIRAVVAVEHAMLVAVWNMLDTGAVYTDPGADYYTKRNPERAKRRAIDQLQKLGYTVTIEPPAA

SEQ ID NO: 41110 - protein, 343 aa, unidentified
MEVVIGIDPHKASHHAFAVEEREVELAQLSIRATRTQTQRLLAWAEPFERRTWAIEGADGLGYLLSQQLVAAGERVVNVPATLAARTRVLGSTKSNKTDPNDARSVALTALRHDDLREVQAVGHSEVLRLLAKRNIDIGDRRTQVVCRMHALLVELAPGGIAKEINASDVDGFLARLSPTSPVEQIRFDLAVELLAEIRSLDAQLKVSHKRIEVAVRASGTTVTDLFGVGPIIAAMLIGFTGDVRRFANRDHYAAYNGTAPVEFSSGGRTVHRLSQRGNRNLNHALHMAAICQLRQPHSEGRAYFERKVAAGKTKREGIRALKRQISNAAYRQLLIDADRVDR

SEQ ID NO: 41111 - protein, 343 aa, unidentified
MQTVTTIGFDIAKSVFQVHGVDAAGQVLIRRQLKRRTVLAFFQKLPPCLVGIEACASSHHWSRELQALGHTVRLMPPAYVKPYVKRQKNDMADAEAICEAVTRANMRFVPTKTPVQQSCLMLHHTRHLFIRQQTAVINSIRAHLAEFGIVAPVGRKGVEELLRIVADPSDKRVPEAARVCLAALGTQLLSLKKQIVEFDRMITAWHRSNETSKRLRYIPGVGPILATALVASVADPRTFRSGRNFSAWIGLVPKQHSSGGKDRLGSISKQGDRYLRSLFVAGALSVIRYAKIHGTKHRPWLTALLARRPTKVAAIALANKLARMAWAMMAKGERYKNPAALSA

SEQ ID NO: 41112 - protein, 352 aa, unidentified
MKQYIACDAHKKYTIFGSIDERGRYGKQRRVSHNREEYRGFLRTLPEKSTIAIESIGNWYWMIEEMEGSGHKPILVHPRKAKLMMGMTNKTDRLDVNGLAMLSRNGTIPGIWIPTGDLRDKRELPRMRMAIVGMRTKLKNRIHATLAKYNIVIEEVSDIFGVRGRELIDKRLVELPPETRRSVKEELKLLDEVAKHIRTTEKRIREIVEETMEMKLLKTLPGFGDILATVVALEVGDIKRFGRAEQLASYSGTVPRIHSSGGKTYFGRVLPNVNRYLKWALVEAANMVVLNQNRLEQSHAVQLYRRIRHKKGHAKAVVALARHLAEATFWVLTRGEQYKEPKRKQVVSSTRG

SEQ ID NO: 41113 - protein, 430 aa, unidentified
MSYRIAGLDVHKRMLAVVVSDVEVDGEYQFERRMFGSSPDQLRSLAEWLLEQEVEEAVMESTAQYWKPVWEALERYWKPLRQKREGARRKSGTLHLAQAQSNRGPRGRKKDFRDAERLVKRLVARELTLSFVPDAEQRLWRTVTRRKYQLKRDRVRLQNQLESLLEEAHIKLSSLVSDLLGASARRMLKALAEGETNPGALAALADWKLRATPEQLCDALGVCTDLKPIYRRLLKMALEQLQFLEEQIDRLDQELASLLHPHQDAVQRLAEVPGLGVESAQQIIAEVGPTAATFPSAKCLSSWVGACPGDEESAGVNYSHRSPKGNRHMRRVLNQCANAAARTKGSIFEIVYRRSVPRLGHNQTIGAIAHRHCRLIWLILHQAVRYEERGPAVTKQSNQRRTARIIRQLRSLGYRIDPPTPQHANPAQGQ

SEQ ID NO: 41114 - protein, 357 aa, unidentified
MFYLGIDQHARQLTISLRNEQGDVVQSRQVSTQPEKIQEFLERLKRDVLRDGESFVAVVEVCGFNDWLLQALEEHQCHKVILIQPEERKKQKTDRRDAAALSELLWVNRERFLAGKPIHGLRQVQLPSATDQQNRRLTTLRKEASEARTRVINKIKHLLRRHNLQWSLPTKTFPTQRAVAWLKELVLPEIDRLEMGFLLADLERTQQRVDELERVIIERSRNNEDEKLLRSIPGVSYFTATSLACRVGNVQRFPRARSLANYWGLTPGCRNSGEHSQRLGHITKAGSNTARWLLAQVTHQALRKDGRLREWYKRIRRRRGSTIARVAVMIKLATVIWQMLRKRQTYSECRAHAGMAA

SEQ ID NO: 41115 - protein, 328 aa, unidentified
MTASLSNYQCARGVNVGIDVAKDTLEVAVRPDNEQWSTKNRVEDFPALIEKLRQIAPERIILEATGGWEAPLANHLAAAGLPVVVINPRQARDFAKATGKLTKTDKVDARGLAHFGEAVKPQVRPLPNEQTQALAALLTRRRQLVEMLAAEKNRLVTVQHRPALKRDVEEHIKWLEKRIDHLDDDLRKQLEESEVWRVNDQLLQSVPGVGDVTSRTLLSQLPELGSLSDKEIAALVGVAPHACDSGQRKGQAHIRGGRANVRSVLYMAALTAIRCNPVIKTFYQRLLAKGKLKKVALTACMRKLLVILNSMIKKQKSWSSGQIPAAQA

SEQ ID NO: 41116 - protein, 343 aa, unidentified
MSEVSTIGLDIAKQVFHAHGADARGRQMFSRRIVRRKLLEFFADQPRCLVALEACGGAHHWARALMAMGHEVRLLPAAYVKPFVKRHKNDAADAEAICEAAQRPNMRFVAVKSEEQQASALVFRTRDLFVRQRTQTINALRGHMAEYGWVAPKGRAHMATLADLLDAEAGASLPQAACAMLKVMHATVEELDRQIAELDKEISRRAREDAVARRLMTIPGIAAITATAIAALAPPLETFRRGRDFAAWLGLTPLQKSTGGKQRLGKMSKMGERTIRRLLIIGASAVVRQASRPGAPERPWLAGMLARKPRMLVTVAQANKTARIVWAVLTKEEDYRAPVVKAA

SEQ ID NO: 41117 - protein, 340 aa, unidentified
MNTTVIGLDIAKQISHLVGLDATGKQVEKKTLRRAKLLAYFANHTPCVIGIEGCASSHHWAREFRKLGHTVKLLPAQYVKPYVRGNKNDYNDALAIAEASRVPEMREVRVKTIEQQSIQALHRFRRGAVADRTKLCNQTRGLLAEFGIIMNQGIGTLRKRFPEILEDGGNELHWIFRDALALKYEQLCQLDALVGKLTKSIEDEAKQHAQIKQLQSIPGFGAIVASTFFSVMGDGKSFSKGRDVSASLGLVPRQHSSGGKNTLLGISKRGDKYLRSLLVHGARSVVIHAHKKDDALSLWVTRLVETRGKNKAIVALANKLARIAWAVTTSGKPYQTNFSI

SEQ ID NO: 41118 - protein, 404 aa, unidentified
MSELGKDLVFAGVDTHKDTHTLCLLDHMGRAIGTFRFAANAEGYDALAGKIGSPATCAGVGVEGTGSYGAGLTRRLLELGYCVYEVMVPGRARRKPGRPKSDPADAEVAARQVLARANLSKPKDQSGWTEELRQLMIARDRLVQATSAMINAAKSLIVTAPEDLRRSLEGLSRKNLRSALSTLDPAAGGIVLALGSLGKAWDLQDREADAIEERMKRVLEANAPALLAIYGCGTVSAAALAVAGGGNPERLKSEAEFASLCGVAPLLASSGKTERHRLNRGGDRRANRALYQIAVTRMSYDQRTKDYVGKRKRDGKSKKETIRCLKRYIAREVFRALRNPLEIKGPSWKDLRPARQALGITLVEAGKALNVGFQKVSYAETGRLMNVQFLEEYDAWLKSQAKTI

SEQ ID NO: 41119 - protein, 356 aa, unidentified
MTTQSTALPNLFIGIDIHKKSWAVHLRTDIGEHRPMTIPARKELLFDYVQSNFGDHCVHVAYEAGCCGFSAARYFLSLGWRVSVVNAADIPRSDKQQYQKTDRYDCRNISKQLSAGQLHGIYVPTEDQDELKSLVRQRASLTRLLRKTKTQIKALLLYHGIEIPQEFDNPNWSKAFKTWLANLAWETEAGKLCLHSKLDLLATMHYQYLSIANSLRAYCRKHFKKDYYLLKSIPGVGGYLASCILAEVGDLRRFDNEAQFASFIGLVPVMYNSGGNEKVFGVTPRCRSLLRSYIIESAWVALRRDPQMQAYYRKHVGRNPKSIIIKIARKMLNRMLSVIKREQIYKINYSPSTKSL

SEQ ID NO: 41120 - protein, 430 aa, unidentified
MSYRIAGIDVHKKMLAVVVSDVEIESEYQFERRKFGSNPEQLRSLATWLLEQEAEEVVMESTAQYWKPVWETLETYWKPLREKREGARRRSGTLHLAQAQSNRGRRGRKRDFPDAERLVKRLVARELTLSFVPGVEQRLWRTVTRRKYQLTRDHVRLQNQLESLLEEAHIKLSSLVSNLLGVSARRMLKALAEGETNPAALAALADQHLRATPEQLCDALGACTDLKPVYRRLLQMMLEQLQFLEQQIGQLDQEMASLLSQHQDAVKRLAEVPGLGVDSAQQIIAEVGPTAATFPSEKCLSSWVGVCSGDDESAGVNYSHRSPKGNRHMRRLLNQSANAAARTKGSIFEIVYRRSVPRLGHNQAIGAIAHRQCRLIWLILHQEVRYEERGPAVTKRSKQKRTARMIRQLRSLGYRIELPNPQHPSPAPAH

SEQ ID NO: 41121 - protein, 368 aa, unidentified
MGHLSNWIGIDDHADKLTIAQYVGTQKEPAKEWEVVPNESGLRQLVRWLKNLQGAVRCVYEAGPCGYELYRLLTSSGIECSVAAPSLTPRKPGERIKTNRRDARKLAELLRGNLLTMIVVPDRRRESIRDLMRARDDARRNLVAARHRLSKFLLRHGFRYREGSAWSTRHWQWIRSIKMPEPYEQIILTESIAAVVQRQLELKRFDDFVSEAAKEVEYAPLVKQLTALRGIDTLSAMTILAELGDLRRFPSAPQMMAAVGLVPSEYSTGDKTRRFGITKTGNAHVRHVAVQAAWQYQHSPRSGSRLQKRRSDQAAEVLRIAQTADHRLHRKYVRLTSRGKRSTVAATAVARELVGFIWAIGQCTAPAK

SEQ ID NO: 41122 - protein, 411 aa, unidentified
MNNTLFVGIDISKRSNVATFMNCEGKVVGRLTFSNNGSGADRLVAKILSYYEKEDFEAIRIGLENTSVYSKNLVWFLYEHEALNEHKLSIIPLNAIMVANYKKSFLDMDKDDITDSFAIADFIRIRPGLLPFKLDDRQEALKIMTRSRYNYVQALSRMKSQFLTRLFLSFSEMEAGKPFYSIFSKTSLSLLEEEFTLDELAEKPIPELVEFLQEKGGGKFQNPEEIAKVLKKAASSSYRVPAMVRESLNRTMASDMEIMRILENEIHNCDKNIEKLMKSVPAILVSIPGIGPVLAAGIMSEIGDISRFRKQESLGKMAGFKWKRNQSGKKESEDKAAVLSGNKKLRYYLVEAANRVRIHDPVFEAYYRKKYAESKTHAHKRALILTARKLVRVIFYLLKENKLYKPDVGIS

SEQ ID NO: 41123 - protein, 354 aa, unidentified
MIIIGVDFHAEFQQIAFVDSNTGEYQDKRLGHREEAEQFYRGLAAAGQPVRVGMEASGQARWFERLLSELQFELWIGDAAEIQSKRVRKQKTDRQDAQLILKLMVKDDFPQIWVPSGENRDLRQLLWHRHRLVQARTRIMNQLQAMALNEGLRCQKRLWRERGRQQLEAYPLAAWASRRRRDLLALLDRLNPTIAELSQAVEQEAEKSPAAQRLMTHPGVGALTALAFVLIIGQAERFQCGKQIASYLGLVPLEKSSGNRRRLGYMTKRGSSMVRFLLVEAAQVTVRSVPEWRRKYVHLTMRRGRKIAKVAMARRLAVALYWMWRKGENYEPCKSPVRTRVQLGTGDGVQSNTE

SEQ ID NO: 41124 - protein, 314 aa, unidentified
MPETERFIGIDVAKAELEVVERPSGARWTVTNDGAGWGQLRDQLEATRPTLVVLEATAGYELGVVATLAAAGVPVAVLNPRQVRDFAKAVGRLAKTDALDAAVLAQFADVVRPTPRPLATPVTQTLEAWLTRRRQLVEMLAAEEQRRVRAPRAIQRHIEAHVRWLRRELGAVEKDLTDTLRASPVWREQDELLRSVPGVGPVMAATLLAALPEVGRLNRKQIAALVGVAPMNRDSGTYRGRRAIWGGRAHVRATLYMATLTAIRCNPVIRSFFTRLVGAGKPKKVALTACMRKLLTILNAMMATRTAWKPAIVS

SEQ ID NO: 41125 - protein, 382 aa, unidentified
MNRILKIGMDVHSTSYTLCAMEPVLGGEDRIFANIQVTSDYRNVIQFIDKLKEKLGSSDSYSIECGYEAGCLGYSLYHQLTKSGVKCTILAPTTMLTQQGKRVKTDKRDAVMIAQCLSYGGYHAVHVPADKDVSVKEYLRMRDDHKVALKKIKQQINAFCLRQGYFYAGNKWTIKHLNWLKKLVLSDLYRETLNEYLTSYEEQTAKIERFDKRIEELAEDSDYQENVKKLGCLLGIKNHTALSLIVETGDFKRFRKGNTYAAFLGLAPGESSSGEKISRTGITKAGNSHLRMLLIEAARGMCRGRIGYKSKVLRSRQDGNPTEVIAYADRGNTRMRSKYYRMIRHGKKDNVAVAAVARELACFIWGLMTNNITPKEEGTKVA

SEQ ID NO: 41126 - protein, 343 aa, unidentified
MQVSTIGVDLAKNVFQVHGVDSAGKVVITRQLRRKQVIDFFSKIAPCLVGMEACGTAHHWAREVSKLGHTVRLMPPSYVKGYVKRSKNDAADAAAICEAVTRPSMRFVPIKSADQQALLMLHRTRDLLIRQRTQLINALRAHLAEFGLVAETGREGLAQLAAIITDESNREALPSAMKQALQAIVDQLAALELQIGTLDRAIHAHHRANDMSCRLETVPGIGVIGATAIASTVTNPSDFKSGRDFAAWIGLVPRQHSTGGKERLGGISKQGDRYLRRLLVIGATAVVRHARQHPQKHPWVIRLLAKKPAKLVAVAVANKMARIAWAIMAKGGYYRAPELAAAA

SEQ ID NO: 41127 - protein, 413 aa, unidentified
MDRIIERCAGRDVHKDSITACVRVPGVHGQRQQETRTFGTTTRSLLALRDWLAACGVTVVGMESTGVYWKPVYYVLEDDFEPWLLNAHHLKAVPGRKTDVKDAEWICQLVEHGLVRASFVPPRDIRELRDLTRYRKALIQERTREVQRLDKILQDAGVKLSSVASEVIGASGRAMLAGLVEGTHDPAVLADLAKGRLRKKLPQLREALEGRFRAHHALIVGELLAHIEYLEEAIERLSQEVERRIAPFAAEVALLDTIPGVDQRAAEVILAEIGPDMTRFPTARHLASWAGRCPGNDESAGKRGSGRMRKGSKWLAITLVESATSVARSKRTYLASQYARIKGRRGHKKAVGAVAHSILVIAYHVLQRQRPYSELGPDYLLRRNNAEAYTQRLVRQLERLGHKVSLEPLTVAA

SEQ ID NO: 41128 - protein, 337 aa, unidentified
MTIIRIGLDTSKHVFQVHGVDEAEQPVLHRQVRRSEVEKFFAKQPPTRIGIEACAASHHWARVLRGLGHEVVLLPPQYIKPYVKRGKNDAIDAAAICEAMSRPGMRFVPIKSAESQAGLMVLRVRELLVKQRTALINAIRGHAAEFGVTTAKGPANVAELLQRAHAEKAGVPPPALEMLSLLAGQLDTIEARLKTLEVHLIGMHKANPTSQCLATIPGVGPIGAVSFALRVPDPEAFRSGRHFAAWLGLTPRENSTGGRHRPGRISRQGDEALRKLLVLGATAVIRFAKPGQASPWLLQLLARRPNKLAAVALANKMARIIWAMMVSGEVYRRPQQA

SEQ ID NO: 41129 - protein, 317 aa, unidentified
MTTPSEAYVGVDVGKTWLDVALWGSEAVWRVSNDDEGVAKIMARVAAMEPQLIAVEATGGYEQLLVQSMLLNSLPVAVVNPTRVRALSKATGKLAKTDVIDARLIAEYAFKVQPEALAPKEAHEIRLNALVTRREQLVEMRTAEQNRLGTAQNSMQADIRQHIEWLSVRIEELEAQIKELVDSLPEWREQAQRLDSIPGVGMITAVTVLAEMPELGQLDRQKIAALAGLAPFNRDSGQLRGKRRIFGGRKGIRRVLYMACLSATKCNPVIRPLYLRLLKKGKVFKVAITACMRKMLTIMNAMIRDGVNWRQPDLISV

SEQ ID NO: 41130 - protein, 469 aa, unidentified
MDLLKLPIYTFYCEFLDMEERFMKKVFIGIDVGKFKNSISIIDSEGNPIIKKGISIENDYYGFAKLEEKIDLIMNNYGFTYEDCIAGVESTGHYWFNLRDYLKDIGIETVMIKTDSVKHRRALEEGQKGKNDTLDARVIASCLRNGNYVYIRDNERELRALQKLTRMRNDISDELVALKNKIHRCIDICNPVFFKIFENLNSKTGVALIKLYPSPQDIINVELDNIKKELGEIVDKPNMRMVSLYKEECEIWSGLIKEPSYAEKVEMIAYIDKFLLQNKSKEHLDKQIKEIAKNIIPLYSEFEEIKGIPLIQLISVLSEIGDIRNFKNTRAILAFLGLSLKGNASGKYIGERKINKAGSRIVRKHLFNIMESLIKHNEYFRVAYCYYKSYRHKDPTKKRSMQIAVMCKFVRVMYGMLKYNASFDYKEMMKGYYFGDCNMQVFKEEFEGENRRKKIENCKIAYDIYTIYS

SEQ ID NO: 41131 - protein, 340 aa, unidentified
MTITTVGIDLAKNVFAVHCVDQNGKTVLVKPKVSRAALPELIAGLPPCVIGMEACSGAHYWARLFREYGHEPRLMAAKFVSPYRMAGKSGKNDAADAQAICEAVRRPHMRFVPVKDESQQAMQCLHRTRQGFIEEKTATYNRLRGLISEFGVIAPQSTDALRRMVSEQKNSLPFQVQQCIDDLLEHVDRIEANIADYDRILSRMAKTDHRSQRLMELKGVGPTTACALVASIGNAHDFKNGRQLAAWLGLTPSQYSSGGKSKLGRITKAGDSYLRTLLVQGARSVLIGADKRTDSFSRWVCTLVERRGYWRAVVAIAAKNARLCWASLHYGDDFRLYSAS

SEQ ID NO: 41132 - protein, 360 aa, unidentified
MIVQGTSVGLDVHALSVVAHAVDEETGKIVRARLCPDRGEVLGWLHQLRAPVRVTYEAGPTGFGLARAITEAGMECLVAAPSKLQRPAGDRIKTDARDAAHLARLLRLGEITEVRVPDRQIEAVRDLVRAREDARADLMRVRHRLSKLLLRQGIVYFGGTPWTCAHEEWLRRQRFDDIHLKAAFDHGFDAVLAATAARDRLDEQIAEVAASPRFADPVNRLGCLRGISALTGLALTVEIGDWSRFTGSSIGAYVGLVPSENSSGNSRVQGSITKAGNTHVRRLLIEAAWHHRKSYSTSGPTLRARWAKVDPALRARGHAGNRRLNKRWRTFTERGKNPLVANVAVARELAGWCWSLVTMQ

SEQ ID NO: 41133 - protein, 326 aa, unidentified
MTQDSTLTAGIDTSKSKLDVAIHGQAGTISVVNALAGWKDLARHFAAHRVQRVGIEATGGYERGVVRHLQAAGVRVILFQPLQVKAFAAARLQRAKNDRLDATLIAACAFMLDDPGRIALDPRFDALADQLTFIEQVEEDIARCKTRLEHTPAGRLARIVAADIKRLETRRKEQLRLLRAAVDAHADLARRLQLLLSIPGIGERTALSLLVRMPELGQVSREQAAALAGLAPFVRQSGTSDGRRHIGGGRERLRRALYAATLPAAFHWNPALKAFYARLVAAGKGHKVAMVACARKLLMFANTVVQRGTPWVAAGTAAPAEPGFVT

SEQ ID NO: 41134 - protein, 389 aa, unidentified
MKIYVGIDIAKLNHFAAAISSDGEIILEPFKFTNDADGFQLLVSKLESFDKNSIIIGLESTAHYGDNLVRYLVAKFYQVCVLNPIKTCQMRKNNIRKTKTDKVDTYVIAKTLMMQDDLRFIGFYDLNMMDLKALGRFRQKTIKQRTRLKIQLTTYVDQVFPEIQYFFKSGLHQNAVYALLKEAPSPKEIASMYMTHLANLLKVNSHGHFTKEQAKELRVLAQKSVGANDSAISIQITQTIQQIELLDSQLDTIEAEMTDIMKFNDSVIITIPGIGYINGGMILGEIGDIHRFSNPNKLLAFAGLDPSVYQSGNFQAKTTRMSKRGSRVLRYALVNAAWNVVRNNVTFKAYYDVKRAEGRSHYNALGHCAGKLVRVIWKMLTDEVEFNLE

SEQ ID NO: 41135 - protein, 397 aa, unidentified
MSTPAAGRVVIGMDPHKRSATIEVMTADETIVGGGRFSTDRDGYDQMRRYAGQWPDRIWAIEGCAGIGKHIAVRLLSDGEEVVDVPPKLSARARVFASGQGRKTDATDAHSVALIGTRMAGLRPVVNDEQLAVLRLLVDRRRSLGEEHTRKTSQLHQLLLELIPGGAKRNLSAAQAKALLGKIRPRDVVGKTRRRVAAELVADLERIYARKKEANKELTDLVKQTGTTLLDLHGIGPTGAARLLVEVGDITRFPNKAHFASWNGTAPLDASSGDQVRHRLSRKGNRQINRVLHTMARVQLRNPTEGRAYYDRKKADGKAPMEAMRCVKRRLSDIVFQTMLNDAVRTNEPTARTGPGGQRGNDSDSSAAGSHPHTSSSDKSLPGPARQHPRTPLPAAS

SEQ ID NO: 41136 - protein, 347 aa, unidentified
MEVAIGVDSHKGSLAAAAVDAVGRVIDAREFPNRPDGHRALSGWIKGLPEPRMVGIEGSQRYGAALARRLLLEEEDVWEVPATLTHRQRRRRASQGKSDPVDAVAIARVVAAGEGLSSARRTAVLSDLKLLVDYRDQLVRSRTQMANRAHADLVVIRPGYEEEVPNLRARRHVVRARTLLRGDRSVRGDLLRLRLAELLRLTREIRETGRRIGEKLQETNTTLTDIPGVGPFVAAKILGEVGDLSRLRSKAGFALLSGTAPLVASSGQTHRHRLNRGGNRQLNWALYCIALVQSRTVPEAKTYLARQREAGKTYKEAMRCLKRHLANVVYRHLQVDASKAPGSGLTT

SEQ ID NO: 41137 - protein, 359 aa, unidentified
MQTQSNKIDFTGQNIYIGFDVHLKSWTVTVMTERLTHKTFSQPPKPEVLYNYLAKNFPGATYYSAYEAGFCGYWIHNKLVELGVNSIVVNAADIPTTGKEKVMKTDPRDSIKIARSLRNGDLKPIHVPSIKTLEERGLIRMRATLVKDLTRYKNRIKSFLYFHGIEYPEVFNRPKTHWSNRFNQWLEAIEFNDLISKATLDMLLGQSNSLRGSVLQITRQVRELAKTDRYKMQEKLLRSIPGIGILTAMIILTEIETINRFSNIDQLCGYIGLIPSTCSSGDKEVIGDLTPRGHSILRTAIIESSWVAARLDPALNKSYHDYCKRMEPNKAIIRIARKVSSRIRFVLKNNQPYVFSVVK

SEQ ID NO: 41138 - protein, 353 aa, unidentified
MKCDKYIGCDLHQATTVVAVLDAEGKVVLETIIATEAAAVIRFLKSLSGPLRITFEETTQARWMYDVVRGYVSEAIVCDPRRNKLLGEGSKGDKPDARKLAELLRAGLLRPVYHGHEATRQLKELVRGYETLAADTQRMMVRIKSIYRAHGIRTPGSAVYQQKQREQWLQRLTEPGTRQRVSWLYEELDHLRQLRKQARMAMVAEGRKHQAFNLLRRIPQLGPIRCAMLVATVDTPYRFRTKHQLWAYSGLAIVTYMSSEYEIKSGRVVRSRKPLATRGLNRNCNRRLKELFISAAVAGSRSEPYRSYVECLQQKGMRTEMARLTLARKIAAVALTVWKKGEAFDPKKLNSTT

SEQ ID NO: 41139 - protein, 425 aa, unidentified
MSDGVLIAVDPHKAHNTLVVLDPASRAVLDEAEFANSGPGYQELVRFVRQWRSRRWAVEGCHGAGRSLAQQLVAGGEPVVDVPAKLAARVRVFSRGHGRKTDRDDAVSIGLAALEAAGVQAVTADDALVALRLLCDRRDELVAARTQAVCRLHRLLAELTPGGLRRELTTGKAAAVLAGVRPRDVAGKIRRQLAVQHLSGIRALDRKIAAVRAQITVMVEDSGTGLGRLFGIGPVIAGRILAEVGDIRRFPSKDHFATYNGTAPLDVSSGEQVRHRLSRSGNRRINHAIHMMAVTQIRNRGSAGRTYYERKRLEGKTGKEALRCLKRRLSDVIYRQLIADQAGTIETCGSPTTGKPTRPTSTSPTSPSRPATPPPSPAHRPASAPSSRSTGTATTLSASRSSTPAPSSPPTCSPRPRSLPSTGLS

SEQ ID NO: 41140 - protein, 339 aa, unidentified
MQVTTVGLDLAKNIFQVHGITEIGEVVFNRALRRAQVLPFFERLEPCLVGIEACGTSHHWARELIKLGHTVKLIPPIYVKPYVKRGKSDAVDAEAICEAVTRPTMRFVAVKTPEQQAILSLHRTRDLIVRQRTQTINMLRAQLAEFGFVFPQGVGHATQFAKRVIDGVQLDIPEVAGDVIAQLSEQLLYLHGKVGWYSREMACVAKSEKRVALLQTIPGIGPITASAIVATVGTGEQFKNGREFAAWLGLTPLNRSSGGKERLGRISKMGDRYIRRLLVIGMMSRMRQIIQNPDRYDPWFADILVRKPGKLAAVAMANKTARIVWAVLISNEPYKVRTA

SEQ ID NO: 41141 - protein, 355 aa, unidentified
MSSEKYIGMDVHQATISVAVLDAQGKTIMESILETKASTLLEFLGGLRGTLNVTFEEGTWAAWLYDLLKPHVAKVLVCNPRKNALLKHGSKSDKIDAQKLANLLRLNDLKPVYHGETGVRMLRELARSYLAIVKDLTRVMSRVKAVYRSWGIPCGGRDVYYTRHRKQWLDKIQEPGVRRRAERLYQQLDMLQHLRQQARRELLAESRKHTITAKLRQIPSLGPIRSALAVALIQTPNRFRTKRQLWTYSGLGLETRDSGEYHYVKGQVRRRKKQKFIRGLNRDYNHDLKGLFKGAALRATMLPGPFQDFYQRSLAKGIKPTMVRLTLARKIAAITLTVWKKGENFDADKVKPQAA

SEQ ID NO: 41142 - protein, 373 aa, unidentified
MLEEGEDIVLVVDYHSENIEYRWLNQATGEGRTGRYATSRVGVLGQVEQATQELSAGGRVVWVMESTTGWARVKDLLGERVELVLCNVLQMPLPPKGRRRKTDKIDTGRILREYLHGSLPASFQPAAWWRQVRRVVDCRQDLVKRQTATKNWTGSLPHHETWEDRRNLWSGGGLARLAGAKLSTSDRELLELKLEQLRHLEVELRQVESRMQAIYDSWPEAQWVDQIRGVGMVTAVSVLAHVGPVERFKGPEDLISYAGLAPGMWESDGTCHHGRIGGGGTDGHLRYLLIEATRWLREIPRYHPTYERVLSKRGKKVAKIVLARLFLRSLHKMLGDRVRFNPVRISGTTCGVAKTNKTATTTTKATATASCSR

SEQ ID NO: 41143 - protein, 491 aa, unidentified
MNSIFQRSNPAIEKLFADAGSPKKVMCIPIDYAKRQHTALVCNGEGLQLRGPFNIHNTPEGVEFLNGIVQGLCKKHSIRKQYVFFGGEDCGGFSFNFIHALLNEGYFGIGMNAHDAAEERKNQVASTDKLDLLAIASVLIKKKQGRTLSMDYSPARILRDLTRHRNALVKARVASAYRIHHLVDQLLPGFLDEKQSPLTPFSDASLWLMSQNFSPRQILARKSDSLAEKLGLFMVRDTEQKVTKIKELARSVLPPPASLCETLQINLGHEVSVYQHLERCTQDTDKDIARRLAVTPGAMMTTVQGIGVTNAASLYAEIGDPARDRALRRLCSYAGLVARLKQSGGPDKEAYTQGRSRRACVPLKRRIMDIALKIGQYGHDDLKADYQRRVNERQDARLTMGRKMLRICSHLIRETDFFFPPSILKSPDPDIRKAYIQKTWDQILIKWRNAGAIQQAFAPDAPLEKWRILFNELYNLNLSKLSPQADRLRDR

SEQ ID NO: 41144 - protein, 310 aa, unidentified
MQTICGVDVSQAWLDGWIEGAGHRRFANGDEGVAALAAWAVEHDVALVVMEASGGIEQAAYLALWRHGCPCAVANPKAVRRFAEAMGHLEKTDRIDAEVIAGFAAARRLQPMPPPSAEQQRLTALAARLRQVTADLGVQKQRVHTTRDPDALASLREAIAFFTGQATKLAREIGALVEADPLWQALDRTFRSVKGVADRTVATLLAELPEIGTISNKAIAKLAGLAPIANDSGKRHGPRTIRGGRASVRSILFLVADIARKYDPTLADFRDRLVAQGKPKMVVRIALARKLLVRLNAKARETRTKLAYAL

SEQ ID NO: 41145 - protein, 361 aa, unidentified
MNQPIRIGMDTSKRLFQLHGVDAGERVVLRRQLRRDHLLAFFAELPPALVALEACGAAHDWARRLTALGHDVRLIAPQLAKPYVSRGKNDAADAAALCEAASRPRMRFVPVKSADEQAALMLAGQRARLVRQRVQLANTIRGHAGEFGLVAAKGAAAIRPLLARLAEADIPDLARALFAELEAEYADLCGYIAALETRLWAWSADSEPLQCLRAIPGVGPLIAALLVMKTPDPHRFACARDYAAWLGLTPRDHSTAGRQRLGCITRAGDPMLRSLLVVGATAIVWRARRPAKAGAYGPEAGPHAALYGWVRALLARKPAKLVAVALANKLARIAWVLLARGQRYGERDRAAALTPPQTATA

SEQ ID NO: 41146 - protein, 419 aa, unidentified
MKSWTELTHFAGLDWAGDHHDVAVVDGTGQVVAEFRIEHSAAGWAEFRQKMAGYSAWGIALETRSGAAVEELLQSEGTVFPVQPRAAARYRERKAPSGVKDDQLDAWAMADALRVDGQHWRALTAEDPLIQELRLLCRDEVALIEQRTALINQLRAALREYYDAALQAFDNWTLPAAWALVVQFPTPTELAAAGKRKWEKFLHVHKLWRPETVEKRLELFARAADWKRNEAVTRAKSRLAVSLAKMLQTLERQLDDYRAAIEALFAKHPDHDLFGSLPGAGSKLAPRLMSELGEDRARFDTPQALQCLAGTAPVSFQSGQMFRVKMRRSCNAHLRHAVHLWADCSRAVCGWAQAYYQAQREKGKSHACALRCLGHRWLEVLWKMWQTKTNYDGDLHARNQQKHGSWVIQILTAPAAKPV

SEQ ID NO: 41147 - protein, 312 aa, unidentified
MDALDIGIDVSKDRLDVAATTASFAAFSVSRDGDGLAALVDRLKPLGPGRIALEATGGFETVVVAALAGAGLPVVVVNPAQVRAFARALGKRAKTDAIDAAVIAHFAAATRPPVRPLPDAETEALADLVARRRQIVAMIGAENQRLDRASARMRKSILRLLKALQKELDDIDGDIDATVRRSPNWLAKAELLTSVPGIGDQIARTLLAELPELGTLDRRRIAALVGLAPWTRQSGQWRGKSFIGGGRAPVRSALFMGAMVASRWKETLKAFRDKLVAAGKPKLVALVAVARKILTILNAILRDSQPWRAQDA

SEQ ID NO: 41148 - protein, 353 aa, unidentified
MESIEYVGLDVHKKKIAFCVKTQAGEVMERGKVAATRGALTAGAAGRRGPGIGALEATLFTGWIYDHLKPHARELKVAHPAMLKAIAASKKKNDRVDAEKIADLLRCDLLPECWMAPGETRELRRVLRYRHLIVREAVRMKNKSAGLLMEVGAEYEKRRLHGKRYFARLTEELGKVEEIPESVVELLKLSRGATELFEGMQRRLVSALREHPALRERVARLMTVPSVGEVTALTWALETGDPHRFASIDKAVSYCGLCSAQRESGDKASRGPLSKQRNAHLQRVLIEVAKLAPRHSPELAELRERELRRGNKNRATLAVARKLVAWLMAVDKSGREFCPEGKPKTPAAHKAAA

SEQ ID NO: 41149 - protein, 387 aa, unidentified
MPAEAGIQSGGLNNLLLLGWTAPDGIECARLRVVITTAKGSRPMTIIRVGLDTSKSVFQVHGADEQERPVLRRQLRRGQIEKFFAKLPPTRVGLEACGASHHWGRVLRDLGHEVMLIPPQYIKPYVKRGKNDVIDAEAICEAMSRPGMRFVPIKSREEQAALMLLKVRDLLTKQSTMLSNAIRGHAAEFGVIGAKGPQKIKELLERIAGEANMPEPARELLNDLASQLAAVEVRLAALEAKLMAHHKADPRSQLLATIPGVGPVTAVNITLKVPDATVFRSGRHFAAWLGITPREHSTAGRQRLGKISREGDEGLRRLLVLGATAVIQQVERRRKAKKTSGNDSPWLLQLLARKPRKLAAIALANKMARTIRAMLVSGELYRRPQAA

SEQ ID NO: 41150 - protein, 320 aa, unidentified
MENIALIGIDLGKNSFHIHCQDHRGKAVYRKKFTRPKLIEFLATCPATTIAMEACGGSHFMARKLEELGHFPKLISPQFVRPFVKSNKNDFVDAEAICEAASRPSMRFVQPRTESQQAMRALHRVRESSVQDKVKTTNQMHAFLLEFGISVPRGAAVISRLSTLLEDSSLPLYLSQLLLKLQQHYHYLVEQIKDLESQLKRKLDEDEVGQRLLSIPCVGTLTASTISTEIGDGKQYASSRDFAAATGLVPRQYSTGGRTTLLGISKRGNKRSELCWFSVPGYSYKNWNTSLASWPTGSGSCCVGKATLSSPVLWQTSWPE

SEQ ID NO: 41151 - protein, 311 aa, unidentified
MNSEAYVGIDVSKDSLDVKVLPNNETLQISNDDFGIGELIKRLTQIDPTLIVLESTGGLEMLAVGSLIEKHLPVVVVNPRQVRDFAKATGRLAKTDAIDADTIARFARDIRPEVRPVKDEHTQLLSALNARRRQIVDMLVAEKNRLSRAPKPNKKSIQKHIHWLERSLTDINKDIDKTIKKSPTWRENDRILQSFKGVGPVVSATLLCDLPELGTLNRKKIANLVGVAPLNCDSGHFRGIRRIKGGRANVRRKLYMAAVASLRHNPLMKAFYERLIEAGKPPKVALTACMRKILTILNAMMRERTYWNAIW

SEQ ID NO: 41152 - protein, 377 aa, unidentified
MHSENIAAYVGLDVHKETLAVAIAAPERLGEVRYYGTINNEAQAVRRLFQKLQGLYGNILSCYEAGPCGFGLYHQLTAMNIKCQVIAPSRIPKSPTDRIKNDHRDAISLARLLRAGELTPVWIPDLTHEAMRDLLRARAAAKRDSRVARQRILSMLLRTDKHYAGKHWTGKHRTWLANQSFSQPSQQIAFQHYCQSLEQIEDRILQLDQEISRLLPEWSLCNLVCQLQALKGVGQLIAITLVAELGDFSRFSNPKQLMAFLGLVPGEYSSGNSIRPRGITKVGNSELRRLLYEAAWSYRTPAKVGAWLIYYRPDSVTQYSKDIAWKAQQRLCSRYRSLTAKGKKSQVAITAVARELTGFMWDIALAAQSSFSQQKQN

SEQ ID NO: 41153 - protein, 347 aa, unidentified
MNAFTKPVVGVDTAKNVFQLYTVDMETGEVISKQIKRGQFLPWFANRMPCLVGMEACGGSQHWARKLQELGHEVKMMPGKMVKAFVNGNKSDAADARAIWLAAQQHGVKAVAVKTEAQQAVLAMHRVRQQLVKSRTAQRNELRGLLAEYGEVFGLGRSAFNAGMKAGLERLSERLPTSLIDTFREQWEELTRLDKRIKSIEARLLAWLRQDRATQAIAVIPGVGLLTATAAVATMGQAKAFRSGREFAAWIGLVPAQTGTGGKLRLLGISKRGDTYLRTLLIHGARAVQMHTKAPSKWLQDIAMRRPANVVTVALANKMARTIWAVLAHDCGYSESHISVRPERAAA

SEQ ID NO: 41154 - protein, 395 aa, unidentified
MYSLLVGIDVSKDFFATAGINSEGKESFSKSHSMDSQGFGELLKTITSHCEDLSKVIVAMESTGCYHINLFSFLTSQGVRTMVVNPLLIANFAKLSLRKTKTDKKDAMTIARFLLDHHEEVSHLSLSQDHQDLRDLSRERESLCHLMAATKVEIKRVLRTVFPELESIGNLYTGAMLRFLGQYPSARLVRGAKPRAIAKALKGPYVGDKLTFSAEDILRAAKTSIGTVSPAKEIILQGKIATLLHLQERLDEMTKLLTDLCKATRVDDLKILRSIKGVGPKTAAPFLAEMGEVQNYASHKKLIAFTGIDPSLHQSGNYIGMSKLSKRGNRHLRRAVYLMTAAVASKNPFFKAYFLRRKREGLPPQKALFATAHKLIRVIFAMLTQRTYFKPKEVI

SEQ ID NO: 41155 - protein, 400 aa, unidentified
MSGLKGSFDGFVGIDVSKDKFDVCGITGDETKLFQFSATMDRKGFEKLKGHLAAVSISSVLIGMESTASYHVNLFSYLVSEGYRVLLINPLLISNYVKMQLRKTKTDKKDAVVIAQFLLANGDTLVQRATPSLISDLRDLARQRESLVDEMTSLKIKIKQLLNITFPELEHMAGIFTKSILKLLQQYPSAFTLRDADLGQLSQMLIADSYGHKREAFAAGLIKAAHSSIGSKSPAKDMILKQKIALLLHLEDALQEITGMLIEMSRKLMNEEINLMTSLKGIGEKAAANFLIEMGGDINQYECSGKIIAMAGLDPAVYQSGKHEGKGRITKRGNRHLRRIIWLMTTKVIQYTDIFNVYYLKRRKEGLPYKMAVLATAHKLIRVIYAMLTQRTTFCPQVNS

SEQ ID NO: 41156 - protein, 337 aa, unidentified
MEYFAGLDVSMEETHVCVVTRNGTVVHQGKVPSTPANIAAALAQAPTCRWVLFETGRMAPMLYHGLSQLGLPVVCIESRQAYQALKSLATHKTDRNDARGLAHLARTGFFKPVYVKSLPAHAVRALIIARKKLVGQRVTLENQIRGLAVVFGVRLPRALSPTFIRQALQASEGIPGLSAAMRGLVAARAAVLAAVVAIDGDIRKMTRASGACRRLMSIPGVGQLTALAFTAAVDDPGRFRRSRDIGAYLGLVPRRYQSGEVDYTGGISKCGDRRVRTLLYEAANVMLTRYKGPLKLKAWALAIANRSNMRKARIALARRLAILMHAMLRHGTEFNPT

SEQ ID NO: 41157 - protein, 428 aa, unidentified
MRVLYDRVAAIDVHKDMIKVAVRVPGKKRGSRTTDVLEYRTFYGVLRAMARELRDGRGVTHVVMEASGVYTEPVYYALTELDFTEVLVVNPADVKALKGQKTDAKDAVRLLDLYECGAVMRGSYIPAPDLKEVRDLVRYRVKTVQARTSEIQRLQKTLESAGIKLDSVVSDITGDSSTAMIEALISGERRGQVMADLALGRMRTAGKLADLSMALEGRFTDHHALMCRLHLDRVSMFDRAVSGLDAKIRPLVARYAAQAELLDTIPGFGEVVVSGWLGAIGPAPHEHFATAERLASWVTLCPGNYISARKSRSGRTGDGGNYIKPLLVQAAWAAIRVPGRLQARFHRLVRKFGGPKNKGARKRAIIAIAHTLLKIAYAVLKSGKPYQEPGADFYTRRDSARARQDYLLRQLQKLNPGCVVTITPAEAA

SEQ ID NO: 41158 - protein, 342 aa, unidentified
MNHFAGLDVSVKETSICIVDDTGRIVREVMVASEPEALLKVLGNPTYHFKRIGLEAGPLSQWLFSALAEAGLPVICVETRHMQAVLKAQINKTDRNDARGIAQMIRAGLYRPVHVKTLRSQKLRMLLTHRKLLQSKAIAIENDLRGTLRNFGLKVGMVGKVKFESRIKELVDNLPDLALLVEPLLIVRRALREQIVILHRRLLAVVRSDEVCRRLMTTPGVGPVVALTYRATVDVPARFRKSKSVGAVFGLTCSRYQSGEIDWSGRISRCGDEMMRVMLYEAAQSMLRSKKWSWLKAWAMQIARRRGMKKAIVALARRLAVIMHRIWIDGTEFRWTRETAAA

SEQ ID NO: 41159 - protein, 382 aa, unidentified
MNTSKNWSRIIGLDLSKATFKGCILYGEGFIQRKNFSGEMKRDESGYVLINNTIQAGDIVLMEAGSSSFNLARYLQKNSKASGVVVLNPAHLRIIWDSQKKNDKADAMKIACIARDMRPEAWPRVTVPSEKEQSERSVVMHWVFLRKQETMICNRFFALFNSLGYPEIDKSRLKKDSDFRIQTINDLLSFNELAFTDAIMLEEQIAIIQRQLSFMEDRLRNICLDHPQQALAWLSIPGIGLVNAATLIAYIGDGSRFSKPDQLMNYAGMVPKQNQSGTVDIKGKITKRGCSAIRRSIIQGAQVLIQLPPTCDITKFAYRKKKECPFNGKVAVAVANRMLRTGLALLHHNDLYRPMIEDGFDRFERKLAGNKLQALVPYLTSN

SEQ ID NO: 41160 - protein, 376 aa, unidentified
MGTPSAQTLDDVGVREIFQELEEVPLMTMVGGLDVHRAQITFDYVDDDGLVHWGQIRPATRKTLRGWLAEHCPDGDAEFALEGCTGWRYVSEELAGAGVGVHLGDPAEIAVLRGPKKRAKTDRADARLLRTLLLQGRFPESWIAPAHVLEIRTLGRLYCTLMDERRAWQQRIHAQLFHQGCPPVRALLSVTGRAALAGAELSAVGGQYVDTALGRIDELSTEIEPLRAQLVNFARHQTGCQALQRHYGIGWLCAAIIWAEIGDARRFSSSDQLVRFAGLDVTVYSSDGKRSPGHLSRQGSPELRWAAFEAAKCAARRGSPDYGYYRKLAAKGDGHNGKNPTLAVERKILRRCHHTLRELGDAAVALPVAEPQEVAA

SEQ ID NO: 41161 - protein, 335 aa, unidentified
MTSVTVFVGLDYHDSGVQVSVLDPAGRVLWNRPCGNDAAAIADRVARFGDRVFAAIEACTGAAALADELAALPGWSVDLAHPGYVARLKQSPDKTDLQDAQLLADLERVGYLPKVWLAPPAVRELRRLVRYRQQLVNQRRDAKLRIRALLREARVAAPPGVRPWTKKWLAWLQALAGLGEQTRWVIDRHLARLEWLSGEIAAAERRLAEATADDPVVCRLLAQRGVGLVTAAALRAEIGRFDRFRTGKQLARFCGLSPRNASSGPRQADAGLVKAGNPELRAVLIELAWRLIRYEPRWRALAGGLRGRGKAGSLTAAAVANRFVRWLHHEMTLAA

SEQ ID NO: 41162 - protein, 326 aa, unidentified
MRLNVGIDVSKETLDLCLLLNQAKSGSKFKCFKNRKIDYLAINDWILKLSKCQPNDIVITMESTGVYHEAIALYLYTMGFQIFISNPGKAKKFSQALGLIHKTDKSDAYMLARYGAAQNEQIHLWKPDDANTRNIKALTRRLSALEKDRLRENNRLEASEISDAHNRVLLSITRIIRIIEDEIQEIENEIDTIISACPTMKKNHDLLMSVIGIGKVMSRELVYLFSAKNFSTAKQAAAYVGLIPKLNESGSFKGRTTLSKIGPSRIRSKIFLAAVSAGTHNPDIKAQKNRLLAAGKTKMQALGAAMRKLIQICFGVKKTKQNTNLS

SEQ ID NO: 41163 - protein, 360 aa, unidentified
MAKARSLVGLDVHAAKIVAAVLDGETGELQWFRMSGESAGAAGFCARLPGPVRATYEAGPTGYGLARELARRGVECVVAAPSKIPRASGDRVKTDRRDAEHLVRLLLAGELHPVRVPGREEEALRDLVRAREAVRVDLMRCRHRLSKLLLRREIRFDDGRAWTERHRRWLATIALEWPAAQTTLQDAIGAVDALEHRRGQLEREIVGLLPDSPWAVQAGRLRCMRGIDTLTAVGLCAEIGDFARFAKAAQLMHYLGLTPSEDTTGEQRRLGSITKAGSGHARRLLVEAAWHYRSRPSIGRALNDRQDGQPPEAVAIAWSAQRRLHRTWTRLEARAKRRTIIAVAAARELAGFCWAITQIE

SEQ ID NO: 41164 - protein, 389 aa, unidentified
MLCVGIDVAKRKHDCCIIDSDALKTVESFTFPNSREGFDMLLSKISELGIPKDKIRVGLEATGHYSSNLAHFISEHDLPLLTFNPLLTNRYKQGFSLRKTKTDKVDACAIAQMIVSGKGSQTYSSSLYHNEEMKSLSRYRSQTMQKCSKLKISVSRLVTILFPELEGLTSSIHLASIYALLKAYPGHEQIAHCSMKRLTRLLSDASQGRFDKSKALEIHQAACRSIGKVSLSASMELVHTITDIEVLKQHIVEIDEKLKEMVDQEESSIIDIPGIGYTLCASILGEVGDFKRFPDVDKLLAYAGMSPSKHDSGDYHSKHNKMEKRGSPYLRKTLYLAARLVAQNVPRFKEYLEKKLSEHKPYKIALSHVAKKLIRLIYRLGISGCPYLA

SEQ ID NO: 41165 - protein, 334 aa, unidentified
MSYRIAGIDVHKKMLAVVVSNVEVESEFQFERRMFGGNPEQLRLLAAWLLEQEAEEVVMESTAQYWKPVWGTLERYWKPIREKREGAKRRSGTLHLAQAQSNRGRRGRKKDFVDAERLVKRLVARELTLSFVPDAEQRLWRAVTRKKYQLRRDLVRLNNQLESLLEETHIKLSSLVSDLLGVSARRMLKALADGETDPAALAALAHQRLRATPEQLCDALGACTDLKPVYRRLLKMTLEQLQLLEQQIGQLDQELATLLHPHQDAVHRLAEVPGFGVDSAQQIIAEVGPTAATFPSEKCLSSWVGACPGDEESAGVNYSHQSPKGNRHMRRLLN

SEQ ID NO: 41166 - protein, 413 aa, unidentified
MDTIYRNVAGLDVHQKTIVVCVRKVLPDGGSKEEVNQFGTMTSDLLRMSEWLASEGVTHVAMESTGVLWKPVWNILDGHFELLLVNPRHLKGVPGRKTDVIDCQWIAQLLQCGLLRGSFVPSRPQRELRDLTRQRKQLTREQTRTVNRIHKTLEDANIKLGSVATDILGKSGRAMLQALVSGERDPVQLADLAERKLRGKIPLLREALRGHLTDHHVFLLRSLLNHLRYLEGEIENFDQQIAERLHPFLDPDQMQRLDLIPGVNRRTIECVVAEIGTDMSQFPDEDQLSSWAGMCPGVEESAGKRKSSRTTKGNSWLRSALTESAWAAGRTKNSYLGAMYRRMAARRGKKRALVAVGHALLVIFYHMLKSNAEYRDLGPDFFDKLKPEQYRRYLVKRLESLGYTVELQPKDAA

SEQ ID NO: 41167 - protein, 355 aa, unidentified
MPFAGVDAHKRYSRVVVKDETGSLLCRASLQNDVASFREFFGAIDGPTKAVLEAGRDWGVIYDLLEGIEVEPVLANPLKTRAIAEARIKTDTVDATILADLLRADLIPVVHVPSREVRSQKNLLRQRLWLVELKTRIKNRIHNILDRNHAGPPPAADLFGKAGRRFLDQLHLPSPDDRLLKAHLELLDLVQNQIGRSEEWIEEALSQRPELAIMRTLPGFGKILAAVVALEVDDVRRFSHPGKLCAYAGLVPTTYASGGKVRHGRLLPSCNRWLRWAFVEAAWAAQRHSAYCHAYFERIKRRKGANCAISALARRLCEITWHCLTGSRPYEERKMTATTEPARSPSKVLGRLGTS

SEQ ID NO: 41168 - protein, 366 aa, unidentified
MKKTSTVRVNGNMIFKGHKLTIGLDLGDQWSCYCVLDEAGKIILEQKVATTPEAMKQAFAKIPQSLIAMETGTHSPWVSRLLTELGHKVIVAHAQKVQLITKSNRKDDRHDARTLARLARIDAELLGPVRHRSAQAQIHLTVIRARAELVRARTSLVNAARGLVKSYGQRLPKCGTQQVSRELGVGLNAELREVLEPLLKEVESLNERIKEYEVRMEKIAKESYPQVELLKQVKGVGTQIALTYVLTLDDPHRFPKSREVGGFLGLCPGRRDSGESQPQMRISKEGDRYLRTMLVQGAHYILGPFGADSDLRRWGLKLAARGGKNAKKRAVVAVARKLAVLLHRLWVSGEVYEPLRNSQKAMRVAA

SEQ ID NO: 41169 - protein, 334 aa, unidentified
MNDSSDNLHFALGIDVGKADCNVALLHPSNAVLLAEAVFTNNKTGFASLLRWLRKTLPKGALVHACMEATGSYSTPLALFLSKELACVSVVNPQMIKAFGQMKLRRSKTDPADARLIAGFCLKERPDPWQAPTVQQQKLMAMARRVASLQMQQTAENNRLGQCLDEDAAKSLRSHLRWLKAEGKRIQTQIEELVKNDPELYQKAQWLDSIPGIALKSAAAILAELPHHEAFGSARQLAAFAGLTPRHRQSGTSGKKGTPLCKIGSNRLRLILFFPAMVAMKTNPALRAFAQRLLDRKKPKMVVIGALMRKLLHIIFGLLKNRQPFNPNHLPLPA

SEQ ID NO: 41170 - protein, 395 aa, unidentified
MIVIGADTHKGSHALAAVDEGTGRVRGSREIKADDAGHLAAVRWARGLDDDRVWAIEDCRHVSGRLEQALLAAGERVVRVPPQRMGASRKGERALGKSDEIDALAVARAVVKDGVQKFPVAYLNGQAVEIRLLLDHRNDLVAERTRTINRLRWHLVTLCPELEASLKRKALNDARGLDRVDRHLRKLHAGARTRIAREQIAHLRGLNRQIEALHRELAELVSEHRPRLLEEQGCGALTAAILIGHTAGNERFRSEASFAKQTGTAPIPCSSGKRSQHRLNRGGDRQLNHALHIIAITRAQHDPATKEYLARKEAEGKTTKGALRSLKRYLARHFHQLLAEPPANHSTATDGQPIIEPHLAAEPEQLPPIPPPPPPRRLADPNTKGQAPSPMVCIG

SEQ ID NO: 41171 - protein, 312 aa, unidentified
MTTLDEIYVGIDVGKTWLDVAVWGNEETRRVRNDEAGVAEIIQHIAEGAPRLIAVEATGGYEQLVVQAMLRKGLPVAVVNPTRVRALAKAAGKLAKTDVIDAHLIAEYAIKIQPPAQAPKEENEVRLRALVTRREQLVEMRTAEQNRMGTTHDALKADLRAHIDWLSRQICELEIQIQELIDLLPDWKAQVELLDTIPGVGLIVAVSVVADMPELGQLDRQKVAALAGLAPFNRDSGKKRGKRRIFGGRKGVRRVLYMACLSAIKCNPVIRALYLRLIHKGKIFKVAITACMRKMLTIMNAMVRHKASWAAP

SEQ ID NO: 41172 - protein, 328 aa, unidentified
MDNFYFIGVDVSKKKLDFCVLFEGKVLREEQVSNHQQAVARLIGELKNDLEMDNEQFLICAEHTGQYTFPLVCACKSVECKLWLENPSQIKYSSGMQRGKNDKVDAKRIAIYASRFGDKVKYYDRPTEEIERLKQLERERALYVTDLAKYKGQMYDQKDFMPAALYRKKTKRMKGLIQELQAAIDAITAEMEKIIGSTEVLARQMELLMSIDGVGKVVALNVIIETEAFSRFDNPRKFCCHAGVAPFSYTSGSSQHSKNKVSHRANKNIKKLLHMAAVSVTHRKEGELKAYYMRKVEEGKNKMSVINALRAKMFAVIKRNEFYTPIYS

SEQ ID NO: 41173 - protein, 344 aa, unidentified
MKEISVIGLDLAKNVFQIHGVTECGEVLVRKVLRRSQVLQFFAKCPPCLVGMEACGGAHYWSREIRRFGHEVKMMAPAFVKPYLKANKNDRNDAEAICEAVQRPSMRFVAAKSPEQQSVLHLHHSRRLLVKQRVAVSNHLRGILSEYGIVLPQGERVLLQQLPSLLEDGDNTLPMLMRHTLATLMAHHTQLAEHIGVLDAQLQGWHKQDEQSQRLASIPGVGLQTATALAATVGDGKDFRNGRQLAAYLGLVPRQHSSGGRPRLLGISKRGDSYLRGLLIHGARAVIRHIRRRLALGQPGGNPWVEQLLLRCHPNEVAVALANKMARIAWVVLSRNEHYQARAA

SEQ ID NO: 41174 - protein, 338 aa, unidentified
MGEVTTVGLDIAKSVFQVHGIDAEGMVVVQRKLTRARLLAFFEKLPRCLVGIEACATAHHWARELKALGHDVRLMPPGYVKPYVKRQKNDMADAEAICEAVTRPTMRFVDVKSPEQQSVLVLHRTRQTLIRQRTQLSNVIRGHMAEFGLVAPPGREGLQRLIDYLGAEERVPATARGCLLMLVEQLRLVNVQVLEADRAILAAVRSDETARRLMAVPGVGPLLASALVAAVPDPRAFRSGRNLAAWVGLVPRQNSSGGKERLGGITKAGDRYLRQMLVVGAMAVIRHAERHGTRRAWLIRLMGRRPTRVAAVALANKTARTVWAMMTTGESYREPAAV

SEQ ID NO: 41175 - protein, 338 aa, unidentified
MSIIKTIGIDLGKSSFHLVAHDHAGREQYRKRFTRSKLLEHLVNIPPTMIAMESCGGSHWLARQCQKFGHEVKLIPPQYVKPYVKTNKNDYIDADAIAEAAMRPSMRFVSVKTESAQVISVIQKVRSSYIKERTACMSRIGAILLEFGLSLPTGHNKMKGLYQWLAEQTIRLPAMLMQELIEHHEYYLMLNERIARQDEKLKKLVDRNSNAQLLMSIPGVGTLTAAQCLSDIPNVSEFKNGRHLAAWLGLVPHQYSTGGKTTLLGISKRGNKSLRTLFIHGARAILSRLDKAESSFGGWIIALRARKPFNVAVVALANKLARIAWSVLKTKQAFEVRV

SEQ ID NO: 41176 - protein, 404 aa, unidentified
MRSIGLDVHKRFAEVAIIDPGASPRRGPRIPVTPAGLRAFAQQLRPDDQLVLESTSNAFPVAELLAQHAGRVVISNPMRTRAIADAKVKTDHVDAAVLAQLLAADFLPAVWIPDERIRGLRRGVSRRQSLVRVRTRLRNQVHAVLIRNLLDCPQSDLFGLSGLRWLAQTALPADERAQVEAALRLLTAVDAEIALAERALAQAAIDDPAVRRLLTIPGVGPTTAVAVRAAIGDIQRFARPTQLAGYLGLVPTVRQSGERAAHTGRITKQGPAHARGILVEAALSAITVSGPLRAFYWRVARRRGPQVAAVATARKLATLAWHMLSRGEDYRWNPVELTRTKIRQLEAAAGIPPARIRRPGTAQRRSHDREVLAQAEASYRDHITERIRSGAVAAKGTRLGGSEA

SEQ ID NO: 41177 - protein, 345 aa, unidentified
MREIVKQVAAIDVDQKLLVTTLGRMYDDWSPELYAQKTFPNTQKGFEALLSWVKKNADKAIAVRFVMEATGVYHENFAYFLDANKEEVTVVLPNKISNYMRTLEVKTITDKTASEAIARFALERKLELWKRPKSICKKLRQLTRERDQLVMERTMVKNQLHAEQAEAEPNKSSITRIKARIKMLDKQAQEIKEELAALIQTDVEMQKKVALLCSLSGIGLLTAATVLGETNGFELIRSRRQLASYAGFDVKEKQSGTSVKGKPRISKKGNKYLRKAMHLPALSAIRHDERFKGLFARLVSKHGIKMKAAVAVQRKLLEMMFTLYKTNEKYDKQYLIKNMVHAEME

SEQ ID NO: 41178 - protein, 368 aa, unidentified
MQELITGFVGLDAHAESTAIAVANVGREAPRFVGTVGARLSELSKALSRLGEPQSLWVVYEAGPCGYSLARELIRLGYRCEVVAPSKIPRRPGERIKTDRRDALNLAGLARAGELTSVTIPDERDEAMRDLSRARLDAVRARLKARQQLKALMLRHGRRYNGKTSWSAAHERYLAAVSFEHPAQDIAFSEYRQAVSEGEARVQRLSESLAREVEHWRMHSLVSALMTLRGLDLIAAATVVAELGDLRRFAHPRELMGYLGLVPSEHTTGSKRRLGAITKTGNTHVRRVLVEAAWNYRYPARISPTLQRRQELQPAPIRAIAWRAQLRLNHRYRRLKARGLQHNKICVALARELAAFVWDIGRHVTPSA

SEQ ID NO: 41179 - protein, 329 aa, unidentified
MTTPNATDCTFAGIDISKHKLDLAQSGIQQVVSFTNDPAGITQLVELLLKTPPKLIVVEATGGLERPLLDALLEASLQVHLANPKQVRYFALSLGILAKTDPIDAQVIERYAAQLSPRLLQKRSQNQSELEALVTRRRQLLHLRTQQGNQLEATRSKPARKSIQAVLKLLEKQIDSMDRQIRKLIESDDDFNDIDKLLRSVPGIGNVASSTLICQMSELGSMDRQQAAALVGVAPFNRDSGRYQGKRAIRGGRTSVRSVLYMSAVCAIRFNPVLGAFAQRLQKAGKLPKVIIVAAMRKLVCFINAMLRDGLRWDQLDIVKKFAAEKKPA

SEQ ID NO: 41180 - protein, 331 aa, unidentified
MKSKCFIGIDVSKETLDLFVLSRQYHFQALNEESDYARLLELCCSQGNCSPSDLFFCFENTGRYSRLLSAFFTESGINYAMVPAMEIKKSLGMKRGKSDRADARAIANYAWQHKEELKPSRINSALAGELRQLLTLRDKLIRHRTAYKNSINDLKDVLYEGETAVIRQVHNRMITNLNKEIENVDQRIEDLIATAHDWQNNYRLIQTVRGIGPVLAKYILIYTENFCRINNPRSFACYAGVAPFEYSSGTSVKGRTRVHPCANKQLKSLLNTAAMCAIQLPGEYKTYFQRRTAEGKNKMSTLNIIRNKLIGRAYATVRRQTPYVDLTRFAA

SEQ ID NO: 41181 - protein, 373 aa, unidentified
MEKSSMLFVGLDVHKDTIDIGVAESGREEVRHLGTIGGELAAVDRALRKLISAGHRLHVVYEAGPCGFVLYRHLLRQGITVEIVSPSLIPKRPGDRIKTDRRDAMKLARLARSGDLTPIVVPDASDEAVRDLLRARADIVRAQRTARHQLKALLLRNDIRYVGKTAWTAAHQRWLATVKLTHPAQQITFQEYVHAVAEATERIARFDRAIAEAVTTWRWRPVVEALCALRGIALLAAATLVAEIGAIERFGNPRQLMAYLGLIPSEYSSGPKRRQGAITKAGNTHARRILIECAWLYRYPARIAPILQKRMDKVSAEVRDIAWAAQVRLCARFRRLGARKLPHNKIVVAIARELIGFIWAIARIQPPLASVPH

SEQ ID NO: 41182 - protein, 404 aa, unidentified
MSVRVAPVTSSTIVVAVDVGKASAMLSATDSARHRLLGPIEFAMIRSGLVAAVQRVSAVIPSGAQVKVGIEAAGHYHRPVLDYRWPVGWEVLEFNPAHVAEQRRVAGRRRVKTDAIDLEAITELVLAGRGQPITERQVRIGELAAWAMHRSRRVATRTATKNQLLGQLDRAFPGLTRALPDVLGTKIGRLVAVEFADPARLSGLGVNRLIRFAAARDIQLRRPVAERLVAAAADALATRDAVVARRVLAADMRLLADLDTQIENAECELAALLPASPYATLTSVPGWGVVRVSNYAAALGDPNRWPGPRQIYRASGLSPMQYESAGKRRDGTISREGSVALRRALIDLGIGLWLTDRAAKAYAAELKSRGKPGGIIGCALAHRATRIAFALVRDHATYNPSRWA

SEQ ID NO: 41183 - protein, 371 aa, unidentified
MEQYSTDPIWVGLDVHQSSITAAILEGDAHEPEVIRMRSDLNAVRRLFRRLSKTGVPRSCYEASGAGYVLQRALDRDGFHCEVIAPSLIPRKPGDRRKTDRLDAVMLAKLYRSGHLTPVTVPDEDQEAVRQLVRSRLAVQTHITRLKHRIVRVLATHGYRFTGTRSNWTQKHRTWLKGVQRELEGPLATVVGIHLEHLEYLETQQRSIDASIEQLSQSEPWRAGAEALRCFRGIKTLTAMTILTEVGDVRRFRTASGFMAYTGLIPSERSSGEVERRGPITRVGNTYLRRVLVEAAWHYRHDAGADLILRRRRQGQNPVLVGIAVKAQHRLHKKFWRIAAKKHTNKAVVAVARELAGFIWDALHNVADREV

SEQ ID NO: 41184 - protein, 350 aa, unidentified
MKKISTAKIKSQAANKKVTVGMDLGDRTSRYCLLDEEGVVIGEASTPTTKAGIAKVFGAMARCRIALEAGGHSPWVSRLLKELGHEAIVANPRNVRLIGESTRKDDRLDARTLARLARIDPLLLSPVRHRGAEAQADLAVIRARRVLVRARTMLINAARGLTKSFGQRLGKCGAGQVAPTLAAEVSPEIRAAVVPLLAEVETLNQRIAAYDRQIEQLAKERYPEVFRLKQVKGVGTLIALTFVLTVDDPNRFQRSRDVGCYMGLRPGRRNSGKSEPQLHISKEGDCYMRSLLVQGAHYILGPFGIDCDLRRWGLKMSEQGGKKAKKRAVVAVARKAGSALAQAVGEWRSL

SEQ ID NO: 41185 - protein, 338 aa, unidentified
MPLYAGIDLHANNSYLAVIDETDELVDANRLRNDIEVVRRGLEPYRAELVGIAVESTFNWYWLVDGLEASGYTVHLVNTLAAQQYQGLKHTDDKTDARWLAHMLRLGILPTGWIYPKEKRAVRDLLRRRSQLVRQRTANRLGLRNVLERSCAKRLTGNALKRVSQGDLCEWVDDPNVRLSMQASLAVIDTLSEQIEGIEKTVAEHAVNDDSYRLLTSIKGVGPTLASTIQYETGDIDRFSTVGNYVSYCRLVRAERNSNQRVKGSGLRKNGNPYLSWAFHEAAHFAVRFQPDARRWYERKRSKTCPLVAIRALAHKLARAVYFMMRDQVPYEPKRLFG

SEQ ID NO: 41186 - protein, 323 aa, unidentified
MSMDTFVCCVGTINPDQRTQISPHKDFKNNITAFKQFYKFALSQQINEVPQYFLMEATGVYYEALAYFLKSQGARVIVVLPNKAKHFAKTLTIKSKTDPIDAHMLTQMGLEKRLSEWEPPSELMKELRLLTREHFALTELRTDAKNRIHAKTHSYKPGRDTINRLKQQVSLYDRHIKQIEVNILSLLKSDLQIWGKIENILPVKGIGIMTIARVLAETDAFALIRNGKQLTSYAGLDVVLKESGKSRGKTVISKKGNHHLRQAVYMPAISAIKSNKNMKTYYDRMLERGKPKKAGVVAIARKLLLLIYYLWSNETPYDPAYSA

SEQ ID NO: 41187 - protein, 337 aa, unidentified
MNITTVGLDLAKNVFHVVGVDARGHEQMKKRLPRGQVLKYVANLPRCLIGMEACGSAHYFAREMSKLGHEVKLIPPQYVKAYLRGQKNDYNDARAIAEAVRAPQMRFVAVKSVEQQDIQSLVRLREGLLQARTALVNRLRGLMGEYGIVIPQGMSALRRSLPEVLEDGGNGLSDAFRRLLSQGQSQLRELDGHIEDLTVELTVQAKRDERVQRLQTAPGYGPIVASVFAGVVGDGHQYRRGREAAAAIGLVPRQHSSGGKNVLLGISKRGDRYLRSLLIHGARAVVWAARKKDDRLSRWINRLRETRGVNKATVALANKLARIGWAILRNGTEYRPA

SEQ ID NO: 41188 - protein, 366 aa, unidentified
MKQQHQDSEVTIGLDLGERRHRFCALDGRGEVVEEGSLLNDRASLARLTARYPGALAVMEAGTHSPWVSRYLEGLGWEVIVSNPRKVRAIYQHERKSDQRDALMLARIGRMDRALLYPVRHGSEQAQQDLLRIKLRDSLVRARVALINSVRFSLKSLGYAVCNPSSERFHKVAMERLPEKVQQMVAPSVQALAELSTRIAVLEREINVVARTKYPQTLWLQQVPGVGALTALYFVLKIEDPQRFENVRDVGAYAGLCPRRDQSGGSDPQLRISKRGDPYLRRLLVSAAQYILGPFGPQSALRAYGLMLAADGSARARKRAVVAVARKLAVLLLSLWKNRSHYEAFPHWQTIEDKRSGTIAMHRVEA

SEQ ID NO: 41189 - protein, 351 aa, unidentified
MIIVGVDYHPSVQQVAFLDTETGETGERRLNHSDGEAERFYRDLQRRQVKVRVGIEATGHARWFERLLAELKFELWIGDPARIKAARVRKQKTDRQDAQLLLRLLIEGRFPQIWVPSPENRDLRQLIWHRHRLVQMRTRAMNQIQAAAMNEGVRRKKTLWSKTGRRQLEALPLAPWATRRRQDLLELVDRLNTTIDELTAAAEQEARKRPEVLRLMTHPGVGPITALAFVLVLGSPDRFGCGHQIGSYLGLIPCEDSSADRQRLGHITKQGSSLLRFLLAEAAQAAVRWDPDWRRRFVHLAMRRDRRIAKVAMARKLAVSLYWMWRKGFDYPQTLQFGSHAGEPGYVHGVK

SEQ ID NO: 41190 - protein, 396 aa, unidentified
MISVGIDVSKGKSTVCIMKPCGEMLESPFDIGHTADELDSLISLIKSFDEETRVVMEDTGHYHLPVATYLSSHNIFVCCVNALRMKKFCSQSIRRAKTDKIDSIKIASFGITYWNELVKAYPSNVIYDELKFLARQYYQVTGMLVKSKVNFSNLLDQVMPKINDVLSNQGENHKLTEFVSRYIHFQNILDMGEMKFTSDYCKWAKKKGYRLNERKAAEILALAQNGIPTLPNSQSVKIAVSEAVKLIHSIEESRNTILAQMQDLCNTLPEYSVVKEMDCIGDTLAPRIIAEIGDVRRFKNKHSLIAYAGIDAPPYQSGSFHASERHISKRGNSYLRKTGYEIMQSLIKHKPADNAVYDFIQKKRSEGKCGKEAMIAGLNKFLRVYYGKVMEFYSEH

SEQ ID NO: 41191 - protein, 358 aa, unidentified
MSVIIGVDPHKQSHTAVAICGEEREVSKVTVRATCQQTASLLAWAEPFGERTWAIESAGGLGYLLAQQLVDAGEHVVDVPPTLASRVRVLSTGRSDKNDPNDALSVAIAALRSQGLRRVEVAEHSEIMRLLAKRNHDLGRMRARLICRLHHALAELSPGGIAKELYASDADRLLESFEPATPIEHMRYELALELLDDVRRLDGQIKESHRRIRTAVRASKTSLTELFGVGPVVACAVIGYTGNVRRFANRDHFAAYAGVAPIEHSSGGRIAHRLSRRGHRKLNNAIHIAAISQIRQPHSDGRAYFDRRVAEGKTKREAVRSLKRQISNALYRQLVIDAERVREDTRKRLVASVVGSAS

SEQ ID NO: 41192 - protein, 337 aa, unidentified
MNYSGIDLHSNNSVVVVSDEADQVLCRRRVPNELEVVLRTLEPYRAQLAGIAVESTYNWYWLVDGLQAAGYRVHLVNTSAIKQYEGLKHSDDDSDAAHLAHLLRLGILPTGYICPPPARALRDLARKRLQLTRSRTAHILAVENIVTRQTGMRIKGEAVKRLKGEELRKLGQHENVTLAMSANVAVIQTLNTQIEKLEKRLREAVRPREEFRVLTTAPGIGEILATTILLETGSVERFAGVGNYASYARCVDSKRLSNGKKKGAGNAKNGNRYLAWAFVEAAHGASRFCPEAKRFYERKKAHANTTLAIKALAHKLARACYYMLKERTAFDVKRCFA

SEQ ID NO: 41193 - protein, 453 aa, unidentified
MKEEKQKNSPTETVKTKRFSQGLPVFNPYAAGIDVGDTMNDVAISDGATGHEVREYKTFTEDLTNLVEWLVSEGITTVAMESTGVYWLNLYLMLEEAGIEPYLVNARHVKNVTGRKKDDTDAIWIQKLHSCGLLQKSFQPESEIRVLRTYVRQRKNLINISSDSVRRMQKALELMNIKLHTVISDILGKTGLQMVNAILQGERDQDELIKLKDPRIKASEEDIKKSLVGIWKDEYLFTLQQAYDEYVFYQSQISACEERIKEQLLNQAASILDGDLTDVFVKKKPKKNQFSVEIGPLLKIIAGVDLTKVEGISEISTLELLSEIGTDMSKWQNGKHFSAWLNVAPNTKITGGKIISSKMLKKKNHAGQTMRMSASCLSNSKSSMGDFSRKMKSKLGKKAGVVATAHRLARIVYTMIKEKKEYDPQITATNNEIWKAKKIKYYEKQILQLRKTG

SEQ ID NO: 41194 - protein, 344 aa, unidentified
MTVITIGIDLAKNVFQIHGVDVHGKCKLKKRIKRSQMTTFFANLSPCLIGMEACAGAHHWARILTAQGHHVKLMAPQFVKPYVKTNKNDMADAEAICEAVARPTMRFVNIKTPEQQSLLSFHRARAGFVKSRTAQINQLRGLLAEFGIVLPQGSASVHRHIPALLEDTDNGLPMPFRRLLSSLYENVKQLSEHIEAMDIAINDHFKHDELCQKLATVPGIGVLTATAIVGTVGDGSGFKNGRQLAAWLGLVPKQHSSGGKNTLGRISKRGDTYIRTLLIHGARSVLVARKDRLVPESWLGKLLERRNKNVAAVALANKNARMLWALLTTDKKFSPEEVMGAAYM

SEQ ID NO: 41195 - protein, 344 aa, unidentified
MDHFAGLDVSVKETSICIVDDTGRIMKEVKVASEPQALLKVLGNPAYRFKRIGLEAGPLSQWLFSGLAEAGLPVVCVETRHMQAVLKAQINKTDRNDARGIAQMIRVGLYRPVHVKTLRSQKLRMLLTHRKLLQSKAIAIENDLRGTLRNFGLKVGMVGKVRFEARIQELVENIPDLAVLVEPLLIVRRVLREQIVILHRRLLAIVREDEVCRRLMTTPGVGPVVALTYRATVDVPARFRKSKSVGAVFGLTCSRYQSGEIDWSGKISRCGDEMMRTMLYEAAQSMMHSKKWSWLKAWAMQIARRRGMKKAIVALARRLAVIMHRIWVDGTEFRWTREKAAAAA

SEQ ID NO: 41196 - protein, 384 aa, unidentified
MRTDQTFTTGSEEPLLAVSLELATANWKVALHDGRREKPAVHTVAQPQAMARLLAVLELIERHKEKWSLTADTPIVVSYEAGQDAFWIYRALRLKEIDCYVVDPASIPVERHQRRPKTDRLDAIKLVTNLRAWLHGERDRMHVVRVPSSQDEASRHLMRERGQLQKEVLQHRDRMRKLLATLGCWDDVDHKTFAERLARDEVRCYDGTPLPPELRERLLRECERLALVGQQFAAIEKLRHEMIPAPARKRIADLSRLKGIGPVGASRLALELFWRVFSNRREVGACVGLVPQPYDSGQSHVDQGISRQGNRRVRALLIEMAWCWLRHQPDSALAQWFNQRVQGTGPNRRARRIAIVAMARRLTIALWRYVKDGVIPEGAKLKSV

SEQ ID NO: 41197 - protein, 419 aa, unidentified
MSFKILKNNCCGLDVHKTWIFACIGITDSHRRTEYKQARFSSFTKGLQELCDWLAKYNCTDVCMESTGKYWIPVFNVLEKNNIWVTLSHPKYTKPQKGNKTDRKDAKWICDLYMCGMVKTSFIPPADIRQLRDLVRYRFKLTCMITSEKNRAHNCLTISNFKLDEVFSDIFGKSSRSITEQILQHPGETFDVAQFVDGRCKTPIEEIQAAVDGAISTEQAVKLRQCLNHIDELEKHQAEIEREIFRLSDKYEEVLNLIRTVPGFDKNPMTAIQVLSEIGGDMSVFPTAKNLVSWAGCCPRNDQSNQKIKSTRISRAGSYFKPVLMQVANALIKSKKHPEFTTRYRRIKARRGHKKAIIAICRMILTAIWHILTDLKPYTTEGFLESRPVNDSKILTTSQALNLLKQRGYVIKDDIVSVP

SEQ ID NO: 41198 - protein, 418 aa, unidentified
MSRVDSNAVLSVVHHHCCGLDIHKDKVSAALITTHEDGMVEESIYEFGTFTEDLYRLKDWVLEHGCHVVAMESTGVYWRPVHNVLVDSCQVIRVNARHVKHLPGRKTDVSDSRWLAGLLRHGLLKGSFIPERHVRQWRDLSRLRKTFVESLADYKRRVHKLLECANIKIDSVASDLFGVTGRNLMDLLVSGEEITLEAVLRCTRGRLKGKEDELFKSIKGFFTEHHRFQLESIRTLIEGVEAQIRRVHERLSSLLSDRREKIHRLMEIPGINDVSAHALLSEIGDTLDQFETAASLASWAGLCPGNNESAGKRHSGRSPVKGGHLKTIMIEVAWGAIKKKGSYYREKYYGLRARKGAKKAIVAVAHRILKAVFHVLKFDRPYQELGEAYLIQLNNKARLHSLHKQAAKLGYTLVPAEV

SEQ ID NO: 41199 - protein, 355 aa, unidentified
MDNTKYIGMDVHQATISIAVLNSSGKLVMESVIETKALTIVQFVRGLRGDLHVTLEEGTWAAWLYDLLKPHVREVLVCDPRKNALLKTGNKSDRIDARKLAELLRGGQLSPVYHGEHGVRTLKELSRSYLAISGDLARVMTRLKAVYRSWAIACAGKQVYAPRYRAEWLGKISEAGVRRRAEFYYQQLDELSALRQQVRRELLAESAKHEASKLLCQIPSIGPIRAALLIAIVQTPHRFRTKRQLWAYGGLAIETHSSADHRYVEGQLQPAKRPVSLRGLNRNHNHELKNIFKGAAIIAATKAGPLQEFYAALVAKGIRPEMARLTLARKIAAIALIVWKKGVSFDAQHLKSQTA

SEQ ID NO: 41200 - protein, 424 aa, unidentified
MKVTYQTCCGVDVHKSFLVATIVKTNGGIEPSYQKKRFSTFNNSILEFKQWLLDNDCHDVCMESTGKYWVPAFNLLEDEINVVIANPKWVKAVKGNKDDTKDSKWIGDLFRLGLVKGSYIPCKKVRILREYSRYRYKLVSCRSSEKNRYQNALTVCNVALDSVVSDIFGKSSSSIIDYLLEQSGTSINHEEIASKLLRSLKSKEDAVIESIEGYQMTDAQKYRMRLVRAHMDYITAEINDVDKMIEKMISSNPDFENAVQFLCTIPGVKRDSAITIISEIGTDMSQFSSSKRLCCWAGLTPGSNESAGKKKSVRITRAGVYLKPALVQCAHAAVKSDKSPYYKKKYESLVKRRGKKRAIIAIARMILTAIYQMLSTGEQWNPSDLYKIDMPVALVEKQKAKAIKQAKKLLQREGLLPPDESLAS

SEQ ID NO: 41201 - protein, 370 aa, unidentified
MGEYSEAFVAFDVAKMKHAVAIAEGGRTGEVRFLGEIENTPARIERIIKKLASRYNRLHFCFEAGPTGYGLYRQIEELGHACLVVAPALIPKRPGERVKTNRRDAVTLARLHRAGELTGVWVPDATHEAARDLVRAREAAWDDLRRKRQQLLSFLLRHGRIYTAGRDHWTLAHRRWLARQSFEHVAQQIVFQEGITAIEDAGQRLHRLEEQLAGIVPSWSMAPVVRAYQAMRGAAFLVAVTFAAEIGDVRRFETPRQLMAFLGLVPGERSTGETVRRTRLTLAGNRRARRILVEAAWTYRFPARVSETLRARLEDLPKAVRDIAWKAQVRLCARYRRLAAAGKKLPVIVAAIAREIAAFLWAIGREVAPL

SEQ ID NO: 41202 - protein, 391 aa, unidentified
MSMYFAGIDISKYKHDCCIIAAADQSVVAKFTFKNNKEGFDQLLTTINSLSSPEDIRIGFESTSHYALNLELFLENASLTFMEVNPVLISEYKKSTTLRRTKTDSVDCESIARWLMTVEYKPHSKGFYHAYSLKSLTRLRDRLVRQRSLYLVKLTNVLDHTFPEFKPFFNERFSKTALYLLENYGSAENMSTMNETDYNEIRRVSHGKFSPQQFLELKRLATDTVGINNSIFDVELESLLSLYKSLAKEINTLESEIIRLINEVHPHFMTIPGIGPISAAVIYAEYGDISNFSSPAQMLAFAGIEPSVNDSGTESHGGKMVRHGSSPLRYVLLNCCLPLIRFDMTFATYYAKKRHEGKPHRVAITHVAKKLLRVIFALEKQNIDFNSQKLR

SEQ ID NO: 41203 - protein, 314 aa, unidentified
METTRYVGIDVSAAMLDVAVHEGSVTQVANDASGITDLVKALQDASTTLVVLEATGAYHREVTSALVAAGVPVAVVNPRQVRDFARSTGRLAKTDRLDAGILARFAAVVRPTPRPVPSDATLELTALVERRRQLVEMLTAEKNRLSVARKPVRPSVQQIIRALEKALAAADADIDRWIRSSPVWRAQDDLLQSVPGVGPQTARLLIAALPELGRLTRREIAALVGVAPLACDSGTLRGQRHCWGGRSHIRAVLYMAALAGSRFNPVLRAMYRRLKAAGKPPKVALVACMRRLITILNAMMKTQRHWQAPALLTP

SEQ ID NO: 41204 - protein, 344 aa, unidentified
MDHFAGLDVSVKETSICIVDDAGKIVREVKVASEPEALLAVLKNPAYHFKRIGLEAGPLSQWLVSALAEAGLPVICVETRHMQAVLKAQINKTDRNDARGIAQMMRAGLYRPVHVKTLRSQKLRMLLTHRKLLQSKAIAIENDLRGTLRNFGLKVGMVGKVMFEARIKELVENLPDLAELVEPLLIVRRVLREQIVILHRRLLAIVRDDEVCRRLMTTPGVGPVVALTYRATVDVPARFRKSKAVGAVFGLTCAKYQSGEVDRNGRISRCGDEMMRVMLYEAAQSMLHSKKWSWLKAWAMQVARRRGMKKAIVALARRLAVIMHRIWVDGTEFRWTRERATAAA

SEQ ID NO: 41205 - protein, 343 aa, unidentified
MQTVSTIGLDIAKSVFQVHGVDADGLVVIRRQLKRRYVLAFFEKLPPCLVGIEACASSHYWSRELQALGHTVRLMPPAYVKPYVKRQKNDMADAEAICEAVTRADMRFVPTKSPEQQSGLMLHRTRHLFIRQQTSVINAIRSHLAEFGVTAPVGRKGMEELLRVIADPSDKRVPDVVRACLAGLGSQLLSLKKRILDFDRMIMAWHRSNQTSRRLNSIPGVGPLLATALVANVADPKAFRSGRNFSAWIGLVPKQHSSGGRDRLGSISKQGVRYLRSLFVAGALAVIRYAKIHGTKHRPWLTALLARRPTKVAAIALANKLARMAWAMMATGARYNYPPALKV

SEQ ID NO: 41206 - protein, 394 aa, unidentified
MHVLYRRCAAVDIGKDVIAVAVRLPGDGPEHRQTIKRTFKTFYGVLKHAAGWLTAQQVTHVAMEATGIYSMPVYHALIEHGQFEKVLVCNAGHVRNVPGRKTDLSDAEWLVHLLECGLLRGSFIPPAQIKAARDVIRYRTKLTESRTSELQRLGNVLQDAGIKVDSVASTITTRSVRAMVEALIDGERRPLLLAELAKGRMRARIPDLQRALEGRFDDHHALMCRLHLDHLDHLEEMIARLDTQIQDMMQPFRAQRELLTTIAGIGPFAAAAIISEAGADIGETFPSAGHFASWIGVCPGNHESAGKRHSGKPERETSICSTSSSNARGPRRARQAICKACTAGTSASSAAHATRPPRTKPSSPSRTNWPSSSGTCLPPANPTQTSAPTTSTVE

SEQ ID NO: 41207 - protein, 454 aa, unidentified
MAKKREKRECRAVVLEPDAAGIDIGAEEIYVAVPPDRDEESVRMFSSFTCDLHALADWLVQCRIRTVAMESTGVYWIPLFQILEARGLEVYLVNARYLKSVPGRKSDVSDCQWIQYLHSVGLLRASFRPSMDICAVRSLWRHRGSLLQMASEHILHMQKSLSQMNLQIHHVLSDITGASGQAILDAILAGERNPVQLAQLCNCRVKSPREKVAKALEGDYRPEHVFTLKQSLDGYRYYQRLIAELDREIQHLMQTLPSAVETVQEMPRRTKHSAFQRQGNDPGFDLRGQLYRIAGVDLTDIPGVSAVTAQVILTEVGPNLRRFRNASAFASWLGLCPENRVSGGKVLSCKTRKVKSRAALALRLGANSLCRAKGYFGEFFRRMRAKLGTAQAITATAHKIARVLYHVLLTKEPYTETVFHQSDEHARRRAEMRLRKHAALLGFQIVPTPARSTT

SEQ ID NO: 41208 - protein, 208 aa, unidentified
MLSIGIDVSKGKSTVCGMKPGGEIVYTPFEVQHTREGMSELVSLLRSSGEEVRAVLESTGSYHCPVVAALLENGIFVSVVNSLRMKRFCSQSIRKVKTDRIDAMQIALYGLAYWQELQPARLLQALAKTLPEYSLVREMPCIGDTLAPRLIAEIGDVRRFHSKRALIAYAGIDAPPYQSANSARITAISPSGEIAICVRPGTKSCRAM

SEQ ID NO: 41209 - protein, 427 aa, unidentified
MSEVESVRREPQFAAFVGIDWADQKHVWGLQAVGSEKRESGELEHTPEAVEAWVGQLCQRFGNRPIAVAVEQWRGALVYMLAKYEPLHLFPVPPTMSASMRKALYPSGSKDDPRDADLLLDRLLQHRDKLHRWSPDTEATRRVQNLVEERRKLVDEKTAQTNRLTNHLKIYFPQILDWFEHLDSELVCALLERWPTLEELQKVPPAKLRSFFRKYHCRDEALTERRILAIGQAIPAIRDRAVIEAKSTVVKVMVQLVRSLVEGIADLDEKIEEAAAAHPDFFIFESLPGAGAVMAPRLLAAFGSQRERYGSANEVQAYTGIAPVTEKSGKKKWVHFRWACPKFLRQSFHEWAGHSIPHSVWARAYYQQQRNKGRDHHAAVRALAFKWIRVAFRCWKDGVVYDERKYLASLARRGSPLATVAATAKPL

SEQ ID NO: 41210 - protein, 390 aa, unidentified
MDADGTRLASRRLPEGLAGIRGFHELVAARADAPAQVVIGIGTDRGLWVEALNAAGYQVYAVNPLAVARYRDRHQVSGAKSDAGDAKLLADLVRTDRHNHRLLAGDTAAVEAIKVLARAHQNLIWARTRHTNTLRSALREYYPAALEAFDNLADRDALAILGRAPTPADAARLSLSKIRSALKTAGRQRNLDAQALGIQTALRTEQLAAPAAITAAFGATTRAAVGIIAELNHQIADLEAELATHFEAHPDADIYLSLPGLGVILGARVLGEFGDDPNRYTTAKSRKNYAGTSPLTIASGKKRAVLARHVRNRRLYNAIDQWAFCALQSSPGARAFYDQHRAAGDLHHQALRALGNRLVGILHGCLRHHTTYSEHTAWAHRQTSPTTRAA

SEQ ID NO: 41211 - protein, 379 aa, unidentified
MKKCIRYLGLDVHGREIMAAVVEEDGKERYLGVIPNRPESVRDLINRLGEKEQLRAVYEAGPTGYGLYWQLEGMGVSCEVAAPTLIPTKAGDRVKTNRRDALKLARYHRSGDLSYVWIPDEDLEALRDLIRAREAAKRDEKRARLRLKSFLLRHGLRAPQGARAWTTKYRAWLEAMTFERAALTGTYQDYLHEVHHHELRVRRLEAAIEEAVEQAPEQFREVVGALQSLRGVGKTTAIGVTAEVGSFSRFPHPQQLMGYSGTVPSERSTGDKHHRGAITKTGNSHLRRLVGESAWSYRHRPALRYALKKRQEGQAAEVVEISWRAQVRLCGRFHRLVARGKTKQKVVTAVARELLGFMWAIGVEVERRRTNATAQEKLG

SEQ ID NO: 41212 - protein, 341 aa, unidentified
MKVSTLGIDLAKNVFQLHGVDHEGHTILRKKLTRAKFVQFVIQLEPCLIGMEACSSSHYFARLFTRYGHEVKLIPPQYVKPYVKTNKTDAADAEAICEAVTRPNMRFVQIKTEEQQAVLALHTERGILIHERIACANSLRATLAEFGITIAAGQSHLTRELPAILEDGENGLSPFVRTSIYRQSKHIRELEEQVKQVEEALASWYRTQEACQRMAKIPRVGMLTATYVVAAVGNARQFSTAKQFASWLGLTPKEHSSGGKQQLGGISKRGDGYFRYLLVHGARALTAWVNRNGAVEENSWLQGLLERKHYNVAVVAMAAKTARIMWSMLSHNTEYQPRQLA

SEQ ID NO: 41213 - protein, 311 aa, unidentified
MQDLFIGVDISKNWLDIHHPNQPPVQIANTPVAMRRFTGACRREGAWVIFEATGGYDRALRDALERVGAKFSRINPRQARDFARAMGVIGKTDRVDARMLAEFGARLRPEQTMPVAPQIRALQALVTRRRQLVEMRKQEATRLKQTHGNASRADIRSLITILDRRIQKIEAQIVTLITTNPELADTARRLHTVPGVGLIVAATLLADLPELGRLDRRRIAALAGLAPVARDSGQMKGRRMIRGGRSTVRAMLYIAALHASRFCVTFREFRQRLTDAGKPIKVVLTATAHKLLSVLNAMVASSTDFQLDPSA

SEQ ID NO: 41214 - protein, 555 aa, unidentified
MITPTRTPVAKPSTSQGKKAPTPDTSAKAKPKPKASANTKPKPKASANTKPTKSADARRTPTRGEKKQARQQADRQAHGKRKQRAAARSQEHHQQLARAEEAERAKVAAMPVVNRHAAGVDAGLTTHWVCIDADGDEGKCVRELPTHTDGLIAIRDWLLENHVTTVAIESTGIYWIPLCEILEAGGLEVFLVDPSYTKQVKGRPKTDRLDCKWIQRLHTLGLLAAAFRPDEKIRVLRNYLRQRANLIRACSQDVQHVQKALEQMNLKLTTVLSDITGETGLAILKAILRGVRDPLKLAKLRNERCQRSEAEIAQALTGSYRDEHMFALRQAMDVWEFHRKQVGQIDEVIEKYLAELGKKEDLPALPKGKRQTRSDNDLAFDVRGALYRVTGVDLTEIEGIGELTALTVLSEIGTDMSRWPTVKHFTSWLGLCPQHKKTGGKVRSSRTRGGANRASQALRLAANGLHRSKSGLGAYFRRMKGRLGTAQAVTATAHKLARLVYWMLKHGTEYVRRTEEEYEQRQRERLIRNLKKRARQLGLEVREGEKTTETGAAEE

SEQ ID NO: 41215 - protein, 361 aa, unidentified
MDSTFPPVSITHHIKKRNKEEFDINTSVVGLDIAKNIFHMYSIGADNQVIKKKLKRAELLAFFVNYPTSLIGIEACGGAHHWARELIKLGHEVVLLNARYVKSFVVGNKNDFNDAQAIFDAVTRPNKRVVAIKTLEQQDIQLVHTVRQSLVAQRTALVNQIRGLLSERGIVIHQGIHQVRKLLPSILEDADNNLTPLSRELLNERYEQLVQLDDAIKQQDRRMNRLCTDNELSKRFLEVPGVGPMTATIIASDIGDGKRYASSRDYAASLGIVPRQHSSGDKLIYLGISKRGNRYIRTLLIHGARAVLKNCSDKTDKLNRWLQALIERRGFNKAAVALANKNARILWAMAAKGQVYQSLPA

SEQ ID NO: 41216 - protein, 440 aa, unidentified
MDTGNAERLTEPDWAAFIAIDWADQKHDWAMEVPGQSKRERGQMAHTPEAIDTWVMQLRQRFADRPIAVTLEQSRGALLFTLSKYANLVLYPLHPGTVSSFRQAMYPSGSKNDPLDADVQIELLVKHRDRLQVWKPDTEATRMLQFLVEDRRRRVDQRTGLLNQLTGRLKLYFPQILRWFPSSDSILMWQFLEHWPDLQSAQNASRQRLKAFLVRDARSCPADVDGFIRQVREAIPATKDRAVVASAALFVQEIVCQLQVLRTTIQKYDKQIEAIAQQHPDFPIVSSFPGIGKALAPRLIAALGTQRERFPDARSMQSYGGIAPVREASGRREWVHARWACPKFLKQTFQEWAQHSMARCAWARAHYDVQRARGKGHQAAIRSIAFKWIRILVRCWQDHTPYDEARYTQSLSRRSSAPSTAVTIVCKNVAGFSKLTGLSA

SEQ ID NO: 41217 - protein, 311 aa, unidentified
MKNHVGVDVSKQYLDVCILQQQVNKRFGNDASGIRDFINLLAGYERTLVVLESTGGYEMDLFCALQKAGIPAAKINPRRIRDFARACGQLAKTDRIDAQIIARYAQTIEPKADSAQDGRMTALKALVVRRGQLIGIRTAENNRLEHVRDKSIKHSIAGMLAEINRQLKTVEMTIQKHIDAMPELKSRQDILDSVRGIGKNTAAMLVTELPELGLFNRRQIAALAGVAPVNRDSGQFRGKRMTGGGRGYVRSQLFMPTLVAIRRNPKICEMYKRLIANGKKKMVAVIACMRKLLLIMNSMLAKNQCWIPKTV

SEQ ID NO: 41218 - protein, 353 aa, unidentified
MQTQSKRIDFTGQNFYCGIDTHKKSWAVTIETDEIPLKTFTQNADPVLLVNHLRKNYPGGTFLAGYEAGYFGYGLQRSLESMGVNCIVIHPADIPTTNKDRDQKRDPRDSRKIARALKNGEVLPIWIPSISIEQDRQLLRVREKLVRDKSRTKNRIKAMLQIHGISYPEVFRQPGSHWSARFIKWLEGVQFQESSGTESLKCLVRCLQFQRNELVTISKKIRVLSKNDQYNDANLRLLKIPGIGMITAMTILTEIGNLNRFKSADHFRSFLGLIPRANDSGEKEHPGRMTSRANKHIRYLIVEATWMAIRHDSFYLHLYKTYRQRMKENKALVRVAGKLSNQIYFSLKKEREH

SEQ ID NO: 41219 - protein, 406 aa, unidentified
MVTRIKKRKFEGSKKRFIGKPTGQIQERVQAVGPERFGIVSVDCAKRRSKWMLCNFYGKVVVEPTVVEHTTGGLRAMTQVVAVACREEGLTDTIVAVEMTGIYHKRVQRAFRKAGFDTRIVHPFASNHYRRTLHPDEKTDDHDLEAIFHAAVNGYGLATLPVGEVYQSLQAVSRHRHNLVKQRSRLMVQMRRLLHQTMPGFADLFEDDKLFHKSIALPVALEFPSAEAIRHAGVARIESHLTKTKVRIQRRTIERIVAWAGTAAESSELATIHTRQWQQLNEVRRLFDAQVGAAEREMAGFLVKTPYILLLSVTGINVVSAGRLAGEAGPIEHYASARAINGRAGLYPSRYQSDEVDHADGTLVRQCNRQLRGAAMQVADNLIKCHPYYRGMSALWAQQNYGAQLN

SEQ ID NO: 41220 - protein, 336 aa, unidentified
MVKHIGLDAHSSTSTFNVTDKMGRELDNTTIETNGRLLINYIRGIEGVKKLTFEECELSSWLYELLRPEVEELIVCNPVANKDYKKIKTDKMDARKLSKLLRGGFLIPVYHDGSSREQFRSLLSGYQDLVEEAVRLKNRYKSLFRKDGKKVKGGTLYNDESFLEGLERSDFKFVGTQIYNLLEKLEESRKKYLKEILEQSKRFKEIKYLKSIPGIGTIQAAKIVSQVINPKRFANKYKYFSYCGLVRHKRISDGRGYGSEKIWGNRILKCVYKMAGHSALKGSSGLRRYYDSLRLKGISHDNAYNAVCRKIAAISLSLWRKSEKYNDKLVEGNLIK

SEQ ID NO: 41221 - protein, 377 aa, unidentified
MKAPSTRPAAVLGLDVGKSSHWACLIDRDGEVLASAPVRNREAELDALFASAPAGTLVVVDQFRNIGSLAVRRARAAGLGVAYLPGLAASRAAGLFAGEAKTDERDAAVIARTALGVPDSLSGVPGRGEALEAARALSSQRDHVVACATRDKNRLRAVLLESCPALEAAVDLSDRRWLELLAGFGGAWGIARSGAEGPRAEAAGEAAAASTAPPPALVEAENRQVRFLAARISEALDEAGALEAETAALLEGDETYACLLTVPGIGPRTAAQLAVSVDIGRFPDHDHLASYCGIAPRVRSSGTSVRSVRASRRGDARLKSLLIFSCNSLVRSSGRYGEYYRACRTRGMGHGRALKAVARKRIRAIYAVMRDRVPYRE

SEQ ID NO: 41222 - protein, 420 aa, unidentified
MMICSLDLGKFKSVACFFDTENQTYRFETILTKVSHVNHLFESNDIDLVVMEACGPSGWISDVCHQRKLKTIVCSTNDEAWSWKNTKRKTDRDDALRLAKMAMMKDLTSVHVPSPEIREQRAIIKYRKNLDYRITRIKNGIRSTFANRGIEIDTGARAWNTGRAHIDSHRKPIDQCGPDDLWKGQLDSELKQLDELTTEMESIEQRLELFAVDNAHIQRVMTIPGVGRKTAEMLVATIDDPHRFKSARHISSYLGMTPRQYQSGEMDRSGRISKRGPRMLRSMLLECAWASLRYNEWSKLTFKRIHGGSTTRRKKAGIALARKIAVVAWAMMRDETNWNASKLIADAEQVGAPEPNDEDATEKAKTGSNKEAPRNGATARPLQRAKPKPPGPIHSEEPKRAASQPKKSPRRKSRRSPMKT

SEQ ID NO: 41223 - protein, 388 aa, unidentified
MIYVGIDIAKLNHFASALSSDGEILIEPFKFTNDNDGFHLLLSKLSSFEKSNIIIGLESTAHYGDNLVRYLVAENYKVCVLNPIKTSVMRKNNIRKTKTDKVDTFIICKTLMLQDSLRFVTYYDLDLMNLRTLGRFRQKTIKQRTRLKIQLTSYVDEVFPELQYFFKSGLHQKSVYALLKEAPTPKEIASMHMTHLAHLLKVTSHGHFDKETAQQLRVLAQKSVGASDSALSIQITHTIGQIELLDSQLERVEAEMTDIMKFNDSVIMTIPGIGYINGGMILGEIGDIHRFSNPSKLLAYAGLDPSVYQSGNFQARKTRMSKRGSKVLRYALVNAAHNVVKNNATFKAYYDAKMAEGRTHYNALGHCAGKLVRIIWKMLTDEVECNLD

SEQ ID NO: 41224 - protein, 353 aa, unidentified
MKKMQEYIIKGNRIFVGLEDSKKTWKVCVRCNRMIVHETGMPAEYEVLQGYLMNHYPECTITLMYEAGFHGFWLHDLLEEDGIECIVTPANKVTCAKDDRVKTDKRDARRLAQNLENGDYVSCQVPDRERREDRQISRTLSQVQKDITLEKNRIRRFLEYHGLDRGLPSGAWKDRDYLTLRNMSLNPSLRVSLNAYLRILTELLAVKKDLLRELRALCDKERYKVGVHAKKSCPGIGWLTAIRLTLEWGEMRRFPTGKHIASFAGLTSREYSSGETVHRGRITGQSSEYVRSWLIECTWRAIRKDPVLLAKFNAVWQNSGSKKKGIVAAARKLAVRLWAIETSGQSYCIGVVE

SEQ ID NO: 41225 - protein, 342 aa, unidentified
MQVTTIGLDIAKNVFQVHGIDAKEKVVMRKQLRRSQVIAFFSALPPCLIGMEACATAHYWARELRKLGHEVRLMPAKDVKAYLKRNKNDAADAEAICEAVRRPTMRFVQIKSAEQQGQLMQHRTRDVLIRQRTQIINALRAHLAELGIVAAQGDTGVNELRAIVADDRNERLPIDARASVIVLAAQLEALQTLIGSIEKRIKMQHRSNETSQRVETIPGIGVLGASAIVATVADPTIFRSGRDFAAWIGLVPRQDSTGGKQKLGPISKQGDRYLRRILIVGAIAVLRRAQGNPGKYPWLTQLLARRPFKVVAVALANKMARTAWALMAHGGTYRAPELAEAA

SEQ ID NO: 41226 - protein, 336 aa, unidentified
MNEATWFLGIDVAKRKLDIALLVTDKIKSKVFDNNTSGHAALTRWLIERGAIQSHTHICLEATGPYSEALAIALVDAGWHLSVVNPARIKGFAQGELARNKTDRADASMLARFCAAMRPGFWTPPSSEWRELRGWVDRLQALKDMHQQESNRLEAHLASGQAALVEAVQTHLDWLTKHIAQLERDIDDHIDRHPELKRDAELLHSIPGIGNTTIAKVLAYAGDVRRFASAKALAAFVGVTPRQRLSGTSVKGRSMMSRTGHADLRRALYMPGLVARWHNPLLKVFGDRLSAAGLAPKAVVGTVMRKLAHLIYGVIKSGQPFDPKFSTARLDFQDGI

SEQ ID NO: 41227 - protein, 369 aa, unidentified
MTSIIYIGMDVHTTNYTLCSYIYGEDDVFAQVQVGPDYRNILKYLQQVREIYSECYIKCGYEAGSLGYSLYHQLANNGVDCIILAPTSMPETRRKGIKNDKRDARKIAKCLANNTYSPVYIPSNEDDAVKEYIRMRDDQKDTVKKLKQRILSFCTRHGKFYCDGGNWTQKHLVWLKKLDFGNAVLQETLQEYLILYHQASEKVVVYDKRIEELAKQEAYAEKVKKLSCFIGVKTHTALALIVETGDFNRFAKAQNYSSYLGLVPGEDSSGSSIQRTGITKAGNSHLRRLLVEAAHSYSRGSPGQKSKTIAARQAGNEPKVIAYADRSNERLRRKFHRLMYRKTKYNVAITAIAREMACFIWGMMTDNIA

SEQ ID NO: 41228 - protein, 385 aa, unidentified
MTQPAHDISFIPRDYDIFAGLDVDKKSMAVTFRDHGTMRKSLKLPYSGRQLLNYTRKHFPGQRVAFVYEAGPTGFGLHDELTAAHHPCLVVSPAMVPTAARPRVKTNRLDSNKLAEGLRGGQLHSIHVPATSYRELRHLVQLRDTQVAQLRASKCRIKSLLLYEGIPFPAANGQWSGQVLRQLEALPCSRAVRFKLDRLIDALQFHFQSAARVQKEIRHYCQKDPELRQSISFLTSLPGVGAITATHALARLGDWRQISNVRQIAGFLGLVSSEHSTGDKENRGEITRIGDSRLRNKLIQCAWTAIRKDPELRAFYRRIYERQPKKVAARKAIVAVARKLTTRMYAVLKEQRPFVVRADNSIAPLTAEETAGPRERLDAAQNEQQ

SEQ ID NO: 41229 - protein, 342 aa, unidentified
MKHYAGLDVSLEETFICVVDESGKRVWRGATKSDPQTISRVIRKRAPKLVELGFEAGPLCRWFWHEFKEMGFPVVCLDARHAKAALSMQVNKTDANDAYGLARIVRTGWYRAVEVKSIESHVVRSLLAVRSQLVGIRTRLSNQLRGILKTFGLVVGKVSGRSLESRVRELTAGNLMLKDVVESILNVWRTIYDQLAVIDKKLRQFSHSNEVCRRLMSVPGVGPVTAAAFMAAIDDPDRFKRSSSVGAYFGLTPKRYQSGEVDRSGKISKCGDSRVRSYLYEAAGVLLTRVKKWSKLKAWGVRLATRVGLRKAKVAVARKLAVILYRIWVDNSKFQWGDAPSL

SEQ ID NO: 41230 - protein, 387 aa, unidentified
MTAVVIGVDPAKRSNTIEVMDSRETVLVTARFDNTNADYRKIRTLVKRWPDRVWAVEGATGVGLHLAQRLISDGERVVDVPSKLSTRVRAIDSGHGRKNDPTDAHAVAVVGLRTKGLREVAADDQMVALRPLSERRRDLVRSRTQAVNRLHQVLMELIPAGAQRHLTAAKAKELVATVRPRDVAGKARRQLAVDLIDDVGVFDRKITTVDTRIQEAVAASGTHLTDIVGVGPVTAATILGEVGDIARFQTADQFASYTGTAPIEASSGEVVRHRLSRAGNRRLNSALHVVALSNNRYDPHGKAYYERKLAAGKGSKGSMRCLKRRLSDVVFRVLVQDRALVNPGGQMGATLTASAVDQIPKANTSDKPQPGFGTEATPTRRLTEAAS

SEQ ID NO: 41231 - protein, 334 aa, unidentified
MENIALIGIDLGKNSFHIHCQDRRGKAVYRKKFTRPKLIEFLATCPATTIAMEACGGSHFMARKLEELGHSPKLISPQFVRPFVKSNKNDFVDAEAICEAASRPSMRFVQPRTESQQAMRALHRVRDSLVQDKVKTTNQMHAFLLEFGISVPRGAAVISRLSTILEDNSLPLYLSQLLLKLQQHYHYLVEQIKDLESQLKRKLDEDEVGQRLLSIPCVGTLTASTISTEIGDGKQYASSRDFAAATGLVPRQYSTGGRTTLLGISKRGNKKIRTLLVQCARVFIQKLEHQSGKLADWVRDLLCRKSNFVVTCALANKLARIAWALTARQQTYVA

SEQ ID NO: 41232 - protein, 401 aa, unidentified
MEGPIVSIDVSNGNSHYMCFIKNNKRFGKVKKIDHDIEGFKRLLEDIQKLEAETNEKVCAVFEATGVYTKPLERFLSKNSIKTYMINPLESARKRKEEIHNKKTDKLDPISISKVYYDKEKMMELKKKDETYNWLRKKNRLYEDQLNHLRKYKVTFQNQLSICFPGYLDLFKDGYSDIPMTILKKYPHPDLLKNKKAETVARYLEKNTCHNHKVSLEYALKIIEFAKKTYPGCEKDDVEVEIFKILLDKVIETQRECEKTLNEMITVASTLEEYRYILSIDGIGTNLAARIIAEIGDIEEFKSREALVAYAGLDPHIYQSGDQDGKHLKISKKGNKYLRCLLFLAVGCSIRGAKDNPVNQFYQKKKQQSNPLNSKAAKTACTAKLLKIIYGICKNKTTYER

SEQ ID NO: 41233 - protein, 385 aa, unidentified
MSDHSEAFVAFDTSKLRNAVAIADGGRGDEPRFLGEIDNTPAATAKLVRKLAAKYERLTFCYEAGPTGYGLHRQVKSLGHECIVAAPSLIPKKPGDRVKTNRRDAVGLAKLLRSGDLTAVWVPDRRHEAMRDLTRARETAMLDLRAKRQQISAFLLRQGLHYPEDKRTWSKSHLNWLASQKFDIAEHRIVFEELMEAMRQAQGRLDRLEAAIRAAVPDWSLGKLVIALMAMRGLDMISASTIVAEVGDLSRFRTPRELMAYVGIVPSENSTGDKVKRGPITKTGNRRVRRMLVECAWSYQFPPRLSKDKQVKVDAVPQAVREIAWKAQSRLNQRYRALLRRGKLKNVAITAVAREFVGFIWAVAQAVGAAPAANNRTAPAPAAAR

SEQ ID NO: 41234 - protein, 433 aa, unidentified
MTTRQRALLTEASVSRETKEVTGKVLFAGIDWASTEHAVAVNDDAGRALASFTVEHSAEGFDKLVARLRAFGEPGGLTVAIERPDGRLVDRLLEAGHPVVAVSPNAIKAWREGEVVSGAKSDPGDAAVIAEYLRLRFHLLEPLQPFSDHTRALRAAVRARGDLVAQRTAAHNQLEATLDAFWPGAKEVFSDVTCKIALAFLRRYPTPASAAKLGEKQMAAFCRKHGYSGGRSAADLVERLRRAPAGITAVAETAARKAAVLAYVGVIASLNAAIKDLDKEVATALGEHPDGEIFTSLPRSGLINAAQMLAEWGDCRQAYDAPEAVAALAGMSPVTKRSGKYKAVHFRWACNKRFRTAVHTFADNSRHGSDWAAGIYAQARARGADHPHAVRILARAWIRVIYRCWSDGVGYDPAKHKAAVALAARDKPASQAA

SEQ ID NO: 41235 - protein, 450 aa, unidentified
MSNEKAETAAVPEPEWAAFVALDWADQKHHWRLAVAGSQKQKQKQEQGELDNTPEAVAAWVADLNVRFGGRPIAVCLEQTRGALVYMLLKFPQLVLFPVNPKTAACFREAFYPSGSKGDPGDTDVLLDILLHHRDRLRRLKPDTVETRLLQRLVEQRRRMVNEKTRQSNRLTACLKLYFPQILKLFDDVTSPLVGALLERWPNLEQLQRAHDGTLRDFFHKQNCRSKERNQERIEAIRQAVPATTDVAVLEGEAMVAHCLVKLIATLRDNITELDERIAKAFAAHPEKVLFDGLPGAAAVLAPRLLVAFGTDRERFASAHEMECYSGIAPVTEASGQSEWIHFRWACPKFLRQTFHEFAGHSIAKSEWARAFYDLQIGKGKEHHAAVRALAFKWIRVLFACWKNRTPYDEQIYLQSLRKRNSPLKALLPPGGALGWKDVAGFQKLSEDPS

SEQ ID NO: 41236 - protein, 418 aa, unidentified
MTAINSIASTVLVAIDISKHRHEVLIGIPGKKRRRRLTIMNTLEDFERLAGFIAGYQMPVRIGFEATGNYHRPLAYHLGQAGFDLRLVSSVALARTREALHNSWDKNDPKDAQVILHMLDIDAVQFFHDPLVTGTADIQELSKTHEIVSRSKTELWHRILTHYLPLYFPEADRFHRSARSDWFLAFLEKYPTPHMITAMTEEAFIADAWRVVGRKVSKERLLSDIYATAAGSVGLPMQPDSDAVRMFRLVLAEGRSLVRQRNEIEARAVELLSDHADYQLLTTIPGIGPINAMTVLAEAGDLRRFRHHRQFLKFCGMDLATVQSGMFRGQSKVSKYGNARLRRTLWMAGQTAVLKRTNSFRDKFERYISKDRHNAHLRRKAYTAIAAKMARTIHAVVKHGEPYRPFFEGVSPGGKTSL

SEQ ID NO: 41237 - protein, 364 aa, unidentified
MEHIAIDLGARESQVCVRSAGGEILEERRIATRPEKLRCYLAQRPKSRVIVETGAEAFWVAEIACECGHEARVVPSMLAPSLGVGRRGQKSDQRDARVLSETSCRIEVPTVHIPAVETRRLQSRLGMREALVRSRTKLTNVTKAYLRTIGERAPIRSAKKLVVQLREKQAQAAQHLEPLLRTVEELNHSIEQFDEELEKLAADNDVAQRLQTVPGVGVVTSLRYMATLDVASRFRNGAAVGSYIGLVPSEHSSGQKQRKGGITKAGSPSMRGVLVQAAWAALRSRRHHNDPMVCWARGIAQRRGKKIAVVALARKLSGILFAIWRDGTRYDAPRAASEELPAPPRRWAPSKGPRRPLRLESATV

SEQ ID NO: 41238 - protein, 338 aa, unidentified
MKKFSGIDLHSNNSVVVVSDEVDHIVYQRRFPNDALQIRAALAPHREELEGVVIEATYNWYWLVDALLADGYHVHLANPAAIRQYEGLKYSGDFTDAANLAQLLRLGLLPEGYIYPADGRQVRDLARKRMQLVQCRTVQILAIGNLFARHTGSQMHGPQVKRLDGAQVSRFGFAPDVTLAIRANLAVLQTLQQQIEIVEKRLMQQVKLNPDYALLNTVPGIGPVLATTIMLETGTISRFATVGHFSSYCRCVDSRRESNSRKKGEGNTKNGNRYLAWAFVEAANFAIRTCPQARRFYERKKRMRNGIVAIKALAHKLARARYHMLREHKPFETVRCFG

SEQ ID NO: 41239 - protein, 349 aa, unidentified
MEHYAGIDVSLELSSVCVVDAKGKIVKEAKISSDPVALVTFFRGLGIAIERIGLEAGPLSQWLHAGLTQAGFEVVLLETRHVKAALSAMTVKTDRKDARGIAQLIRMGWFRPVHCKSVGSQEVRALLVGRKLLLGKLLDVEFSIRGILRGFGLKMGMVTRRNFEARVQELCAGHSMLEQICAAMLAARSALQIEYTKLHKAMLTIVRKDEVCRRLMTTPGVGPLVAITFKTGIDDPSRIRKSKAVGALFGLTPKKYQSGETDVTGGITRVGDEMVRTALYEAANILLSRVTRFSALKRWGMDVAKRRGTKRAKVALARKIGVILHRMWVDNTNFRWTKEAPNAPRLIQA

SEQ ID NO: 41240 - protein, 430 aa, unidentified
MVRYIGLDVHRREIEACVLDEAGSRLHRQRFDATREAIEGFASRWISAEDQVALEATGNSWGVVEVLRPLASEVVVSNPLLTKAIASAKVKTDKVDAAVLAQLLRCDYLPRVWEPDAATRSLRRLTSRRTSVLRGRTAAKNRIHAVLAERLIPLEGHELFGPVGRQWLAALELDEESRCLVDMDLRLIDGVDEEVRRLDEILFRRGHGDERVKLLMTLPGVSIGVAQGLIAAWGSIERFADPAHAASYLGLVPVTKQSGDRCYHGPITKAGNGHARSMMIQAAQHLATEPGPLGAFFRKIAKRKCWNVAVTATARKMAEIAFLMLKNREPYRYAKPTQVETKLAKLRVRATGEVRPPTRREGKRRPAEAAQGDWVRRIRPLAEVYEREGLPAMHPIGAGEQRALRAAKVKTFVEGLAREHLVVRKKSPKE

SEQ ID NO: 41241 - protein, 396 aa, unidentified
MKYYTSTTEYNCGIDLHAHQMYVCVMDRQGKKLVHCNVKDNDFDYFLKLIKPYRHDLTVCAECMFGWYWLADACQAAGLKFVLAHALYVKAIHGDNNKNDRIDSEKLAHLLRANLIPQSYVYPSEQRPLRALLRQRLFFVWQRSDLLCRIQSVQLAHNRPTLRPTRPNRDPWEAHLLSHEDHPLRQLALKNEMAMIRHFDAQITAVEEQLHRLTKENLPRDYALLQTVPGIGEHLGMTILYEIGDINRFPTVKDFLSYCRLVKGTVASAGKFKGLRGAKLGNPYLRWAFGEAAVLAKRDHHIIGPLAQGLEARLGNNVLAIKLARAVYFMLKNRTVFDPDRLVMALERKSFGPGRSQPARSNWRQLKGEAPTSRSSSSVAPQTPNAALGTPALRPV

SEQ ID NO: 41242 - protein, 396 aa, unidentified
MTQPYAVFCGVDVGKGEHHAVGLDPNGKRVFDKALPNDESRLRAVFDKLAAHGPLLIVVDQPNTIGALPVTVARACGHDVAYLPGLAMRRIADLYPGQAKTDARDAHIIADAARTMPHTLRRVDIGDDTLTELGVLAGFDDDLASEATRTSNRIRGLLTGIHPALERVLGPRIAHPAVLEILSRCGGPEGIRASGRRKLTAIAAKHAPRMGARLVDEILAALPAQTVTVPGTKAAETVLPKLADSLKSVLLQRQQIAADIEKMFSDHPLAEVLTSMPGIGVRTGTRILLEVGDGTTFATAGHLASYAGIAPITHRSGSSIRGEHPARSGNHKLKRALFLSAFAALHDPASRAYYDRKRAEGKKHNAALICLARRRCDVLFAMLKTKQRYRAPQAAA

SEQ ID NO: 41243 - protein, 441 aa, unidentified
MTEFFLGIDVSKGYADFILIDSQKNIVEKNFQLDDTFQGHNFLFSFLQSFFLNNPNANIIAAVESTGGYENNWVSFIAKLKDDFPICVTRLNPFGVSHSSKADLKRVITDKISALTIAEYVINHRAKISFVEEDYFAPLRKQWIYVKLLVKQKVQLYNQLEALLYTANPELITYCKHGMPNWVLVLLKQYPSAKSLAKASPSVLARIPYVTPQKAETIISNAKVSVASQTDPVTGALLKSVVGQIIFLDKTIKAQEEKLTRCCSFPEVKLLQSFTGIGAYSAVGLLLEIRAIERFSSAKKLAAFFGLHPVYKASGDGMGSMRMSKKGRREPRLILFNIARTAINCNPLIKQVYKNNLQKGKSGLSAMGVVMHKILRIVYGMLKTNTAFNPDIDIRNTEQAALKKPKVVMLKSRRFQQFDSLAPVSKKQNKKREEQKASQKE

SEQ ID NO: 41244 - protein, 339 aa, unidentified
MTVKTVGLDLAKDVFQVHGISESGRVIFNKAIKRAKLLAFFEALPPCMVGMEACGSAHHWGRTLRKFGHDVRLMPANYVKPYVKRGKTDAVDAEAICEAVRRPTMRFVEIKTEDQQAILSIHRTRDLAVRQRTQLANMIRSLLREFGHILPIGIEAVTAFAKRHLDGDHPDMPEIANGMLGIQCYQFIGLNERVEGYSKMIEQHALLNADARRLMRMPGIGPITASAIVATIGDAKQFRTGRDLAAWLGLTPLNKSSGGKERLGKITKAGDRYIRKLLVVGMTSRAVMAKRSPEKVDLWTAKIIAEKPFRLATVAMANKAARSIWAMLTKEQEYRQPAF

SEQ ID NO: 41245 - protein, 347 aa, unidentified
MNSVGIDLHRNRSHIAVLDEHGELTLSKRIVNGRETFLELLGGLEGESQIAVEATYGWEWLAELLEDAGYDLHLAHPLRTRAIAAARVKTDAVDAKTLALLLRADLLPEAYVAPRELRDLRELLRHRIALTAMRSALKNRVHAILAKHGITREHSDLFGKGGRQFLAALELREAPRARLDSLIALICDFDREIDETTREIDQRAKADDRVEVLCQIRGIGPYTAMLIIAEVGEINRFPDARHLCAWAGLTPTVRSSDGKARLGHISRQGSPALRWALVEAAQKCMTGGGPLREQFERIAKRRGRKIAKVAIARQILTLSYYGLRDGEIRCLARRSRASAKEQLAAAA

SEQ ID NO: 41246 - protein, 351 aa, unidentified
MEKYIGLDVHAKSCTAAIIDGRGKRLGSQVIETNGKSLVEFFKLRAGRVHLCLEEGTQSAWLTEVLRPYVAELAVTVPRQRRGQKNDELDAYTLAEQLRQGAFTIRVYQQVGPFGELKQLVKTHRSLVIDTRRVQSRLKARYRSRGIATAGQEVYAQSTRSDWLSQLPKSSLRSAEVLYRQYDALCEIRDQARRDMVRESHRFPITRILETCPGMGEIRVARLVSVVVSPQRFRGRRQFWSYCGLGVVMRSSSDWDQDPSGSWHKVRKPVTRGLNPNFNRMLKDVFKGAATTVLQQGGEEPLYSEYQRQTLGGTKPDLAKVTLARKIAAISLTMWKNEEKYDPKKRKQVLA

SEQ ID NO: 41247 - protein, 358 aa, unidentified
MKYIGCDFHPSFQQIAMLDQETGELVERRLLHTEEARVFYAGLQGPVLVGIEASGNTHWFESLLARCGHQLWIGDAAAIARQNGRKQKHDRRAAELILKLMVEDRFPQIWVPTVVERDLRQLLIHRQHLVRMRTRVKNQLQHIALNQGWQKKHKLWSEAGLALLRSLELEPWTQQRRDTLLEMLGELEEKIRPLDQAVEKEARACEAARRLDTHPGVGPVIALATVLTMGEVGRFADSRSWVSYLGLNPSEASSGERRRLGGISKQGNPFLRYLLVEGAVSATKGDKDLARMYARLRAKKHHGVAKVAVARKLAVRLYWMARTEKSYPEVVRTQGSQSHGVAEVLAVRLNRPPASHQE

SEQ ID NO: 41248 - protein, 397 aa, unidentified
MYIVGIDIAKRKHEAAVIDGEGTVIIKPFSFTNNCSGYNRLLAMLTKAKLPLDEVSFAMEATGHYWLALFTRLQKEGFRVQVINPVQTNSIRSFYIRQAKTDPRDALLIAEVIRFGHFSESTLHPENIYELRELCRGRHAIVSMQADVKRKVVALLDQVFPEYETAFTNLFGDTSMAILQTCPTPKELSEMPLEELCHLIEVSSHKRFRMAKAQELQELARNSFGFAMAGDVFSTMIRLYAKHLDFLKQQVREMDRKIAEIMDTLDTPITTITGIGPTLGAYILSEIGDISRFSSAAKLAAYAGIDPTMRQSGEYNGVRNRMSKRGSPYLRHAIWLAASSAVLHDPALKLYFQKKRDEGKPYMASVGHACRKMVSIIYAVMRDNKAYTPCIPNEISA

SEQ ID NO: 41249 - protein, 401 aa, unidentified
MVSDFRKGRYNLMKIYVGIDIAKLNHFAAAISSDGEIIIEPFKFTNDADGFQLLVSKLESFDKNSLIIGLESTAHYGDNLVRYLVTELYQVCVLNPIKTCQMRKNNIRKTKTDKVDTYVIAKTLMMQDNLRFVSFFDLDMMDLKALGRFRQKTIKQRTRLKIQLTTYVDQVFPEIQYFFKSGLHQHAVYALLKEAPSPKEIASMHMTHLANLLKVNSHGHFTKEQAKELRVLAQKSVGANDSAISIQITQTIQQIELLDSQLEKIEAEMTDIMKFNDSVIMTIPGIGYINGGMILGEIGDIHRFSNPNKLLAFAGLDPSVYQSGNFQAKTTRMSKRGSRVLRYALVNAAWNVVRNNATFKAYYDAKRAEGRSHYNALGHCSGKLVRVIWKMLTDNVEFNLK

SEQ ID NO: 41250 - protein, 424 aa, unidentified
MKVTYQTCCGVDVHKSFLVATIVKTTGGIEPSYQKKRFSTFNNSILEFKQWLLDNHCHDVCMESTGKYWVPVFNLLEDKINVVIANPKWVKAVKGNKDDTKDSKWIGDLFRLGLVKGSYIPCKKVRILREYTRYRYKLVSCRSSEKNRYQNALTVCNVALDSVVSDIFGKSSTSIIDYLLEQSGTSINHEEIASKLLRSLKSKEDAVIESVEGYQMTDAQKYRMRLVRAHMDYITAEINDVDKMIENMISSNPDFENAVQFLCTIPGVKRDSAITIISETGTDMSQFSSSKRLCCWAGLTPGSNESAGKKKSVRITRAGVYLKPALVQCAHAAVKSDKSPYYKKKYESLVKRRGKKRAIIAIARMILTAIYQMLSTGEQWNPSDLYKIDMPVALVEKQKAKAIKQAKKLLQREGLLPPDEPLAS

SEQ ID NO: 41251 - protein, 385 aa, unidentified
MEHIYRTDFPHRPELEDTMTYFFGIDLHKTQFTVHYRTEDRIAKEIVQYATDGDGYAEFLRRIRSLRTRGYEVRIGVESTGNTRFFKNKVEQAGAVVTVINTLKFKVINESTKKTDRHDAATISEFLSKDMLPESYLCSKDTENIRRLLKSRERLVRSIVGQKNEVHALLVSMGLQDDLRSIQSKKGRQKVLDTLSSQSDLVLEAQTVKLLFEIIGRIEESVKKVEGQLHGLLDGDGMVRRLLTIRGCGPITAWTIRAYTEDIGRFASAKKYAAFCGLVPWVQDSNRTVHHGKITKRGPQELRTAFVQLVLGIRRCGDTGKWRLMQRYEYMKRGKGSGKSIVAAARKMAELVWTLLTDRVDFDSRRMEGNYTPPSESLAEQAAFA

SEQ ID NO: 41252 - protein, 351 aa, unidentified
MTIVGGLDVHRQQITFDYVDDDGLVHWGQIRPATRKTLRGWLSEHCPDGDGEFALEGCTGWRYVSEELAGAGVVTHLGDPAEIAGLRGPKKRAKTDRADARLLRTLLVEGRFPESWIPPAHLLEVRTLGRLYCTLMDERRAWQQRIHAQLFHQGCPPITALLSAAGREALAGAELSPAGRQYVDTALRRIDELTAEIEPLRTQLIGFARRQPGCRALQARHYGVGWLCAVIIWAEIGDARRFHSSDKLVRFAGLDVTVYSSDNKRAPGHLSRQGSPELRWATFEAAKCAARPGSPDYAYYHRLAAKHHGKNGKNPTLAVERKLLRRCYHTLRELGDAALALPVPDRREVAA

SEQ ID NO: 41253 - protein, 353 aa, unidentified
MMVTVGVDTHTDVHVAAVLDPAGRLLETASFPATTRGYAKLAMWAESFGLVDKVGMEGTGSFGAGLLRFLADYGLTVVEVDCPDRAGRRRNGKSDPLDAESAARAVQSGRATGTPKSRDAQVEMIRVLRVARRGAMKARIQAGAQLDALVLTAPEPVRASLRKLTSKQRIRACAAPRPGSVSDPASAVMTALRALARRWQALQAEIDELDIQLTPLVTAAAPELLALPGVGVETAGQLLVTAGDNRDRLRSEASFARLCGAAPIPVSSGRTDRHRLHRGGDRQANSALWRIALVRMGCHQPTKEYVARRTAEGKTKTEIMRCLKRYIAREVFPHLLTATPGTGSVRSRLGQTG

SEQ ID NO: 41254 - protein, 391 aa, unidentified
MSMYFVGIDISKYKHDCCIISAADQKVVSKFTFKNDKLGFDELLTVLNSLSNPEDIKIGFESTAHYALNLELFLENAHHSFMEVNPVLIKEYKKSTTLRRTKTDSVDCESIARWLMTVEYKPHSKGFYHSYSLKSLTRLRDRLIRQRSFYLVKITNVLDHTFPEFKPFFNERLSKTALYLLENYGSAEKMARMNSASYDKLRCISRGKFSIQQFLRLKELATNTVGVNNSIFDIELNSLLTLYKSLVKEIDTLESEIHKLIEEVHPHYLTIPGIGPISAAVIYAEYGDISNFSNPGQMLAFAGIEPGINDSGTESHGGRMVKHGSSQLRYVLLNACLPLIRFDLTFATYYAKKRAEGKKHRVAITHVAKKLIRVIYALERQDIDFNAQKLR

SEQ ID NO: 41255 - protein, 316 aa, unidentified
MSQASALYVGIDVSKKVLDVVIGPEGEAWSVSYNPLGLQELVRRLRAVRPALIVVEATGGYERRLLEVLCLARLPVARVNPRRVRAFARATGLLAKTDRLDARVLARFGEAVKPRPYTLPDEQQQYLKDLVRRRQQLLEMRTAEINRLDTAPTRIQGQIQEHIRWLEEQIKQVDQGIDDLIGQVPEWNERVNILKSVPGVGKVTAATLAAELPELGQADRREIAALVGVAPMSNESGQRRGKRRIRGGRPAVRSVLFMATLAAIRSNPVLRRRYRRLLERGKEKKVALAACMRYLLVVLNAMIRHHQPWNPALCGV

SEQ ID NO: 41256 - protein, 339 aa, unidentified
MKVSTLGIDLAKNVFQLHGVGCNGQTVLKKKLTRDKFLPFLMQLEPCLIGMEACASSHHFARVLRQYGHEVKLIPPQYVKPYVKTNKTDAADAEAICEAVARPNMRFVQIKTAEQQAILVLHTERNILIRERTACANSMRAILAEFGIIMPRTLSQLYKTIPEILEEYDNELSAFVRCSVARQLAHLQGVEDQITLIEQELSRWAKTQPACQRVMKVPGVGLMTATYLVASVGNGQQFHSAKQFAAWLGLVPREFSSGGKQRLGRISKRGDRYFRYLLVHGARAVAAVIERHKDNMPWLYRLLNKKAYNVAVVAQANKTARILWSMLVHHTEYRTLSVV

SEQ ID NO: 41257 - protein, 371 aa, unidentified
MEHTRFVGLDIHKERISIAVAESGRSGAVEYLGEISNDPVAIGKLCDRLGRSSKKLAFCYEAGACGYGVHRQLTGIGHRCDVVAPSLIPTKPGDRVKTDRRDATMLARLHRAGELTPVWVPDADHEAMRDLIRLRGVVRQIVTRARQHLQGFLLRHGRKHGRGTAWRMAYRRWLSTLAFKHPAQQIAFQDYVDAVMDAERRLKRVEEQISGLLPEWNLRPVVDALQAMRGIALINAVVLVAEVGDFTRFTNPRQLMAYFGLVPGEQSSGETIRRGGITKTGNAHARRALVEGAWAYRMKARIGRHKVDRIEALPKIIRDIGWKAQVRLCTRYRRLRARGKTANVVNVAIAREMVGFIWSIACTIQSAPKTA

SEQ ID NO: 41258 - protein, 321 aa, unidentified
MNKNTEIFGIDISKDVFDVYSHQKGHHSFKNDAQGFKSFLKVITKDALVVMEATGYYHYLFAQFLHKKKVQVSVVNPLSVKRFIQMKLAKVKTDKSDAKAICEYGQMNEVPLYTALTDVQAECLQLFRLLDNYLKKRTQTKNKKHGEEVLGIPSKYVYGSLKRDLKHLDKEIKGIEARLLELVKQDQQHQLTLLKSIPGMGMKTALFLIVVTDGFSKFETASQLCSYVGITPTIRESGSSVRGRSRISKVGNKKLRNLLFLCAFSACKHNKACKEIYERIVNKGKSKKLALIAVANKLLKQAFAIAKSGRPYDENFVSKLA

SEQ ID NO: 41259 - protein, 311 aa, unidentified
MTDHTIGVDISKSHLDVFRLGDQAAARFENSKSGFCAFQKWLSKSLVARIVFEPTGPYHKAFEAALGETFPLVKVNPLQARRFAEAHGTRAKTDAVDAQMLALMGAAFNLEPQAPCSKETLVLRDLHVARAGLIKDRTRLRNRAQTQDITLLKRQTKARLTQVERQVAELDAEIAALIEAHETTARNRDILCSMPGIGAVTAAAMLTLLPEIGTLQRKQVASLTGLAPITRQSGQWQGKSFIGGGRKPLRDALYMPALVAMRFNPDLKAKYDALRTVGKPAKVAIVAIMRKLIEMANALVKADRMWTPKTA

SEQ ID NO: 41260 - protein, 341 aa, unidentified
MVGVDLAKEVIQVCIYTNKKVHSNEEMTHHEFLTWLFRTKPTIIVFEACGSSNYWKQKAIEAGHKPCLISAKLVATVRQNQKTDKNDALAIIQAAQLPDINFIKGKNVEQQQLQSIMRLRELAIKQKTALSNQIKGLLLEFNVRVSTRNGGLKGTVQSFIEDAENELSFEFRESLNTAHEQYVLVVKSIKTYDSCLEKVVAQHSECKKLLKLEGVSTINAVNLYIALGCAELGVFTKGKDVSACIGLTPMQYSSGGKIKLGSIGKYVKNSLLRSQLITGAMAAVHQATKRAAVTKKDAWIQALVARKGKKCAAVALANKTVRTAFAMLTQGTQYKAELLPA

SEQ ID NO: 41261 - protein, 353 aa, unidentified
MNSLTDLREVVDVVIGVDTHVHTHSAAVVDAATGGVLDEITVEATAEGYGELVEFANNHPMLRAWAIEGTGGHGAGLSRHLLEMSEIVIELDRPKRAARRNGAKSDPLDAIRAAREAMARPRLGTPRTGGERQALSVLLAARRSAINASTEAQQQVFSLVIAAPEPIRVRFRGQKLAAMLNTAANLRVHASWDTETTSTVVALRTLARRAHAMLKEARELQKAIVAIIRSWRPDLLEEFGVGPIVAATVLCAWSHPGRIHSEAAFAMFAGVAPIPANSGKVTTRYRLNRYGDRQLNNALHTVVQSRIQYQPATRDYVARRTAEGKTSREIKRCLARYVARDLYRLLENTATAA

SEQ ID NO: 41262 - protein, 338 aa, unidentified
MKLKRVGVDLAKQVFQIHGVDSHEQVKCRKQLKRGQMLSFFRQLEPCLVAMEACGSSHYWARELSALGHQVKLIAPQFVKPYVKSGKNDANDAEAICEAASRPNMRFVPIKSAEQQAGQSLHRIRSRLIRARTALANEIRGLLAEFGLIEPVRGVTATRRLLQASLETADNGLPGKMRRLLRELQNELQEHDARLSRLDELLQQEAREDERVQRLLKVEGVGVISATALVSAVGDARHFSSARQFAAWLGLVPSQHSSGGKTRLGSISKRGDTYLRTLLIHGARAALNACKDKTDKRSRWVQQLQCRRNTNIATVALANKNARIVWAILSRGERYQPG

SEQ ID NO: 41263 - protein, 402 aa, unidentified
MNAVGIDVSKSKSVVAIMRPFGEIVSTPFEIKHTASDIHSLIELINSVEGESRIVMEHTGRYYEVLAHQLSEANLFVSAINPKLIKDFDNDSLRKVKSDKADAVKIARYALDKWQNLKQYNVMNELRNQLKTMNRQFGFYMKHKTAMKNNLIGILDQTYPGVNTYFDSPARSDGSQKWVDFASTYWHVDCVRKMSLNAFIDHYQNWCKRKKYNFSQSKAEEIYGKAKELVPVLSKDAITKLIIKQAVDQLNSASTTVESLRTLMNETASKLPEYPVVMAMKGVGTSLGPQLIAEIGDVSRFTHKSAITAFAGVDPGVNESGSYEQKSVPTSKRGSSDLRKTLFQVMDVLIKTHPQDDPVYQFLDKKRAQGKPYYVYMTAGANKFLRIYYGRVKEYLASLPES

SEQ ID NO: 41264 - protein, 313 aa, unidentified
MPPIPVFVGIDVAKATLDVASLPSGLQAHIPYTDGELQALTARLAAVGPILIVCEATGGLEGPLVGALAAAGLPVAVVNPRQVRDFAKATGTLAKTDALDAAVLARFAAAIQPTPRPLPDAATQVLAALVARRRQLVEMLTMERNRLGSAPRVLRAELQAHIRWLERRITDLDTDLTHAIRTSPVWRVQEEILRSAPGVGPVLATTLLAHLPELGTVPGKQLAALVGVAPLSHDSGAWRGRRAIWGGRAQVRAVLYMGTLAAVRHNPVLREFYARLRAAGKLPKVALVACMHKFLTILNAMLKSQQRWNPTHV

SEQ ID NO: 41265 - protein, 343 aa, unidentified
MTHYIGLDVSQRMTAICAVDAEGGKLWQGQCASTPEEVAQAVRKHGGNDAQVGIETGPMTPWLVHELRGRGLDIVCLDARHARAALKMQLNKTDQNDAEGLAQIMRTGWYRAVYVKSFDAHRARALLGARAQLVGMRTRLSNNIRGVLKIFGLLPGAMRGLSFDRRVEVLLVDRPDVAPIVRPILVAWRQLGEQIAVFDKAVRTLVKASPACRLLMSVPGIGVLSALAFVSTIEDPERFSRSRSVGAHLGLTPRRYQSGEIDRSGRISRCGDALARTLLYEAAVVILARVKRASGLKDWAQAIARRSGAGKARVALARKLSVILHSIWRSGEPFRWSEHPAVA

SEQ ID NO: 41266 - protein, 345 aa, unidentified
MYAGLDLSRKRLDFHLLDGEGATLEVGAAPPDGDGLDGLTERLARYGAPIRAAIESMNGARFVHDRLELAGWQVEIADAQKVKGLAPLACKTDRIDAWVLAELARRDLVPAIWLPDPLVRAERERARWRLHLVRHRSSLKQRVHAVLLTHGKPCPVSDLFGVRGRRLLAQLGLPEPWQGTIDASLRLIDELDREIGESERELRRLGADHHYVPLLCTVPGIGWVLAYTIAAELGDINRFPTPRKLVGYSGLCPRVYQSGERDLRGPLAKQGPRYLRWALVEAATHACTHPAYRQRYTDTKARIGKQRGAKVAQVDLARRLAEAIWHMLTRGQRFAPKGATDPLAA

SEQ ID NO: 41267 - protein, 370 aa, unidentified
MQTVRSFVGMDVHKETISISVAEDGRNGPVRFIGVIPNQPDDIAKMSKRLAKHGELDFCYEAGGCGYNIYRQLTALGHSCTVAATSMIPRKPGERIKTDRRDSQKLAILHRSGDLTKVWVPDATHEALRDLVRARVDASMHLMRARQQLLAFLLRHGRSYPTGKHWTQRHRSWLAGQTFQQEVHRIVFQDYVETVWTAQERRDALIERIGAMTASWSLGPLVEALRGLRGIDLLSAATFICTTGDLSRFESPRMLMGYLGLVPSEHSSGGSIRRGGITKTGNREARRMLIEAAWSYRYPARVAKEKAEILVRLPKNIRDIAWKAQTRLCARYRTMIARGKKPTVVVAALARELAGFIWAIGQEMRTPMMI

SEQ ID NO: 41268 - protein, 437 aa, unidentified
MEILYARVGGIDVHKKQVTVTARTPDDQRRARWETTRTFRTFYGELLEMASWLVVQRGITHVAMESTGPYWWPVYSALREVGGPDLVIEVVNAAHVKAVPGRKTDVKDSQWLAQLMEVGLLRGSFLPPEQVRSMRDFTRYQTKLTEERSREKQRLLKVLEAAGIKLDNVASDTFGVSGRAMLQALVAGERDPQVLAGLARGVLRNKTEDLRLALAGRFTAHHGYMVALHLARIDHLDQMLTQVKEKIGHIGVAAPVGLVAPFTPQVDLLTSIPGISERVATVVISEIGVDMARFPTANHLAAWAGLAPGNNESAGRRRKGRHRKGNTHVQSLLIEAALAASRTRTRIGARFHRLHRRFGGKQNKGAAKKAAFAVAHTLIKVIWKVLTTGQAYTDLGHDFYTRRVDPETQTRRLIAQLEALSGKKIVFVEDGGEPAAA

SEQ ID NO: 41269 - protein, 408 aa, unidentified
MERIVQRAAGLDVHKDVIAAEVHLPGGVVEQGTFATTTPGLLVLRDWLVGHGVTRVGMESTGVYWKPPYYMLEDVTEVWLLNARHMRNLPGRKTDTADASWICQLIEFGLVRPSFVPPAPIRELRNLTRYRKAQIEERTRETQRLDKILQDAGVKLSSVASDILGKSGRAMLAALIAGTTDTEVLADLALGRLRVRIPALREALTSRFSGHHAIIVSSILAKLDFLDELITSLTVEIEQVVAPFVHQIDLLDTIPGVNQRTAQGLLAEIGADMSVFGTAARLASWAAVCPGNHESAGKSKSGKTRKGPKWLGIYLHDAATSAIRTKNTYLGAQYARLRPRLGHSKALVAVEHSILVAIFYMFERDQPYHDLGADYFVRREDPQRRARKLIRQLEAIGYTVHAEPPAAA

SEQ ID NO: 41270 - protein, 501 aa, unidentified
MKKSKKSPSAKATKAARRKGQRHLSRKLKAVKAPPVDLAALEGLEQIHLHAAGIDVGASENYVAVPAHSVKAGEPAMRVFGTFTEELDELVQWLKDCGITTVALEATGVYWMALYDKLEEAKMEVVLVEPHSVKQVPGRKSDVEDCQWLQRLHTYGLLRSSFRPEEPIRRLRTLTRQRGELVQGAVQCQQHMQKALIPMNVQLHLVLSDIIRETGLRIIEAILAGERDPANLIQLRDASCRKSTVSEMKAALRGHYTEEGLFVLQQNLEGWKFFQKQLQECDQKMVEVIQQMPTAKVIALPVPAKPVPAAPPEPKGKQKRLNGGNNALSVDVKGLSAQLQRICGISLQGVCGLNLLSVIMLIAEIGVDMSRWPNAKAFCSWLGLCPGLKISGGRVLSRRTRKVVNRASVILRLAAWGIGRTETWLGRFYRRKRAHLGAPKAITATARKLACVVYHLLKYQEEYLPLDMQVYEAKAAEAQRKHLKRQAEKLGFQLVEIKAVA

SEQ ID NO: 41271 - protein, 328 aa, unidentified
MQGKVSSERTAIATVYVGIDVCKEWLDIHLHPLGRSFRVANDTAGLRRLKRELDALGQMPRSALHIVMEATGKWHRAVQRSLHADGFYVSVVDPLRARLFAKACGFLAKTDRLDARLLAIMGEALKPAQTPPQDQALEALQELVNARSAANGERTALSNRMKTAVTAFLRKELTRRLAALDTHIARLDAEIQRSIGAEPEMRRRLDILISIPGIGAVTAASLIAGLCELGACSGKQAAMLAGLAPLACESGERAGHRAIRGGRPAPRNAIYMAALSASRHNPDLAHFAERLKKAGKPNKVVLVAVMRKLIVLANTLITKNRIWTPNPP

SEQ ID NO: 41272 - protein, 484 aa, unidentified
MAKRKMSTFERLQSGKMNRTQRKELQQRLNAADPGLEVVHPDAAGIDVGNESHFVAVPARRDPHPVQEFGSWTADLQRMAEWLKSCNIRTVAIQSTGVYWIALQEVLEKNGIEVFLVNARGTKNLPGRKSDVQECQWLMKLHTYGLLRNSFRPPEEILAVRTVWRLRDRFVKDAGRAIQQIQKALTTTNIRLGNAISDVSGVTGMAIIRAVLKGERDPRELAKLRDGRIQASEEEVVRSLEGNWRDDVLFELQQVVECYDFLQHRIAACDQQLKSYMTALPDREMEREKAAEAAPEASQGLKKSKKRRSKTRRKNQPNFDLEVELRRSFGVDLTRIDGIKVITAQVILSELGPDLSAFPNEDHFASWLELSPRRDITGGKVIKQKSRESKNRVASALRMAAESLSRSDSYLGARYRQLRGRMEGKKAVKAMARYLACLVYRLLTKGQEYVDRGAAYYEGKRAARDMTYIRRKAAELGMKLVPAA

SEQ ID NO: 41273 - protein, 361 aa, unidentified
MNIYVGLDISQRKTAICAVNDKGKIIAEGTSLTLPSDIHRWLASKSLDFSAIQGICLEAGAMSSFVYKGLEAFGLPVMCVEAFQAHQFLKAQRNKTDKNDARGLAQYIRMGGDYIRQVIVKDIVTQEDRMLLTLRQKYVSEKLAIENAITGILKPLGILVPRRCGSATRFCDAYAETIAKAETLGPVLREAALESLDAYRAVSDILDKLTKKIERVARNHPVCRRLMTAPGIGPIVALSFVTAIDTPHRFRKSEDVGSYLGLTPKKFQSGDVDHDAGISKFGSSMTRCHLVQAATTLLYSSRKWSSLRAWGMKIAKRRGYHIARIAVARKLAIILHRMWICERDFCWNTTDGTKTMISDAV

SEQ ID NO: 41274 - protein, 347 aa, unidentified
MAEVTIIGVDLAKRVFQAHGATADGATIFRRKLPRDRFLSFLADQPRCIVAMEACATSHEWGREIERLGHSVRLIPPVYVKPFVKRQKNDAADAEAIAEAASRPTMRFVKIKTEAQQARAMLFRTRDMLVRQRTQTINALRGHLAEHGVVAPQGAVQVKRLADAINEDTSRLPMMVRDLGQLYLEQIESLTAKIVDLDKRLRTAASQAETTRRLQTMPGVGPITAVAMETFAPPMEEFRRGRDFAAWLGLVPRQHSTGGKVRLGKTSKMGQRDIRRLLIIGAMAVVKAAVRRGVASDTQGENVWLSRMLAKKPRMLVAIALANKMARGLWAMMTKEQNYRNPAVIAA

SEQ ID NO: 41275 - protein, 400 aa, unidentified
MRAVFGIDVSKASSEVAILVNGEKVHGYTISNDALGFARLLGDLKTVHKPEIIFEATGVYSRRLQAFLEDNGYAYTRLNPLEAKKQLDSLRVRKTDQIDAEKLAQSQFVLNRKPTYVQEEVYQELRDLSRFYQNLTEDIVRAKNRLHKVLQVTFPELETILSTPTGEQYGNLVVAFPCKDFVLDLSKDELSESIRQSTSKRISDKRVAYLVEKLTALANQSYCAVKKTSPIMEEVRYYAKELLRLSEQRQTVLDQMVELAQPLPEYDILLSIPGIAETTATSIIGELGDIRRFQSANQINAFIGIDLRHYESGNFLAKEHITKRGNPYARKILFKCIHNIASASNTNPCHIADFYEKRKRQSQTTSTKPHTIASIHRLIRTMYYLIMHNKLYDYASTQNR

SEQ ID NO: 41276 - protein, 338 aa, unidentified
MPMYFVGIDISKYKHDCCIISAADQQIISKFTITNDKDGFEQLLTALNSLSNPEDIKIGFESTAHYALNLELFLENAHHSFMEVNPVLIKEYKKSTTLRRTKTDSVDCESIARWLITVEYKPHSKGFYHAYSLKSLTRLRDRLIRQRSFYLVKITNVLDHTFPEFKPFFNERLSKTALYLLENYGSAEKMARMNSASYDKLRCISRGKFSIQQFLRLKELAANTVGVNNSIFDLELNTLLTLYKSLSDEINTLETEIIKLIEEVHPHYMSIPGIGPISSAVIYAEYGDISNFSNPGQMLAFAGIEPGINDSGTESHGGRMVKHGSSQLRYVLLNACHL

SEQ ID NO: 41277 - protein, 366 aa, unidentified
MWMEAPVKVQRTSIGLDVHARSVVACGLDGDTGEVFRRRLCPDHGEILGWVQGLPGPVAVTYEAGPTGFGLARVLIAAGIDCRVAAPSKLQRPPGDRVKTDARDAAHLARLLHLGQIVEVTVPSPAQEAARDLVRAREDCRGDLMTVRHRISKLLLRQGIVYYGGQAWTGKHELWLRSQRFDALGLQLAYDTAMDAMIAGVHRRDRLDKAIVAMAADSEFTPVVQRLGCLRGVSTLTACGLAVEIGDWHRLTGRSIGAYLGLVPCEYTSGDTRVQGGVTKTGNGHARRLLVEAAWHHRAPYRPSRDLRARWTAAPAAAQARGHAANHRLHDRWTGFDARKKRSVVANAAIARELAGWCWSLAVLDD

SEQ ID NO: 41278 - protein, 313 aa, unidentified
MTNVTFPQLIQRGCGIDVHLKVVVATIDGVGIQKETRSFNTFTSCLTEMKEWLLAKGITHVAMESTGVYWKPVMRVLEEDIPNVWIVNARHIKNVPGHKTDKMDSEWICKLLLAGLLKPSYIPPKEQRQLRDLTRYRNKLIQTTAAEKNRMMRVLEDCNIKLSSVVANTSGVTATALIDMLCEGRKLTMADIESVYHKKLSASPQELLEACTGFVEEHHVYMLQTIRKSIAQTQGLVDELSKRIKDILIKYDNVLEALKEIPGFNTKVVEDLVSEIGLDMSAFPSEKHLASWAGVCPGNNESAGKKKRKNHSW

SEQ ID NO: 41279 - protein, 364 aa, unidentified
MNCVVVNTELSSLEETRRQFNGGKAYIKLGIDVHQDFYVVVMQEGSSNPKPPQRFHKEAFLRWAAKLVCSGAQVYAVYEACGFGFSLQRRLSALGIECYVVCPQKLDEQNKRVKTDSLDARALCLKLDRFLQGNRHALALVRVPTEEEEQTRALHRQREQLVKVRKVLEAQGRSLMVNHGIEPVQQWWKRRAFAALSMPEWIRVLLQNTQPIVLSLQSQIDQLTLQLQNAATAEPPRGLGKMTSVIIDREIGNWHRFNNRWQIASYTGLCPGEYSSGQKRLQSCVTKHGNPRLRAALVELAWRMVRFQPNYRAVRKWNERLRKGALTTGSARKKAIVALARQLAIDLWRIRTGRLSHAQVGLEM

SEQ ID NO: 41280 - protein, 276 aa, unidentified
MFVGIDVSKNSLDVALLKAPGKPRHKVFTNNTAGHRQLLTWLNEQGALSVHACLEATGTWADAVALALHESGHQVSLVNPALIKAFGQSQLKRTKTDKADAQLIARFCEMHQPPRWSPPAPEIRELQALVRRLDTLEEMRVMEEMRVMEENRLTSGVSCAEVQAPLEEHIAYLQAQIAKTRRQIRDHIDQHPNLKDKAKLLDSIPGIGEATAALLLAELGDLTQFSNARQVAAFAGLVPRIRESGSSVRGRSRLSKVGSSRLRKLAKARCSSLEPP

SEQ ID NO: 41281 - protein, 355 aa, unidentified
MTSVKYIGLDVHKESISICVRNSVGKVVMESVIETKASTILQFIDGLRGDLRVTFEEGTWAAWLYDLLKPRVTSVVVCNPRKNALLKDGSKSDRIDANKLAEQLYMNNIKPVYHGEHGLRTLKELARSYLTVSKDLTRVMNRLKALYRSWAIPCAGKEVYAPRYRAEWLGKISEPGVRRRAEFYYQQLDALCPLRQAVRRDLLQEVKKCQAWKLLRQIPGIGPIRAAVLMAVMQTPHRFRTKRQLWTYCGLGLETHDSGEYRAVEGQLQRAKKQATVRGLNRDHNHDLKDIFKGAAMRASTAAGPLHDFYENLLAKGRKPPMARLTLARKIAAITLIVWKKEVRFDANYLKPQAA

SEQ ID NO: 41282 - protein, 400 aa, unidentified
MIDTGDIDVFLGLDVGKGEHHATAVTPAGKKAFDKRLPNTEPKLRELFAKLQAKHGTVLVVVDQPASIGALPLAVARDMGCPVAYLPGLTMRRIADLYPGEAKTDAKDAFIIADAARAMPHTLRAIDGEDETIAELEMIVGFDDDLAGEATRVANRLHGLLTQIHPSLERVLGPRLQHPAVLTLLEWFGSPAQIRKAGRRRLVTLLRPKAPRMAERLDEEIFAALDEQTVTVPGTEAAALIVPSLAASLTAVLDQRKLLAGRIEELLEDHPLSKVLTSMPGVGVRTGARILIEVGDGSTFPTAGHLAAYAGLAPATRSSGSSIRGEQPSRKGNKQLKRAFFLSAFAALGDPASRAYYDKKIAQGKHHTQALLCLARRRADVLFAMLRDGTFYEPQPAGAR

SEQ ID NO: 41283 - protein, 339 aa, unidentified
MEVYAAIDLHASNSFLAVVDREGKTVFKRRLVNDSAILLNVLEPYKEDMQGIAVESTFNWYWVVDAMMEAGYRVHLANPAAIQKYRGMKYSDDNSDAVWLAEMLRLGILPEGYIYPREERPVRDLLRKRTHLVKLRTSLINSLQNILARNTGVKIGAAKMKQLTHDLVSPLLEQDEDLALTGEVSKQTIDFLTRQIKKVEKKIQEKLEWKNEYTCLISMPGVGAILSLTIVLETGPISRFPAAGNYASYCRKVPTRWTSNGKSKGSGNKKNGNKYLAWAFSEASELARRFDSQIKAWFDRKVSRTSRMCAHSALGHKLARAAYYIMRDHVPFDNKRLIG

SEQ ID NO: 41284 - protein, 505 aa, unidentified
MTAPTTRRPPASSAPPSGKPAQAQAQRQAYDRRKTRAQAKSEALRQQEAAQVQALPVLRPHAAGIDIGSRSHWVCIGFTTEADSGWVKEFPAHTDGLKAIVAFLREHQVTTIALESTGIYWIPLYELLQAEGFEVLLVDPSYSHQLRGRPKTDRRDCQWIYRLHSVGLLAAAFRPDDKTCQLRAYLRQRANVVRQASKHVQHMQKALEQMNLKLTEILSDITGVTGRSILRAILRGTRAAEKLAKYRDKQCKASEAEIAQALTGSYREEHLFELKQAYEAWQFSLGQVAKVDEQIALQLGRMKCDRALPPLKPKARPKRRVNSPGFDVRTALYYVVGLDLTEIEGISELTALTLISEIGPGVSQFATVKKFCSWLGLCPNWKKTGGRVKSSRTRRGVNRAAQALRLAAQSLHHSQGALGGFLRRMKGRLGTQAAVTATAHKLARIVYLALKHGMTYVRQSQEEYEAQMKEKQIKALRRKARQLGLEVVEKTSGSVPTAAAASVQG

SEQ ID NO: 41285 - protein, 322 aa, unidentified
MAMLSFGGIDVSKDRLDVMVLPEEQCSSVSNDAAGWDKLVEQLRASSVAAIGIEASGGYERGVMRALLAADLPVRQVNPFKLRQFARASGVLAKNDPLDARMIASFVAIMPTRPAQRQAPAAQRLTEMLAVRRQLSAEKVAAENASRLLEDAMLQRLSRRRIVRLAADIDLLDQHMVEIIATDAALAHRYHLLSSMPGVGPVLACTLIALLPELGRMSRKQVAALVGVAPYAFESGKLKGRRCIWGGRAYVRQVLYMAAMSASNWNPALKAFHDRLKAAGKLPKVAIVAVMRKMITTLNAMVRDDVAWADRHRGRHTVPTAR

SEQ ID NO: 41286 - protein, 435 aa, unidentified
MHHPNEQTEAPGEPAFAALVAIDWADRKHYWTLRTGDIISRGQLENTPEAVEQWAAELYGKFGGRPIALAVEQRRGALITMLGKYAQLYLYPVHPSTLAKYRETWHPSRSKNDVKDADLLCDLLAKHRNRLRRLAPDTEDMRLLQMQVENRRKLVDERTALGNKLKDTLKIYYPQIPRWQEDVTTELVCDLLKKWPTLEALKKARPQTLEGFFREHRVTDEEKIQRRIGEIREAIPATADRAVIESSVPMVKVWIGQIGLLREAIREIEKLIRNLAAAQDDWMIFHSLPGAGEVLAPRLMAAMGTLRRRFGSAAELQSFAGIAPVREASGKSAVVHFRLACPKFMRQTFHEWAMCSIPLCAWAKEVYDALKARGKSHHMAVRALAFKWMRILYRCWEQRVPYQEEIYLASLAKRRSPAGRPVPSVQIPRISLKSL

SEQ ID NO: 41287 - protein, 314 aa, unidentified
MSKAVVTVGIDVSRDRLDIAVRPSGESWSQERMAVTELLERLGSIKPDLVVMEATGNLEAPLAGELVGAGLQVAVVNPRQVRDFAKATGKLAKTDRIDAQLIAHFGEVVRPHLRTLADVERQQIKELVLRRRQLSDSITAESNRLRRVLPGTQRYIQDHNAYLHEQMERLDQDIDRTIKHSPVWHDQVNLLVSVPGVGQVTATTLATCLPELGHLNRKEIAALVGVAPFNRDSGFTRGKRTIWGGRSTVRRVLYMATLVATRYNPVIRDYYQRLCDAGKHRKVALVACMRKLLTILNTMTKQHTAWNHHLLLQT

SEQ ID NO: 41288 - protein, 339 aa, unidentified
MELYAGLDLHSRNTYIGIMDKAFNRVFKKRVPNHLEHILQTLAPFRDQIKGFVVESTFNWYWLVDGLMDAGYSSAHLANPSAIKQYEGLKHSDDQHDAFFLAQLLILGILPQGYIYPKMDRPVRDLARKRMFLVQHKTAHILNLQSLIQRCCAMKVRANDMRHLTVKELEAWLEEEYLVLSAQANLDSINFLKQKIQGLEKAIRKKVKLKKAFHHLKTVPGIGDILALTIMLEVGDIKRFSKVGNFTSYCRCVPSRRLSDGKIKGYGNRKNGNRYLSWAFTEAAQLGRRHNERFRRYYNRKVAQANTSLATKALGNKLARICYFIIKDQVPFREELFGQ

SEQ ID NO: 41289 - protein, 341 aa, unidentified
MKQFIRIGVDLAKNYFQVHALANEDGPAVTRKLKRSKMHEFFAQIEPCLIGMEACGSAHYWARELETMGHEVLLMPPAYTKPYVKRGKNDAVDAEAICEAASRPGMRFVPIKSAEQQATLMLHKTRELLVKQQTMSVNALRSHLSEFGIVVAKGIGRVDELLELAESDTTLPEVARAAVKILAQHLEGLDKSIDDLEKQIGRAHAQSEMSRLLDQVPGVGKIIASVISASVPDPSVFKSGRDFAAWLGLTPRQNSSGGKQTLGGITKQGNRYIRKSLVLGATSLLHVLGKRKGALRDWIVALLAKKPARLVTVALANKLARIVWAMMKTGECFRAEMFAKA

SEQ ID NO: 41290 - protein, 523 aa, unidentified
MRTATRRQRRSSPRPRSIHKPRGVLQPRVQSVGPEHFGMVSVDCAKARSKWMLSDFYGTVLIPPTELVHSRGHFEMAVLLVREAIAQHGLKDLVVAIEQTGAYHQPVKRAFRAAGFECRIVHPLASKAFRQVAHPGIKTDDTDLVGIFGAAANGFGLLEPALDPLAARLRLWVRHRRDLVEKRSALCCQLKEHWQATLPGFAALFEDLWTTPAGLTIARHFTSSEAIQQAGLEGLRAVLHAARQPGRSRTLERILAWARTAPPADPEASLRGRLALALDDDRLQKTREILAADGEIASLLVQTPYVLLMAIPGINVASCGELAGETGPISNYASAKAITGRAGLFPSRYQSDQVDFPDGPLVRCANRRLRAALLGIADNLLKCNHYFQGLADRWKAMGKDPRDTHVKVASRFSRLAYLIVAGREIVPHPCLQPRGYILDKLIAFHQKHQTTPQQMMADLNQAVAQLPTEQHSLEAVPLIQRLQETHAARGRGPQPIGNILPLLLAKLGVGQVKSSNTGVRDSS

SEQ ID NO: 41291 - protein, 326 aa, unidentified
MQCFVGVDVSKAKLDVAMLVAENKFRSKVFANEPGGFAALLQWLKAHGPCGLEDVHVCMESTGNYQEELACFLSDHGVAVSVVNPLLVKRFAEVNRQRNKTDEADAKTLALFCRAQRPELWHAPSRAVRTLQALVARLQTLQAMRQAESNRLEVAHDSVAASLRSVIAGLDEEIERVREQIRRTIDDDPDLKGRAGLLQTIPGLGDKTIPQLLAYVGDPARFRSAKALAAYASLTPLIRQSGTSLDRRRGTHPMGHRELKKALYFPAMVAARYNPLIARFSERLKAQHKPGKVILVACMHKLLAIVYGVLRSGQPFNAHHQNLLEA

SEQ ID NO: 41292 - protein, 344 aa, unidentified
MEITTIGLDLAKSIFQVHGVDASGQVVVRRSLRRAQMLPFFARLPSCLVGMEACGTSHHWARELVKLGHEVRLMPPAYVKPYVKRGKTDAADAEAICEAVRRPTMRFVPVKSPEQQAALSMHRTRDLLVKQRTQLVNMMRGLVAEFGINIPKGLERALLMARRIVEGEAPDVPIEAAKIVATLSQQALDIHVRLRQIDRDLLVWQRGNDVARRLMTIPGIGPVGATALAASVTDPHQFRSGRQFAAWMGLTPLQKSSGGKERLGRISKMGDKYLRKLLIVGMTSLVRRAKYNPKTIDPRLANLLARKPVRVATVAMANKTARIIWAIMTRDETYCAGHQPALAA

SEQ ID NO: 41293 - protein, 329 aa, unidentified
MLDASTGAVLARATVSTDPDGYAELVTLAEAHAGLRAWALEGAGGYGAGLARHLADAEELVVELDRPVRAHRRAGAKSDAIDAERAAREALSRTRLARPKTGAERAAVAVHLTARRAAVEAASTAQRQLRALVITAPEKVRARFRGQSTTAMVTTATRLRPATTNGDVEVREALSVLRTLARRITFLTEDADEHERLIRALVRSWRPDLLQVSGVGPIVAGTVLTAWSHPGRVRDDAAFAMLAGVAPIPASSGKTTRYRLNRSGDRQLNRALHTIVLSRLPYYPDTRAYADRRRTQGKTDREIKRCLKRYIARQLYRQLENPQDLPAAA

SEQ ID NO: 41294 - protein, 415 aa, unidentified
MVTDYEIYLSRGLNMNAIGIDVSKGKSKIAIIRPHGEIVAKPFDITHYPDQLAELAEYIHSLEDESRIVMEHTGKYSEPIANFLCDAGIFVCMVNAKLIHDYGGDTIRRVKTDKVDALKIAGYCLDKWSNLTRYEPADERRKTLKTYNRQLSEYTKIKTMLKNNLISLLDQTFPGANELFSSPAREKDGHEKWIDFVAAFTHCNCVTLLSKGAFTIKYEKWCRKNGYNFCPHKAEQVYSTALNCLPTLSNNDFAKTLIVQTVSQLNHLCETVATVKSEMSKLASTLPEYDTVLAMHGVGKTLAPQLIAEIGDIRCFPKRSSLARFAGIEPPENQSGAYNQHSRRISKQGSPHLRKALFLVMCCVLQNSNFDEPTFQFLDKKRSEGKPYKVYMVAGANKFLRIYYARVNECFAALK

SEQ ID NO: 41295 - protein, 342 aa, unidentified
MKIIGCDFHPSFQQIAMVDRQTGEYTERRLTPDEARQFYAELKGPVLVGMEACGNTLWFERLLASLGIELRLGDAGKIRALEVRKQKTDRRDAQLLLQLLLEDRFPQVWVPSVQQRDTRQLLLHRHKLVGMRRQVKNELQHLALNQGLQQKRKLWSECGRQRLEQLPLTGWTAQRRQDELELLDELHRRIAKLDQAAQQEADEDAVARLLQTHPGVGPITALAFSLTLGTIERFARSRQVVSYLGLNPAEHSSGGRQHLGAISKQGNPMLRSLLVEAGQSAARSVPELKRAYQRLKHRKHSGVAKVMVARKLAVRLFWMWKTQQPYTAARTQGSPSHPLVAG

SEQ ID NO: 41296 - protein, 345 aa, unidentified
MMLIGCDFHPSWQQVNWLDTETEETGERKLVQASGDAERFYRQVAAPALIGMEATGNSHWLVDLLSELGQLWVGDAAQIRASYVRQQKTDKRDAAHILKLLVEGRFPRIWMPSSEVRDQRQLLLHRYKLVIIRARVKNELQHLCLNKGVQRKHKLWSAAGQQILRELPLQPWAGRRRDDLLKLMAMLDQQIEPLDQAVKAEAQRDKMALLLQTQPGVGPITALAYVLTLGDVSRFPRGKQVASYLGLIPREHSSGGRQKLGAITKQGNRMLRMLLVEAAQIAVRYDPQFRREYLHRCHKKPKAVAKVAAARKLAVRLYWMLRTQRPYPAVVRIESSPRVPLVGAS

SEQ ID NO: 41297 - protein, 328 aa, unidentified
MNKERFAVGIDVGKDELLVAAGEPRVRTFGTTPGEIRRLHRWLCKTAGSGVIHVGMEATGVYSVKVALALISHGGLTISVINPAQIKAHSRALLKRTKTDAVDAQVIWNFVCKHNPPAWTPPTEAHRRLSALVAQADAIKGEQQQWCSRQHTHRHAPDTPREVTRSTAAILKTLQQQLDKIDDLIENLCRSDQTLAANIALATSIKGIGLCSAVRILAHGGEALTQRTRRQLDAHAGLAPAQKQSGTSVRGKSHLAKQGNAKLRRALYMPTLVAVHHNPLFQNHYQRLLQRGKLKKVALAACMRKMLNVIRAILINKQTFDPNYQPLT

SEQ ID NO: 41298 - protein, 425 aa, unidentified
MTTDNYVAYIGIDWADRKHDIALYDCASGTWQESVIQTRPQDLLDWVNQLRARYGEGKIAVAMEQKRGPLLYALCQYDSLVLFPVNPRTVANYRKAFQPSRAKSDPVDARLLVELMQKHPDKLECWVAGCPQTRALRQWVESRRMLVGEKVRLTNRITASLKSYFPQVLDWFEDKDTLVFCEFIEQFSQVQTAQAATPQQLTQFFHTHKVTRKSAIARRIQQIQAAGVPLTTDEAIVVPAQALTRALIALLKVILHQLADFNAKIAALFETLPDAELFSSLPGAGPYLAPRLLVAFGAERNRFSSAQAFMSYVGIAPVKEESGKKRWVHWRWSCPIFLRQTFVEWVNQARRFSPWSQAFYLQQKRSGKSHQKAIRALAYKWGRILWRCWQSNTAYDEEKYLAALIRKKSPLIKLLGADSQQSTAS

SEQ ID NO: 41299 - protein, 312 aa, unidentified
MNKTFVGIDVSKDSLEVALRPSDTVQSFTNDDEGIARLIQFICPQQPALIVLEATGKYERPVARALAIEGLPFNIINPRQGRAFARASGILAKTDRIDALLLARFAEALQPEARSLKDEETEALGELVTRRRQIVEMITAEKNRHALATEKRVRRDIQVHIRWMQKRLEDLNDDIDQWICQSPLWREKDKLLRSVTGVGPVLASTILGALPELGTLNRKQIAALVGVAPFSRESGRYKGKQKIQGGRASVRNVLYMGTVAGIRANPVLRSFYERLVTSGKPKKLALTACMRKLLVILNTMVKNGTHWQNQPA

SEQ ID NO: 41300 - protein, 356 aa, unidentified
MTSNAKYIGLDVHKESISACVRNSVGKVVMESVIETKASMIVQFIEGLRGDLQVTFEEGTSSAWLYDLLKPRVTKVVVCDPRKNKSMREGNQNDKIDARRLAELLRLDHLNPVYHGEHGLRTLKELVRSYLTITKDVARVKSRVKAIYRSWAIPCTGKEVYARCHREEWLGKISEPGVRRRAEFYYLQLDALRLLRRDARRELLVESKKHKVWKRLCGIPSIGPIRAAVLLGILQTPHRFRSKRPLWNYGGLAIEMHSSADHRSVDGQLERSQKNVLVRGLNRNCNHDLKNLFKGAAAVAASKPGPFQEFYTALVAKGMRPEMARLTLARKIATIVLMVWKKGVCFDANHLKPQTA

SEQ ID NO: 41301 - protein, 420 aa, unidentified
MEPPQVSFKQVVSRGCGLDVHKKVVVATIDGEGLRKQTREFGTVTSSLKELRDWLLENGITHVAMESTGVFWKPVYNILEPAGITVWVVNAAHVKYVPGHKTDKKDSAWLCKLLLAGLLKPSFIPAKEQRELRDLTRYRTKLVQSNASNKNRIIRILEDANIKLSSVLSSTNGVVGTKLIDKICDGEEITMQDVDEVYHKKLAATKEEIFEACQGFITEHHVYMLQIIRQEIAGTQQTIESLTQRIKEVLLPYENALELLQKVPGISSKSVEDLVAEIGLDMGVFPTEKHLASWAGMSPGNNESAGKKKSGRTTRGNKQVKAVLTEIAWAATRTKNTFYHARYHKLAARRGKKRALIAVGHSILKSVYHILSDMSEYKELGAEYLISRTEAKRKAYLKGELGKLGYVVELKELPPVEKAG

SEQ ID NO: 41302 - protein, 316 aa, unidentified
MSNIAFEQVIKVGCGADVHKETIVATIRRSDSDFETRTFSCYTSSLIELREWCQSCGVTHFAMESTGIYWKPVFNILEESDMKIILVNARHVKNVPGHKTDKKDSIWLSKLLLSGLLKGSFIPPADIRELRDLVRYKKKVTEQRSSEKNRVIKTLEDCNIKLSSVLTNVDGSVGERLIHDIIEGEGDPEKLIKHYHGRIKKSRTEFKLALAGRLTPHHRLMLKMVKRSIEDKDKLIADLEKEIDQKVEKYNDQIIRLQTIDGVGRDSAITIISEVGADMSQFPNEKHFSSWAGMSPGSNESGGKKKVPKQSKETPT

SEQ ID NO: 41303 - protein, 341 aa, unidentified
MKHLYLGIDWGKNFSQLFGFDQAGEVVIEERLKTLDLSVWRKKLRSLKGYSIHAAFEIGAHYDWLHDLLTEYCCEVAVIDPAQFAVICKSQRKTDKIDAQKIAEGLRRGDLPLVHVPDKQTRADRRLVAFTHWHSQQASSVKGKIRSLLLAQRLECPYSNIMGMAALEWLNEQAPQMDDDAQLFLRLLLAQVELLRQQRQELDARVAIRAKRYKQAAVLDSIPGFGQLTILAALSSIAGVARFSRPEQLSSYWGVCSSVYQSGATLRLGSLTRRGNVHVRWLLSQALQHLHRKDARARKRYLKLKRKKPRGVARAAQVRWLTQIIWHLLKKDEPYRIKVAA

SEQ ID NO: 41304 - protein, 416 aa, unidentified
MKYAWIHVLPDTPPGGLTAGIDWGNADHAVCVVDAAGQVRARFTVAHDRAGIGKLIAGLRAAGVSEAAIERGDGPLVEALLEAGLTVVVITSRQMKNLRSRYGSAGAKDDRFDAFVLADVLRTDRARLRPLVVDTPGTAALRAAVRARRDLVAHRIAACNQLRAHLAVAFPGAIGLFAHLDSLISLAFLARFGSQDAAGPLGEDELAAWLRTLPYRGNPATPGQLRDRLHAAPRGITGAEGAAWAAVTGALVATLTTLAAQIKALEAEIAAQLAVHPDARIFTSLPRAGTVRAARLLAETGDCRARFPDPESLAALAGVAPVTRRSGKHTSVGFRWAVNRQLRDAVCDFAADSRHASPWAAAIYQAARARGKDHPHAVRILARAWIYVIWRCWQDGTAYDPAKHTALQRILEQQNA

SEQ ID NO: 41305 - protein, 452 aa, unidentified
MEQDVISMEIINPQAAGIDVGSRSHWVAVGQSEQDVREYGVFNEDLFAMADWLEERQVKTIAMESTGTYWQNLYAVLLSRGFQVILCNGKFTKNIKGKKTDIKDCQWIQKLHSLGLLTGSFLPDGQTEQLRTYCRQRANLIHSSASTSKKMQKNLCLLNLRLDVVVKDVCGLTGLAIIRAICEDEKNPQKLACLRHGNCRKSEEEIAKALHSNNREDYLFALKQELDTYEYLQKKIVECDMEIEKKLNEIIGGDDNKRQHYIDPKTHKRINKNTPKNIDLNLKSYQMFEGTDLLAIEGMSYSTVLALMSEVGIEGIRKFSTAKHFASWLRLAPNNKVSGGKVLSSRVPKGSNRLKIALRNAANAIGNLKESTPLRDFFHRINFRKGRVSAISATARKLAVIIWNMVVKGTPYINPEGYLFLDQKRKLGLVKRIKKQIDKFALTDEDLGFVNS

SEQ ID NO: 41306 - protein, 410 aa, unidentified
MEPVLISCAGMDVHEKKVDVCIAHGPLNKSPVFKIKTFSTMTSDLIKLREWLTGYGVTTVAMESTGVYWKPIFNILEKDFDVILANAQHIKGIPGKKSDIKDCQWIATLLRHGLVPRSFIPPREIRELRDLNRTRRKLVGSMASEKNRLIKVLEDANIKLSSVVTKIYGVSSLNMIRALLEKDKLTKEEIADMSKGKLRKKVDLLAEALNGNVTDHHRFLLRMHLDNIEFLAKQIKKLDGEIQRKMIPFEKESELIQTIPGISEVSAAEIIAEIGVNMSQFPDETHISSWAGICPGNHESAGKKKSGRIREGNTFLKGALTEAAWAASRMNGSAYQAIFRNIAKRRGGKRALVALAHHMLRDIYRVLSTGEPYQEIGAEAVINISSRKKEQKMIRMLEHAGYTVTKAVTA

SEQ ID NO: 41307 - protein, 346 aa, unidentified
MMIIGCDFHPSWEQICWLDPETGETGEKKLVHSEGEAERFYRGLAVPALIGLEATGNCHWLVDMLRDAGHEVWIGDAAQIRASYVRQQKTDKRDAAHILKLLVEGRFPRLWTPDREQRDQRQLLIHRHKLVEIRTRVKNGLQHLAMNQGVQKKARLWSRAGMQTLRELPLAPWAARRRDDLLGLLAGLNQQIGLLDAAVAEAAAENAQARVLMRQAGVGPITALAFVLTIGDVSRFKRSKQVASYLGLIPREHSSGGRQKLGGISKQGNRMLRGLLVEAAHQAVRYDPEFRREYLHRCHSKPKNVAKVAAARKLAVRLYWMLRTQTAHPESIVIESSPRVPLVGAS

SEQ ID NO: 41308 - protein, 340 aa, unidentified
MLYVGLDVHKEFCQASILNEKGFEEDNERFPTTRRGLESYLSRFEDAAFVLESTGVWEFVYEIIEEKGFPVKLAHPLKVRAIAEASVKTDKVDARTLAKLLRLDMVPESYVPSREIRDLRRLTRLRSYLTQTNTGLKNRTHAELLSRGIRRPEDMVKSFSQKSHDWMRTLDIPAVDVQLIMIEAVQGQIEHVNGLIRQEFEKREEVRNLTSIPGIGIYSALVIFAEIGEVRRFPDPEHLCSYAGLTPTVSQSASSVHYGGISKEGSKQLRWILTEAVHSHRRFEPDSNLSRFYDKISRKRGKHKATTAAARKLLHIIYWMMLNGEEYHSHGFNPVLKPAA

SEQ ID NO: 41309 - protein, 478 aa, unidentified
MPTMTKSRARLKTQGAAPVTALASQDRVDVPTAKRRARRRLEPTETPASPVEAKNLSENRAILPPSGRIPDGTPTRSETQLDGAQGRMTMRIVALDLGVKKTCYCELSQGHVVQRMTVSDVCSLEHLLGPNQPPAKVAIEACRDAWFVHDLLVEWGNEVVVIDTTRSKQLGIGQHGRKTDRIDAEVLARALESGRIPKAHVLTPKRRDLRRVLLVRRALVEARAQLVTTARGLVREQGVKIPTCHTSSFVSRVRAQQLPADIAQLIEPMLVLIQLIDTQLVSISERLDALCAQDPTVALLTTTPGVGTVVAACFVAVVDDAKRFHRSHQVESYVGLVPSEDSSGGKRRLGAISKRGNSYLRALLVQAAWSIVRSRDKSNPLYLWVAQLIERRGNRIAVVALARRLVGVLWAMWRDGTVYDTEHLAKQNVRGLRGAIQTLEQQSAALAQAAKKTSAKHSRTTSTATPRRKTKTPAAKAA

SEQ ID NO: 41310 - protein, 318 aa, unidentified
MKTEQSQPFVGIDVSKATLDLCVLPSGEQWSCQNSASGINSLVKRLAALKPALIVLEATGGLQMPVTAALAECQLPVAVVNPRQVRDFAKALGILAKTDAIDARVLARFAEAVRPEARPLRDAQALELEALMARRRQLVEMCTAEKNRLQTAPKPVQKDLKAHITWLEKRLADFNGDIGRLIKSSPLWREKDALLRSVPGVGPILSTTLIGDLPELGALNRHEIAALVGLAPLNRDSGHFRGKRMIWGGRAEVRSVLFMATLSAVRCNPVIRPFYRHLKAAGKPFKVRMTACMRKLLVILNSMAKTNTHWRLQEDASG

SEQ ID NO: 41311 - protein, 334 aa, unidentified
MQNVTLIGIDLGKHSFHVHAQDKNGNALLRKKFSRNPLTAFLSTCAASTVVMESCAGAHFMARHISQFGHQVKLISPQFVRPFVKSNKNDFIDAEAICEAASRPSMRFVTPRTEDQQAMSALHRVRDAIVRDRVKTTNQMHAFLLEFGISMPRGTAVIRRLAAVLEEHELPPYLARLLMRLHQHYAYLTEQIEELEQELKTHMADDDTAQRLLTIPGVGLITASLLATKLGDGKSYASSRDFAASTGLVPRQYSTGGKSTLMGISKRGDKNLRRLLVQCARAFMQRLEHNQGRLADWVKAQLSRHHSNVVACGLANKLARIAWSVTTHRTAFIQ

SEQ ID NO: 41312 - protein, 387 aa, unidentified
MTDPFDVRKSARPFDQDHTLVAVIELSQASWLVGGIVPGLARSPLKKLKPEKEQLLKLLVRWRDEATKAGHAIVRIAVACESGRDGFWLVRWLRAHDIEAYVIHAASVAVSREHRRAKTDRLDVELLKRSFLGWLRGEVGHCSMVAIPSCEEEDAKRPSRERETLMKERTRLINAMKGDLTRLGICTFNPKLRNAPKKLATLRTPEGAPLPANTAAKLTRDLERLRLVVTQIKALEAARLERLAASPEDKPHAMVLLLARVRGIGIETADMLVREVLSRHLRDRRSVARYAGLTGAPDESGSKRREKGLAKAGNARVRRGMIQLAWRLLNFQSDSALVQWYRKRTADGRGGTRKTMIVALARKLLIALWRKVATGEVPEGFILRPAQ

SEQ ID NO: 41313 - protein, 313 aa, unidentified
MSDSLPQTIGIDISKATLDCHVHPAGIERQFPNTTKGHKALIAWAGQWEVERIAYEATGTYHRALEVALGHLPCVKLNPERARRFAQATGTLAKTDRIDARLLARMAATLQPPVRPARNPQQNQLAELVNARDGLVRDRTALKNREKNLTVTLLKRQCSQRLEQIARHIEALDAEIATVIAADEHLARRHDILTSIAGLGTLTANQIIAIMPELGSLDNKQAASLAGLAPVARQSGQWKGKSFIRGGRANVRQALYMPALVAARFNPDLKAKYQQLIAAGKPAKIAITAIMRKLIVTANALLKQNRLWIKSPA

SEQ ID NO: 41314 - protein, 583 aa, unidentified
MLPHQAPAPQSPRRCGVGIDTSRYGHYAAFLRDDLQPAADELQFPESAAGYARFRQRLEGIRQRYGPIPFVVRLDAAGQYADNLLHFLHGLGTAGPEGAPAPFALALSCGDPQRNKNYRAALFGGKKSDPVEARAAARFALTEHPAPANPLSLELRTLRQVAGRLQGVVRQRTRLINQFHQVLALTFPERALLTKDLAAGWVLELVQRYPTAPRLAAATATDLDKVPYLPQAQIAPLLEQARTSIASLAGAAAEELVRDHVRQLRDVGARQKRLEDLLVAASHALPQANHLATLPGVGDVTAAVLTAFILDIDRFQAPGQLVAYFGILPIEVASGIDREGQARAPRRFVMSRRGNDLVRRYLWMAALSASRCNPAVRALYARVVAKHPHQKAIAVGQAMRKLLHLAFALWKTGRPFNPDHYPWQAPAHGEARDREPSAQGRAAGHTPDTEPARPVVTAACADSVAEAAALGDSAYIDFAHLKKQLSLARVLDQLGLTPRLRGSGPQRRCTCPLHRGDARGRTFSVNLDDNVFHCFDKHCGQKGDVIDLWAAVHGLSLRAAALDLLRTFGLEPAPRNGTEKRHG

SEQ ID NO: 41315 - protein, 339 aa, unidentified
MKLYGAIDLHSTNSVVTVIDEQDRVVYQKRLDNDLTVILQQLAPYQSSLEGIAVESTYNWYWLVDGLMEAEYRAHLVNTAAVQQYEGLKYTDDHSDARWLAHLLRLGILPQGYIYPKEQRAVRDLLRKRSQLVRQRTANLLSIQNLVTRNTGSSISSNRIKVLRVEDVGSLLGNADCALAAQSNLWVLHCLEEQIGKLEQVIKERVKLRPQFRYLKTVDGIGEILALTIMLETGEIKRFAGVGNFASYCRCVGSEKLSNGKRKGSGNTKNGNKYLAWAFVEAANFAVRFNPQIRRFYQRKKAKTNGIVAIKAVAHKLARACYYIMRDEVPFDVAKAFAG

SEQ ID NO: 41316 - protein, 408 aa, unidentified
MNAVGIDVSKGKSMVAALRPMGEVALLPQEFLHTEVGLEQMAYAIIALGEDTRVIMEATGRYHEPVAAALHEYGIYVCVLNPLFIKQSGGGSIRKVKTDKADAMKIAKYGLDNWVDLREYTPMDTVRQQLKLCSRQYNLYMKTVVSLQNNLISLTDKTFPGVNELFSSPERADGHQKWVDFVMTFYHCDCICRVSENAFAERYQKWCKRKGYHFSAEKAQDVYLGSCGHFTTLPKNDNTKLLITTAAQQLLAGKMTLAALRTEMTRLAKQLPEYDIVRAMYGVGETTAVQLMAEIGDVRRFPRRSSIVGFAGVDPAVDQSGKHSTKSVPTTKRGSPHLRKTLYQIVCTYLKKSPVDEPVYQFLNKKRSEGKPYFVYMTAAQNKFLRIYYARVKECLEAFDAQQDTSQR

SEQ ID NO: 41317 - protein, 388 aa, unidentified
MNVGADKSEPLTAIHTDLGAIFVSLELSRSSWLITSLSPGGGEKMSKHSVRGGDFAGLMERFAQLQEKARLRTGQSFRIIVVQEAGLDGFWIHRALQNEGIESHVVDAASIATSRRRRRAKTDKIDGETLVRALLAYKRGEPRVCAMVKAPTPGEEDRRHLCRERKALTAERVRHVNRIKGFLFSQGVSGYQPLRCDRRQRLEELQTGDGRAFPQHLKALVNRELDRLELLLKQIKTVEAARDALLAVEQTAKPAPAAMLLDIRGIGPEFAAILWSEGLFRHFENRRQIAAYAGLAPTPWQSGAVDREQGVSKAGNPRLRTTLIQLAWLWLRNQPRSALSLWFHERVSRNGGRLRKTTIVALARKLLVALWKYVTAGVVIEGVTMKVA

SEQ ID NO: 41318 - protein, 339 aa, unidentified
MNSMAVGVDIAKSVFQVHYVDPETAEIVNKPIKRAKFLEHFANRAPCLIGMEACSGAHHWARQLAKMGHEVKLIPAEFAKAFNIRNKNDAADARAIWLAVQQPGKPVAVKTETQQAMLALHRMRQQLIKFRTMQINNLRGLLTEYGEVMGKSRAALDKAIPEVLERVAQRLPAVVIDTLREQWTGLTKLDEQVAQIERRMREWKKEDKAVKAIGEIPGVGLLTATAAVAMMGDPKAFSSGREFAAWAGLVPAQTGSGGKIILHGISKRGDTYLRTLLIHGARSVLEHAKDPGPWVEQMIKRRPKNVVIVALANKIARTIWAVLAHDRPYRKDYVSVKPA

SEQ ID NO: 41319 - protein, 338 aa, unidentified
MLYTGIDLHKRTVVIATIDETGKVHSEVSLPASRAAVAHYFHWLPEPTTATVEATSSWYWLRDLLEQQEVPLTLAHAKFVKAIAYAKVKTDAVDALTLAQLHRADLIPRAHMVSPELRPLRALLRTRLHLVEKRTSAKNSVQRLLEQFNVPEPLRLPDEATLQASLYAEQIELLGDQIHRIEQRLQPELIPDPDIQRLLWIPGVGKIVAFTLHLEIDGIERFPTVRQFFSYCRVVPGADNSAGKRRHGRRKDGNRYLKLALSHASVRAVQYFPEIKRFYQRKARQKNPAIARTLVQKEIARSVYIVLKEQVDFNHTFKGQPLSKRKASKWPRQANPDA

SEQ ID NO: 41320 - protein, 350 aa, unidentified
MELHTIGIDLGKTVFHLVGLNQRGEVVVRKKFSRKQLLHFTANLQVKLIGMEACGGSHFLGRALREQGHEVRLMPAQYVKPYVKTNKSDYIDAEAIAEAVERPKMRFVPIKSDDQLDLQSLHRVRERWVMRRTAVINQIRGLLLERGITLRQGRRHIDAALPGILEDASAQLSGALRLLLAQLRQELDHLQMRIDEADAVIQKIAGENEACRRLVAIPGIGPVTATAIIAAIGNGAAFKKGRGFSAWLGIVPGEYTTGGKQKLLGISKRGNSYLRRLFVQGARAVLQQSAKQSSGLSAWLAQLTTRTHSNVAAVALANKLARMAWAVLAKNEPYRPPMLTGAATECLACR

SEQ ID NO: 41321 - protein, 452 aa, unidentified
MPSRKPRPQGLPPQLQQVQFNAAGIDIGSEFHFVAVPADRDEQPVRRFSAFTVDLLALADWLKQCGIDTVVMESTGVYLIPLYELLEQRGFQVLLVDPRRLKNVPGRKTDVLDCQWLQQLHTFGLLSGAFRPVEEVAVLRSYLRQRGMLVEYAGHHIQHIQKALQQMNIKLDKVLSDVTGMTGMAILDAILAGERDPVKLAKRRDPRCKNNEETIAKALQGNWREEHLFALRQALTLYRAYHQQMLACDEQIERQLGAMTDKSLGTKLPHQPRTHKPHRNTPTLNLRDGVHRITGVDLTRIDGIDGHTALKLISEIGTDMSRWKTEKHFTSWLGLCPGNKRSGGKNISGRTKPCANRAAAALRLAANGLHRSQSALGGFLRRMKARLGAPKAITATAHKLARLVYFALRYGWDYVDKGIQWYEEQFRERQLKSLQIKAFQLGYLIVPAPAKG

SEQ ID NO: 41322 - protein, 343 aa, unidentified
MQAITTIGLDIAKSVFQVHGVDADGQVVIRRQLKRRYVLAFFQKLPPCLVGIEACASSHHWSRELQSLGHTVRLMPPAYVKPYVKRQKNDTADAEAICEAVTRPTMRFVATKTPEQQSCLMLHRTRHLFIRQQTAVINVIRAHLAEFGIVAPVGRKGVEELLDVVTDSSDKRVPVVARVCLAALGAQLRRLKEQILEFDRMIMAWHRSNETSMRLDAIPGVGPMLATALVASIADPKTFRSGRNFSAWIGLVPKQHSSGGKDRLGSISKQGDRYLRSLFMAGALAVIRYAKIHGAQHRPWLTALLARRPTKVAAIALANKIARMVWAMMARGEQYKEPVALAA

SEQ ID NO: 41323 - protein, 320 aa, unidentified
MLSFCGIDVSKDRLDVMVLPDEYSSSVPNDPAGWAILVEQLRGFSIAAIGIEASGGYERGAVRSLQAAGMPVRQVNPFKLRQFAKASGVLAKNDPLDARMIASFVGIMPTRPAQPTTPAAEQLVEMLAVRRQLSAEKTAAENASRLLEDLMLQRLSRRRIARLAADIELLDKRLVEIVATDATLAHRYRLLTSMPGVGPVLACTLIALLPELGGMSRKQVAALVGVAPYAFESGTLKGRRCIWGGRANVRQVLYMAAMSASNWNPALKLFHDRLKGAGKLPKVVIVAVMRKMITTLNAMVRDDIAWADRLSGRHSVTTAR

SEQ ID NO: 41324 - protein, 347 aa, unidentified
MKYYAGIDVSLNSSNVCVVDASGKIVREGKVASEPVTLITWLGSLGVNLERIGLEAGPLSQWLYGALREAGLAVELLETRHVKTALSTMPVKTDRNDARGIAQLMRLGWFRPVHCKSMAAQEVRALLTARKLVQSKLYDIEMSLRGILRGFGLKVGPTTSPSFAARINHLVDGQTSLEVVAAALLSLHAVALREFKSLEKSMRQISRADARVRLLMSTPGVGPLVALTYVAAIDDPARFPSSKSVGAHFGLTPKKYQSGETDVSGRISKMGDGSVRTALYEAAHVILTRPIKGGALKSWAMKLARRAGMMKAKVALARKLAVVLHRMWVDAIKFDADKASGCVRVAA

SEQ ID NO: 41325 - protein, 318 aa, unidentified
MLIHYIDIAKRNFVIAVSSLSKTKTETNNPKGIAHTIEYLKKHKVALVVTESTGGLEIPAAKAIRRAGIAVIIANPRQTHQFAQSQPLTKTDAKDAKMPAFFAQMTAQKEDSQTMPYQPPTEAEEVLEALVNRRNQPADMRTAEKNRLHQVHETQVGSVKQLIAHFDRLIDELDKQIDNHTHTHFDGKDQVAEQIKGIGSITTATLMAMLPELGRLSHKRIAGLAGIAPHPRESGETKFKSRCFGGRSAVRKALYMATVAATRFEPLIRDFHQRPLSEGKPYKVAVTACMRKLLTISNTRMRDYFAENDTAENGIRTA

SEQ ID NO: 41326 - protein, 343 aa, unidentified
MDYYVGLDVSLKQTSICVVNQAGSIVHEGVADSDPEAIASFVRSKAPGTVRIGIETGPTTTWLWTELKRLGLPVICIDARHAKAVLKMQINKSDRNDAAGIARIMQTGWFKEVRVKDLDSHAVKALLASRALLVKIKRDLENQIRGLLKNLGLVIGRAKFNVFAVRAEELIEDRPELVAAVRPLLDARKAIERQVGDLDRKVHKLARHDVQVRRFMTVPGVGPITALCFKATIDDPTRFRRSRSVGAYVGLTTRRHASGEVDWSGRISKCGDAMLRMYLFEAAGVPLTRVPKWSGLKAWGAKLTKRNGLRKAKVAVARKLAVILHRMWIDGTEFNWSTKKAAA

SEQ ID NO: 41327 - protein, 369 aa, unidentified
MQESTMFVGLDVHKDSIAVALAPAGQGEVRAYGDIAGDLEAVDKMIRRLRQSHEKLDFVYEAGPCGYALHRHLTGKGLPCAVVAPSMIPKRPGDRIKTDRRDAVSLARLHRAGELTTVYVPDPQDEAIRDLTRAREDAVLAHKRARQQFASLLLRQNIRYSGNRAWTQGYKNWIARITMPQPAQQIVFQEYMNAIDETGQRVERITEQIRLALDAWRMAPVARALQALKGVSLIASASIVAELGDLTRFNHPRQLMAFLGLVPSQYSSGPRQRFGSITKTGNSHARRMLVEAAWAYRFSARVGRQLCERQENLPPAARDIAWRAQLRLCKKYRRLVAKGKIKQVVTTAIARELLGFMWAIAQEVKPLAA

SEQ ID NO: 41328 - protein, 428 aa, unidentified
MLEKLDRLEQFRQLRSTIRGSKTILVVGIDVAKSRHHAFFGDANGKTFHKRLIFDNDLEGFQKLRGMASSLVARHTLEQCVYGVEPTASYHKPLAEYLIRNNEQVVYVSNVAVKHNRSLLDGRWDKNDTKDAANIADLIGQSRCQYYDLAANDIRELRSLLAYRNKLKKQEHGLRMRIRNNLLAQYFPELDKQMPPGGQDGLILDIIAKDFDPAHIAKTPFETFRQQYNLSRRHISYEKRLRTIWEQSQQSVGCFLPESAAWEGQMMVDQLHHTRQIKHDLERQLKHIGETFPSYRSIITIPGFGPIISAMTLGAISDAHRFTNRKQVLRLAGLDLSASRSGKTSNSAVPVISKQGKAALRYGLYQAAMIASYQDETIRNYFTRLLKGRELERGIKTKMRIKLAAKLLIVAWTLMKRNEVFDSGHFKV

SEQ ID NO: 41329 - protein, 440 aa, unidentified
MRIMYERCCGLDIHKASIAACALISEKGTPQEETRRFGTMTADLRELAGWLQQKGIRHVAMESTGVYWKPVWNILEPAGFELLLANAQEVKVVPGRKTDQKDSQWIADLHKHGLLRNSFVPPRAIRDLRDLTRTRAILTQEHTSICNRIQKVLEDANIKLGSVASDVFGVSGRAILRALMKEEHDAEALADLSKGLLRKKIPQLRRALEGQVTAHHRSLLTGQWSRMEFLEREIVDLETQIAERMKPTPEETALTLPNTAEDAPAPLSPREEAIQLWMEIPGVGWTAACSMVAELGVNMDQFPSAAHVASWAALCPGNNESAGKRLSGKTRKGNVWLRRTMCEVAWAASHTKDTYFAAQFHRIASRRGNKRALMAVAHSILVTAYHMLKHKRHYQELGADFFDAINRDKVRDRLVQRLAKLGFDVTLKSKDSIASDSQKN

SEQ ID NO: 41330 - protein, 336 aa, unidentified
MMSVCILDQSGEILVHRTMKTDPETFLKAIAPYRQGMVVAVECLCTWYWLADLCADAGLPVVLGHALSMKAIHGGKAKHDQIDSHQIAALRRGGMLPQASVSPATMRATRDVLRRRRPLAHKRAALLAHVQNTHSPYHLPAMGTKIASKANREGVAERCADAAVQKSIAVDLALITSDDALRRDGELPIVTTAKHHDAHTLSLLHTVPGIGTMLRLVLLDAIHDVHRVPRVQDVVSSCRLVQCARASAGTRYGTSGATLGKAHLTWAFAAAAVLFLRDHPAAQKYLARVEKKHDTGHALTSLAQTLARAVSDLLKRPGACETETFFQRYTIREGSG

SEQ ID NO: 41331 - protein, 341 aa, unidentified
MDHYAGIDVSLECSSVCVVDGSGKIVREGKVASEPQALIAWFGALGLSLARIGLEAGPLSQWLFGGMQQAGLAVELLETRHVANAFKTMPVKTDRKDARGIAQLIRLGWFRPVHCKSIGAQETRALLTARKLVQKKLHDVEASLRGLLRGFGLKVGKTTPNRFAGRITELVAGHPSLEAIAEALLAVHAVLLREFKGFERRVRTVARHDARARLLMSTPAVGPIVALTFAAAIDDPGRFKSSKQVGAHFGLTPRKYQSGETDYTGRISKIGDSGVRTALFESAHIIITKPIKGSSLKSWAMRLAKRAGMQKAKVALARKLAVIMHRMLVDGTEFEFAAAAA

SEQ ID NO: 41332 - protein, 428 aa, unidentified
MIPAVIERCAGIDVHKKFVMVCVLIGPADSNPTPQIRRFSTFNAELERLRKWLLELQCNRVAMESTGPYWKPVFNVLEEAGIEMVLANPQQVKNLRGHKTDPKDAHWLAHLFRHGMIRPSYIPPKPIRELRDLTRRRKQLVRNGAMERNRVQKLLEEANVKLGSVLSDVFGASGQNMVEALMKGEATAEQIAQLAQRRARKKIPEIQKSIEGHRLNQTHRDLMQQCMTHLAFLEEQIEEIDQQIQNKIRSYGLSEAYELLQTVPGMQAEAAATVLAEVGADVQAFPSAAKLSSWAGVCPGNNESAGKRKSSHTTKGNPYLREVLLECAWASSRKKNSQMQHRYRRLLGRRGKKRAAVAVAHALVQAVYYVLSTRKPFVDTAEPPRSPGQVRRLVRHHTRRLRKLDCWTRRTKSDNKGNSMAQNQQTSG

SEQ ID NO: 41333 - protein, 316 aa, unidentified
MDHNNAVYGVDVSKAKLVTVRYDMQTLVEVDNRAESIAAWLAGLSKGAMVAMEATGIYHRLLAHLAHAAGLRVYVLNPQTLKHYAQAIDQRGKTDGCDARMIARYAVHEQAKLRRWQPPARAADRLSQLLERRHTVVGVRQTLAQSLSGLPMLKAARQSLLASLERTLGRLDILIRHEMARLPGAAALYGRLQSIVGIGPVVAAQLVAMFSTLSFARASAFIAYTGLDPRPNDSGNRHGRRSLSKHGPPLLRCLLYNAGMAAANSKVFKPMYKQLRERGLHTTEAIVILARKLARIAFALYKSGEVFEAQKHFKTA

SEQ ID NO: 41334 - protein, 428 aa, unidentified
MAEDTTLTSQTWLVAIDVGKAFHAVLVEGVDGKRQQFRMANHAEDYDRLVGFLRGLPGPARIALEPTGDFHRTLAHRLLREGFSVVSVSSVAGARYREAMFNSWDKNDPKDASVILQLLKHGLVQHYHDPLLAGDHDLQELAKTYHQIVLARKRLADSLLNHYLPLYFPEMGRYWESTRVEWFVDFLEKFPTPAAVRALPKEAFVRAAWSVVGRKVNKQAKLEELYELAHRSIALPVAVDSVAIETFRLQLAQLRRLAELRQTLEARAHALLKDRADFQRLCSLPGVAAILALVILAEGGDLRRFPHHRQFLKYCGLDLAKCQSGQFRGREMLSKRGNARLRMAFWMAAQRAVRMNENSFRDKYERYTRHDSGNPDVRRKALTAVAAKMARVAYAVVKHDQPYHGYHEQALPSGSIPLKRAVGARATP

SEQ ID NO: 41335 - protein, 369 aa, unidentified
MEPSRTPDIIIGLDVGKTGHHACALTNTGERIYDKPLPQDEAARREIFASMQAHGSVLMVVDQPNTIGALPIAVARDCGCTVGDLPDLAMRKAADLYPGRSKTDRRDAFIIADTARTMPHTLRAVDRDDETLVALKMLAGFHDDIVKDATRTKNSLRSVLTQIHPALERVFAGEILSRTLVLDSLIHYEGPTKLAAAGRGRVLKWMRNRAKKDPVALAIFAALAEQTVTVPGMAAAELVIPQLAANIKALQAQRDTIAGHGSEMLESFPLAQVLMSMPGVGIKTASNILLSIGDCQDFADAAHLAAYAGIAPTTRQSGTSIRGEFPTRAGNKQLKTRCFDRRGSRRTAIPHRATTTCVNGLKDRSTMPR

SEQ ID NO: 41336 - protein, 398 aa, unidentified
MTRKNTLKSLPTDTEFRVVGLDLAKSDVSVAAIPVDDNTPSLVDRMTYADLLDWAGKISPTLFAMEPCNGYSLLCLQLENLGHEIKVISSWTVSMWINTHLSGQKTDLNDAIALARLAVSDAELTPIRHKSITEIRIQTVQAVRQQLMSQRSKSIVSFKALAQQWGIPCAAGHRNLKKLRESIEAKVDLITRPVANAMLFLLDAVKSLDRQIGQLNQTLQELVMSDERGRLLQSVLGVGTQISARVITVVGNIERFNSPRSLVAYVGVAPRNFITGHKNLTKKKHGNCPDLSHKGQGKISRRGDKLLRSLFIQGAACLYMQFCKDQLPECQLKRWILQQLARQKTYGKLIVSLAAKLIRIVWAVLTYGEKFNIQKAGMTRSMWSEMALETPLNKEVPA

SEQ ID NO: 41337 - protein, 402 aa, unidentified
MNAVGIDVSKGKSMVAIMRPFGEIVSAPFEIKHTASGINSLVELINSVEGESRIVMEHTGRYYEVLAHQLSEANLFVSAINPKLIKDFDNDSLRKVKSDKADAVKIARYALDKWQNLKQYNVMNELRNQLKTMNRQFGFYMKHKTAMKNNLIGILDQTYPGVNTYFDSPARSDGSQKWVDFASTYWHVDCVRKMSLNSFIDHYQNWCKRKKYNFSQSKAEEIYGKAKELVPVLSKDAITKLIIKQAVDQLNSASTTVESLRTLMNETASKLPEYPVVMAMKGVGTSLGPQLIAEIGDVSRFTHKSAITAFAGVDPGVNESGSYEQKSVPTSKRGSSDLRKTLFQVMDVLIKTHPQDDPVYQFLDKKRAQGKPYYVYMTAGANKFLRIYYGRVKEYLASLPES

SEQ ID NO: 41338 - protein, 346 aa, unidentified
MCSLPVFVGMDYHDSFVRVVVQDTDGSEMGNADRTNHWKAIADFGDRFGRPVRAAIESCCGAADLAEELVSCAGWSVALAHPGYVQRMKQNPDKTDCQDAQLLADLERVGYLPRVWLAPRYIRELRHVVRYRLQLTEQRRATKLRLRALLREQRCHAPEGLNAWTKAWQHWVRQTAELSEQGRWLAEQHLDELARLAIRIHEVEKRLEHLTANDVEVQRLQQQPGIGPVTAWTMRAEIGHFDRFRTGKQLARFCGLSPRNASSGQRQADAGLIRAANPALRTVLIEAAHRLVQYDPSWQKFAQRLRARGKPGSVVAAAVGNRWMRRLYHEMKTSSGELAIAVGPAR

SEQ ID NO: 41339 - protein, 415 aa, unidentified
MAAPLFVGVDVHNQTNHIALLDQAGAPVGKQFTVCNNRPGAQVLVSRLVQTLREGDFDGLRLAAEATNWYWFPLFQTLSQDPVLQHWPVSLFALNPRLVAKYKETFTDQDKTDASDAFLIADRLRLGRDLPESYPVADAYLALRFLTRYRYHLVKDLVREKNYCLSLLYLKASAYRQDHPFSDVFGVTSQAVLQEFASTEQLAAMPLAELLTWLDSQAKGRFPDPAAVARELQQVAQDSYPVARQFQQPINYVLNWSFQLVNFLERQVQRANTAIADTLAPIPHTLATIPGFGPVYSGGIIAEIGDIARFDHDETKVAQFAGLHWRKTESAQFRAEETRLTKRGNAYLRYYFCEAANAVRMRNAEYAAYYQRKHDEVRKHQHRRAIVLTARKLVRLVVRLLTTNQPYQPRRQPSG

SEQ ID NO: 41340 - protein, 373 aa, unidentified
MPRYSTAFGMDVHLRSTTVCALDAETGEAVTRRFRGNPWGEVAEWMSGFPGPSLAAYESGYLGFAPQRELSALGVDCVVAAVSRVPRSAADLSSKNDRNDAARMAKAILSHDISPVWVPSPEIEGLRDLAGAHDAATARLAAAKQRLLAFLARRGYAYGGTTPAGNPRRYWTYDFLRWLDKVRPADDGGIRALAALRNEVEAADETREALLAEYRAAVAAGPLSAEVEALQSIKGCGFALAAAFASEVGDFSRFRSGRQVTAYFGLAPKQRSSADSVRLGGISGAGNALVRKLAVEGSWCYAQAGHQPKLMPKGSGVPLEIRMHGRKGSERLLRRREEMIARGMPQAKANAATAAELVRWLWALGAMCREATE

SEQ ID NO: 41341 - protein, 360 aa, unidentified
MSFNGTSVGLDVHALSVVAHAVDEESGRVERARLCPDHGEVLRWLGQLRGPLRVAYEAGPTGFGLARALAEARIECVVAAPSKLIRPAGDRVKTDVSDAAHLTRLLRLGEITPVTVPEADVEAVRDLVRAREDARADLMRVRHRLSKLLLRQGRVYSGGQAWTARHETWLRQQRFAYAHTAAAFDHHFDAVLSATAARDRLDEQIVAVAASPRWADTVDRLGCLRGISALTGLALAVEIGDWSRFTGASIGAYVGLVPTEYSSGASRVLGSITKAGNAHLRRLLIEAAWHHRASYRNPGPAMRARWAKVDPALKARGHAGNRRLHQQWCRFLDRKKHPAVANVAIARQLAGWCWSLATLD

SEQ ID NO: 41342 - protein, 386 aa, unidentified
MQTVADRTEAATAIRTDLGAFFVSLELSRSTWLITSLSPGGGEKMSKQVVRGGDVAGLLERFARLREKTRARTGKVFPFVVIQEAGLDGFWIDRALHNEGIESHVVDPASIATSRRRRRAKTDRIDGEALVRALLAYKRGEPRVCAMVKAPTPEEEDRRRICRERKVLIVERVRHINRVKGLLFSQGISGYEPLRRDRRERLDTLQTGDGRRLPDHLKAQVRRELDRLELLLEQIKAVEAERDVLLAAQRDAAPAAMLLDIKGIGPEFAAILWSEGFFRHFDNRRQVASYAGLAPTPWQSGSIDREQGVSKAGNSRLRTTLIQLAWLWLRHQPQSALAQWFEERVKRNGGRLKKRTIVALARKLLVALWKYVTAGVVIEGVVMKRA

SEQ ID NO: 41343 - protein, 434 aa, unidentified
MSNRLQVGIDFGQKRTDFCLLFPDGQFIEPHLGFDNSRPGYELSKKLLLDVLDRYGFDGLDVSGEATGYYWFPFFLQLAADPDLEPYDLKLHVLNPRWVYWFKKCFAQDNKSDQKDPYYIAERTRTHPPSIPWKPDYDTYALRFLTRFRFHCIKNLAREKCYFSAFLFLQASAYRQLKPFSNVFGVTSRLVLSQQPGLDELAALPVEDLAAQLYELSGHHLPDPANNAHKLQRVAQESFSLPEALTRPLQRILSLTLAHIRFLEDQISQVDAWIAKEVSAYPAIVNLTTIPGVGPVFSAGLGSEIGDTQRFLQGTKWDKKRKRMRPRNLRNAEDAVAKIAGLWWPRSSSGDFDAQDRRMAKSGNRYLRYYIIQAANLMRIHIPDYRAFYGRKYAESAKHHHKRALVLTARKAVGLFVGLLHRNEAYRPGGASKT

SEQ ID NO: 41344 - protein, 411 aa, unidentified
MDVYCGIDWAEDHHDIALVDRDGQLVARRRIGDDAAGLAQLLALLAEHGDTPGDPIPVAIETPRGLLVACLRATGRAVYPINPMAVARYRDRHSVAGKKSDHGDSVVLAGVLRTDMHAHRPLPADTELAQAIAVLARAQQDAVWDRTTAHNKLRSHLREYYPAFLAAFAPASGGITRPEARTILAAAPTPADAAKLTLAQLRGLLKKAGRSRGIDTEAARLREAFRVPQMHQLPLIEQAMGRQTLALLGQLNAACAAADDLERAVTESFNLHPDAGIITSFPGLGALTGARVLAEIGDDRSRFQDAKGLKAYAGAAPITRASGKTRSVTHRKVKNNRLAAAGYCWAFSALTASPGARAHYDRRRDDGDRHAAAQRNLFGRLLGCLHHCLIVGCEYDEATAFPGSTKLSAAA

SEQ ID NO: 41345 - protein, 347 aa, unidentified
MYYAGIDYHKRYSVVSIQDAQGQIVQEQRVDHQFPEVFKRLFRECREPVSLVYESTLNWGWLYEILEPADNVASITLANPFKVRLIAEAEIKTDKISARALATLLRLNVVPACHIPDRQTRQRKEVLRQRSYWVKLRTAVRCRVHKILGNQHDLSMPQVTDLFGRKGRAALDKALLPAPDATLLAQNLRVLDAIDKEIGTDEQLIRQEGQADRASQILASMPGIGLILANVIATETDGIGRFGRSERYTGYSGLSPTVHSSGGKTHMGRMMQQCNRWLKWAYIEAAWIAVGCSPYFGGLYRYHRGRGKQANTAITIVARRMCHIAYQLLTEDRLYQERSFSPAALLK

SEQ ID NO: 41346 - protein, 417 aa, unidentified
MSETVYRRCCGMDVHKDTVVVCVLPAVAQTGTMIRKSYRTFLADLTRMRCWLQQLRVTEIAMESTGVYWRPVWNVLEEHGFRLLLVNPAQVKALQGRKSDRRDAQRIAEYLQDERLDGSFVPPPEIRELRSLLRHRVHLLEMRNQVHSQIRDLFETANLKLSSVASDLLGLSGRNIIEALIAGQDSPERLSWKVRGNLRKKERLVKEAMKGCFNDFHRLMLKGHYEHYQFLTGQIQALEAEIERRMGAHQQQVELLVAIPGVERITAWHLVAELGLDMSIFPDADHCASWAGMSPGSCESAGKQLSGRTKKGNKYLRRVLAQSAWAASRCKQGYLRAFFYRVKARRGWGKAIIAVAHKILVIAYNILKTGLPYQDLGSDYFDKLHPERTTNRLVQRLERLGHRVVLETSPTPKPQIP

SEQ ID NO: 41347 - protein, 330 aa, unidentified
MKKWKFTLGVDVSKNTLDVSCSELNEHIRIINGSQGFIQFLKWCKRLNIDLKESFLVLEYTGGYEYKLLQFCEAHAIIYARIPGLAIKNSMGITRGKNDQVDSARIAQYGEEKYKSLQPSKALNPAIIRLKELLAFRKRLVRENAGYKSSIKEREHMYGKNRKDIIVKSLQQKLKANSKIIENVETEMMQIIVQDEEMHLNFALITSIKGIGKVNGLMTIAYTENFTSFSNPRSYAVYVGVIPFDHSSGTSIRGRKRVSHIANKELKQELNQAARSAMVWDKEMNNYAENKMKTKCYKIVLNNIKFKLILRMFAVVKKGEKYVDNYKNVA

SEQ ID NO: 41348 - protein, 344 aa, unidentified
MSEVIIIGLDIAKHVFHAHGADGKGRAVFSKRISRGKLLDFFAAQPSCTVALEACGGAHHWARQLAQLGHEVRLIPPAYVKPFVKRQKNDAIDAEAICEAAQRPSMRFVAVKSEQQQAAGLVFRTRDLLVRQRTQLINAIRGHLTEYGWIAPKGPSHVAMLTDLIEEEEMASSLPKAAHAMFQLMLDLLADLNGKVADLDQEIARRAREDEVSRRLMTVPGIGPISATAIAALAPPAETFAKGRDFAAWLGLTPLQRSTGGKQKLGATSKMGERTLRRLLIIGSSAVVQQASKRGAPRGSWLEQMLARKPRMLVTVALANKMARIVWALLVRCENYRAPVAAKA

SEQ ID NO: 41349 - protein, 376 aa, unidentified
MNQDSTLYVGLDVHKDSITVAYAMGLDEVELLGKTGTTQVEVDRLCKRLQSKARHVHVVYEAGPCGYGLHRRLVGKGFDCMVCAPSLIPRKPGDRVKTDRRDAIKLVRSLRAGDLSAVHVPTVEDEAFRDLARAWSSARDDLKQARQRLKSFLLSHGVQYSGRANWGPAHRRWLSTLSFDSAWQQLAFNEHRRTIEDRLAQCGRLEAALHEAVLCWRFYPVVLALQAMRGIQFTSAVGLVSEVGDLSRFEHPRQLMAWLGVTPSEHSSGSKRRQGSITKAGNSYARKLLVESAWSYQHPARVSKDIQRRQEGIPKPIADRAWDAQLRLCGRYRRLVARGKSRQVAIIAVTRELAAFIWDIGRMGMTLAVPQSEQPA

SEQ ID NO: 41350 - protein, 368 aa, unidentified
MSDDITAYVGLDVHKGSIAIGVAEPGRAAPHFVGTTGPDLAELTKALSRLGRPEQMLLAYEAGPCGYPLARQLAARGYRCEVIAVAKMPRKPGERIKTDRRDALALARYLRGGELTPVCVPDERDEAMRDLSRAREDAVRARLKARQQLKAMLLRHGRPYTGKGAWTQAHERYLARVAFEHTAQAIAFAEYRSAVREADERVERLTTALRQQLADWRWAAVVQALMSLRGIDFVAAVTLVAELGDLSRFAHPKELMSYLGLVPSEYSTGESRVQGAITKTGNGHVRRVLIESAWAYRHPARMGEEITVRNQGQPRAVRDIAWRAQLRLCGRFRRFAARGLPHNKICVAIARELAAFIWDVARHAPGLT

SEQ ID NO: 41351 - protein, 370 aa, unidentified
MAKRSMFVGMDVHKESIDVSIAEEGRDGEVRHYGVIAGDLEAVAKVVRALRAPSRRLRFVYEAGPCGFGIHRYLTAQGEDCVVVNPSSMPKRSGDRIKTDRRDGDALARLHRAGELTAIYIPTPDDEALRDLVRAREDAVGLSTQAKHRLKAFLLRQGRRYPGRAGWTRPYRRWLADLSFPLAPQHIALQEYRDTIDETERRVERVTDQLRQLTPAWRWAPVVDALQALRGVSFVTAVGLVTEVGDIRRFTHPRELMAYLGLVPSEYSSGPSVRRGGITKAGNPHARRLLAEAAWAYQGAPRIGRQMLYRQEALPKSVCDIAWKAQLRLTSRFRKLVARGKAKPKVATAIARELTGFIWAIAREVPAPPA

SEQ ID NO: 41352 - protein, 391 aa, unidentified
MEVVAESVAGIDVHQKQITVTILIGSENVKKPKKVSKRFGTTTNMLRDCGQWLKEHGVEQVLMESTGQYWRPIWQVLESFDFQLILCNPRIIKNIPGKKTDQKDSEWLSELARYGLVSASYVPPRKIQELRESTRSRKKMKESLTRIKNEIHNILQRSNIKLTSFISDLFKGSGLKLLNMIINGEVLTLDSITKCMHGKLKASPEQLLESMNGVLSQNDRNLLVIQMNLLNSYLKCITDLNDLIDEQIREYSDLCHRLEDIPGISSATAQVIIAEVGVDVSPFPDVHHLASWAGLCPGNYESAGVKHGSRILHGNVYLKKALVTAAMGAKVTKETGLKDYFWRLKSRMCTQKALIAVAHKILRIVYSLIKSEKTYREYKKDQRKAITSVQI

SEQ ID NO: 41353 - protein, 345 aa, unidentified
MRDLKIIGVDLGKNVCSLVGLNAAGGVVMRRRVRREGLLALLTKLPGSVIVAMEACCGAHYLGRLLTGRGLEVRLMSPEYVRPYVKAQKNDDRDAEAIAEAATRPTMRFVALKTEAQLDVQVLHRVRDRLVGQRTSLMNQVRSLLLERGIVVPQGRRSLLDAVAAVLVEGHASELGRRIRLLLEDMLDQWRALDTRIAALDDEFAEMTRRDPAARRLATIPGVGVMNATALVAAVGDGRAFSRGRDLAAWVGLVPRQATTGGRPRLLGITKRGSKYLRKLIIQGARSALPSLARTATPIGAWLRGLLSRAHGNTVVVALAAKLIRIAWALLRNGTSWSVARSAAV

SEQ ID NO: 41354 - protein, 410 aa, unidentified
MEVILRCCAGLDVHKDGVEACVRRTSAGGKVEHEVRHWGTTTRELAEMSNWLSSLRVTHVAMESTGVYWKPIFNILEEHFEILLANAQHLKNVPGRKTDIRDCQWIAQLLQHGLLKGSFIPPRPQRELRDLTRQRTQLVDEASRISNRIQKVLEDANVKLGSVASNVVGASGRLMLEAIVAGQDDPSQLADLAKRRLRGKIPQLEQALDGKLTEHHRWMLGLLLDQWKSTQLFIARLDERIAERTRPQQAVLEKLDAIPGVDRRVAEVLLAEIGPDVTPFPTHAHLASWAGICPGNNESAGKKRSSKTTKGSRWLRQALVQAAWAASHKKDSYFQAHARNLMHRRGRKRGLVAVAHSLLTVIYHMLKEDTSYHDLGSQFLDRLRAKHLVRFHVRRLQNLGLQVTLTSETA

SEQ ID NO: 41355 - protein, 367 aa, unidentified
MKKVSTVAAMQSRNISQQKLTVGLDLGDRNSWYCVLDEAGQIQLEQRVRTSAKALQEVFGAMPCSRIALEIGTHAPWSSRLLSAVGHEVIVANARKVRLIGESCKKDDRLDAQTLARLARIDPQLLYPVKHRSAQAQADLMMIRARAALVRGRTALVNAARGLAKSYGERLRGCNVRNMDAEKAEGLSPELQRALEPLLATIEELSERICEYNDRIAALAEASYPQVALLKQIKGVGTLIALTFLLTLEDPHRFGKSRDVGGYLGLQPGRRQSGQRDPQLHISKAGDPYLRTLLVQGAQHILGPFGIDCDLRRWGLKLAERGGRNGKKRAIVATARKLAVLLHHLWVSGEVYEPLHNSSRVTVAVAA

SEQ ID NO: 41356 - protein, 339 aa, unidentified
MNVTTIGIDLAKNVFHVHGADARGRCVFSVQLSRAKLAAFIANLPPCLIGMEACNGAHYWARRFRSMGHEVRLMNPQFVKPYVKSNKNDRNDAEAICEAVGRPSMRFVAVKTPAQQDRQALHRVRERLVGHRTALVNQTRGLLAEYGIVLGRQVAVLRRRLPEILEDGENELTGDSRTLFAELYEELLELEQRIAPLSERITREANDNELCQRLQALDGVGPIIASAVTASVGDARVFRNGRQFAASFGLVPRQYSTGGKTRLGGISKRGDKYVRKLLIQGATVAVYHAARKQTPRAQWIQGLVKRCGKQKAAVAVANKNARIIWALMARGETYRAQAA

SEQ ID NO: 41357 - protein, 407 aa, unidentified
MNASTPRNTRKYSRFCGIDVGKNKHVACIIDRDGKLMVRSQSFTNDAEGYQRILDRFKEVGGPSKVAMAMEATGHYWYSLHDLLIRHRYDVAVLNPIQTAKQVTKGIRKTQTDRIDAHHIAVLLKNGEHRPALIPGELGMTCRQLTRLHHAMVRQASRIKQLLWSKLHPVWPEYEPLFATPFCKTGRTLLNTAPTPQDVLALPREELQDLIRKTSRGKYGTIQADKVRQAAENSVGTHRGLPGARVAIRLLLAQLDALKPIRGQLEAQIEALAARLPDYLSTLPGASPISIVSLFGETDPLEAFASPSQLIAFAGLDLVVSQSGEYQAPRRHISKRGSPFLRHTLWAMAHRACYQEGDLRDYWLRRKGQGLSHLASVTAVAIKLCPVVWRIMTDRRNYLPQRPARKP

SEQ ID NO: 41358 - protein, 415 aa, unidentified
MELLHERCAALDIGKKDLKACVRTPSVSRRKRSRSQEIRTFATTTNALLELRDWLVAEQVTLVVLEATGDYWRGAFYLLEDDLNVILVNAAHAKGLPGRKTDVCDASWLCQMGECGLLRASFVPPEPIRHLRDLTRYRTTLTAERSREAQRLEKELEDAGIKLSAVATDILGVSGREMLAALIDGERDAQVLAEMAKARMRPKIPQLVAALTGNFGEHHAFLCRLHLERIDQLTAAIGELSARIEEQMLPFARQLEHLATIPGVGQSVAEVIVAETGADMSRFRTAANLASWAGVCPGHHESAGKRRSGKTRHGNRWLSGALGTAAMAAARTKDTTYLGARYRRLVPRLGKKKAIVAVEHSILTAVWHMLTDDVDYHDLGGDYFARLDPERAMHRIVRQANALGFTVRFDPIQAA

SEQ ID NO: 41359 - protein, 321 aa, unidentified
MHKYNQIFGVDISKDVFDVVNSKGAYYQFSNDLIGFKAFAKKLTKETLVVMEATGYYHYCLAQYLYQQGYLVSVVNPLSVKRFIQMKLSKIKTDKSDAKAICEYSQFNEVPLYTAKDKSQAECLQLIRLIDIYLKQSTAIKNKLHGEKTLGIPSKVVYHSLNRSLKSIKKEIGVLENRLNALVKDHQQKQLTLLKSIPGMGTKTAIMLIVMTDGFNRFENSKQLCSYAGITPTIRHSGSSVRGKSRISKMGNQKMRNLLFLCSFSACKYNKGCKDLYERIVSKGKSKKLALIAVSNKLLKQAFAIAKSGLQYDENFVAVLK

SEQ ID NO: 41360 - protein, 336 aa, unidentified
MSQNYLGIDVHKKWCVYTQIDSTGKVMSQSRFRNTLEEVSTFASSLNSKIHLVLEPVLNYLWLLDQFEPYVGSVHVATPFKVRVIAESKSKTDKYDSRMLAELLRTNFLPESWVPPSEIRLLRGLIRQRYHLVKSMVMNKNRIRHLLFQYGIDLKVFNIASPRARLEIQHLCLPDITRETIDQCLKIIALLDDQIKEISKKIWECVKDNPTVELLQTIPGIGKIRSAVVYAEVGNVARFHSSKALASYTGLTPTVRSSGDSIWTGGITRYGSKPLRHALVEASINVIRKSSDLSRMYHRILYRSNIQKARVAVARKLAVIIYAMLNRNESFKMETA

SEQ ID NO: 41361 - protein, 414 aa, unidentified
MDTIYARVAGLDVHQKFTTVGVRCRLETGKLFAEVRTFGTMTRDLLALADYLEALGVTHVAMESTGILWKPVWNILEGRFTLLLVNPRRVKQVPGRKLDVSDAEWIAHLLQCGLLQGSFVPKRELRELRDLTRCRAQLVSEQTRVANRVHKVLEDANIKLGAVASDILGKSGRAMLWALNRGERDPDKLADLALGRLRAKIPELKLALEGHFREHHQFLVEHLLGHLDDLERRIEEISQRIAEHLPSILDDERLRRLDAIAGVNRTTIENVVAEIGVDMSQFPDEHHLSSWAGICPGNEESAGKRLRNRTTRKNRWLRRAITEAAWAAGRTKNSYLGALYRRLAPRRGKNRALIAIGHSLLVIFYHMLKYDVEYQDLGVDYFDKREPERLRNYLVKRLQLLGYQVCLTPQTDAA

SEQ ID NO: 41362 - protein, 379 aa, unidentified
MGQILPTDIIIGVDTHKHTHAAVAITGLGSRVAELTIRVSREGYRDLETWALSLGTVRAFGVEGTGSYGAGLVRALREKGHVVHEVTRPDRQLRHQHGKTDHLDAEGAARAVLGGRAIGLPKEGTSQVEMIRHLKVARDTAVKARTQAMLTLKALIVGAPAALREQIEALTGKMTLIRSLAAMRPGPITSTTASAKASLRAIARRWLDLDAEIKAHDAHLEELVGRCAPRMIQAHGIKTGTAAEMLILAGDNPERIRSEAAFAKLCGVCPIPASSGKTSRHRLNRGGHRQANAALYRVVVVRMRAHQPTIDYVQRRTAEGKSKPEIIRCLKRFVAREIFGFLCGPHRGASPEKTAACTATMTLTAQRQEALHPMVEQAA

SEQ ID NO: 41363 - protein, 366 aa, unidentified
MKKTSTVRVNGNMIFKGHKLTIGLDLGDRWSCYCVLEEAGEVLLEQKVATTPEAMKQIFEKIPRSLIALETGTHSPWVSRLLRELGHQVLVAHAQKVQLITKSNRKDDRHDARTLARLARIDPELLGPVRHRSAKAQIHLTVIRARAELVKARTALVNTARGLVKSYGQRLPKCGTQQVNRELAAGLNAELREILEPLLKEIESLNERIQEYEVRMEKIAKESYPQVELLKQVKGVGTQIALTYVLTLEDPHRFPKSREVGCFLGLRPGRRDSGESQPQMHISKEGDRYLRTMLVQGAHYILGPFGEDSDLRRWGLKLAARGGKSAKKRAVVAVARKLAVLLHRLWVSGEAYEPLRNSHQAMRAVA

SEQ ID NO: 41364 - protein, 347 aa, unidentified
MHYIGIDHHRQYSFLTVMDGDGQVVKQGKVLNYRLDMEDFIRDITGSIQAVIEAGRSSMSMVDVLEDIGIDVKVAHPAEVKAIAHAKIKTDKRDSKILAELLRADLIPEVHKKGKDSREAQRVLRQRVFFVGMMTRVKNRIRALLAQQVEQVNKSVGGFNDLFSLKGIEHLKSLELPSSDRALLNAMLELFAQLKILIKESDKLVDAIFQQNRDAQRIATVPGYGKFFSVLIASEIDQIERFDSAAKLQSYAGIIPSTNNSGTRCYHGKIIKACNRWIRWAAVEAVWPAIRSDAELRIYYQKRAFRKNSNTAKVATARRMLSIIYKILKEKRCYVSFQDKIKHRLPS

SEQ ID NO: 41365 - protein, 349 aa, unidentified
MIWIGVDAHKQVHEALALSSEGVVGQQRIPNTPQAWAALLAWAQQWPERIWAVEGAWYLGRGLAQYLARSGERVHEVNGRWTARRRRGMRVPGKSDRLDARSVATLLREEASTLPRVYAEEDELAAVQLWSRTQAELTKDLTRLVNRLHELLLQCDPEYKRTLPALTTKAAITALQQYAAPGSGVLAREREALIRATATQLALLDEQDRALRRKLGRASRARFSPLRQVEGIGSIIACAIAAEVGRPRPGFGEEQLAALGGLSPLEASSAGATRHRLNRLGNRRLNMVFHQIVLTQARIYPPARTYLLRRQAEGRTSREARRALKRLIVRRVFRAWRECFQTHTERVAA

SEQ ID NO: 41366 - protein, 457 aa, unidentified
MTASKERSRSTDEEGLPVVHRHAAGIDVGATFHVVAVATERDAKPVRTFRSFTGDLHCLADWLTKMGITTVAMESTGVYWIPVFEILESRGFEVLLVNARDVKNVPGRKTDVIDAQWIQRLHQHGLLRGSFRPRQAVVALRAYLRHRERMVEYAASHVQHMQKALMQMNVQLHHVVSDITGGTGLRILRAILKGERDPHVLAGLRDMRCKESRETIGKALAGNYRPEHLFALQQALELYEVYQERIRTCDGKIEETMRALNEDREAPTESLANRRSKRQKNEPAFAIQPALQALLGVDPTQIHGIGPYLALRLVAECGDDMSRWPTAKHFTSWLTLAPGNKISGGRVLSSKTRRSANRAASLLRMAAMSVGKTNTALGAFYRRLGARIGKAKAITATARKLAVLFYNTLRYGSAYADPGADYYEERYKERLRKTLQRRAAALGLQLIEAAPSGIRVS

SEQ ID NO: 41367 - protein, 349 aa, unidentified
MIRNKPRGATVYGIDLGKNIFHVVGTDPAGNVVQRVKFRRDTLRAFFERAERAVVGMEACPGSQWLARKLQAMGHTVRIIPAQFVKPYVKSHKNDTVDAAAIAEAVTRPTMRFVQVKQPEQVDLQSLHRIRDQMVGSRTRLICQMRAFCLEYGVAIRQGAGLFKSDLPRVIADECNDLTPTMRRLLNELFEDLMRLEKRIAEITREIEALAASDEKARRLMTIPGIGPLGATALLAAAGNGQQFKKARDLAAWLGLVPQQYSTGGKPQMFGISKRGNRYLRRLLIHGARSCVMHLDRSRDRLGAWLRQLHSRMHVNKVTVALAAKIARIAWVVLNRPGAIYERRDPALA

SEQ ID NO: 41368 - protein, 419 aa, unidentified
MSFKIFKFNCCGLDVHKTWIYACIGITDSNNRTEYKQARFSSFSKGLHQLCVWLAKYNCNDVCMESTGKYWIPVFNILEQHKIRVTLSHPKYTKPMKGNKTDRKDAKWICDLYMCGMVKPSFIPPADIRELRDLVRYRFKLTCMITGEKNRAQNCLTVSNLKLDDVFSDVFGKSSRSITEQILQHPGEKFDVSPFVDSRCKTPIEEIQAAVDGNISKEQAVKLRQCLDHIDELQKHISEVEQEILRLSDKYEAALNLIRTVPGFDKNPMTAIQVLSEIGGDMSVFPTAKHLVSWAGCCPRNDKSDRKIKSTRISCAGSYFKPVLVQIANALIKSKKHFEFTTRYKRIKTRRGHKKAIIALCRMILTAIWHILTDLKPYTSDGFLESRPVKKEKVLTTSQALNLLRQRGYLIKDEPSPVS

SEQ ID NO: 41369 - protein, 313 aa, unidentified
MIITLRCVGIDVSKHHLDIFDEGIGVSERVANAPHAITELVARWRCDALVVFEATGVYDLELREALCAADIRFARINPARARDFARASGQLAKTDPIDARMLAAFARAMQPATEQVSTPARNALARLAKRRDQLVLMRAQEKNRRSEAGDRAMVERICRLIEVLDHEIAEIEADISALIKAEPEISHDAQLMRSLPGVGPVACMQLIAQMPELGHVGPKQAAALAGLAPFNVDSGAYRGKRKIRGGRKRVRTALYMVALNAVRRADRFKAFYAKLRQAGKPAKLALIAVARKLLTILNAIMRDRKPYMPAQQT

SEQ ID NO: 41370 - protein, 358 aa, unidentified
MRHSTELFPDVTVGMDLSDRSAKAVVLNADGVEIDRLSLNLTRKDLESFFKRLPPGRVVFETGTQSPWISWLVKEIGHEAVVANTRTSSKSFKKTDELDAEGLARKGRSSPEDLHPIEHRSREVFLHRAVLTIRDGFVRARTLMVNLARNQPKPFGYRLPSSSTRAFKESLLGDLPQEIALLLKPVFEMVSVLNELIARCDKTIEKLCEKKYPDTQKVRQVNGVGPITALAFVLAIEDPKRFKKSRDVGAYFGLAPRVQQSGEWDPQLGISKAGNRVVRRLLVGSAHYIMGKFGEDCYLQRFGRALARRGGKSAKKRAAGAVARKLAVLLHRLWVSGDPYDPMRNTPKGTKRKTKTSV

SEQ ID NO: 41371 - protein, 345 aa, unidentified
MTLDAVPGSMTVGIDTHKDTHHAAVLGPAGQLIATSSFPTTGPGYAALLLWASGLGPIGKVGMEGTASYGAGLARYLTGHGMAVFEVPPGDKALRRLRGKTDASDAEAAARRVLADPQPAIPKTTDGTFAVLRQLYVARKLLVKMQTELSNQIGQLLITGPDDIRARYSTGTTLARMRQLVSTTPEITDPVERLMIDLLRDLATRWLDLRTRTRQLHDQIHELVTLHAPALLSRCGVGAITAAALLTAVGGNGNRIRSEAALAMLFGAAPIPVQSGTTNRHRISHGGNRDANCALHQIAIARLGHDPRSQTYRDTHLAHGKTKKDVIRLIKRALCRELFPLLCPH

SEQ ID NO: 41372 - protein, 350 aa, unidentified
MTTTVYCGVDFHARVQTVAYCGSADGEIHLHELNHRQDDVRGFYSQFSGEVVVGLEASGYSPWFEQMLEELGHKVWLGHAAEIRRFANRRQKNDRRDAELILDLLVKGDFPVIHRPSAQSIEILRMLRYRHRMVKMRTMIVNNLQALAIGSGLSLKSRLLTRPGRLRLLATQMSPVMSRQREEWLSLLDDLNARIASVVKWLEQQAQTDSKVQLLRTHPGLGLLTSLGLVHSMEPVTRFANQRKVAAYFGMEPMERSSAEKKHYIGISKAGSRLVRFLLVEAAQTAARNDQELKRFYHRLVARRGRPKALVAVGRKLLTRSYIMLRDGIDYAEFLRRGVEARPARETHRC

SEQ ID NO: 41373 - protein, 348 aa, unidentified
MSISMIGLDTAKTVFQIHGVDEAGRAEIRRKLRRNDLIAFFDKQAACTVVMEACGAAHHWARMLTGLGHSVKLIAPEVVKPFVKKGKKNDAADAAAICEAASRPDVKFVPAKSVEQQGILALHAARSLLVKQQTMLANAMRGLATEFGITVAKGIRKLDELMVVVDADEAIPKQAKQAITGLHDYCNDLSEGIETLEAEIVAHARHDETARRLATIPGIGPITASLIAATVGDISLFKTARQFAAWLGLVPRQSSTGGKTRLGRITKTGNREIRKLLVLGATSMVYRADGWNSAVGAWLRSVLERRPVRLVTVALANKMARIAWAVMTRKEVYRPKGGGVAAVAQATA

SEQ ID NO: 41374 - protein, 415 aa, unidentified
MKEEENASPCRYIALDIHKHYSVVAGVNRDGEEILAPRRVEHLDLEDWLAKHLQATDRVVIESTTNAWHVYELLEPLVGEILVANPIKVGQIACARVKTDKKDTLILARLLAANLVPTVWVPPKHVREMRQLVSQRRQLVGMHTQVVNRMHSVSHRHHLGHPKGKRFQEKDMGWREKLGRMERFQLDLDLETKKYLKGQIDQITKELGSRSHEEPWANQMMYLMQIPGFGVVTGMTVLTAIGDITRFESPKKLVSYSGLAPGVEQSGEKNRGRGITKEGRKELRWALVEVAQRAVKADPHWKRLFIELQRRMHRNQAIVAIARHLLTLVWTILSQGKSYHYYSDERIAYKYYTWSWQLDEVQRKGLTRPQFVRYYLMRLGIGANLQKVALDPKHPHRLASEAEILELMPEFQPPR

SEQ ID NO: 41375 - protein, 399 aa, unidentified
MNKLYAGIDVSSTINHVYLMNPDGSKKIAEKVISALTSLSICNVVIGIEATGVYGDNLMIYLRDESGLVQFDCDFHVLNPKQVKKFKDSYSDLPKNDPIDAFVVADSLRFGRITKPMYVDDGYRYKALQTLTRARFFAVQNLVREKQRFSNYLFMKCSGLAQEKVFSRKTGATSMALADEFETIDELVYMNMNELADFIKEKGRGRFANPNAVAEAVKSAAKGSYRLPQTINDSVNQAISVSISNISAMKEPIKTFDRAIQKQLDLIPNTLISIKGIGLVYSAGIIAEVGDINRFDNHASLAKYAGIAWKEHKSGNFNAEITNLVKSGNRYLRYYLLEAADSLRRCDSEFRRYYDLKFKEVNRFQHKRALALTARKFVRLVFRLLKDNRLYTPPELFKR

SEQ ID NO: 41376 - protein, 436 aa, unidentified
MEEVTDEPLYRDRVCGIDIGKAGLVATIRVPAEKDPARRAAETRSFGTTKREVLALADWLRCWQVPAVVMEATGDYWKGPLYRLEAEGFECVLADAKQVRHLPGRPKRDPADSRWLAACFERGAVTPCFVATEEFRVIRLHTRYRRDLTEERTREKQRAEKLLESAAIKVSSVLTDLHGVTGRDIMNHLIAGDRDPKVLAQLARTAARRKISQLEEALEGAEFFTPAHAALLTVMLARIDRLNADIDQLTEVIERLLAPHEEQLQQAESMPGWGRRAAQDSLAETGPDMTRFPTGAHLASWAGRTPLDHQSGKRQGRSKAKKGNRYLGAVTGETAVAAGRTQTREGARYRRLARRRGKPKAQVAVGNTQLKVYHKLLSNPGMRYADLGPDYYERQRGIRRQIAHHVGKLGDLGFEVTLVRLPSPGPEPGGTHNPAA

SEQ ID NO: 41377 - protein, 425 aa, unidentified
MDFIQNQKINQVTEKTLVIGIDIAKRTHYACFVDDRGRVLQKSFSVSQAGNGFELFYQRIMTAMKETEKTEVLVGIEPTGHYWLNLAYFLKERGIPLAMVNPMHVKRAKELDDNLPTKHDRKDALVIARLVKDGRFSYPRILEGMEAELRVGSSFKSKLTEEFGAVKNMIIRWLDRYFPEFTQVFPKFGKMALAVLECTPFPSDLHQKQPDEVLSLYREVEGFKSPQRPKAIRIIEVAANSIGVTEGREMARIEIATLVRRYQQLEQDIESITEQLVELVKTSVEYEWLSTVPGLGDATIIDLLAEIGSFSHYENPRQLIKLAGLTLRENSSGQHKGQKRISKRGRRKLRALLFRVMMPMIRHNEAFRKLHEYYTNRQVNPLRKKQSIVVLCGKLLKVLHGISTKHKAFDAQRMMKDISSLTEAV

SEQ ID NO: 41378 - protein, 323 aa, unidentified
MNKDIKYFGIDISHLVFDVTDSEGNYYQFKNNTSGFKKFLKLLSENSHCVMEATGYYHYQLAYYLLECGIRVSVENPLAVKRFIQMKLSKIKTDKSDSKLICEYGKQVELKLWKGNSKHQTECLQMVRLLAVYTKQSTMLKNKIHGEAVLGNPSKAVVISLKRSLKQVQKEIKALDEKLMILVKEVHQEVFTRLKSIPGIGNKTALMLVVLTDGFERFTRGSELCSYAGLTPVIKKSGSSINGRSKISKMGNQKLRNLLFMCSFNAVKYNKACKDLYDRIVAKGKSKKLALIAVCNKLLKQAFAIAKSGLFYDDSYRSNLVKN

SEQ ID NO: 41379 - protein, 429 aa, unidentified
MKNSTAYKLRQVPPGYLIIGIDPHKKIHVAVAMTQNTILHTKFKFANSRQGYEDVMTKAKEQMVRTGSRGVIFAIETGGHYWRNLAYFLDEKDIPFRIINPFTLKRIREGKDINRRKNDFRDAEMAAELLRNGEFVETKLPKGIYAELRTTYSTYRRLIKERTRIKNLLKGLLDGLFPEFNQVFKNICGMTSLQVLSICPAPKAITGMNLEEFVAIVREGFKGRAPKIRKLHTIYSLAQISIGIETGAESVSLELSFLVQRLRLLIEQIEKTEDILVRLLYSIPDSRYLLSIVGISYISVAGILAELGPLEAYQNARQLIKMAGTNPIEWESAGKRGSHTPMSKKGRPGLRWCIWTAAMCLLRHNIDFRSWAKERRERPAHLHPLKAREVFGAVANRLLRLAYALVREQTFYQIPNPKSVPEPELVAAI

SEQ ID NO: 41380 - protein, 343 aa, unidentified
MLYIGLDVHKEFCQACVIDERGRALSNERFPSTHESLDVFLAGIKDAKFVLESTGIWEYIYEGIEDRGFEVVLAHPLKVRAIAEARVKTDKVDAETLAQLLRADLIPRSWVPSRDIRDLRQLVRQRVYLSRQSTSFKNRIHAELLRRGERRPPELKTPFTKKDIERMRSLDIPTVTSSLDCLERIQAQIEVMNQQLLVEFKRRPDAQLIATVPGIGFYGALLIHAEIDDINRFPDPERLAAYAGLVPTVSQSASTVHYGGISKEGSAYLRWILIETVHIHRHIHPESRLSKFHSKLEKRRGKNRATTATARKLAHIIYWMLKTREPYHGQGFNPVTKPARTSA

SEQ ID NO: 41381 - protein, 429 aa, unidentified
MNKNEATPTEEYAALIGLDWASEKHDVWLWDVATGKSRHRVIEHTPEALADWLSELQSQYPGQRVAVCLEQSRGSLIYALMGHAFLDLYPVNPVTLAKYREAFAPSRAKDDPGDAKLLAEILRLHRDKLAVWKPADDQTRLLGFLNEERRKAVNLRTKLVLRLQAALKLYFPQAIQWAGTDLGAPMACDWLLKWPTLEALQRAKPQTIRAFYYAHNVRRPDLVEGLLATIASAKPLTQDAPVIGAHRLTVQMLAKQLRTLHSSIAGYDKQIAQLFKEHPDALLFESLPGAGAILAPRLLTAFGPDRTRHPDAKGMQTYCGVAPVIERSGKSRWTHWRWNCPKFLRQTFHEYAKSSIPYSAWARAFYDQQKQRGKGHNAAIRSLAFKWIRVIHRCWQTHTPYDEARYLQALELRGSPLCRLIAAPDREAS

SEQ ID NO: 41382 - protein, 365 aa, unidentified
MSKDIKKPAGETRRYVGIDLGDKKSRVCILDEGGQIVLQEWAVTTPEAFFKRFRGETKMDIAMEVGAHSRWASDLLSRCGHRVVVADPRQIGLITKNNAKSDKRDARTLAQLLRADARLLSPIEHRAEKLQMDLTVIRMRDNLIETRTRLVTSVRGVVKATGGRLPSSETSSFPQQVSDLIPEPLRPALAPVLEVIDRLNEATYEYDCLLEHWAGTRYEESSRLTQIKGVGTLTALMFLLTVGDKERFSRTRDIGAFLGLRPRLGQSGDNEPELRITKAGDGLLRKTLVECAQYMVGAFGQDSDLRRWGLKMIAAGNGSKRARQRAVVGVARRLAVLLMSLWKSGQSYDPLRHSRAQERSQEVAA

SEQ ID NO: 41383 - protein, 356 aa, unidentified
MTAAYDGQQIVGMDLHRRRSVLVRMTSEGERLGKARITNSPGALRAEIAKAGERPKVVVEATYGWYWAADTLQLAGAQVHLAHPLGVKAFSYRRVKNDERDAADLADLLRMGRLPEAWIAPKDVRDLRELTRYRAKLVSARTSAKDQVHAVLAKLGIPVTYSDLFGVGGSAWLDELALPQPYRGKVGSLRSLIEVYTDEITVLDKTIADLLTGHTGYAAILALPGIGPILAAVIVAEIGDITRFDRPQKLACWAGLTPRHRESDLKVARGHITKQGSKSLRWALIEAVQRQPATSPIRAVKDRLIARRGKEARNIAKTAAARELATLVFYGMRDGHIRALDNTSAPCAPATAAGAA

SEQ ID NO: 41384 - protein, 342 aa, unidentified
MTLYIGVDIHARQQTLSYLDTSDGTTGQVELSHERDDIKGYYSQFRGEVIIGIEACGYTNWFEELIEQLGHKLLVGDAAEIRRLARRRQKNDRRDADLILELLWHQEFPVLFRYPQESREVLRQLRYRHKLVKLRTMVVNTLHALAINAGLSLRAQLLTKGGRKQLAGLQLSAISQQQRDELVSLADELTRRIQTVEKWLQEQAQSDVRVQRLQTHPGVGLLTSLCLVHTLGDLSRFSSTRKVAAYVGFDPMEDSSAERKAYGGISKAGSRLLRYLLVEAGQTAAKHDQQLKQFYRRLLPRRGKARAKVAVARKLLLRCFLMGRAEMDYAEFLRRGKERETE

SEQ ID NO: 41385 - protein, 378 aa, unidentified
MKNDIRYVGLDVHAETIAVAVVEPDGEMRFLGTIPNRPEAVRRLVKRLGSTTQLKACYEAGPTGYVLYWQMIELGVQCAVVAPTLVPQKPGDRVKTDRRDAEKLAVLYRGGHLTPVWVPDQAHEALRDLVRAREAAKSDQLRARHRLQKFLLRHGRRPPQGIKAWTQKHLDWVRREVHFEAPAQEAVLVDHLAEVEHARERVRRLEGAIDTAVEAAPACLRGVIEALQGLRGIAKVSAATIVSEVGLLSRFRKPRQLMGYSGGVPREDSSGERVRRGSITKTGNAHLRRIVGEAAWSYRHRPTVRGELLKRQAGLSEEVKAISWKAQHRLYSRYRRLIGKGKAKQQVITAVARELLGFIWAIGVHVEQQHGTATRRAA

SEQ ID NO: 41386 - protein, 377 aa, unidentified
MNKITNKCIKEANIDSTSLSQKYDHYIALDWSKKNMAIARMTEHSAKAKVTDVPSDLKELKVYLKNLSGTKILAIEESTSTQWLYVELYDYVNKIFICDPYRNKLLSDGPKNDPIDARKLCLLLRNGLLKEVFHSTDKIFELRKYVSAYNDIVKSGVRLKNQHSAFLAREGKDKKCKEKSSSQTTGFIMNVLEESIEQYEKNRKQYWELFGKLCRKEQALKNLQTIPGVGNILAVQILAAVIDAKRFPKAGGYLAYCGLVKHMAVSGGRIYGKRNPRYNRTLKYAYKTAASISIQSSGPIREYYDYLLGKGIAENNARNAVARYIAKASIGILKHNQPFNPYLWRAKKKQIVLADAGSSGDQIKDNKKRKLKKMAIK

SEQ ID NO: 41387 - protein, 431 aa, unidentified
MSERDYNKQVAKRQRIRNTTLVVGVDVGKAYNAVGFMNKEGKVLGSCAKVCNSREGFEQFMKMVEDLKARYGLEDVLIGMEPTGHYWRKLAYFAKEHGYEVRFVRTTALKHHRELDESASAKSDQRDALTITNITREGKYIDTVIEDGPLRQLRTLAKARERLLRYSVSAKNSLHAALDDYFPELHELFWSMGSRSLWAILDRCPFPEDVRSIKVSTLKSLIIKSSRNRAGAVQKAEALYQAATKSIGLRQIGSADRYRVQMCLEEVKRTVLTLKGMDQQMKSMLKEIPAAPYLLSIPGIGALSAAVFLGELGDPTHFHNARQIVKYAGYDPQESDSGSWVSRKFISKKGRWLMRKYLFFMSMRVVVLTHYFKTYYERKLETKNRVGQLPRRKEILCAVAIKLIKVIFALLRDKRQFDDTRGTVMALSQVA

SEQ ID NO: 41388 - protein, 360 aa, unidentified
MLVPFSFQQKLEQFIRRQEPVFRIDKPMLISFIKEITMSKFTGIDISKQTFDCSITKEDGKVETKKFSNNLKGFEKLISLLPSDAQVVMEASGPYYLKLATHLYEQNIKVSVVNPLVVRRFCQMRMMRTKTDRKDASMIREYGLTELPSLWQPDEPSITKLKQLNAAIELMDKGITASNNQIEAFKEMPDTDSKLIKELEKNRAANIKAKEKLEAEMELIAISNYGASYKALQTIPGIGPKSSAIIIAITGNFKKFSNYKQLIAYVGLNPRVFESGTSVKGRGHICKMGTSRLRKLLYLCSWSAKKYNVYCKEMYQRLKAKSKPERVIKVAIACKLLRQAFAVGINQTSFRINYEPAIAN

SEQ ID NO: 41389 - protein, 334 aa, unidentified
MQNVTLIGLDLGKHSFHVHCQDRQGNALLRKKFSRTQLINFLGSCKAATVVMESCGGAHFMARRIADLGHEAKLISPQFVRPFVKSNKNDFVDAEAICEAASRPSMRFVPPRTEDQQAMAALHRVRDSLIRQRVKTTNQMHAFLLEFGVSLPRGIAVIRRLAAVLEENDFPPYLARVLSRLHSHYVYLSGEIEEVDKELKTHLAEDETAQRLLTIPGVGPVTASLLAMRLGDGKNYASSRDFAASTGLVPRQYSTGGKTTLMGISKRGDKNLRRLLVQCARVFMQRLEHNPGRLAEWVNRQLARHHSNVVACALANKLARIAWAVTAHQTVFIK

SEQ ID NO: 41390 - protein, 414 aa, unidentified
MEKEMINIYHKRNTCFVGIDMHKDAHCAVVIDCWMNKLGEINFENRSSRFPAFVEDVRKICGIKEIVFGLEDTRGFGRNLAAYLVGRKFEVKHVNPAYTSAVRLANPIIYKDDSYDAYCVARVLRDMVDTLQDAKHEDIFWTIRQMVKRRDLIVKSNVMNKNQLHSQLAYSYPSYRKFFAMVDSKSALCFWENYPSPEYIWNTTPEEIYQTIKPVHQALKMQRIHEIISMIERDGDTRKDYQPERDFIVRNIVKDIRHNKELIAEIDDELRKLIPLTGYKLHTMPGIDLVTEAQIISEIGDINRFPDSDKLARFMGLAPVQFNSAGKGKDQRCRNGNRALNAIFHFLAIQMVAVSASGKPRHPVFREYFEQKVKEGKNKPQALVCVARRLVRIIYGMMKTKTEYRPYEKADDKN

SEQ ID NO: 41391 - protein, 388 aa, unidentified
MSHLFDASRSLTALEQDNTIVAVIEMSEAKWLIAALVPGLKRQPLKKLEADAPALLKLLQRWRDEAGRAGHTIKRIVVAYEAGRDGFWLARWLRAHDTEVYVIHPSSVAVSREHRRAKTDRLDTESLMRAFLGWLRGEKRHCSMAAIPTLEEEDARRPNREREALVGEQTRLVNRIKATLTRFSIHAFKPTLRKAADKLDSIRTAEGTPLPDNTRAELYRFLERLCLVREQIRAIERERLRRLAAAPAATSGPHAMVRLIARIIGIGVETADMLVNEILSRGLRDRRAVARYAGLTGSPDESGSRRREKGLAKAGNARVRRGMIQLAWRFLLFQKDSALARWFRARTSDGRKTTRKTMVVALARKLLIALWRLVTAGEVPQGVVLRPA

SEQ ID NO: 41392 - protein, 367 aa, unidentified
MKKVSTVAAKPSKKISQQKLTVGLDLGDRNSWYCVLDESGQIQLEQRVRTTAKALQEVFGTMPRSRIALEIGTHSPWISRLLSELGHEVIVANARKVRLIGESRQKDDRLDAQTLARLARIDPKLLYPVKHRSAQAQADLMMIRARAGLVRARTGLVNTARGLAKSYGERLRGCNVRNMNPEKAESLSPELQAALEPLLNAIESLSERIVEYNERIEQLAQQSYPQVALLKQIKGVGTLIALTFLLTLEDPHRFRKSRDVGCYLGLQPGRRNSGRSEPQLHISKEGDPYLRTLLVQGAQHILGPFGIDCDLRRWGLKLAERGGRNGKKRAIVATARKLAVLLHHLWVSGEAYEPLHNSSRTTVAAAA

SEQ ID NO: 41393 - protein, 316 aa, unidentified
MNIIGIDVSKNELIGVRIDRAGKETENYKFRNNSDSINIFLHDVAQKHRHLVIACESTSYFHRNLALTCISQNIPFHLINPITTKQFVKVTVRDRKTDMSDALIIAKLALHGEGRYMQKEDFSFNKSISRTASKLSEMERSVGRMISRLNTVEDEEMYVVSDELKICRQTLEIGMKKLRKYLHKKTDKTLRKLLTSIPGVGPTTADILIAEIGNIDKFHSGKSLVAFSGIDPRVKQSGATLKRNTKITKQSSPHLRHILYFATVVAQMHYKEFKDHYAKKIAEGKTYTEATLSRARKLAYRIYAVWKRRTLYIIKS

SEQ ID NO: 41394 - protein, 410 aa, unidentified
MVEPILQCSAGLDVHKMSVVATVQCQGPNGELTEQTRSFTTFKRGRQELCRWLKDNAVELAVMESTGSYWKSIYASLEGRVRAAVVNAYHVRRVPGRKTDVTDSQWLASLARYGLLRASFIPPRDLRELRLISRQRTKLQGILAGEKNRLHKVLDDAGIRLGGVVSDINGISAQAIIDGLIQGQSLEQLAGYVQGRLRRKLPEVVESVDEPLGARHRFVLEQLRRHIRYLEQELGAMDEYLFAAMNPYQSQWELLQTLPGVDRIAAAHLIVELGVDMERFGAADALASWAGMCPGNNESAGKRHSGKTRKGNRALRRLLCEIANAARKTSSQFKGYYHALVIRRGHKRTIVALGHKLLRVIYAMLKHGVAYCDPQVDYDALQVHRNAPRWIRALKRYGYWPRPATRTATS

SEQ ID NO: 41395 - protein, 343 aa, unidentified
MDHFAGLDVSVKDTSVCIVDETGKIIREVKVASEPEALLQVLRSAAYHFKRIGLEAGPLSQWLFSALAEADLPVICVETRHMRAVLKAQINKTDRNDARGIAQMMRVGLYRPVHVKTLRSQKLRTLLTHRKLLQSKAIAVENDLRATLRNFGLKVGMVGTAKYETRIKELVENFPDLILLVEPLLVVRRVLREQIGVLHRRLLAVVRDDEVCRRLMTVPGVGPVVALTYRATIDVPARFRHSKSVGAVFGLTPSRDQSGETDRPGAISRCGDAMMRTTLYEAAQSMLVYSTRWSWLKAWAMKIARHRGAKKAIVALARRLAVIMHRIWVDGTEFRWTREAVAA

SEQ ID NO: 41396 - protein, 338 aa, unidentified
MALYGGIDLHSNNNMVVVQDEEDRVVAKRRLPNDLKTVLAFLEPYRKDLVGVVVESTYNWYWLVDGLMAAGYRVHLANTVAIQQYNGLKYRDDGSDAQWLAKLLRLGELPEGHIYPRTERAIRDLLRKRSQLVRQSTMNLLSIQNLYARSRGESISANRVKQLTAEAVDAAFEDPNVGLAVTSSVKVMDCLAEQISVLERAVHGQVRLRKGYKRLLSAPGIGKVLALTIMLETGDIGRFHEVGHYVSYARLVGSSHLTNGKRKGSGNTKNGNAFLCWAFIEAANFAIRHNEAIRSYYQRKLARTKRIVALKAVAHKLARAGYHMIKEDAAFDLTRAFG

SEQ ID NO: 41397 - protein, 314 aa, unidentified
MGKMTIDRSVLGIDVSGKRLDAHAHPDGRVRGFANDAQGIARLLAWAVELGAFVVLEATAPWDQPLLRALEASGLGFHRANPGRARDFARSLGLLAKTDKVDARMLALYGSSVPLEPTAPVAPERLALQGLTARRDQLVEMRKAERTRAKAELDPFLAESLRAVIALLDEHIRQVERRIEVLLEKPLLERDHAILRSAPGVGPVAASILLANLPELGQVDRRQIAALAGLAPIARDSGLFRGRRHVQGGRKRVRDALYMAALSAIRTAPWKAVFDAMTAAGKPAKLVIVAVARKLLVALNAAIRQQRPFQALAA

SEQ ID NO: 41398 - protein, 392 aa, unidentified
MKFVGIDIASETHTVAVVDEKSKVLVKPKPFAEDAAGYAKLLELIGPPAETLVAMEATGHYWKNLFAFLVANGFAVALLNPLRTHRFAGEDLQRTKTDSIDALGIARFAAQKRPVASRLPDTVTEELRELVRFRDRLKQDFDDRVRQLHRLVDLGFPEFTRYVKSLDSELAAAILKDFPTAEAFIGIRPRSLSNLKYDGRHFVGLELATKLIEAAKVSVGRHHGHAYRVQVRCYCEDLDVLRRRLRELDRDIETKLDQHAIGKLLTTIDVIGTNTAARLIAAVGNPADFRDERALAAYVGAIPGLKHSGLSKPLRGGLTPIGNRDLRAKLYMPTLTAVKRNPWLRAFYERLIAKGKLPKVAMLAAMRKLIAAIYSVAKNRKPFVPQLQEAYP

SEQ ID NO: 41399 - protein, 368 aa, unidentified
MLIIGCDYHPGFQQIAYVDTETGEFQERRLQHPEEAEKFYRALWEPSVKVRVGMEASGHARWFERLLEELSFELWTGDAAKIRAKRVGKKKTDREDARHILELLVENRFPKIWVPTWQNRDLRQLLWHRHRMVQRRTRIMNQLQAVAINEGVRYKKRLWREAGRQQLESLSLAPWASRRREDLLEVLDRINPTIAELTQAIENEAEKCCEARRLMTHPGVGALTAVAFVLIIGEAHRFGCGKQIAAYLGLVPEEDSSGERRRLGHISKQGNSLLRFLLVEAAQATARCDQRWRNQFFHLAQRRGRKIAKVAMARRLAVRLYCDVAARMELRATTKFRFARRTARKSSWCAVNHRRNDWASCSSSEGGV

SEQ ID NO: 41400 - protein, 351 aa, unidentified
MIIIGVDYHPSVQQIAYVDTETGETCERRLNHSDGEAEHFYRALERRQVSVRVGIEATGHARWFERLLAELKFELWIGNAAEIKAARVRKQKTDRQDALLLLKLLVEDRFPRLWVPSPENRDLRQLIWHRHRLVQMRTRAMNQIQATAMNEGVRRKKALWSKSGRQQLESLLLAPWATRRRQDLLELVDRLNGTIAELTTAIEQEAHKRPEVLRLMTHPGVGPITALAFVLVIGSPDRFACGKQIGSYLGLIPCEDSSANRQRLGHITKQGSSLVRFLLAESAQAAVRWDSDWRRRYAHLSMRRDRRIAKVAMARRLAISLYWMWRKGYDYQQSLKFGSHAGEPGYRHGVK

SEQ ID NO: 41401 - protein, 394 aa, unidentified
MFYLGIDIGKRTHVASIMNAEGKVVLKGFSFANSLDGAHALLERLTSFSDSTNDFLIGMEATGHYWLALFSFFDEQRFLVHVINPIQTDGWRKGIEIRKRKNDRIDSVLIADLIRYGSFNETALADETMFSLRQLTRYRSYLVGTAGDFKRKIIAVLDQVFPEYEQVFSKVGIFGKASKAVLSEFSSPDEFNQVSAETLAETLRLASRSRVGLSKAEALKTAAAHSFGVRFAQDAFVFQLRSMIDQLSFLEEQIKRTEEEIAQLMASLHSVIETIPGIGPVLGATILGEIGDIQKFSNPKKLVAYAGIDASVTKSGEYEATHNVMSKRGSPYLRKALFQAALIASRCDPVFKAFYDKKRAEGKHHLTAIGAVSRKLCYVIHAILTNNEPYEIRQ

SEQ ID NO: 41402 - protein, 392 aa, unidentified
MSQHFRFDASRSLTALEQDSTIIAVIEMSQTKWLVAALVPGVERQPLKKFDAQEEMLLKFLHRWRREAGQAGRNIKRIVVAFEAGRDGFWLARWLRARDIEVYVIHPTSIAVSREHRRAKTDRLDTELLMRVFLGWLRGEKRHCSMVAIPTIEEEDARRPNRERQNLVIEQTRIINQIKAMFTRFGLRTLRPTMRKLAEGLEDLRTAEGAPLPQNTLSELRRHLARLRFVRDQIRAVEQERLRKLAVAAPAEKNSPDAMVRLIARVFGVGIETADMLVNEIFSRHWRDRKAVARYAGLTGSPDESGSRRRERGLARAGNVRVRSGMIQLAWRFVRFQKNSALAQWFAARTADGRASTRKTMIVALARKLLIALWRLVTRGEVPQGVVLRPAS

SEQ ID NO: 41403 - protein, 387 aa, unidentified
MPASGPRPGQVAVQVSLAAIFVSLELSRSTWLITSLIPGGADKMSKHSVRSGDITELMTHLAKLRDKAQARAEVSFSIIAIQEAGLDGFWVHRVLERAGIESHVVDAASILTSRRWRRAKTDRIDGEALLRTLLAYKRGEPRVCAMVWVPSPEEEDRRRLCRERRTLVAERVAHVNRIKGLLFAQGIADYEPLHGNRRQRLEALRTGDGRPLPLYLKAQIGRELDRLELLLEQLKTVEAERNALLEPTNDVAPVAVKALAGLRGIGPEFTAMLWSECLFRSFRNRRQIAAYAGLAPTPWQSGSVRHEQGVSKSGNPRLRSTMIQLAWLWLRHQPTSELSLWFRERVKRHGGRGKKTAIVALARKLLVALWKFSSSGVVIEGATMKAA

SEQ ID NO: 41404 - protein, 392 aa, unidentified
MNRIVYIGMDVHTSNYTLCSLDPGYGVEKDNYFAEVQFTNNFVTNVVNYVSNLKKKLKDCEFVCGYEAGCLGYSTYKDLTKVGIKCVIMAPSTMAVQKGGKKVKNDRRDARVIAQCLAYQTYKEVYVLSEHDEAVRGYLRMRDSHNKALKRIKQQIIAFCTGHGLFSPTKSNWTVAHLKWLKDLKFNDPVEQEILNEYLSSLTFLSDKIKAMDVRIEELASEKQYCENVKKLRCIKGIETNVALTLLAEIGDFNRFSKPTDFASYLGLIPGEQSSGDKVRGTGITKAGNSTLRRKLTESAKGYWRGRIGIKSATFKKLEKELPKEVTEYALKANTRLQRKFFNMTHVKGKNMNVAASACAREMACFVWGLITNHYEKAPAVPKTDEELLDLN

SEQ ID NO: 41405 - protein, 343 aa, unidentified
MTNYVGLDVSQKLTTICIVDDTGRRLWRGQCTTDPEQIERAVRRNAGEDVRIGIETGPMTPWLVHELRGHGLDVTCLDARHARAALKMQINKTDQNDAEGLAQIMRTGWYRSVHVKSFDSHRARALLGARVQLVGMTTRLSNHIRGVLKTFGLLPGPMRGVPFDRRVEALLADRDDVAPIIRPMLAAWRQLRQQIATFDKAVRTLVKSSPACRHLMGVPGIGVLSVLAYVSMIEDPARFGRSRSVGAHLGLTPKQYQSGEMDRSGRISKCGDTLARTLMYEAAVVLMTRVKRASGLKEWAQAVARRSGAGKARVALARKLSVIMHSIWRSGEPFRWSEKPVAA

SEQ ID NO: 41406 - protein, 482 aa, unidentified
MKAKPQEKNKRATNHPTQHHWHEMNRKQRRETMRKIQSEDLSLEVIHPDAAGIDIGNESHYAAVPPSRDSQPVRCFGCTTAELKAMAAWLQQCRIRTVAMQSTGVYWVGVYDILEQAGLEVYLVNARDTKNLPGHKSDVQESQWLMKLHTYGLLRNSFRPSQKIRTMRTYWRQRNDLVQSASRHILRVQKALTQMNVQLANVLSDISGVTGQAIIKAILAGERNPHKLAEFRDPRVQASEEEIAHYLEGNWQPDLLFVLKQEQDGYEFCQQQMAECDRQLEQYLQSTEDRSHGAPLPEEKRKGRLKKKKGNKPQFDLREGLFRMSGTDLTRIDGIDVMTATTVISEAGYDMSKWKTENHFVSWLRLCPDNRISGGKVIGKGRLPTNNPVSIALKMAATTLRQSKTYLGAQFRRLRTRLGAPIAIKAMAAKLARLVYRVLRYGMKYVDQGAAFYELKHRERQVHQLKWKAAQLGYKVTLLPAA

SEQ ID NO: 41407 - protein, 465 aa, unidentified
MTGGKRLWRNRKERKEWARRLQSEDPGLEVVHPNAAGIDVGNSAHYVAVRPDRNPEPVRRFECFTADLHGMADWLQSCGVKSVAMQSTGVYWIPLYEILEERGFEVHLVNARHTKNLPGRKSDVQESQWLLKLHTYGLLSNSFQPVSEIRGLRTYWRQRGEHVRGAATCIQRMQKALTQMNVQLANVISDISGLTGQAILRAIVAGERDPRKLAALSHPRIHASPEEIAKSLEGNWRPELLFVLQQEVDMYDTYQKRIAECDQQLQKQLAGLTGVTPPGKEPTQKPKAKPAAAKNAPRFDLSSELQRVTGVDLTRIDGIDVMTAQTLLSEVGLDMSRWKTESHFASWLGLCPDNRISGDKVLARGTRRVVNRAATALRQAANTLIRSRSYLGAQYRRLRTKLGAPKAITAMAHRLARLVYRMLKYGQAYVDKGTEYYEERFRQQQIQLLRKRAAKLGLQVAEIQA

SEQ ID NO: 41408 - protein, 339 aa, unidentified
MRLLGGILTKDDRKENQMLTWIGIDISCKQFDAAWYTETGRKHIKLDNNDEGFVKLLEEVPEEVAFVMEATGSYSINLALFLHEHGKHVSVVNPLRTHSFGKAEMSRNKSDKSDAYSIARFGQEKSPKAWVPVTKEMVEIQQLRAFADKLKQQITQLSNQRHAFSQSKLQSADALSLIDIAIKFHGRILGEAMKDLEAAVGRSFQRQIELITSIPGIGKETATRLVALIGDFSRFRTSRQLVSFLGISPTLKQSGTSVHSKGRISRLGNPQIRKVLYFCAISASSCNAQCKSMWDRMNESKRPGKLILMAIANKLIRQIHAVVCSGKAYNPNFANFSLA

SEQ ID NO: 41409 - protein, 343 aa, unidentified
MKTITTIGFDIAKSVFQVHGVDAAGEVVIRRQLKRRYVLAFFQKLPSCLVGIEACASSHYWSRELQALGHTVRLMPPAYVKPYVKRHKNDMADAEAICEAVTRANMRFVPTKTPEQQSCLMLHRTRHLFIRQQTAVINSIRAHLAEFGIVAPVGRKGVTELLHVVADPSDKRVPEVARACLAALGAQLLSLKQQILEFDRMIMTWHRSNQTSKRLHYIPGVGPILATALVASVADPRTFRSGRNFSAWIGLVPKQHSSGGKDRLGSISKQGDRYLRSLFVAGALAVIRYAKIHGTKHRPWLTALLGRRPTKVAAIALANKIARMAWAMMARGERYKQPVALAA

SEQ ID NO: 41410 - protein, 345 aa, unidentified
MQTTQVAVDLAKSVFQVAVSHAPGRVDKQHRLSRQRFRNFFLHHPPTHVLMEACGSAHHWGRELQALGHQVSLLPPSHVARYRQGNKTDRADAKALLEAARNEDITPVPVKTLDQQAINALHRLRSGYLGTRTARINAVRGLLREFGIPVPLGARTFLAKAHLALDDDTLPAYLRAALTQALTEIKELQAKADDLKSQLEHLAPLIPGVPFLMTVPGIGILSATALVASVGDVHRFPSGRSFAAYLGLTPRESSSGGSRRLGPISKRGNRYLRVLLIHGARAALLAAHRTQEPDTLQAWALHTAEARGHNIATVALANRMARIAWRVWRDQRPFQRRFTAQEDAA

SEQ ID NO: 41411 - protein, 325 aa, unidentified
MIISNQAKKIKSDTIIGVDISQDKFDIAITSKEGPVHTFANDPKGHQNFIKLIKPLKPKLILMEATGKCETRLALALQKAKLPFRIENPAKMRSFSRSMGMIEKTDKIDARMIALAGERLDISAKSSKLNHLIIKLKEHVRTRFTLIEELIRLENIMDRMLDADLKMELLKLHARISESKEIVEKKIKKIIDSNEEFSSRYKLLTSVPGIGFVTAVTIIAECEELGETGRGQLAKLAGLAPLANDSGKMQGRRHIRGGRKNLRNALYMAMLATVKYNPKIKAFYERLKSKGKPPKVAMVACARKMLGLLNAMIKHKKEWNEFAVC

SEQ ID NO: 41412 - protein, 407 aa, unidentified
MEVLYPRCAGVDVHAGSVTACVRIASGADVTYQHRTVAATTQGLLELADWFAANGCTHVAMEATGVYWKPVWHVLEESFTLVLANAMHIRNVPGRKSDTNDATWLADLLAHGLIRGSFVPPAPIQDLRDLTRTRKQLVGEIGRHTLRIQKTLEDANLKLTQVVSDILGASGRVILRALIAGETDPARLADLTTGRLKASRAQLIAALQGRVTAHHRFLIELHLSQIEALDAAVRKLEGHLGDALAPFRAAAERLTTIPGVSDTTARVLIAEIGVDMTRFPSAGHLVSWAGLCPRLDESAGKRRSTRIRHATPWLKTTLIQAAWAATRKKGSYLQAQFLRVKNRRGPKKAIVAVAASMLTAAYFMLRDGVEYHDLGGRYFADRDKRQLTKSLLRRLRDLGVVVEVKAA

SEQ ID NO: 41413 - protein, 387 aa, unidentified
MYFVGIDISKFKHDCAIIDELCDTVMPSWSFSNDREGFSHFKALLDSLEGEKKIGLESTGHYGQNLKQFLEANGFAFMEFNPLLVSRFVRSKSLRNTKTDSIDALSIAQYVMTVEYKPYPSSFYHLDKLKSLTRFRNSLVRQRSKQLVELTNVLDKLFPEFKPFFKDKFSVTALYILAHYQTPERIANMNARSYEALRKLSRGRFTLSNFTQLKALAKNTVGTQSDYLLDQMNILLELYSQLDSKVDELDAQIKECVRGIDPPCLSIPGVGELSAAMILSEFGDFSKFQNPSKMLAFAGLEPGYFQSGQSEYTGHMVKHGSSRLRYALMNCCLPLISNEPVFAAYYTKKRSEGKPHRVALTHVAKKLLRVIYTLQTKNIRYDPTMIH

SEQ ID NO: 41414 - protein, 410 aa, unidentified
MEAIVECCAGLDVHQATVVACLNRGPPTKRSHKEVRTFGTTRHELGKMRDWLLASDCTLVAMESTGIYWRPVYGELEHHFDLTVGNAQHIKNVPGRKTDVKDCEWISDLARHGLIAKSFVPPRPIRDLRDLTRYRRKLSQNQAAERNRLIRMLESANVKLSGLVSDVFGVSGRAMLLALIEGKESPAEMAQHARGRMRRKRGALELALDGRLDGHHRFVLRMQFERIETMEALIERLDERLSEKLAPYDEPLGRLMQIPGVDWVIAATIIAEIGVDMSAFVNADHLASWTGICPGNHESAGKQRSGKIRKGNVHLKTALVTAAMGAARTRGCYLGEKHRRMRARRGEMRAHVAIAHRILVTTYHMLATGSDYQDLRSTYLDRIDQRRTANQLTRRLRNLGYDVEITLKAA

SEQ ID NO: 41415 - protein, 351 aa, unidentified
MQMLAIDLAKQSFHVHGINADGEVISRRVGRQGLLVLVGKFDPEIVAMEACATAHYWGRLFLAEGREIRLINPHFVKPFVRGSKNDAVDAEAIFDAASRPTMRFVPVKTEDQQDLQSLHRVRDRLVAQRTSLSNHLRGLFGEYGLVFPKGAALLLSRVRVGLGKARLSAMAHETFEGLLEELEMVEGRIERVDKRLGDICRDNETCRRLMTLLGVGPIVATALVASIGDPHQFRTGREMAAWIGLVPRQYSTGGKFRLGGVGRRANHYLRRQLVHGARAVALRLSGKGNCYDNSAVETFFKSLKAEMIWRQSWPTRRQAEAAIFQNGFYNSRRRHSYLGGISPLAFEAKVA

SEQ ID NO: 41416 - protein, 391 aa, unidentified
MELAERVVIGMDPHKRSVTIEVMTGKEEVLDARRFGTDVDGFKAMAEFVKQWPDRVWAIEGCNGIGRHVAMRLLADGEEVVDVPPRLSARARVFSTGQGRKTDATDAHSVALVGTRVAGLRAVVADDQLTVIRMLADRRRSLGEEHTRKISQVHALLLELLPGGAKRDLSAAQAKALLAKVRPRDQVGKTRRRLAAELVADLEQIHARKKAADKELRELVDATGTGLLDLHGIGPSGAARLLAEVGDITRFPDRNHFASWNGTAPIDASSGDIVRQRLSRKGNRQINRVLHIMATVQLRNATDGRAYYDRKKATGKSSNEAMRCLKRRLSDSVYRTMLDDAVKAQVTGSGGHRGNDSDSSAAGSQPHTNSSDKPHRSPSSTQPKPALPAAS

SEQ ID NO: 41417 - protein, 389 aa, unidentified
MKIYVGIDIAKLNHFAAAISSDGEIIIEPFKFTNDADGFQLLVSKLESFDKNSLIIGLESTAHYGDNLVRYLVTELYQVCVLNPIKTCQMRKNNVRKTKTDKVDTFVIAKTLMMQDNLRFVSFFDLDMMDLKALGRFRQKTIKQRTRLKIQLTTYVDQVFPEIQYFFKSGLHQNAVYALLKEAPSPKEIASMHMTHLANLLKVNSHGHFTKEQAKELRVLAQKSVGANDSAISIQITQTIQQIELLDSQLEKIEAEMTDIMKFNDSVIMTIPGIGYINGGMILGEIGDIHRFSNPNKLLAFAGLDPSVYQSGNFQAKTTRMSKRGSRVLRYALVNAAWNVVRNNATFKAYYDAKRAEGRSHYNALGHCSGKLVRVIWKMLTDNVEFNLK

SEQ ID NO: 41418 - protein, 338 aa, unidentified
MLHSGIDLHKRTIALSTVTADGQPVRDAELPTTRAAVRAYFDALPGPHRAVVESTSNWYWLRDLLAGAGVDLRLGHSKYIKAISYAKVKTDAVDAATLAQLLRSDLVPEAHMVSAEWREARDLLRARLQLVSQQVRCKNTVAGLLAQYNVTAPAALPPLVQLRTAMLAEQCALLGAQAKRLAATLNPGLIPTPDVQRLLWIPGIGRVVAFTIWLEVDGIQRFPSARDFVSYCRLVPGAGDSGGRTRHKRTKDGNRYLKLAFSHAAVRAIQYYPEIQRFYRALARRKPPAVARAVVAKELARIAYFVLSKQEAFNGAFKGKPLSRTKQPKWPRLASPPV

SEQ ID NO: 41419 - protein, 429 aa, unidentified
MNDVGTTRLENFRQLRKEIRGSNEHLIVGIDVAKDNHHAFFGTARGKTLLKRLVFNNNLQGYEKLYTYVEAAKVKNNLNKVVFGLEPTANYHKPLGEHLIKCGFDVVLVAGTAVKRNRELLDGRWDKHDTKDAANVADLVSQGKCLFYEYPIMLLRELRNLLSFKRRLKKQEHGTRVRIRNHLLAQYFPELDPYFARMPASSLSVVKWCLGPSLIAGLEYEEFLRLVAPGKRTIKQREHVKLIWEKAFESIGCSVGETVQFEAKMMVEELQHVRESISEVEEKIEEICLNFPEYKYLLSMPGFGKDISSKVLGAIGDPFRFDNAKQVIKLSGWDLNANRSGKSSGYATAVISKKGKADLRYALYQAALVASSRNQLFVAYFTEKLRQRSREKGIKTKMRVKLAAKLLVIAWTLMKKREPFNPEYLKVTL

SEQ ID NO: 41420 - protein, 520 aa, unidentified
MISAESDVRRHCFSSFQPALAVTAFLAFSLAHMAHSANTEFSSPAVAPARKAGRVHAHCARLRSPYAAQDKPFTSGSTNPDRKGCDILLKINYMSTLFVGIDVSSKTNAVYAMDFEENKYISSSFGNNQPGADQLVTMIAQCMHKHKNLDTVLIVLESTSVYSVHISNFLSTSEVLMPYKPYVFCVNPKATSNYRKSYIGMEKTDPIDAFLIADFARVGRTKKLEPWRGGQFIALKRLTRHRMHLSECITREKTYMVSNLYLKFSELQLLEGDNKPFSNIYGATSSAILTEFLSPQEIIDLSEEELLSFLAEKSRNRISDISRTSELLRKAARDSYRLDQCMYEPLNISLASSFNCIQAYQKEIKLIEQAIEKCINGMNPNAFLILKSIPGIGPVWASGMLSEIGDITAFHSSDALAKYAGLYWLKNDSGDFISEDNQVSKVGNPYLRYYLGEAANSVRKHVPEYTEYYAKKYAEVTKHQHKRALALTSRKLVRLVFGLLVKNQLYTGEKLDTQSNINKN

SEQ ID NO: 41421 - protein, 391 aa, unidentified
MIYVGIDVAKEKHDCFIISDEGEVIYEPFVIENNRHGFDTLYQRITINNTDLKEIKIGLESTGHYGFNLITFLVKKGLKTYVINPLHTTLFRKSMSLRNTKTDPIDTRSIAALLMSGVNLREYKLKSIETEELKSLSRYRYEKVRERSKLKVSVARLVNILFPELEKVISIQNKSIYRLLINYPSAKHIAETELEKIENLLLKASRGHYKKEISRNIHNKAKESIGTAITAKSLELKHTLKLILEYDKEIKEIEKEIKKIMDGINSPILSIPGISYTIAAMILGEIGDFERFSSPDKILAYAGISPTIYQSGNIKIGTYSHMEKRGSKYLRYALFNGARFVCSWDDTFKAYKKKKMAEGKHYKVAISHASKKLVRVMYHLEKTGELYKKQE

SEQ ID NO: 41422 - protein, 400 aa, unidentified
MRVVFGIDVSKVSSEVAILVNGEKVHNYTMSNDAIGFSRLLGDLKTVHKPEIIFEATGVYSRRLQTFLEDNGYAYTRLNPLEAKKQLDSLRVRKTDQIDAEKLAQSQFVLNRKTTYVQEEVYQNLRDLSRFYQNLTEDIVRAKNRLHKALQVTFPELENILSTPTGEQYWNLVIAFPCKDFVLELSKDKLSESIRQSTSKRISDKRVAYLAEKLIALANQSYCAVKKTSPILEEVRYYAKELLRLSEQRQAVLDEMVELAQPLPEYDILLSIPGIAETTATSIIGELGDIRRFQSANQINAFIGIDLRHYESGNFLAKEHITKRGNPYARKILFKCIHNIASASHTNPCHIADFYKKRKRQSQTTSTKPHTIASIHRLIRTMYYLIMHNKLYDYASTQNR

SEQ ID NO: 41423 - protein, 318 aa, unidentified
MMANPSVKIHTALGLDVSQDSVTLYDSLTRQTLTIDNRRDALLEALTPFTDRELAICEATGGHEDVLLAALHALGIPAHRADAAKVKAFIRSYGKRAKTDPIDARWLAQYGLDRAEKLSRWQPPEACQRQIEALVARRLDLVAMRRQEQCRLKAPRALLADDIAGHIAELDARIRAIETEIQHLIAQHQQLALRDVALRSVPGISHVLAPLLIATMPELGSINRHKAASLAGCAPHPKDSGKTNAYRQCSGGRRQLRPPLFIAALAAARGKNPLADFYRNLLKAGKPKRLALAAVMRKIITIANARIRDALHQHPQLN

SEQ ID NO: 41424 - protein, 408 aa, unidentified
MRIIGLDIHRAFAEAVALEDGVCRRLGRIAMTRDQLEAFAESLQPTDHVVVECTGNATAVLDILAPKIARVAVANPLQVHLIARAKTKTDKIDARVLAKLYAAGFLPEVWIADAPTQARRRQVTRRKQLVKSRARLKAIVQSILHAHLAPRCPHADLFGGKGRAWLRAQVLPADEHVAIERHLEEYDRQTAAQKAVERDIAGIALDDANVRRLMTIPGIDMVVAVGMMAAIGRIDRFAAPEKLVAYLGLNPSVRQSGDGRAHHGRITKRGSSQARHLLVEAAWQAMRSPGPMRAFYERVRARRGAHVAAVAVARKLAVLIWHMLTKGEDYAWGRPLLMARKLRNLELAAGHAAKPGTRGAAYEYGITERRQADRAQAEQAERAYRRITEHWRRQNRKGGAGAASEVRH

SEQ ID NO: 41425 - protein, 440 aa, unidentified
MIILAIDLGKFNSVCCFYNPKTRKAKFLTTPTKLEHITSIFEDCGADVVVMEACGPSGWINDLAQLHGLKTLVCSTNEEAWRWANVKRKTDKDDALKLARMTAMGELKGVHMPSPQHREFRSLVKYRKTLDGRINKVKCAIRAWFVNHGIEIDKAWHTGREHINSFRKPIQDCTATELWKGQLDIELTILDSLSLQLSSIVKRLEQLGKIDARIKRLRTIPGVGPRTAEILVACIDDPHRFENGRQVSAYFGLVPRQYQSGETDRNGRITKRGNPLARTILVECAWAALRYNPWAKEIYERICGKQKTRKKKAAIALARKIAVIAWAMLRDEKGWEPKRMIEVTESYGSMPAKLKESLQSMKPKENSDQRKARLRREARQAKAASKSPTSKTSTNKDHREPSSTTANRSTKPKAANRKPKQSTTQTQPKPRRAGKLVPRT

SEQ ID NO: 41426 - protein, 331 aa, unidentified
MQGREHFTEGILMHSTNVFVGIDVSKRTLDIAACVDNQPTGSWSVSNDQDSINQLVKQLAKLHPAAVVLEATGSLESALVAALAAASLSVAVVNPRQVRDFAKAVGKLAKTDRIDAQVLARFAEAVKPPCRPFPDDATQQLRQLLTRRRQLVEMLTAERNRLSRADLAIQPRIQDHIRWLKIALDDLDQDLGHRIRSSPVWREKDQLLRTVPGVGPVVSNTLLGELPELGSLNRKEIASLVGVAPRNRDSGNFRGRRTTWGGRSQVRCALYMATLVATTHNPTIRAFYAHLLKQGKAKKVALTACMRKLLTILNAMIKKHTPWKQPLPATS

SEQ ID NO: 41427 - protein, 425 aa, unidentified
MRFIGLDVHRDFCEVAIAESGQVRLAGRVQTEPEELALFAQSLAADDQVALEATGNALAIARVIEPHVGRVVLANPKAVKGITQTGAKTDKIDARTLAKLLAGGFLPEVWLPDEQTRILRRRVSHRAQLVRHRTRAKNQVHATLIRNLKGKPPVADLFGVRGRRWLGEQVLAADEQETIAACLRQIEFLDAEIALVERALAQQVLVSAEMRRLLTLPGVNFVTAAALIAAIGDVTRFATSRHLVSYLGLDPRVRQSGIEPARHGRISKQGPGETRHVLVEAAWHAARTPGPLRAFHERVAARRGGNVATVAVARKLAVIAWHMLSRGEDYAFARPSLTREKIRKLELATGAERRNGKRNPVRVFASREQHRLDQELAAQAELAYRRLVQDWQPAIKGTGAAPGRASRGPSSGQAARQETAPPPAL

SEQ ID NO: 41428 - protein, 376 aa, unidentified
MENDSTLYVGLDVHKDSITVAYAIGMGDVELLGKTGTTQIEVDRLCKRLQAKSMRIYVVYEAGPCGYGLYRRLVEKGFDCMVCAPSLIPRKPGDRVKTDRRDAIKLVRSLRAGDLSAVHVPTVEDEAFRDLARAWSSAREDLKQARCRLKSFLLSHGVHYLGRPDWGPTHRRWLSTFSFDSGWQQLAFNEHRRTIEDRLAQCERLETALREAVVSWRFYPAVLALQAMRGIQFTSAVGLTSELGDLTRFEHPRQLMAWLGVTPSEHSSGGKRRQGSITKTGNSYARKLLVESAWSYRHPARVSVDIQRRHEGIPKPIIDRAWDAQLRLCRRYRKLVARGKSAHVAIIAVARELAAFVWDIGRMGMASAQSYSGQPI

SEQ ID NO: 41429 - protein, 378 aa, unidentified
MQKVRFVGLDVHKESIAIAVADSDGSAPETVATIPNETKLLIKRLKALGQLASLRCCYEAGPTGFVLHRSLREAGIDCIVIAPSLVPKRPGDRVKTDRRDAVKLARFLRSGDLTEVHVPEASTEAMRDLERSRDDAKRAERTSRHQLSKFLLRHGRRYEGKTSWRGMHLDWARGQTFAHEALNRVLIDYVQAVENATARVDRLTQDIAELVETWSRRPLVKALQALRGVQLVTAVILAAELGDFERFPSAPALMAYLGLVPSEHSSGETRKRGRIHPHRQPPRAARARRVRLGLPIPTDHELGDPQAQRGRRARGPGHRMESATPLERQVHEASGSRQKQAANDHCPRARARGLRLEHRASTAPARGLASRPRSTLGR

SEQ ID NO: 41430 - protein, 333 aa, unidentified
MHYVGIDVSKRSLDVCLLAEGSKGSRKTKTLSNGQDSAQNLAKWLILQKCELSQTHVIMEATGIYHEYLACGLHQMGILTSVINPCRSREFAKAMGIFTKTDAVDAYVLAFYGCLKQPEAWTPPEEEVRKLRALLQHRDSLLNDKLRIDNRLNTLKSTEAVQEVMDSLSLVNQYLKSEVARIERLISSHIAQHPGLKRDLKLLMSIDGIGKQIGWNMLAVLRGNNFKSAEQLAAYLGVVPVERRSGTSVHGRARLSKIGSSNIRAKLYMGALTAISKNSHIKALYERLLAKGKMKMSALGAAMRKLVHLCYGVLHTQQPYDEKYKAKIINFSS

SEQ ID NO: 41431 - protein, 382 aa, unidentified
MDVLHACCAGLDVHKRTVVACVRRVDPAGKVSRNIKTFATMTGDLLNLSDWLAAQGVAVVAMESTGSYWKPVFNILESRFPVVLVNAHHIKQVPGRKTDVKDSEWIAQLLQHGLLRASFIPPRPTRELRDLTRQRTRLVQEKTSVGNRIQKVLEDANIKLGSVASEVLGVSGRDMIGAIIRGELDPVKLADLARRRLRSKIPQLQLALRGSVTEHHRFLLKTQMDHLDHLERLIRRYDERIEEALGPFSAQVGRLITIPGIDLRVAEIVLAEIGLEMDRFPTAGHLSSWAGLACGNNESAGKRRSGRTSPGNRWLKTALVQSAWAAYRAKGTHLSRKFRRIAGGRGKKRAALAVAHTLLVIIYHLLKEGTNYREIVEGVEAA

SEQ ID NO: 41432 - protein, 416 aa, unidentified
MNAVGIDVSSRKSTVAVLRPLGEVVCLPFDVTHDIAGLASLAEKLKALDGETRVVMEHTGRYYEAVEKALHEAGLFVCAVNPLLIKEYGANSLRRVKTDKADAVKIARYALDNWADLRDFTPMDAIRYDLKTLNRQFQLASKQRTASANNLIALLEQSFPGIRKCFDSPVRSDGTQKWVDFAHSFWHVDCVRKQPFAAFCERYRKWCKRHAYLFKLSNAEEVYALAKRAVVLTPKSKVVKVLVQEAANQLSSISRSVEVYRAEMDRLAAMLPEYPVVMAMYGVGKSYGPQLMAEIGDVRRFERKQALVAFAGIDPMPNQSGDKNVRSNKSSKRGSPYLRKTLFNVIRTYLQCAPQDEPVFQFLNRKRAEGKPFYVYMLAAANKFLRRYYAKLRDYFASLDTLQPVAPIPTILKATL

SEQ ID NO: 41433 - protein, 345 aa, unidentified
MNYFAGLDVSLKRTAICIVDGDGNIVREGVTDTEPEALISWLRDTRFALQRVGLEAGQCSSWLHKGLSEGGLPVICVETRHAKSVMQAQTVKTDRNDARALAQMMRTGWFKAVHIKSEDSQKLRALMGSRRCLLDKQRDLNNHIRAALRTFGFKVGLIGQSRFEERVRELIVADGDLQALVVPLLEARRMLGEQARVLTRLIGRLVRSDATCRRFMTVPGVGPLTALAFKTTIDNPGRFRKSRHVGVHLGLTPGKYASGEVDYNGRITRCGDAFAREHLFEAAHSLMVNTRRWCSLKAWGIRIAKRSSMKNALVAVARKISIILHRMWCDGSDFRWERSEATAAA

SEQ ID NO: 41434 - protein, 343 aa, unidentified
MEYYVGLDVSLKQTSICVVDQSGSVVREGVVDSDPEAISVYVGSKAPGAVRIGLETGPTSTWLWTELKRFGLPVICIDARHAKAVLKMQINKSDRNDAIGIARIMQTGWFKEVHVKDVDSHSVRALLASRALLVKIKRDLENHVRGLLKNLGLVIGRAKFNVFAVRAEELIEGRRDLIAAIRPLLEARNAVEQQVSELDRKVMRLARHDVQIRRFMTVPGVGPITALAFKATIDDPARFARSRSVGAYVGLTCRRHASGEVDWSGRISKCGDAMLRSYLFEAAGVLLTRVPKWSAVKAWGVKLVKRNGLRKAKVAVARKLAVILHRMWIDGTEFNWSRKEIAA

SEQ ID NO: 41435 - protein, 317 aa, unidentified
MSNPDSFVGIDVAKAWLDVAWLDGRTLRIDHTPEAVTGLLEQLRSQSPALVVMEATGGLETALASALAAAGVPVAVVNPRQVRDYAKACGRLAKTDRIDALVLAAFAAAIRPQVRALPDEHTRALGDLLARRRQLVEMRVQEKLRLQQASALQRESLREHIAWLDERIARLDIDLTHALRSSPAWRDKDNLLQAIPGVGSLTRATMLALLPELGSLNRRQIAALVGVAPFNRDSGKHHGGRVIWGGRAQVRRTLYMATVAALRCNPVVRAFYDRLRVQGKPAKVALTACMRKLLTIMNAMLKHRSSWMPSLDMQHSC

SEQ ID NO: 41436 - protein, 394 aa, unidentified
MACVRHMVDGAVKREVRTFKTTTKDLMALSEWLSAEGCTDVAMEATGIYWKPVWHILADGDFKPMLANAAHVKNVPGRKTDVNDATWLADLMAHGLIRGSFVPDEPTQEMRNFLRTRKQFVRERTSHVQRIQKTLEDANIKLDSVITDIMGLSGRRMIEALIAGETDPFALAGLAHRRIKASQAELEAALRGRVSDHHRFMLRLLLQHIDAIDAAIGQIDQEVDAHVEPFRTAIQILSSIPGISDLSAEVIVSEIGIDMNRFPTEGHLISWAGLCPRNDESAGKRRSTRMRKGAPWLKTTLIQCAWAAARTKGSYLQAQFQRVRSRRGAKKAIGAVAASVLTAAYHMLKNGTLYEDLGSDHFDRRAKGKQILRLVSRIQNLGFAVQITPIGAAT

SEQ ID NO: 41437 - protein, 349 aa, unidentified
MSTLYAGLDVSLEMTSVCVVDADGRLLAEKQVSSDPEAITKELLVIEGTWERVGLEAGPLSQWLFFGLKDAGLTAVCIETRHAKAAITAMSRNKNDRNDARSIAQIIRSGWFKAVHVKSTDSQELRTLLTSREFLVNKVRDHENEMRGALRPFGLKVGRVGASGFAQRIRDLVSDRPRLALCMEALLASREVLRQQLASLHAALLRVVKNDELCVRFMGIPGVGPVTALAFKTTIDRPDRFRRSADVGAHLGLTPRQFQSGETDRRGRIGKGGDSLTRTALFAAANVMLSRSTQWTALKHWGVTLARRSSLKKAKVAVARKLAVIMHRMWRDGTPFRWTAQEGRRTPEP

SEQ ID NO: 41438 - protein, 355 aa, unidentified
MKQVTKLSFKGQSIYVGMDVHKKSWKVSLFTDTFELRTMSIPPSVEVLKCYLHKMYPEATYYSVYEAGYCGYWIHEKLQKEGIFNIIVNAADVPTTDKEKKRKTDPVDSRKLGRSLRSGELKSIYIPSEIKQNDRLLVRSRHDNVKKQTRCKNQIKSVLNFFGIFISDEKIKTHWSKAYIQWLKSLCNDTSGRSIKLKTLITELEYFRKTISDLTKSIRALSLDPAYKKYVKLLTTIPGISTLTAMIILTEFGDMKIYSSLNKLSSYVGLIPDEHTSSDNEKRYGVTKRGNRYLRKALLESSWVAIRKDPSLTLSYRNYLKRTIAVKSIIKIARKLLNRIRYVLITEKEYQLLKP

SEQ ID NO: 41439 - protein, 361 aa, unidentified
MSMITKQSDKRKQAQVDFTGTPCWVGIDVHKSSYAVAILDEDGQRQEFSTPAEPKKLLVQLLKMCMHIQALVYESGPCGYELAWICQESGIPVLVVAPSRIPRPISKSGKTDRLDSMNLVELLARGMLKSIAIPSREEFAVREMERARQSLVRARRRVRQEIRSFLLRNALTEPPNLSRWSQIAVRALYDKPLPEYLHNTLAVYLDEHASILASLSRISAQLAKATIAQGHGERVKNLQTIPGVGETIAHTFISEIFRPERFERAEAICAYVGLAPMTNHSGAGKERAWTRPVGQDYLRSILVESAWRLVAVEERYRDLYNRIRNRTGLAQKAITAVARKMLILIWRVAIEGRAYRPTTTN

SEQ ID NO: 41440 - protein, 419 aa, unidentified
MNKIETKKQKIVNAKTLIVAIDIGKTTDTGYCRCPSGEECKPFEFSNNAEGFRKLWDRICWMKTSHHLEEVVVGFESTGAYGEPLVHYLRQKPVKLVQVNPMHTKRMKELQGNSPGKTDRKDPKVIADIIGLGHALSVVIPEGAAAELRRLTLARERSIERRTALYNQLQDLVFIVFPEFLQVMKDIKTHTAQYLLRHYPTPQDMVACGSEELIRILRQVSRGKLGKVRAQALYDAAVQSVGLQEGRRGILLETEEILSGLEACKRFIEKMEEEMVPYLEQIPYSDSLLSVKGIGKITVAGLIGEVGDFRQFHTLREVMKLAGLDLFEISSGKHKGNRHISKRGRPLLRKLLYFAAINTIRKGGVMHASYQRYLERGMPKIKALIAIARKLLGILFALVRDHSQYVENYSPKEVLKLAA

SEQ ID NO: 41441 - protein, 437 aa, unidentified
MEEVTDEPLYRDRVCGIDIGKAELYATIRVPSDKDPARRASETRRFAATKRGVLALADWLRCWQVPAAVMEATGDYWKGPFYRLEAEGFECVLADAKQVKHLPGRPKRDPSDSSWLAQCFERGAVRPCFVPDPEFRIIRLHTRYRRDLTDERTREKNRTEKLLESAAIKLSSVITDLHGVTGRDIMDHLIAGERSPKVLAQLARARARRKISELEEALEGAEFFTAEHAALLAAMLARIDRVNAEIARLSEVIETLLEPYEEQLQQAESMPGWGRRAAEDALAETGTDMTRFRTGAHLASWAGRTPLDNSSGKRKGKAKSKKGNRYLGGLLGETAIAAGKTQTREGARYRRLSRRRGKAKALVAVGNTQLKVYHALLSSPGTRYEDLGPDYYERRAEVSRQVRHHVGKLGALGFDVTLCRIPEPGPEPGGTGNSQTA

SEQ ID NO: 41442 - protein, 359 aa, unidentified
MASKVKKNKVNFKGKMVSIGIDMHKISWRITALVEGDTVLAITLASPNYEAFKKVISRFKGNHLRIVYEAGPGGFDLYDRLTEDGIECIVTPPSLIPTESGSKVKTDKKDSYKLARFLESGMLKAVWVLSPEERAHRQLLRTRRQIVNHRSDVMRQIKSLLLFNSIDVPFKGTQHWRGPFMNWLLKLDLGYEPLNRSLKALVDLFNYLSAEKKKITNDVLELAEEEKYAKRVELLESIPGIGTLSAMEILVELQDITRFKTADELAAYLGLTPSQYSSGEHIRMGHITHAGNKRARTTLVESSWILIGKDPEMKQKYQRIKERRGGKRAVIAVARNLSGRIRRMLLDHVPYELNFQKAA

SEQ ID NO: 41443 - protein, 313 aa, unidentified
MSEPVYVGIDVAKDTFCVATCPNVLKTCLPNTPDGHRQLCQSLKPCTTALIVLEATGGYERPLATELLSASLPVVVVNPRQVRDFANGMGQRAKTDPIDAQILAKFAQIVKPVAKTHSTPQTAELSELVRRRRQLNDLRTQESNRLLMIHHPKVKKSIKKMVKTLDFQIDEIDQLIREHIDADDNFKNKDRILQSAPGVGPQTSAMLIANLPELGTLNRQEIAALAGLAPWDRSSGKYDGKAHIWGGRKDVRSVLYMAAFTACRFNPTIRELAARLKQKGKAYRVILTACMRKLLVILNTMIRNQTQWTPKIA

SEQ ID NO: 41444 - protein, 423 aa, unidentified
MNNSTLCIGADVHLKEIVLRAVDKLSGNEVIASFSITNNLPGAQAAATHIADVATRLDYTRIEVGYEATGMLWIPFHRFLSTSPLLQPFDLVQVCFNPKLVADFKDALVLRGPKDDDRDAFDIAVRLQIGHLPDSYVPDDFWQGLRRLTRYRFHLSRNLAREKMRFQSYAFLKCSDWKRVKPFSDIFGATSAALLTEFTAAELRQMTHSQLADLIAHRGRGRFHDPDATARAVREALRSSYPIDHRMDEMLTFTLATGWEHIRCLKRLMKRLDQRIARCIDPVPNPLITVSGLGPVITAGLLAEIVDISRFPEHKHLAQYFGISWIKRASGDSVSQNTRMSKVGNPYGRYYFILGADHLRQFNLEYKAYYWRKYNEVSSHQHKRALVLTARKLVRLVHALLTKNVPYVRPRMPADSVEDDLLQ

SEQ ID NO: 41445 - protein, 342 aa, unidentified
MEELYYIGLDLHKKIIAYCIKTVSGVTVSQGTVAATRSALLKWIESLPKPWVAAMEATLFTGWVYDFLKPHAKELFVAYPAMLKAITAAKKKNDRADAEKICDLLRVDLLPLCYMAPAEMRELRRVLRYRNFIVRMATTVKNKMSGLLMEVGAEYSKKRLHGRSYFGNLLETVEDVPSSVKELLKLSRAGLEMFAAVQKKLLAALRENGLIRDRVRRIMTIPGIGEVTALTWVLEMGDPQRFSARQAISYCGLCSAQRESAGKEIRGPISKKRNKHLQSILIEAAKLAPHWNPHLALVHERELKKGNRNRATLAVARKLVIYMLAVDKTGIDFVLADEADAA

SEQ ID NO: 41446 - protein, 354 aa, unidentified
MTDIKYVAFDVHQATISAAVLNLEGKLLTQAVMQTQATAIRDFLRGLSGQVHLTFEEGTQAQWLYELTRPLVAEWLVCNPRLNHSGSRENKRDRLDALKLAKDLRAGLLKSVDHGSPQTQTLKQLAHNYETLTEDPTRCMNRLQAVFRSQAVKCGGRDVYYRRNRAAWLAKLTEVGWRLRAEFLYQQLDHLRELRREAKKALLQEARQQAAFTQLCGVPGLGPIRVAQLIAVIGTPFRFRTKRQLWTYCGFAVVRRSSADYVVVGDQLERRSKNPQRRGLNPNHSRRLKRVFKSAAIEALKEEFFKKMYERLQASGVRAEMARLTIARKLAAVALAIWKSGEEYDETQLSKLAA

SEQ ID NO: 41447 - protein, 350 aa, unidentified
MQNTQNMQNVDKLIIGIDVSKKDLDVAYWQSHLQSKSIFLGKFPNSIAGFGTIVKEVEKKKQETNAASVLVVLEPTGGYEQKFAHFAHEKGWDVSLPNPKQVRDWIKGTGRRAKTDRIDALMLAHYGAAQNPYTWKPMRPEFAQLESMLDRLEDVKGMLAQEKNRLEAQENRVSCHHIASKNLQDNIANLERQVKALEKAVKEHMKQHPHLKDQCKNLKTVSGVGDVLGPWLLVAMHKFGQLTDFKGTSKAITAYFGLDPKPYESGTSVRKRAGISKQGNSEIRRFLYMGALGGVGGNNPLRSFYKKLVETSGKPKKLAMVAAARKILVWCWAVFRQGKPFDATRHQGVF

SEQ ID NO: 41448 - protein, 410 aa, unidentified
MPERKVYEMIDGEAPVLAFDVSKGCSHCQGFSSFGKPIGKPIKVAHTKSGMAAAEKISETLEQMAGTKPKVVMESTGVYSKPVIRWAESLGLEVYLISPLESAKVRKSKVRPTKTDALDCGVIAEVAYTRSLRRRVTPRSSLYSKLYSLSRRRAAIADRLVASKNQYRKSLDAVWPLLDKACDPFSGYAMWAVGRYRHPEALAKAKGESIVSGLERAKVGTGAISKAAIASKLIAYAKDALSGCSPNDGEVDALMSAMSDVKRDMEALDEATEKLIALAKELPHFTQILSIDGTGDVLAALLCAEIGEPSRFSCRNGLVAYAGLDPTILQSGKNDGLHYSITRKGNAFLRRYLYLAVENMVMSKADNAITRFYSKKKSSGLCHKAAATAACRKLLVTIWGMLRSGTFFNK

SEQ ID NO: 41449 - protein, 346 aa, unidentified
MMIIGCDFHPSWQQVCWLDTETGETGEQKLVQALGDAERFYRQLSAPALIGMEATGNCHWLVDLLSELGHELWVGDAAQIRASYVRQQKTDKRDAAHILKLLVEGRFPRIWMPSSEVRDLRQLLLHRHKLVIIRARVKNELQHLCLNQGVQRKHKLWSRAGQQVLRELPLKPWAARRREDLLRLMAMLDQQIEPLDQAVKAEAQRDKMALLLQTQPGVGPITALAYVLTMGDVSRFPRGKQVASYLGLIPREHSSGGRQKLGAITKQGNRMMRMLLVEAAQSAVRLDPQFRKEYLHRCHSKPKAVAKVAAARKLAIRLYWMLRTQKRYPAVVRIESSPRVPLVSAS

SEQ ID NO: 41450 - protein, 316 aa, unidentified
MNIQDKSEINIGIDTGQAILDIHVRPQGHFQSFENNPEGIRSAIRFIKPFKPARILIEATGRLEIAFFCAAHKAGLPVCVCNPIKVRKFAEMTGILAKTDKLDAQVIAYYGETMKPALTELKPEKLRLLSDLLAVRSQCLDMSTMQKNRLQRMPKTVQKPIRNILKKITEEIAVIDRQLDQVIAEIPQFQARVDQLISAKGVGKVLAYTLLSELPELGSMNRKQIAAIVGVAPMNRDSGKHKGKRKIRGGRSKIRTVLFVSMLSAIQCHPKLKPMYQRLVAAGKPKKVAIVACMRKQLIILNTMVKNGTMWDENMI

SEQ ID NO: 41451 - protein, 385 aa, unidentified
MSSKAFVPRDYDVFAGLDVDKKSISVTFANHQGFIRSLRVPYSAEHLVNHVRKHFPDQKVAFAYEAGPTGYGLYDGIVAQDYPCLIASPSMIPKAPGQRVKTNRLDSRGISENLRGGQLKSIHVPSVLYRELRHLTQLRDTFVSELVAMKQRIKSLLLMEGLEFPPAPAGSQWSFMVKDKLRKLACSSTVRFKLDQLLDSLEFNEKQIVKTTQQIRRFCRNDPELSQCIEYVVSVSGIGQIVASQLLARIGDWRELRNVRQLGAFLGLVPTEHSTGDRTDRGSITHSGDPRLRSKLIQAAWSAIRKDGELREFFRSVCQTHARPVASRVAIVAVARKLTVMVSVVLMEQRPYVVRKKVHSAPLTQEETVPQGTPRRQAEPGAKNS

SEQ ID NO: 41452 - protein, 340 aa, unidentified
MDATTYGLDVAKRVFQMHWVEVETGEIMNRRFGRDELIRFLAQRPAGRVALEACGSAHWWARRIKALGHEVVLLHAKFIRPFVQTNKTDAADARAIWTAVQQPGMRTVATKTEDQQAMLSLHRMRALLVKFRTMQVNQLRGLLYEFGATFRAGRAAGLAEIRARTAELEDALPGTMMCCLQDQLRRIEELQRDIDLLENRIGIWQKKDAACQAITAVPGIGRLTATALVATMGDAKSFRSGREFAAFLGLVPRQSGTGGKVRLGPISKRGDPYLRTLLIHGARSVLYNAKVPTPWQTDIQARRPANVAAVALASKIARTAWAILARGQEYQRNYVSVRPA

SEQ ID NO: 41453 - protein, 387 aa, unidentified
MLKKTGKVAMMANHHLLECFPGAFAPVGRPARTGSGEIVLTQGQSPVCSLIRRCPQDSIRTVAGATKPAWQGRMNPMEHYVGIDIAKNTFDVHVLPEKAARHFEYTEEGIQACRQWLVAFHPSLILMEATGGYEKQLARELFAAQFPVAVINPRQVRDFARAKGRLAKTDKIDAFIIAEYAQTMQPPAQEAMDELSEKIRALIARRRQLVNMCTQEKNRREHAFDDYISGSLSCFIASFEKALQEIDELIENHINGAPALKKKADLLVTAPGIGKSTAMFLVAELPELGKVNRREIAALIGTAPVNRDSGTFRGKRMTGGGRRHIRTQLYMPTLAAIRYNSVIRTYYQHLLKNGKVKMVAVVACMRKIITILNSMLMSNQPWNPDFA

SEQ ID NO: 41454 - protein, 398 aa, unidentified
MFYAGIDIAKNKHEASVIDAEGKSLFDSISFSNTKEGCEKLLALFDRIEIAKDDVLIGMEATGHYWLSVHAFFLELGFDVKVINPIQSEAFRKMYIRQTKNDSKDSFIIAQIMRFGQFSATNLSEEGIVALRQLSRYRLALVDSCGDCKRRVIALLDQVFPEYDHLFSDTFGVASTEVLLKYPTPEDMLTVSTRRLTTLLNKASRGRFGEEKAKQLKAVAAGSFGIGFAKDAFSFQIKQLMEQLAFLEKQIDDLEKEIAVLLKQIGSFITTIPGIGDTLGAIILSEIGDVHRFDAPGKLVAFAGLDVKVNQSGEFTGTKTKISKRGSPYLRRAIWLAAGRSAFCDPILSDYYQSLRARGKHHLTAVGAVARKLCNIIFAILTENRPYEQIPPKGKPQS

SEQ ID NO: 41455 - protein, 377 aa, unidentified
MGCRHAAEALVFNERTAIGLDVHARSVRAAAIDTLTGEVIEARLPAGAADVLAWVMQVSARLGPVHAGYEAGPTGFGLARKLEAAGIAVTVAAPSKIIRPAGDRIKTDARDAVLLARLLKMDELVAVRVPTQAEEAARDLVRARDDARTDLLAARHRVGKLLLRRGLVYAKDRAWTGAHDAWLRQMRREGLDGAGPGTLAAFDAGYDAVNSILARRDRLDRDIAAMATDSPFTAVTNRLCCLRGISTLTGFALAAEIGDWDRFTGRTIASYLGLVPSEHSSGGSRSQGAITKTGNTHARRLLIESAWHHKPVYRPGKIMKDRWAAAPAAAAARGDAGNRRLHHRWIVLDAHKKKHTVATTAIARELAGWCWSLAVMT

SEQ ID NO: 41456 - protein, 345 aa, unidentified
MKITTIGLDLAKAVFQIHGVDERSKVAARKQLKRAEMSKYFANLEPCLIGMEACGSAHYWARKLESYGHTVKLMAPQFVKPYVKTNKNDMADAEAICEAVSRPNMRFVAIKNVEQQAILSVHRARQGFVKARTAQGNQIRGLLSEFGIVIPKGITSITKLVPEILEDGDNGLPGAMRHLIDRLATNLKEMDRQVKELEAQIQKWHRENEASSKLAEIPGLGPITASAIVATVGDAREFKNGRQLAAWMGLVPKQSSSGGKQNLLGISKRGDTYLRTLLIHGARSVINAAEKKAEPESWLKKLMGRRNTNVAAVALANKNARIVWALLAHGRTFHPDYKFAQTANL

SEQ ID NO: 41457 - protein, 372 aa, unidentified
MEGYAGQQFVGIDLHRRRSVIVRTTERGDPLETVRISNDVDSLSKVMARAGVCPEVVVEATYGWYWAADALADLGAVVHLAHPLGVKAFSYRRVKNDVRDATDLADLLRMGRLPQAWIAPPATRELRELVRHRAKLVAIRSGCKCEIHAVLAKCGIPVLMSDLFADPGLALLERLEAPAPYLARIGSLRRLIDDLDVEIDLFARLIRGRLAADPGYRAVQTIPGIGPVLAAVFVAEIGDVHRFPGPAQLTSWAGLTPKHHESDTHVHRGRITKQGSRLVRWAAIESVQALGPSTGAGRLKRRVGDRRGRNIGKTAAARQQLGYVYYALRDGQVRALAHHPGPRRDRGPLQHLARGLVVQVMTPVRGAVAPSD

SEQ ID NO: 41458 - protein, 356 aa, unidentified
MVRLSISKLERFSKRVGGEPVWIGMDVHKRSYHVALRTGSGLSETFVSPSEPKSFVKLLHRLSLKVALVVYEAGPTGFGLARALEEVGLPVFVVAPSKVLRPVRPGSKTDRLDCLKLAEYAVKGLTKPIAVPSEEEEADRSLIRRRHQVVDDLRRVKQRIKSLLLCYGVAEPAGLETWSNKSIAKLERTILPGRARITLRSMIRELRFVAKELGRIDQELKRMAALKRHRKKVSTLRTIPGVGPVAAVAFCLEIFSPKRFNRPEEIASYLGLAPTVRQSGEGKKRGRIVPTGQKRLRSILVEAAWTFKRYDPGAREFYNRILAKTGVAQKAICALARKLAIIMWRLCLEQRSYRPA

SEQ ID NO: 41459 - protein, 397 aa, unidentified
MIAIGIDVSKSKSTVAILNGDGSIRAKPFDVHHVADELQALVDYIKSTSEPATILMEPTSHYHYPLLKAFTEADLPVCLINPYQMKKYGDTELRKAKTDKRDSLRIAQYALEKSYSLIPYTPTDQKYDDLRFLSRQYNQRISTLTISKVQLLRLLDQTMPGITTFLPLKSRDPDNCVLLRFVKRFKSFDTIRKMGKTHFLDSYLVLVRKTKDRFAGAKGLAIYELVLNSVTTRGDNPLTAMTQDQCVDLISTSQKAADEINLHMLNIAQTIPEYKVLRSMAGVGDRLGPIILGEIGDIRRFHSGKALNAYAGNDAPPYQSGQFESRNRHISKRGNPALRKACFEVMQALKLTKPQDDPVYLFLLKKEQEGKPYNVAKMAAVNKFLRIYYARAMELYK

SEQ ID NO: 41460 - protein, 345 aa, unidentified
MDYFAGLDVSVKETSVCIVDDTGKIVREVKVESEPEALLAVLKNPAYHFKRIGLEAGPLSQWLFSALAEAELPVICVETRHMHAVLKAQINKTDRNDARGIAQMMRVGLYRPVHVKTLRSQKLRMLLTHRQLLQSKAIAIENDLRGTLRNFGLKVGMVGKMKFEARITELVENRSDLAVLVEPMLIVRRVLREQIVILHRRLLAIVRDDEVCRRLMTVPGVGPVVSLTYRATVDVPARFQKSKSVGAVFGLTCAKYQSGEIDRSGRISRCGDEMMRAMLYEAAQSMLVHSKKWSWLKAWAMQVARRRGMKKAIVALARRLAVIMHRIWVDGTEFRWTRDQAAAPA

SEQ ID NO: 41461 - protein, 397 aa, unidentified
MIATILSIFGEKKQLRFERTEEGILSLKKWVLTEKCDVVACESTSDFWVPIYDSLINHLNVIVGNARDMKAFTHKKTDKIDSEFIAQLALNNMIKPSRVFSKNQREFRSYIRLRHKLVQKRTDIKNVAHAILSSEMFRLNDVLTDIFGKNGLKILSGISSGKNVDQIIESLSPNVRKKSDQIREVLDREMSLSAAIRIQTCLSLIKNIDEQINILEAEIFRYAYTNHNREMKLLMSSPGVGEISAATIIAEIGDFNDFSSGDKLASWLGLVPNVYQSADKYHNGRITKRGSKVARWILIQVAQAAARKNRSKLKEFFERKKKTIGHSKAIVALARKIVTILWHLITNDEMYEDEMGYKKGDVQKRKIVESEEFSVDERISIISEIFAIVKKEEPDVT

SEQ ID NO: 41462 - protein, 356 aa, unidentified
MNEGSCVGLDVHARSVVAGVIDMGSGEVRSLRVPPGNEGTVAWLKTLPAPVRVVYEAGPTGYGLARGCAEAGISCVVAAPSKIRPAADRVKTDRRDAERLARLLRLGEITPVRVPDPEEEAARDLVRAREDARGDLMRARHRLSKLLLRHGVVYEATAWTRAHDAWLRRNRFGGGPLAIVFDECYARVLDAKTRRDSLDGAIAELAVTPPYIDVVERLVCLRGVSTLTAFALTVELGDWNRFRPESLGAFLGLTPSENSSGERRRQGGITKAGNSHARRLLIEAAWHQRSAPRLSVTLERRRTGKSLAVRAQADRSARRLHGRWHALEARGKPRLIVVVAVARELAGHCWALATME

SEQ ID NO: 41463 - protein, 274 aa, unidentified
MKKQVIVGIDVSKSWLDAHLVIEDNEFKEGLRIDNSVRGFKKLLKWVADHTQLDATAWLVCMEHTGTYSYKLNLFLQERGISQSMVNPLAIKRSMGIIRGKNDKADARLIALYTKRFAETLELYELPSEALQKLKAQLVQRERMVNMKRQLILANDSLKDLPERLIHQITKQNDQLKKQISRSIIELDKAINETIRSESSLQSKAQKMESIPGVGIQIAAHVLVSTQGMTRFKSSRKFACYCGVAPFEYSSGSSYKAKTKVHYLANKKLKSLFH

SEQ ID NO: 41464 - protein, 326 aa, unidentified
MDVLGIDLAKLSFDATLLLQTGSSHYASFPNTPEGFLQLATWLKEHNVSSLHACMEATNIYWQALASWLHAQGYSVSVVNPARIKGYAMATMQRNKTDKLDSAIIASFCAKHQPSLWQPASQEQQRLRALTRHRDDLLQTQLQQQNRLRDTTDELVRSSLESLLLAIVSQLETVQEQIKQQLRLQESFQTNLALLTSIVGIGAVTAAKLLAEFADLEEYASAKAAAADAGLTPSHYESGTSVRRRSKLSKMGKVGIRAALYWPAITAMRCSPAIKAFAHRLAARGKPKMVIICAVMRKLVHICYGVLKHQTPYDPDKAFGHSTPAT

SEQ ID NO: 41465 - protein, 369 aa, unidentified
MKTEKYVGLDVHKDTTVIAVAEGDRCGEVRQFGAVSSDLRALEKALKKIGGEGITLHVVYEAGPTGYVVYRRLKRLKIDCIVVAPSRIPQANGARQKNDRRDALMLARLHRAGELTAIHIPDDVDEAIRDMTRARADAVHDLTRAKQRLKSFLLRQGMHYPGKASWSAEHQRYLRALQFPIPSLRAVLEEYLFAYDQIVQRVQRLEELLEVHVPQWRMYPAVQALMCMRGFRLTAAAMLVAELGDIRRFSHPRHVMAFLGLVPKQNSTGQTMRMGAITKAGNPHARWILVEVVQHALMTPKVSRQLGIRQEGQPALYRDLSWKAQVRLHKRGWHLLRRGVMKAKVNIALARELAGFVWDLLRQAPTPTA

SEQ ID NO: 41466 - protein, 338 aa, unidentified
MPTYAAIDLHSNNGVLTIIDETDRVLKQRRIPNKIEEFIKELEPFRATLQGIAVESTFNWYWLVDGLRAKKFPVTLVNTAAIQQYEGLKRSDDQYDAWWLAHMMRLGILPKGYIYPREERAVRDLLRKRATLVQQRTANILSVQNLEARNRGTKISSNEVKHLTGASIAALYDNEDLALALTTTLTIIDALTKQTSLLEKAVLKKARLRCEWELLLTVWGVGKILGLTIMYEAGEMSRFAGPGHFASYCRCVDATRLSNGKKKHDNNAKNGNKYLAWAFVEAAHFAVRYYPEAKRFYDRKTAKTNSIVAIKAIAHKLARAAFHVLHDQKPFDPKKVFA

SEQ ID NO: 41467 - protein, 393 aa, unidentified
MVCVGIDVAKDKHDCFIISSEGEILADVFTIPNNAEGFDTLLQAIRRSTRPEDKIKVGLEATGHYSYNILGFLLDKGLPTYVINPLHTNLYRKSLSLRKTKTDRVDARTIAAMLMSDVDLKPYTDTVYHNEELKSLTRYRFDKVRERAKLKQSVSRLVTILFPELEKLVSSLHSASVYALLSEFPGAKQISSTHMTHLKAVLKNASQGRYGQEMAETIRNAARSSVGSVMPAKSLELQHTIRLIRELDAEIEDIETAIQAIVDEMQSPITTIPGMGVRMGAVILAEIGDFSRFDSPDKILAYAGMSPSTYQSGQLSLSGAYSHMEKRGSRYLRYALYNATKHVCHWDPTFAAYLAKKRAEGKHYNVALSHAAKKLVRLIFAMEKSQRPYCAAA

SEQ ID NO: 41468 - protein, 342 aa, unidentified
MNITTIGLDIAKNVFQVHGVDAHGKVVLRKQLRRIQVLAFFANLSPCLIGLEACAGAHYWGRELLKLGHDARLISPQFVKPYVKGNKNDANDAEAICEAVSRPSMHFVPLKSIEQQDIQMLHRVRSGLVKERTAQANRLRGLLSEYGIIIGQGLAQVRTRLPEILEDDKNGLTMAARQIFTDLQYQLRERDKQIAAYGEKILMLHRSSPASQTLGAVPGIGPITATALLAALGDGKAFDKARQVPAWLGLVPKQDSSGGKPKLLGISKRGDVYLRTLLIHGARAVVKAAAKKDDAHSRWINDLVQRRNVNIAAVAVANKNARIAWALLARTEAYRPPVPASV

SEQ ID NO: 41469 - protein, 452 aa, unidentified
MKNKNLALEIVNSHAAGIDVGSRSHYAAIGQGSNDVKEFGVYAEDLKQLAGWLIDNNIETVAMESTGTYWQNLYSTLQESGLKVILVNGKFTKNIQGKKTDVKDCQWIQKLHSIGLLTGSFLPDYATEQLRTYCRHRSNLIDTAADTTRRMQKYLRLLNLRLDVVVKDITGLTGLKIINAICSGEANPEKLASLRNGNCKKSEEEIAKALQSNGRRDFLFALGQEFDMYKTLQKKITECDEAISKLLNEQINIDENKKVLKAEIKAHKRINKNAPKNMDINQLAYQHFNGIDLMNIEGVSHNTVITLMSEVGYDGIKKFEAAKQFTSWLRLSPNNKISGGRILSNRIAKGSNRLKIALRNAANAIGNLKDTHLSNFFKRVCFRRGRPAAISATARKLAVIIWNMIVKNIPYQPPTNYEFLDQKRKRKVQEMKKLIHKFDIKTDELGLQLSSL

SEQ ID NO: 41470 - protein, 414 aa, unidentified
MKTLFVGIDVSMKDFKAQFMDNLGEIVSKRQKFSNDNPGLEALINLVLEICHSNNFESVVIGLESTSVYSWHLQMGLASNYQLASYHCQVYTFNPKVVANFKKAYVDLPKNDWTDAWVIADRLRFGRLPENSQVDFRYLPLQRLTRFRFHLTQTLTREKNYFLTNLFLKFNTLQQDEVFSNLFGATSEAILTEFLSPDEIAARPLDNLIDFLVEKGNKHFADPKATAEKLKIAAHNAHRLRGNLLEPVNLILATSLETIRTLEKQIKNIDKAIAKEIAHFKHTLDSVPGLGPVICAGIIAEIGDIHRFPNDSALAKFSGLTWREHQSGEFEADTTPLTKTGNAYLRYYLIQAANSVRQYEPEYREFYSRKFRESKTHHHRRALVLTARKLVRMVDALLRSNQLYLPKGQRRNLA

SEQ ID NO: 41471 - protein, 340 aa, unidentified
MDATTYGLDVAKRVFQLYWVERQSGEIVNRRFDRADLIEFLAQRPAGRVALEACGSAHWWARKLKGLGHQVVLLHAKFIRPFVQNNKTDAADARAIWTAAQQPGMRTVAAKSEEQQAMLGMHRMRAQLVKFRTMQVNQLRGLLYEFGVTFRAGREAGLSEMRARMGELQEMLPGVLLEGLREQLKRIEAIEDDIGGLEKRIGAWQKQEAACRAIAAIPGFGKLTATAFVATIGDACAFKSGRQCAAFVGLVPRQSGTGGKVRLGPISKRGDPYLRTLLIHGARSVMTHAKAPSTWQQELRARRPANVTAVALANKMARTAWAILAHGRAYQKDYVSVKPS

SEQ ID NO: 41472 - protein, 374 aa, unidentified
MEVLYTRCAGLDVHKDTVVACVRCVVDGRVEREVRTFSTTTSDLLALSAWLTWLGVTHIAMEATGVYWKPVWNVLDDGEFELTLANAKHVKNVPGRKTDVNDATWLADLLAHGLIRASFVPDRPTMETRTLLRTRKQMTRERTRHVQRLQKTLEEANIKLDSVISDIAGKSGRAMMEAMIAGESDPVVLARLAHKRIKASPQTLIEALRGRINRHHRFLLRLHLDQVDVLDRVLAEIGTDMSRFPTAANLVSWAGLCPKNDESAGKRRSTKMRKGAPWLKTTLIQCAWAASTAKDSYLRSLYHRVKARRGGKKAVCAVAASILTAIWHMLRDGTFYQDLGPDHFKRRSSSRQTKNLVARLEGLGYQVQLKPVAA

SEQ ID NO: 41473 - protein, 363 aa, unidentified
MTSMIPAAEVVQRRHRVVIGVDTHKYVHVAVALDEFGGVLDAQRFAADRAGYAQLIDWAAGLGRRLTFAIEGTGSYGAGLTAAVRRRDIGVIEVLRTDRRDRRLRGKNDTLDAENAARAVLGGHATAVPKAGDGVVEMLRQIKVAKDIAVKARTAAMISLKAVIVNAPPELRETLQPLSKMALIDRCAGLRPGPVTNVAAATKHTLRSIARRWQQLHEEIKTHEALLTELTGQLAPQLVAAFGIGADTAAELLIVAGDNIDRVRSEAAWARLCGVAPLPASSGLTKRHRLNRGGHRQANAALYRAVIVRMQHHDPTRTYVARRILEGKSKSEIIRCLKRLLARETWALLRPLRSAPGTAPAVA

SEQ ID NO: 41474 - protein, 347 aa, unidentified
MCNYVGLDVSLKTISICILNEKGKRLVEGEVDSTPEAVSDFLKKTGLEIGQIGLESGNLTHYLKKGLLKMNYQVAVMESRKMAAILATIINKTDKNDARGIAEALRVGHFQECVHRSDEAVEIRTLLHMRQTAVEERTHITNSLRGHLKVYGIKFSKKAGKSFRKKVEDAVKNLTPRIQKMICSLLNILDALNNEIQAMTKEVEDVAADHEDVQLLQTIDGVGPMTALAFKTEIDDPNRFENSKDVAAYIGLTPTQYSSGEIQRQGGISKKGSKRTRYLLVEAASAMLTRCKMWSRLKAWGMKLQKKKGTRKATVAMARKLAVIMHKMLLTKKPFERGSEKKAAIAA

SEQ ID NO: 41475 - protein, 421 aa, unidentified
MQDADDNEEIIERVAAIDIGKVELVACVRVPDPDRPGRRQQEIIHSSTLTPRLLGLADRLYELGVTRVVMEATSDYWKPVFYLLEAQGFDPWLVNARDVKHLPGRPKTDRLDAVWLAKVAERQMLRAGFVPPPPIRLLRDLTRYRANLVAARTAEKNRVEKLLEDAQIKLSSVASDIFGVSGREMLAALLAGERQPAVLAQLARTRMRAKIPLLEEAFTGRFTDHHAFLLRTMLARIDETSADVAALEARIEQLIAPFATVVTRLDEITGLGATGAQTIVAEIGLDMSRFPTPAHLCSWARFAPGVKESAGKTKGRATTGRGIRYLAQVLGEAAVAAGRTNTFLGDRYRRLARRRGAARAVVAVGRSILVTIWHLLSNPDARYRDLGADYTRQRIDPQRRTRNHVRQLEALGYSVTITPAA

SEQ ID NO: 41476 - protein, 429 aa, unidentified
MNDVTDRLELFRRMRASVRGSERYLLVGVDVAKNNHHAFFGTPNGRTLRKNMVFDNSTKGFESLRSFARDIRNQHGLVEVVYGLEPTASYHKPLAEYLIRQDEHVVYVSNVAVAKNRALLDGRWDKNDKKDAANVADLVGQGRCLYYDVPEESLRELRSLIAFRIRLKKEEHALRMRLRNNVFAQYFPELDKLYIRAGQPDDLVLSIAQHCLDPREIAGMEFEAFLKLITPRKIRIEQEKRLRELWEIANESAGCQVHDAARWEAQSLVSKLKAVRETVKDNEQLMEKVAKQFPEYESLLSIPGFGPIVSAMVLAAIGNAFRFENRKQVLRLAGLDLSAERSGKNSDTAKPVISKQGKAALRYALVQAAMVASSLNPDIRSYFSNLLKGRELERGIKLKMKVKLAAKLLVVAWTLMKSKDKFKPSCFSR

SEQ ID NO: 41477 - protein, 334 aa, unidentified
MKQEIIKQNVGVDVSKDDVKVALSHLTTDYRVVVRSTRTISNTPKGFKQLQEWVNAKKHPTQSVHFTMEATGVYYERLAYYLYEQDYRLHVVLPNYAKKYGQSLGIKSKTDKLDARTLAQMGLERELRLWQPVSPSLLELKQLIRERDALVRNRTTASNLLHAYRHQGKPNKDSISRSISHISFLDKHIKKIEREITGFVNQDKELKIKIKYLLSIPGVGLLTAATIVAETNGFAAFESIKQLTSYAGLDVRIAESGKWKGKSKISKRGNSHIRKALFMPSLSKIKHNQETKQFFERLKEKKAVGMIVVVAVERKLLGLMFSLWKKEEMYRHAC

SEQ ID NO: 41478 - protein, 337 aa, unidentified
MITIGIDPHKGSHTATAVDASEAVVGELRVTADRRQRARLLEWAARFEPRRWAIEGATGMGALLAQQLVGAGEHVVDVPPKLSARVRLMGNGRIDKTDPNDARSAAIVAVRNATLNTVGADSEHRVVLRLLADRYHQLTAQRTRSVCRLHALLCLLIEGGTGRSLSTARAVKLLAGVAIGDPIIAERVATCRQYVTELEALDQALVDIRARTVTAVDASKTTVIDVYGVGPIGAAIILGHSGDIRRFPTAGHYARHNGTAPIEASSGPKARHRLNPRGDRQINHAIHTAALTQIAHDHPGRVYYARKLAEGKTKKEAMRALKRRISDVIYRQLLADT

SEQ ID NO: 41479 - protein, 399 aa, unidentified
MLAVGIDISKSKSVAAILNQDGSMHTSPFEFHHTQPELDAFIKYILNSNQSATILMENTGHYHYPVLKAFREAGLPVCMVNAYQIKKFGDMDLRKAKTDKKDAVRIARYALEKSYSLVPYTSMEQKYEDLKFLARQYNQRMLTLKTNKVFLLNLLDETMPGITNILPLTTRTPETSLSVLFINRFKSYDRIKKMGKSRFLDAFEKIARKSRNRQTKTYGLAIYEAALRNITTRGDNEYTLAAQDQCLELVCESQKAADSIIPKMQTLAETLPEYAVLRSMAGVGDRLGPLILAEIGDIRRFHSGKALNAYAGNDAPPYQSGTFESHNRHISKRGNAALRKYCFEVMQALKLTRPQNDPVYLFLLKKEQEGKPYNVAKMAGVNKFLRIYYARAMETLKQQ

SEQ ID NO: 41480 - protein, 362 aa, unidentified
MPMLAELIDAVVGVDTHRDTHEVELALPTGTAIGIRKISNDNSGFAELLAWILDHSPGPRVVVSIEGTRSFGVGLARAVAAAGLTVIECEQPNRKARRGKGKSDPIDAHLAVLAALRLDADRLPVPRADGDREALRILLGTRHELTVVTTAQTNRLRALLLGGGDTDRDRARATLTDPVLLAMVRRREPPQASREQAVRHGEIRRLAHAVRAGRHALAANRAQLQAIVDQIAPGLTERRGIGAVTAAQAIVSFSHPGRCRSDAAFAALSGTSPLQASSGKTVRHRLNRGGDRALNSAIHTIAVTRMRCCPTTKDYVARRTAEGKSSREIQRCLKRYIARQLYRALNASTTLTAQISAPPAAA

SEQ ID NO: 41481 - protein, 360 aa, unidentified
MTTSIPSKTTVSYDSVKLGIDAHAKYYWVSRQLDGATPQPVQKMTYEELLLFVVKQQKLTPNLVTCYEAGAFGFHLHRKFEQLGIKNYVVQPQDWDERGKGVKNDRLDAAALCQRLDRYQRGNTKAFSTVRVPSEDQERERAISRQRQQLMRERQRISAMGRSLLATHNIHVTGKWWKGKTWTVVQKLAPAWVVERLEVFIIILKPLEEQELKLMHQLQEAAQEQKIPRGVGPLTFEILRREVGDWGRFNNRRQVSSYTGLCPREHSSGGKRRSGSVSKSGNPRVRAMLVEMVWRMMRWQPEYKPLRKWAHVLYSLTPNAAAKKKAVVAIARQLAVDLWRIFTGQCKAETYGLIYLPEAA

SEQ ID NO: 41482 - protein, 358 aa, unidentified
MKLIGIDIGKNKHFFCIMDKDSGEIVSQPASFSNDKEGFDFLLQKIKSYPKDSVIIGMEDTGHYHFALLKYLLDLQYTVALINPKTTDFNRKMQGGITKNDKLDTINICDVLDTPERKKQYRITKVNKFDLYEQKQLTRQHHNLKEELNVYKNRLQKSIDIVFPEFNSLFKSKYGTVYINILKTFGSAENIANTDIRTIRKCFEIDGRGNRISLTPERLKERARSSIGISSLAEVIQIKHLSAQIDLIEEQLSEIDKKIEEFSIQNNSPILSIPGISHFSGTSILAELGDISNYSKPSQIIKFAGVAPLHYESSQFNAQHTAITKKGSKYLRKTLYQIILPVIRHNPEIGRASCRERV

SEQ ID NO: 41483 - protein, 345 aa, unidentified
MTQYKRIAIDTSKAVFTLHGIDQQDRPVLRINLRRVQFIPFFAKLPPTEIAMEACGGAHHWARELTALGHEVRLIPPQYVKPYVKRAKNDRNDAEAICEAAGRPGMHFVPVKSITQQAQGMVLKVRESLVGQRTLLVNTLRGHAAEFGVIAGKGLSKIGPLLAAIEQEAAIPSEAKDMAALLGQQIADLDTRIKEIEVKLTAAHKANAVSQRLATIPGVGPVTALTLAIEIDPGVFESGRHLAAWAGLTPKEHSTGGKQRMGGISRAGNERLRVLLVTGATSVIKAAMQPGSKQMTDWLRAMLLRKPRKLVAVALANKMARVAWALMTREEVYRRSTTTTGVAVA

SEQ ID NO: 41484 - protein, 339 aa, unidentified
MYTSGIDQPKRDSVITTLDTAGERVRQVRLPNHRAAISRYFAAFPGPHQAVVESTGRWYWLSDLLTGLGVELTLAHAKAVKAIAYAKVKTDPIDSNTLAVLHQAGLIPVAHMISPDLRAQRDLLRTRLRLVAKRTSCRNSVHRLLEKFNVRTVAELEPLYQLQAACHEEQIALLEEQRKRLERELNPSLLPTPDIQRLLWIPGIGKLTACTLYLEIDGIARFPSDKRFVSYCRLVPGAANSGGRTRHRSGSKDGNRYLKLAFSTAAVRAIQYYPEIRTWFRRLARRKNPKVARTLVAKELARIVYQVLTTQTDFTGQFKGQPLSRRKQSQWPRLASPDA

SEQ ID NO: 41485 - protein, 344 aa, unidentified
MKITTIGIDLAKNIFAVHGVNEHGRAVLKKVLKRNHVTEFFANLPACVIGMEACASAHHWARKLQAMGHTVRLIAPQFVKPYVKTNKNDAADAEAICEAVTRPNMRFVPVKTVEQQSVLSLHRVRQGFVRARTAQANQIRGLLAEFGIVVPKGIGHLERQVPELIEDAENELTGSFRLLIQRLMDQLKELDRQVKELEAQIQAWHRSDETSRRLARVPGIGPLTASALVASVGDAKSFTSARQLAAWLGLVPRQNSSGGKNVLLGISKRGDVYLRTLLIHGARSLLQVAKRKECRSAWLDGLLQRRNANVAAVALANKNARIVWALLVHGREFHADYHAPAATA

SEQ ID NO: 41486 - protein, 424 aa, unidentified
MRQNEKLRMIKEGVITVGIDIAKRIHWVQPMLHSGILLGKPFSIQNNRNGFESLLAKLKLIKQQNKCQEVIVGLEPTGHYWKALCWFLINNQIKVVLVNPYHVKTSKELDDNTQTKSDPKDAMVIGRLVKDGRFFETYLPVGSWAELRVLSNTRSQLRAKLNVVLNNLKAILDEYFPEYETVFKTITGKASLHILTNCLLPNDLKLLRVPGIIAEFRKAVKKGVGLKKAKLLYQAAYSSVGVPANEAVKLKLSLFIQELNLLTDQITAIETAMEKQLQATGISQYILSIKGIGIVTAAGILGEIGDPSRFTDWKQVRKLAGFNLVESSSGEHKGQRTISKRGRCLLRNYLYQAALVMVAHNQEFKQLYQYLISRKQNPLKGKQALVVVAIKLTRVILALVQKKENYDSGKVLGVHRETQFKKAA

SEQ ID NO: 41487 - protein, 317 aa, unidentified
MENTEISFEQAVRVGCGIDVHQAVIVATISKGQENYETKEFSAFTSSLTDLREWCKRAGVTHVAMESTGVYWKPVFNILEEDFEIILVNARHVKNVPGHKTDKKDSKWISKLLLAGLLKGSFIPPRDIRELRDLVRYKKKQVAHVSSEKNRMIKILEDANIKISSVLSDVHGASGSKIIHDIIDGKTDVDELIKHIHGKVKASREDIRKALEGRLTAHHRFMLKIIRKSIEEKEGIIKELEDQIDVATAQYAVEVELLQTIDGVGKDSAIGIISEIGVNMEQFPNEHHLSSWSGMSPGNNESAGKKKAQGPSKETNI

SEQ ID NO: 41488 - protein, 478 aa, unidentified
MPNVRPLTRGDRRRNEKLARLRAIVRPDLAIVGIDLASAKQAAVVADHDSITLGRRMFDGDPWVIDEILDWALPIATEAGFAGVVVGCEPTGHRWKPVLERCRARGVEVVCVNPMLVHRGREEEDFTRDRSDFKDSTIIARRVADRHCYVPYALEGHWCRLRHLGARRNDQLVESGAARQCLRDLLECVWPAVLATAAQPLNSKTWQAAMAVSCDPGEIVAMGYDTFVTAVGTELARWGGKRRNRRILSAIWAAAQAPGGVKRERPAAVERASFAMGDWRRALDQLDDVEARMLAVLDALGLSELVTTIDGLSAVGAAAILAEAGDPARFDCARTWVNTPGCAPGPMSPATSPGRQRCRDGDGRRCAPPPGGPSGAPCPTTPCTRPVTATSSAGLTTRSRMARPEPPSPGRCCASCSSSSPDASPGTRPSPPASATRRRWSARPHDATLAPGGANPHGPWVEPVAEQGRPVHSPPELA

SEQ ID NO: 41489 - protein, 316 aa, unidentified
MQTVRDLGADVDSRTFVVACAARSVAPQRVANERRAILAWLRTVPPGSRLGLEATGAHHELLADLAHRTGLQVFVLNARDVRRYAQGLGRRGKTDRVDAEVIARYVAHEHSELHAYLPPSKEQRALSRLIKRRAKLVAIKGALTQSLRGVPGVRQELHQVSARLERLIAQVEALMQCALQQLPAAHQAAQRIATVPGYGPLGSTCLGYTFTRVPYLNSDAVIAHTGFDPRPADSGQKRGRRRLSKRGPGELRRVLFNCAMAAAKTTLWRPYYQAQRRKGLSSTAALVILARKMTRVAFAVYQRDQPFDATRLRFSA

SEQ ID NO: 41490 - protein, 345 aa, unidentified
MEQISRIGMDTSKYIFQLHGVNTAEQPVLRKKLRRKEMFAFLEKLAPTVIAIEACGASHHCARLLQSFGHSVKLIAPQLVKPYIKRGKNDAADAEALCEAMSRPTMRFVPVKTAEQQAGLMLVGVRDRLIRNRTQLSNAIRGYAGEFGLTAAKGKAHLAPLLERIHADDSLPALVRELFAAQAEEYAQLQAQIDEVDARLMAWHRADECSRRLTKIPGVGPIGAVLLTMKTPEPELFRSGRQFAAWIGLTPKDHSTAGKVRLGGITRAGDEGLRSVLVVGATTVIQHAQRGGRPSPWLTQLLKRKSPKLAAVALANKTARIAWKLMVTGENYAAKAAPAALAAAA

SEQ ID NO: 41491 - protein, 330 aa, unidentified
MTFAGVDLHKSFCQAIVCTHEGDVLKEGRIATEQQDIEEFFSGLEGLEIALEASTNYEYFYDLLESLGHHVVVAHPLKTRMIADAKVKTDKLDARILADLLRGDLLPTSYVPPKEQRELRHLVRHRIALGRLRGRLKTQIKTELRRKNVKYREGANCFTEKGKTELRRLHNPVIDSYLTIYAVVEDELKKMDRAIAEAGTRYEDVRLLTSIKGIGVYSALVIYSEIGDGSRFPTDDHVFSYAGLTPRVHQTGNEQYYGRITKEGSKYLRWILVEAARIHVQWCPESRITKHYEKIKRKRGEKIAIIAAARKLLQAIYYMLKHKEPFRIEG

SEQ ID NO: 41492 - protein, 338 aa, unidentified
MGQITTIGFDLAKNVFHVVCCDIHGKLIRKKMLKRSSVLEYFTNLPPCLVGMEACASAHYWARKLAALGHQVKLIPPQYVKPYVRGNKNDYNDALAIAEAVIRPEMRFVSVKTPEQQDIQALHRLRERRVQERTALCNQLRGLLAEYGMILPQGIRTVRQRIPALLEDADNGLSDLFRQLLAQSYQHLQELDHHIDYYTQEMKRQSQQHEACRRLQTIPGFGPIVASVFHSTVGNGEGYQRGRDVSASLGLVPRQHSSGGKDILLGISKRGDRYLRSLLVHGARSVVIQAAKKDDKLSRWINKIKEQRGFNKAVVALANKLARIGWAVLAKNSSFHSA

SEQ ID NO: 41493 - protein, 344 aa, unidentified
MKHYAGLDVSVKETSICIVDETGKVCRELKVASHPEDLLRVLQDPAWNLVRVGLEAGPLSQWLFNGLAEAGIPALCIETRHAKAYLKAQINKTDRNDARGIAQMMRVNLFRPVHVKTLASQKRRALLTARKLLQEKAIAIENDIRGLLRNFGLKVGVASAVMFEQRIRELVEGMPELGELMEVLLDARRKLREQFSKLHRKLLSIVREDEVCRRLMSVPGVGAVSALAFRATIDVPSRFRNSKAVGAVLGLTPAQHQSGESNRIGRISLCGDGMMRTLLYEGAQSILTRSVKWSWLKAWAMKIAKNRGLKRAIVALARRLAVIMHRIWVDGTEFRWTKEEAVSA

SEQ ID NO: 41494 - protein, 360 aa, unidentified
MTTTTTQTATAADTILALDLGKYKSVACVYRAADDLRFTTVTSSRQELGRLIDTCQPAIVLFEACLLAGWVRDLCADKGVKCLVANTTSEAWKFKHLKRKTDRDDALRLAEVYRLGKFPAVALPEKEVREKRGLIEARQKLVGRRVALQNRVRAILVSQGLPAPRGARAWAAPGLAGIAAYAQPIGECGPLELWRGRLHLALTELGHVKGLLGQAEKKLDDMGKADERMKLLDTIPGVGPRTAEAVVAFLPAPERFRTAKQVSAYGGLVPRQYQSADTDHRGRITKRGPRTLRKLLVECAWVMLRYNRWARSVYERLTHGGRSRKKQAIVAVARKLLVRCWAMLRDGTAWRAEPAGAVAR

SEQ ID NO: 41495 - protein, 352 aa, unidentified
MTVTIVETRVETRAITGGVDTHADVHVAAALDPVGGLLGVQEFPASPAGYAQLLGWLGGFGTVCLVGVEGTGSYGAGLARHIIAAGVRVVEVDRADRQDRRRAGKSDPLDAVSAARAAQSGRAAGAPKGGDGAVEAIRALMVAKRSARAGRTQTNGQARALILTGPDDLRIRFCEHTPARLVAELAALRPRPGAPVGYPTRIALRELGRRAQFLGHQLQRLDELMVPLVTARAPRLLALYGVGADTAAMLLIAAGDHPERLRSEAAWAHLCATAPIPASSGKVTRHRLNPGGDRQANHALWRIVITRMSAHPATRAYVARRTKEGLSKKEIIRCLKRYAAREVYPHLRAPAG

SEQ ID NO: 41496 - protein, 339 aa, unidentified
MTLYCGIDLHAKNSYLAIIDEKRQRIFKRNVANNRQLILSFLAPYKTELAGVVVESTFNWYWLADALMDEGYRVHLANPCAIQQYAGLKYIDDKHDAFWLAELLSLGILKEGYIYPKEERPVRDLLRKRGHLMKLRTSLLVSLQNTMANVCGAKIPTHHVKVKEDRVSAHLCQHESLALMGQVSKASIDALTAQIKTIEAHVEKLYKMEPGYVGLQSLPGVGKILGLTIMLETGPISRFAQVGNYVSYCRKADSTWKSAEKVKGKGNIKNGNRYLSWAFAEAAEHARMFDTASRNFYTRKVRERNGAVAHSALANKLARAAYYIMRDKVPYEEAKLFGK

SEQ ID NO: 41497 - protein, 310 aa, unidentified
MEHIFIGIDVAKDHLDVHVRPSGEAFRIAHDEPGLAALLPRLRALTPHLIVLEATGGYEVPLAAGLASAGLPVAVVNPRQIRDFARATGRRAKTDALDAHVIALFAEAIRPTARPVPDAQAQALGELMARRRQLVDMLGAELNRRRLLRDRRLQRQLDAHIAWLEEALRRLDHDLTTLVRSTPIWREADDLLRSVPGIGPVTACTLIAELPELGHLDRRRIAALAGLAPFARDSGTFRGRRMIAGGRAPVRRVLYMATLAAIKYNPVIRLFHQRLVGAGRPAKVAITAAMRKLLTILNAMLRDRRPWQPA

SEQ ID NO: 41498 - protein, 409 aa, unidentified
MRYYLGVDWADQTHAVWVGDERGTKITARTVPHTAEGMIEWGRELDEWRAQRLELWAAIERPEGRVVDFLLDHGVVVYPVNPKALDRARDRFRQGGAKSDPFDARVLADFLRTDHPRLQALQPSSEAAQELKFLTEDCQRQIRQQTRLVNQLTNTLKAYYPRGLEVAELTTALAREFLQAYPTPAAVAALTERQWQRWARAHRLSEARTQELWAVLQRPQLPVPPHVVRAKARLMHTLLAELELVVAAVGAYRQAVEDFFAALPAAQWIRTLPIGEHGVTAPTLWARLGDAPGRWESFHHLQAHAGAVPVTVKSGKQQVVHFRFACDKALRSVVDQVAFLSLRSSEWARAYYDQQRARGHEHREALRALGAKWLKIIFVLWERQVPYDESYHLATMARQQLRQRPKKLA

SEQ ID NO: 41499 - protein, 337 aa, unidentified
MEYLGIDVHSKYSEVCGVSEAGEITVRRRVATTESGFRGFFGGRECSQVVLESGPVTPWVYRLLVALGHEVTVVNPRRVRLIAESTLKTDKIDAEILARLSRLDLGFLRPVYQRSREAQALRTRLRVRTNLVRARTSMINTVRGTLRAQGYRMGSCTTRRFVARYAEVSLDASLAEALDPLIETLVELTDRIDALEADLVAEARSDELLKRLQTVPGVGPLVSLAFVGWMDSPERFQRSRDVGASLGLRPSLRSSGGREVRGRITREGDSEMRRLLVQAAHSTLRCRQDFTLKRWAERLAERVGKRKALVALARKLGVLLHHLWVTGDSFRPFPQAS

SEQ ID NO: 41500 - protein, 394 aa, unidentified
MILVGIDIGKNKHTFSIINKSSGEILLSPSDFSNNLEGFLFLIQKLNNYTKSELLIGMEDTGHYHFALLKYLLDRRYTVALINPTTTDLTRKLQGGITKNDPLDSLTICDVISSNHRNKPYRVTKLNRFDLYEQKQLTRHHHNLKEELNTYKNRLQKCIDIVFPEFNSLFHSKYGIVYMNILKAFSSAKAIANADIRSIRKCFEFKGQGKRISLSAEQLKLTAKSSIGIPSVAEEIQIRHLVSQIELLKKQISEIDKRIEEFSLKNNSPILTIPGISHFSGTSIISELGDICNYTKASQIIKFAGVAPYHYESSQFTAQHTAITKKGSKYLRKTLYQIILPVISNNEVFHAYYTKKLNEGKGHRCAQGHCIRKLLRVIYHILSTGQPFNPELLV

SEQ ID NO: 41501 - protein, 435 aa, unidentified
MNEIESIRLEEFRQLNKEIRGSKEYLIVGIDVVKDKHTAFFGTATGKTLFKRLIFENTIEGFKKLLIHSEAIKTQHALTKTVFGLETCRRTQVESPTANYHKPLGEFLIKSNHMVVLVSGVAVKRNRELLDGRWDKHDTKDSANVADLMSQGKCLFYEYPSMALRELRSLLSLKRRLKKQEHGLKVRIRNHLLATYFPELDRYFGQSESDSLEIVKWCFNPSSIAGVDYEQFLQLVAPQKKTMCHQNRLKAIWKKASDSIGCDAGESVEFEAKVMIEALEQIRETISNTDAKIKDICLEFPEYRYLLTIPGFGPDVSSKTLGAIGDPFRFKTGKQVLKMAGLDLSAERSGKGSDAARPVLSKKGKAHLRYALYQAAMIASTRNNHFIAYYTNKLRGREREKGIKTKMRVKLAAKLLIIAWTLMKKKEVFYTPQAY

SEQ ID NO: 41502 - protein, 311 aa, unidentified
MNTTLCGIDISKDWLDAHIEPMGAANRFANDAAGIADLAAWCQNHDVELVIMEASGGYERLAFLLLWEMGQPCGMANARSVRYFAEAMGFLEKTDRIDAAVIARYGAVKRLKPTPPPSAAQQRLKALVARLSQVGGDLTIQKQRKSTADAETIASLDEVIALLARQSRRLEGEIATLIDDDPLWACLDRAFRSLKGVASRTVARLMAQLPEIGILSNKAIAKLAGLAPIANDSGKRSGRRPVRGGRAGPRGVLFLVASIVAKYDPHLAAFKQRLQTAGKEKMIIRIALARKLLVILNAKARDARNEFANAT

SEQ ID NO: 41503 - protein, 378 aa, unidentified
MPETPTAMVNTINPSLFVAFELGWKTWKLASTVDLGTKPRISTVRAGDLEAVIEEFKKALKRFDLPEGARIVSCYEAGRDGFWLHRFLIHAGVESIVIDSASIEVSRRSRNRKTDRLDAIKLATMLVRWDLGEKPWAVVQVPTVEGEDCRQIHRELKTLKKDATRHVNRIKGLLAGQGLRIGSIPKDLKKWLEEQRLWDGSRLPSGVAVRILMEHDRLSFVRSQILAVEKERRRMLAEQKTKDAQVAGKLHRLGAIGVNSAWTFSSELFATRHFDNRKQVGSLIGLTSTPFDSGETGREQGIDKAGNKWARHMAVEIAWGWLRFQPRSELSLWYQRRFGGGSKRMRKIGIVALARKLMIALWHWTEHDVLPKGATLKA

SEQ ID NO: 41504 - protein, 422 aa, unidentified
MEDERNWFVGVDWASETHHVRVSDARGRKLGARAFAHSGEGLAAMAAWILEVTGAAPEAVFVAIEVPHGPVVESLMERGFRVHAINPKQLDRFRDRFSLAGAKDDSRDAEVLGDALRTDPRCFRALQPLDPVVVELREASRMAEDLKQERNRLGNRVRDLLWRFYPQILGLTDDVAAPWFLDLWRLIPTPEKATRVREATVDRLLKRHRIRRLSAADVLEALRRPAILLAPGTVSAAVSHLEAIAKRLDLVNRQMLAVDERLDSLTESLAGAQEGAEGQGPEPCDVTILRSLPGVGRIVLATLLAEAFEALQRRDYQALRCLSGVAPVTKRSGKSRLVLMRQAAHVRLRNAVYHWARVAVQHDPRSQAKYGALRARGHGHGRALRSVADRLIGVACAMLEAKTIFDPNLASQRALNLGKPTC

SEQ ID NO: 41505 - protein, 310 aa, unidentified
MEPIFVGIDVAKDRLDVHVQPSGQAFSGSRDDAGLADLVRRRPPLGATRIALEATGGYEVVVAATLAAAPLPVAVINPRQIRDFARATGRLAKTDARDAQAIAGVAAAVRPAARTVADADARLLGELVARRRQLVDMLGAEHNRRRLIEPPALKRRLDAHIRWLERALRELEGDLDTTVRASAIWRATEDLLRSVPGIGPITAYTLIADLPELGRLDRRKIAALVGVAPINRDSGTLRGRRMIAGGRASVRHVLYMATLTAIRHNPVIAAFYRRLVSAGRPGKLALTAAMRKLLVILNAILRDPRPWRPA

SEQ ID NO: 41506 - protein, 355 aa, unidentified
MDNLRYIGLDVHRDTISAAVLNREGQLMMQSVVPTHAPAILDFLKGDMQGSAHAVEEGIHSAWLYDPLQPRVARVLVCDPRKNRLLKLGNKGDLIDARKPAELLRNDALSPVYHGELSSLEVQRRTRSYTMLTEDTTRIMSRVKAVFRGQAVHYHGRSIYRPDHRESYLAQLPTEGLRRRAEILYQELDAVHRLRLRAKREMLAECRKHPAMKWLQSVPFLGKVRTAVLIGRVQTPHRFRTKRQFWSYCGLALETHDSAQYHVLHGQVERKPRFVQVRGLNWNHNHDLKDVFKSAATMAAAREGVFRDYYCGLLAKGTRPEMARLTLARKIAAITLKIWKEGGMFNAEQVKPQAA

SEQ ID NO: 41507 - protein, 338 aa, unidentified
MSIVMGLDQHRGQITGEWLDTDTGEVQRTRVAPADRAAVRNWLSRFGGRELEVALEATTGWRFVVEELLRVGAVVRLAEPAETAGLRGPKKRAKGDRADARHLRELLMIGRLPESWIPPDHILDLRARVRLRHTLSEQRSEWQQRIQATLYHHGCPQRRQLMTGDGREWLAVQPLPAAAREQVTVALAMIDGIEAQIAPIDKELRGYARRQAGCQALMAHYGIGPLVAVTILAELGDCTRFSSSRLAVRYAGMDITVKQSDQHRAPGHLSRQGPPALRWALFEAAQSACRQGSPDLDYYRETAARLGHNRACLSVARKLLKRSYHTLRELGEEALAAA

SEQ ID NO: 41508 - protein, 461 aa, unidentified
MKKIPKRRQPSKLHRASQLSVLQANVADIDIGSREMFVCGPADENEQREMRVFGTTTEQIRECVGWLKRQKVTSVAMESTGVYWIPVLEIMESSGWEVVLVDTRPLARVPGRKTDAEDCQWLQTLPSHGLLQGVYRPGEQISEVRRMVRQKTVLVRQQADLLRRMQQCLDQMNVRIHPAVKPLQGATGMAMLRAIVAGERDPQKLAKLGDAGCQKSASEMVKLLTGHGRSDHLFNLGQLLRQYDFLSEQIAQYEQEIERRLQELTPLERPHLTVPPLANREKRQTMQKRHQEAKRRVRYRMIGADLTAIDGIGVETAEVFVSEYGPDLSKFATEGEFVKHIGLAPHRPVSGGKVLKKRRQEKGTRTAEVLRNAASALKASRSALGAYYRRMARRKDSAIAVFATARKLAQAIFRLLRHGQAYLDIGQAEYERRYEAAHLRALQARAKQSGYALVQLEPATA

SEQ ID NO: 41509 - protein, 309 aa, unidentified
MSLTLVGIDVAKATLAVCVLPHKLHLTLPNTSAGHAQLLAHLKGHSVDNLLLEATGGYERALMRVLSKAGLPVTRINPRRARAFAEALGKIAKTDPIDAQVLAHMAGVVKAPCQAVEPEREALRAWVQRREQLVQQRDDERRRLKQAELAGLRKDLLDNIKQLGQRILKIDKVIAQAQGQLDDALGRSLMAVAGIGQVTAASLLAYLPELGRLTRKQIAALAGLAPYNVDSGKHAGKRRIRGGRAPIRRVLYMACLSVIRKQPDFKTRYEALRQRGKCAKVAITACMRVLLTRLNAMARDQTEWRMTGA

SEQ ID NO: 41510 - protein, 392 aa, unidentified
MDSPPPRHHSATVAFKEANGSEGETMKKHSSKHDPLSSTDVELCTTLCVDLAKQVFQLAGEDATGRVIYENRIKSRQNFHDFLIKLPVTVTVLMECGPGAQAWARLLQAKGNPVRILPAQRVAEHRSGAKNDRNDAHAILRAGRDTSIASIPIKSTTALAIQALHRVRRGNIKRHTALGNQIRGLLLEHGVSMPQGDAAINSHVPRALEDASLPLPDLLRELLDELLTDWLSLGERIATLSRRLEATAQEDKVAQRLITIRGVGPIIATAIVAKQTEPSRFASGRMYAAFFGIVPDQHSSGNKIRLGRMSKRGDGYIRSLMIQGAHAVLSQLRPDSDQPDDHRLLRWLSRLGRKEAAIRLANRNLRIIWALLQSDQVYQRKPNSNSEAAMSL

SEQ ID NO: 41511 - protein, 329 aa, unidentified
MTVTNQFAAHVGLDWADKKHDVCVQFKNGERVFDVIEHTAEALDAWLTELHQKVKGRIAIALELKKGPVVYALQKYPFITVFPVHALSLARYRQAFSPSGAKDDPQDAELALELMLRYPQKIKAIEPDNADIRLLQQLVEQRRQLVEDKRRFVNRIINTLKQYYPQPLEWFSHRGSLLLCELIIRWPSLQQLKRARRDTIRNFLNAKGGRAMALTEQRVASIDNAIPLTTDPSVIEANALMAAALATQIKVVSEIIKTYDKRIETLFDTLPDAGLFKSLPGMGPCMGPRMLAALGDNRDRFNSAEEIQNYAGIAPVTERSGQKSWVHWR

SEQ ID NO: 41512 - protein, 482 aa, unidentified
MKKRNIYQNQSQELLHLFEEAGSSEKVMCVPLDYAKNDHLVMFCNGHGDILRKPFSVKNTPEGIAYIDDQVTRSCRRRGIKKKHVFFGGEDANSFAKNFVSTLRCKGFLVANVNAHDAKKQRGNLQASTDRIDLMGIATMLLNCRANCCPAQSGIYRNLRTLVRHRRKLVQMLTEVKNRVHGIVDELFPGFLNEKNSGIISFTQSSLYLMEDRFSPKQIRRRRRQKLIEILKRFGTSKAEKTAVKLQQYAAKVLHAPVEYVDTMQVSLAQHVKHIRCLKESVAQMDKEIALNLAKTQGAFLTSVRGIGLVLAAGVTAEIGDLNEQKPLNNLASYSGIVPRVKQTGGTDGKTYTGPVAKRCNRILKDYVVKSAYHLGLHGPQDLMADYKRRDVSGQHADFGMGRRYLRMAINLMRTSQVYLPPNLRKGDFTLEERAGYYLMSWPYLREKWKKVGALEAAFANNRPLGQWRQIVQELYDIKLKL

SEQ ID NO: 41513 - protein, 382 aa, unidentified
MDRVAVVGMDLHRDFSKAVVMAPDGKVLKVRTVYHDGQEEMADFFGGFEPGTEVVMEAGFNWPWIADMAEKAGLRPHLGHALRCREMAKGMSKNDKKDATFLARLWLAGDIFPEAYLAPQSVRARRSRFRTRALLVKIKSELKNSMHGLLIKNGVKREGISDLYGRKGRKWLAGLELSPQAREELDIKLAVADDVDKHITSLEKKLWAELPTDPYASLLQTIPGVGRLTAYGFLAEIGEVGRFPDRRALASYAGLLPMDNESAGEEHGKHTNRRCAKFLKLMAIEAVRGAVRTSRRMRSLFERVRAKNPDRPGKAMVAVAREIMEVVHIVLSRGVPYEEAPVRPGSRKGIATGHSEDRRTNNPHRASQIRCSADLTGGQAAT

SEQ ID NO: 41514 - protein, 349 aa, unidentified
MTIVGCDLHTRKQQVAVLHTDTGEVVEQELLHAGDAVEQFYRTLPRPVTVGIESTGYALWFHELMQHLGHTLLVGEAAKIRAMVVRKTKTDRRDAQHLLDLLKHDRFPAVWIPDPATRDLRALVTHRMRLVRMRTMVKNGLHAIAMNRRLTLGPSLWSQRGLAQLQGLALAPHTTQRRDESLQLLTWLTARIAALDDRVAAAAQADPGARLLLTHPGVGPLTALTTVLVLGPVSRFPDSKHVVSYTGLAPAVHASADTCRLGQITKQGSPLLRFVLGQAGLIAAHAEVDLTRHYRTLLRRRGRPKAIVAIARKLLVRLYIMLRDQIDYEEFRRRGRTPRRQEVPPPALA

SEQ ID NO: 41515 - protein, 342 aa, unidentified
MEKVSIIGLDLAKRSFQAHGARAEGGVAFRKKLSREKVLTFLAEQPRCIVAMEACGSAHHWGRTIRDLGHEVRLIPPAYVKPFVKRQKNDAADAEAIVEAASRPTMRFVAVKTEEQQARAMLFRTRDLLVRQRTQLINALRGHLSEHGVVAAQGPTNVKVLEEAVEDQGTSLPLLVVELARVFLDQIEGLSKRISGLEKVTAHEAACGETTRRLQTMPGVGPITALAIETFAPPMDVFKCGRDFAAWLGLVPRQHSTGGKQVLGKVSKMGQRDIRRLLIIGAMAVVRSALRKGSPEGSWLQRMLARKPRMLVAIALANKMARSIWAMLAKAEDYRVPVAAAA

SEQ ID NO: 41516 - protein, 520 aa, unidentified
MVTARFSRRRRKRELLQKPRGQFTSRVHAVQPEHFGIVSVDCAKARSKFLLADFYGQVLIAPTWVDHTQSSLLAATQHIRQAMSQHDLRDLLVAIERTGEYHRPVQRAFRAAGWDTRLVHPYASKQFRQPADPGNKTDDTDLGGIFRAAVNGFGLLELPWPADYQQLQLLIRHRRDLVGKTTTLCNQIRERLHAAMPGYAECVENLWRCPVALLIARHTGCAAAVRQLGYPGLRQLAEQGERRCHMTTLTKILAWAETAEAGHPQSDFLRRMLMALDDDRLEKTRQICALERTGANLLAHTPYLLLLAIPGINVVSAADLAGELGPLLHYANANAITGRAGLVPSRYQSDDVDRANGPLRRCAHRRLRAVLLQIADNLVACNHYFSVRAGRWALAGKDPRWVRVKIAKIFSRIAYAMVAGRQLFPHPCCQPRHYILDKLLAFHREHQTPMDQVLLDLQAATEQLPRSAYRDEAAPLSQRLQALQASRRGPQPLGDILPIVLARLGIDAIQSNTVRDQDPG

SEQ ID NO: 41517 - protein, 425 aa, unidentified
MRFVGLDVHRDFCEVAIAEDGLVRSAGRVASSEEMLEVFAGSLGPDDVVAMEATANALAIARILEPFVARVVLANPKAVKAATGLRAKTDKIDARVLAQLLAAGFLAEVWTPDEQTRVRRRLISRRAHLVRQQVREKNQVHAVLQRQLKDRPPMTDLFGVKGRVWLAAQCAALPVDERQSVDACLRQIDFIKSEVELVDVEIAKQVMASPDIRRLMTLPGVSGVTATALLAAIGDVSRFPTPRHLVGYLGLSPRVHQSGSEPAKHGRISKQGPGEVRGLLVEAAWHAARTTGPLRAFHQRVKARRGANIATVAVARKLVVVAWNMLRRSEEYAFARPSLHREKLRRFELMLGASRQQGKRLATAGRTFATIDQRNAEKALADQAETAYQRLMADWQPVKKKEGASVTTGRASQKPSKGKAARQTQ

SEQ ID NO: 41518 - protein, 400 aa, unidentified
MKLKELSGGIDIGSEFHHVVVIGESGKVLYDKQVLHRFSEFHSAVRELKETERRTGGKIAFGLEGKNGYGAPFDRILGENGFSLYNIDNLKLKQFRNTFGAEWKTDRRDARMLAKLMSLKAQLNGERDKVFIPIEKTSLTNEKLKILSRHQQTLIDEKKRICNRLRKKLLEICPGILDIFGEVEAKSLLRILIRYPNFSRYKKLTEGKLLRMKRIGKVIAGKIINQLQGLEYVRELALVYATIIQSQAKRILELKEEIELLDKELDKLGEGSKEVQRLRSIPGVATKLSSRLAGEIGDIRRFKDSNKLAVYFGVGCINNDSGKRKMAKAVFKANKICKSTMIELAGCTIRSISESKRYYNKKRSEGKKHNHALRCLARQMTKVIFKLLIEDRDYYVKDES

SEQ ID NO: 41519 - protein, 369 aa, unidentified
MSKSIRFIGMDVHKNSISIAIAEEGRKGEVRNYGTIDNNMTALEKVIRKLLSDNVELLFAYEAGPCGYEIYRYLTGNGFHCEVVAPSMIPKKSGDRIKNDRRDAQMLARLYRAGELTPVYVPHIEDEAMRDLTRAREDARDCQRKAKQRLNAFLLRHGFNYSGQSKWSQAHFRWISDIKMEHPAQQITLQEYIDSLHECSQRVKRLTQQIQLLLPSWRLFPVAKALQALRGVSLIVAATTVAELGDLRRFKNPRSLMAYLGLVPSEHSSGETTRRGSITKTGNNHVRRLLVEAAWSYRHPARISRHLLKRQQGLPPSVREISWKAQLRLCSRYRRMFAGNKKKQLIVTAIARELSAFMWAIAGEVPVEI

SEQ ID NO: 41520 - protein, 327 aa, unidentified
MPVMIGVDPHKTSHTVAALDDHGQLLGQQCIPASLDGYRQLRQWAGRWPQRCWAVEGAHGIGRALAQRLVDGEQVLDVPAKLAARVRVLSVGHGRKSDPDDAVSVAVAARNAPSLRQVAVEDQAVVLHLLTKRRQDLVAARTQTINRLHRLLMDLIPGGARRNLTARRAAGLLAAVTPVGRPAVIRWQLATELVADIRQLDQQIAAVEARIKAAVAQANTSLVELFGVGPVLAARFLGEVGDIGRFPTKHHFAAHTGTAPLEASSGQVIRHRLSRAGDRKLHHALYMMAMVQVRRPSAGQAYYQRKLAEGKAPKEALRCFIGRVSVV

SEQ ID NO: 41521 - protein, 393 aa, unidentified
MRISVGTDVAKETHWVVALTEPGEVLVDHAVDNDPAAIEALIAELGALPGECTIGLDVLGGIATLLSAMLLAAGQRVVHVPGLAVNRARQGTTGGETKSDPRDARVIAEQVRSRRDLRSIAVEEEPLAELQLLVGRRRDLVAEQTRRLARLHDLLSRIHPGLERALDLTNKSGLCLLTRYVTPAEIRHAGRARLARHLRASGARHVEAIATAALEAAQRQQIALPGERVAADLVRELAREALAVRERLGEIDAELAQVLAVHPDSTLIRSLPGMGVILTAEFIAEVGIRDRFADADAPAAAAGLAPVLRQSGKVRFLRRPLGGDKRLKRVFYQAAFCSLSCPASRAFYARKRREGKRHHQALLALARRRVNVLWAMLRDRRPYELQEPRCGAA

SEQ ID NO: 41522 - protein, 461 aa, unidentified
MGKSQKKSSSKGSKKKSLDSLKPINLNAAGIDIGADSHWVSVPADRDGQNVREFRCYTPDLSAKADWLQQCKVETIVMESTGVYWIPVFQILETKGFEVLLVNSHHVKTVPGRKSDVLDCQWLQQLHSYGLLAGSFRPRDEICILRSYIRHRDNLIRSAGTHVQRMQKALTQMNLQLHRVISDITGKTGLKIIRAMLAGERNPQKLASLRDGRIRKTAEEIAGALTGDYRGEHLFVLQQELQLYEIYQQQIAQCDQEIEAYLTSLDSQMEAEETDSGTKPPKKKKCCGNEPAFDLKSHLHRISGVDFTRIDGLGVLTVQTILSEVGLDPSRFPTVKHFTSWLGLCPGSRVSGGKVKSSQTRHVVNRAANAFRLAANALSRSQTALGAFFRRLRARLGAPKAITATAHKLARIFYCLWTSGGEYNDPGIDAYQQQYQQRVLKNLQRKADQLGFELVPLSDES

SEQ ID NO: 41523 - protein, 354 aa, unidentified
MSPLISRIATVGIDIGKNSFHVVGQDERGAIMLRQKWSRGQVEARLANLPPCLVGMEACTGAHHLSRKLQALGHDARLMPAKYVRPYSKGQKNDFRDAEAIAEAVQRPTMKFVATKTTEQLDLQALHRVRERLVCQRTGIINQIRAFLLERSIAVRQGLRFLQAELPTILGTRSDALSPRMLRLIEDLAGDWRRLDARIEAISGEIEELARKDQACERLMTVPGIGPIISSAMVAAIGTGDAFAKGRDFGAWLGLVPKQISTGDRTILGGISKRGNRYLRALFVQAAWVVLVKLGKKWERYGLRSWIEAAKKRLHHNVLAIALANKLARIAWAVLYQGRAFEYVKTDATASRSA

SEQ ID NO: 41524 - protein, 334 aa, unidentified
MLYAAIDIHKRTFQAVVLDVVTGEMSERRFGATREELNDWAMPLQGTLAAVAIEATNGWRWVWRELSALGFDVRLVDPAQAKALRGRIKRAKTDRLDARWLCVLLAKEMLPESWLPPAEIQTLRDQTRLRKALAEDRTRWAQRLHALLTHEGWPCQRARLLTVEGRRWVQSLSLSPAARAQVDRLLRVIEAVEGELRALETELRRFARADRRCLALQTIYGVGPILACHLLAELGEAARFRRARQAVRAAGLDPVVDESGDTRRRGHLAKHGAPVLRWALVEAAQHAQRANSPDRALYTQAATRVGSKRAVLTVARKIGRRAYHVLHELEAQAA

SEQ ID NO: 41525 - protein, 370 aa, unidentified
MAKRSSKVSEQVIEKSTSRFIGIDIGDRKSDFCVMNEHGTILEEGKVPSRVDEFGEAFARFKGAKALIEVGTHARWMKVSLENAGLECTVCDAKAANLVNQHGRKTDARDARMLAELLRTNSALIKRIEFRSDDAQLAMTILQCRGALVEARAKLVNCVTSRVKPFGIRLKKTSTDAFGRTYKDLPSELKAVMNQTYMAIAALTEAIDQYETKIHRIAAKLPAVEQVTQVPGVGDIIGLAFVLTIFNPNRFKSVRDVAAYLGLVPHERSSGDSHPQMRISKQGNGFTRKLMVQAAHYLLGPLNANRDSDLRRFGLRIAGERGGSTGKKKAVIAVARKLACLLLTLWKTGQKYEPLRNAKAVEAAAAAARA

SEQ ID NO: 41526 - protein, 469 aa, unidentified
MSKLSKRNRTRSSRGEARPFEGMRTVNPHAAGVDIGAHEIMACIPAGDDQQIVRAFGTYTTDLESLADWFVDHGIQTAAMESTGVYWIPLFETLEARGIQGCLISAQAIKHVPGRKSDVLDCQWIQTLHSYGLLSASFRPDADFVALRTLLRHRAQLIEHRAPHVLHMQKALLQMNIQLSQALSDVTGATGQRIIRAIVAGERDPQTLAALRNYRCKKDADEIAMALTGTWREEHLFVLTQALALFDFYTAQISACDAQIERTFSVIMPRFEPAPHDLASHEPAPTEATTPRRKPHSHSKNAPEVNTRAHILRITGVDLVAVHGISDSMAQTILAEIGTDMHKWPDDKHFGSWLGLAPKNDISGGKVLKSRTMKNRNRAAQAFRMAAQSVIRADCAFGAFYRRLKGRLGPAQALVATAHKIARTVYHMLKQHVPYHDIGAAEYNQRFREREMHYLQKKAAKLGYKLSPA

SEQ ID NO: 41527 - protein, 340 aa, unidentified
MSQSVKYVGLDVHRDTISVAVAEDGKRSEVREHGEISNTPAALTKLLGKLGGSGVALHVCYEAGPCGYGIQRQVTAAGHDCAVVAPSLIPRRPGDRIKTDRRDAVKLARLHRAGELTAVWVPDSAHEAMRDLVRARLAAVRSLRHARQQLSGFLLRHGHHYHRPAWTQMHRRWLSGLRFAEEAHHIVLEDCIATIDAAKERRDRLTVQIEKRLAYWTLAPVVEALQALRGMALVAAATIVAELGDISRFSKAEQLMSYLGLVPSEDSSGKRRRQGGITKAGNGAARRMLIEAAWSYRFPARISREQLLRQEQLAAPIRAIAWKAQERLCLQYRRAMSESW

SEQ ID NO: 41528 - protein, 370 aa, unidentified
MRKHSTETVWVGMDVHQDSVTCAILFGDDNEPQVERLPGDLNAVRRMFRRLSERGTPRSCYEASGAGYVLQRSLEHDGFHCEVIAPSLVPKKPGDRRKTDRLDAIHLANHYRAGNLTPVAVPSQEQEEIRQLVRSRLAVQSHVVRLKHRIVRVLATHGHRFTAGKSNWTQKHRVWLRRLHHELDGPLGTVLGHHLEHLEYLEAQKHSLEAEIDRYARSDPFRAKVETLCCFRGIKTLTAMTILTELGDIRRFARPTGLMAFAGLIPSERSSGNVRRRGSITKSGSQELRRVLVEAAWHYRKRAGADLILKRRRMGQNPQVVSIAIKAQHRLKKTFWKIAARKHSCTAVTATARELCGFIWSALVVEAQEA

SEQ ID NO: 41529 - protein, 337 aa, unidentified
MKFSGIDLHSNNSVVVVSDEEDRIVYRKRLPNNLEQIRAALAPYRDELAGVVVESTYNWYFLVDGLMDAGYRVHLANTTAIKKYEGLKYSGDFADAAYLAQLLRLGLLPEGYIYPREERAGRDLGRKRMQLVRCQTMQILAIENILARQTGGRMSGERVKRLTAEQIEELGFMPDVALAVEANRAVSETLQRQIAVLEKRLQQRVKLRPEYFLLKTVPGIGETLATTIMLETGTITRFASVGNFSSYCRCVDSRHESNGKKKGEGNVKNGNKYLAWAFVEAANFALRYCPEAKRFYERKKRRSNRIVALKATAHKLARACYHMLREQKPFDVQRCFV

SEQ ID NO: 41530 - protein, 362 aa, unidentified
MQTQVNRLDFTGQNIYTGIDVHKKDWRVSIYSKELYHKSFNQPPKPEVLYRYLNKHFPNGTYYSVYEAGYCGFWIHNQLQSLGINSIVVNPADVPTTDKEKKQKSDPIDSNKLARQLRNGDLEAIYIHNRDMLEDRSLIRTRCTLVKEITRYKNRIKAKLAFFGIEIPEGYNRNWGYWSNRFIEWLSELKFNQESGDESMKILVNHVKYLRKDLLEVNKKVRALSRNEYYNKRINLLLSIRGIGLITAMVILTEIDDIHRFSNQEKLISYVGLTPTSHSTGDKQVHGEMVNRGNKFLKKSIIEAAWIAARVDPVLHMKYLGYCRRMKANKAIVRIAQKLLNRVSFVLKNEVPFNDDIEKYPI

SEQ ID NO: 41531 - protein, 411 aa, unidentified
MQDKFQWYVGIDWATEKYDVCVLDASGREIAKRVIEHSGSGIAELLDWLTELAGRKPEAVAIAIETPRGAMVEGLVERNFAVFAINPKQLDRFRDRYTVAGAKDDSLDAFVLGDSLRTDQPCFHRVQLDDAQRIRLRELSRIEDDFQSQSNRLSNQLWEQLHRYYPQMLSLSSAANEAWMWDLLELAPQPSEVGSLKLAVVKRLLRSYRIRRLSAEQVLSILQRPALRLAPGAAEAAGEHALLLLPLLRSVHEQQQQVSRRIRRLLEQLSRPATEHSDAAILLSLPGVGQSVGATMLAEASQPLAERDYHALRCYAGIAPVTRKSGKRKVVLMRYGCNQRLRNALYYWSLASIQNDQWARAYYAELRARGHSHGTALRMLGDRWLAVLVAMLKTRTLYDPGRRLQPQAQAS

SEQ ID NO: 41532 - protein, 345 aa, unidentified
MKIVGCDLHTRYQQIAMLDTETGELIERRLEHANGEARAFYAGLQGPVRVGIEATGHTRWFERLLAELGHELWIGDAAQIRAAMVRKQKTDARDAAHLLQLLVEERFPRIWRPTMAERDLRQLVWHRQKLVWMRNAVGNQLHALAMGEGVCRKKQLWTKKGRAELQALNLGAWASYRRQELLEMVDQLDGSLEKLDRAVEEQSQQNEAAVLLRTHPGVGPVTSLAFVLTLGPVERFKRSKQVVSYLGLNPREHSSGGKQRLGGISKQGNPMMRSLLVEAGHSAARLDAELHKDYQRLKLRRGSGVAKVAIARKLAVRMYWMLRQQANYAQLVRMQGSPWATLVEK

SEQ ID NO: 41533 - protein, 334 aa, unidentified
MQNVALIGIDLGKHFFHIHCQDKSGNALLRKKFTRTKLMQFLVTCPSSVVVMEACAGAHFMARRISDIGHDVKLISPQFVRPFVKSNKNDFIDAEAICEAASRPSMRFVQPRTETQQAMRALHRVRESLIRDKVKTTNQIHGFLLEFGISLPTGDAVIKRLSLVLAEHEIPEYLSRLLMKLHAHYLYLIEQITELESELNQSIKADATAQRIMTIPGVGPITASLLSSQLGDGKQFSCSRDFAASTGLVPRQYSTGGKSTLLGISKRGDKNLRRLLVQCARSFMMRLEHQQGRLAEWVRKQLDNKHSNIVACALANKLARIAWAITVLQKEYQA

SEQ ID NO: 41534 - protein, 340 aa, unidentified
MVHVGIDLDKHSSQIAILTEDGEVVQQRLANDVTRLEEFFGDLPPHTPVAIEASGTWWWLVDLLERLGHDPILSHPKQTKAIAAARLKNDRVDAERLALLLRGDLLPTVWIPPAALREARELVRHRIQLVWVRGVIRNRLQAMLARRNLKPASGQSWLTQRGQRELHRLPLPAAAGRIREDCTAVLPMLDAQIRRLDAELLARWGQDPRVQRLTTIPGVGPFIAIVLILELGDITRFATAKQVASYVGLTPRVRASAGRVHAGHISKEGNRLLRWVLVLAATQASRRPGPLRTWFHAVKKRRGKKVARVALARRLAEIVFHVWKHECDYFTVVRRDVVRG

SEQ ID NO: 41535 - protein, 428 aa, unidentified
MDYTQNAKIAQVTEKSLIIGVDIGSESHYARAFNWRGQEYGKKVFHFNDDVEGYKAFKGWVEAHKARTGAETVIVGFEPTGHYWFSFGRYVKQMGMMLVLVNPYHVKQIKELDDNSPKKTDFKDPKTIAKLVVDGRYSIPYIPEGVYAELRQAVSSRDRIIKEQNALTNRIKRWLKIYFPEYLKVYTKFSAESGLLLLEKAPLPAEIVELGVDGVTQIWREQKLRAVGKKRAETLVEAAKNSVGIDGGACAKLELQLLLSDFRTKQAQLEQVEAVIEAEVLKVPHVEKLLAIKGIGLITVAGFLSEVGEIGRFDSPKQIQKLAGLELKENSSGKHKGQTSISKRGRKKLRKILFQAVLPLIRSNAEFSDVYRYYTTRQKNPLKGKQAVIAVGCKLIRIFYTLLTKGVDYDASRMRLDIIRPADGEQVA

SEQ ID NO: 41536 - protein, 368 aa, unidentified
MKMNAIKAAPAASAIALKNEKSAKAKRILIGTDVHLRGYQAARKIDNGVIGVVENLRSEEALLLHVEKQCERADQVVVVYEAGPLGYTLYRKLTARGVLCYVCAPDSSEQKRKRRKNNKIDARNLTSKLFNYLNGDQGALQLARVPTEAQEQLRLASREHDQMVEERKRLGAKGNALLLSQGFGSWSNWWRPKAWAQLSSLVPQWLLEKLKIWVDVLKMLDEKICQAKVALARACSGPRPKGVGALSQMQLQSEVLNWSLYTNRRKIACLAGMVPSEWSTGDKERRGSITKVGVPAIRRIIVEMVWRMILFQPQYKPVQKWQKVLQGTNPALKKKAVVAIGRQLIVDLWRLQTGRVTAQELNLVMVGA

SEQ ID NO: 41537 - protein, 350 aa, unidentified
MSTVTRFFVGVDLHKTIVQICVVAGDGSPVCERRFLVRSLSDSGGVFSFLEPYRETGRVAVEALGLNRWFVNMAKEQGFDIVVCDPLKLHLKMLGRKTDRRDAQEIARRLQLGDIDRNATTWYADDETYGRRKVLRARHAQMEQRQQVLNQIRALLNSYKITGFTGDLTRKKMISRLSALELATEELTIVLQSWVSQLISLGESISLLNQELKSMDRGGLAEHLQRHLDHVGPVTASVLVHELGDVRRFTSSRAVAAYAGLVPRVSQSADTAHHGRLTKRGNRELRHVLGEWAVRLLSSDPRVQAWAKPRLKRSHKNKVRMALARRLLIGVYKMLLTGEMFQMERCLGQA

SEQ ID NO: 41538 - protein, 361 aa, unidentified
MLVLVERRRPMGKVYIGIDLAAKYCWGATRDRQGELRSVERFKTSEENLIAYVKNQEGEATVLLEECDMAGWAQRILIPHVEVVAVCEPRANLYIHRDAVKTDKIDAKKLAEIAWMGNWRPVYHTADESIYHLHLAVKAYDRLVRRTTGLKNQIKAKLRGEGIITEGARVFGKRGRQEALALVPSPALREIIASDYELLDFLLKEQAKAKGRFVRLGKEIPIVRAFQEIPGVGPVGAAKFCAYVKCPHRFSDQRKLWRYSRLGITACETGGKSIRRQHLDRAGNGCLKDVSRKAFQAAMRTRGDNLVKRAYARALANTGSEVHARLTVQRKILAIMWAMWRCGTPYDDNHDLNTRGLKARL

SEQ ID NO: 41539 - protein, 430 aa, unidentified
MARLSIGTTVDLRCDALYHICVEVAMDLIPICRSAVGMDVHLNMIEVCAIVEDASGEAQVHRRRFGGFRRDRLEMAQWIAGFAPETVVMESTGIFWKSPYAYLERLGIRALVVNAQHVKTVPGRKTDVGDAEWLAMLARAGLLRGSFIPPEPLRNLRQLSRHHQRVTAMLAAEKNRLVRVLGDAGIRLTAVVSDPHGVAARAMIDCLLDGGTPQQALAHAGRLRAPREELAAALEGEPSEEHLFVARMIRRHIDALEADLAELARALIARLEPYQAALDILLTLPGVDLLAAAKLLVEIGEDMSAFGSAEKLAKWAGICPGNRESAGKRKSGKTAKGNRYLRALLCEIAWSAARTASQFKSRYQALAIRRGAKRAIIAIAHKLLKIVYVLLARRVPYRDSTVDYEALAVKRKAPRWIRQLKKFGLLPQTA

SEQ ID NO: 41540 - protein, 343 aa, unidentified
MKIMRVGVDLAKNVFHVHGVDRSEKPVWERRLSREKWLGAVLEKVEPGCEVGMEACAGAHHWARELQSRGYTVKLMAPQFVKPYVKSNKNDMNDAQAVCEAMSRPSMRFVPVKSVVQQDIQAIHRIRTELVSQRTAKGNQIRGLVAEYGLVAPQQLTRLRRAIPLWLEDAENGLSMRLRRLLDGLRGDLVVLDQRIGELDAEIEAIAKSDPVAKRLQQLRGVGPLTATALVATVGNGEQFTKGRHLAVSLGLTPKQHSTGGKERLLGISKRGDPYLRKLLVHGGRAALYAARNKDDPLSQWAKNIAARSHPNVAAVAWANKTARIAWVMIRHGCDYQPERATN

SEQ ID NO: 41541 - protein, 419 aa, unidentified
MSFKILKFNCCGLDVHKTWIYACIGITDSNNRTEYKQARFSSFTKGLNELCDWLAKYNCKDVCMESTGKYWIPVFNILEQHEIWVTLSHPKYTKPMKGNKTDRKDAKWICDLYMCGMVKPSFIPPADIRALRDLVRYRFKLTCMITSEKNRAQNCLTVSNLKLDDVFSDVFGKSSRSITEQILQHPGEKFDVSPFVDGRCKTPIEEIQAAVDGAISKEQAVKLRQCLDHIDELQKHISEVEREILRLSDKYEAALNLIRTVPGFDKNPMTAIQVLSEIGGNMSVFPTAKHLVSWAGCCPSNDKSDRKIKSTRISRAGSYFKPVLVQVANALIKSKKHPEFTTRYKRIKTRRGHKKAIIAICRMILTAIWHILTDLTPYTPEGFLESHPVNKEKVLTISQALNLLKQRGYLIKNDPSPVS

SEQ ID NO: 41542 - protein, 408 aa, unidentified
MNSQPIHLHVRAGGRAIVGIDIGKQHHAAVAISSCGERIASIASFQNTREGVDLLQTRILEPAGTPPQVLFAMEATGHYWMPLYHELVRRGYQGVVLNPIQTNGEARTRIRKTKTDKRDAEGIARFILTGKAQAARIPDEATLELRILTRRLLQLLQMKGNAERAAQSLSDRIFPEYANCMSKPFIPSGRTLIREIGLIPARITEQPDAVRDTLRRASRGKLSVATIDGLLEKAAESIGIGYAETVINEELNSSMELIENIEEQICSLDTLIADLMENRDSPLPSLGIGISLAAAIHAESDPASDFPSARQYAAYAGLEPTTFQSGQMEGTRAHISKRGSPHLRRALYLAAFGCYRRHEHFARIYNRFRKKGHSHNSALIVVARHLALVIWRLLVENRSFMKRPPKKK

SEQ ID NO: 41543 - protein, 416 aa, unidentified
MKKHNNSGKKSEPTSKRTKSRGPVQRDTKEVLAELVGKLKEKLDPTKVAATSAGEKHQRGELRPNLDRLTVGVDLGDQWSHYCILGLEGETLAEGQLRTTQEDLATFFQGLNGARVVVEVGTHSAWVQEVIRGCGHEVLVANPRLMDGSKRRKRKNDRIDANKLARLGRVDPESLYPIQHRSREVRQDLVMLRARDALVAARTEIINTTRGLVKSMGTRLPKCSSRSFAQKGEEAVAVEMREALLPLVRLAATLSADIKEYDKKIETLGQEKYGHTALLRQVKGVGPITALAYVLTLENPQRFAKSRDVGPYLGLVPKQEDSGESQPQLGISKAGDTMVRKLLVGSAQYILGPFGPDTDLRRYGLRLCERGGKNAKKRAAVAVARKLAVLLHRLWVSGEVYEPLHYAMSAPIAAAA

SEQ ID NO: 41544 - protein, 347 aa, unidentified
MSEYIGIDLHKAKSFVTRVDRHGRVLEQVELRHAAGELQRYVEKIPGDTRIVVEATGNWMWLYELIEDRHPDLVLAHPLKTKAIASARIKTDKIDATTLAHLLRADLVPAAYIPPRAVRDTREILRYRASLVRLRTQVKNKIAAILSKNGIVTPTKTAFGVKSRQFLATVAMRPCYRLALDGYLRQLAHLTDEITQAAQTIEAQAQADPQAQLLCTMPGIGAYSALLILSEIGNVHRFPDSRHLCSYAGLVPSVHASGGKTRLGRLTKQGSTWLRWILIELSMHAIKGAPQFRQLYHRVARKHGRNAGRTAVARAMLKTIYAMLKHQEAFRPIEQGSTGQRLGAMAG

SEQ ID NO: 41545 - protein, 340 aa, unidentified
MRQLYAGCDLHGNNNLIGIIDGEGKRVFKKNLSNDLPLIRDALKPFQRELVGIVVESTYNWYWLVDGLMEEGYRVHLANPSAIQQYSGLKHGDDKHDAFWLAEMLRLGILPEGYIYPKGERPLRDLLRKRGHLVRLRTSLVISLQNILSRNQGVRMLVNDVKRLKEDRISPLLEGNEDLAMAGRVSKEAIDFLTRRIRKIEGVVEKKAALKEAYRYLLTLPGVGKILALTIMLETGPIFRFEQVGDYVSYCRKVPSQRMSNGKRKGAGNKKNGNKYLAWAYSEAADYSRRFYPEPRAYYNRKMQKTNSVVAHSALAHKLARAGYYVMRDQVPFRPEKLFG

SEQ ID NO: 41546 - protein, 317 aa, unidentified
MRASAAFFVGIDVSKQQLDIAVRPSGESWTVAHEEASLSALVARLRGLAPTLIVLEATGGWEVPVTGALAAAALPVAVVNPRQVRDFARSTGLLAKTDRLDAQLLAQFAEVVRPAPRPLPDAQAQELTALLQRRRQLVEMLTAEKNRLPLAARRIRPQLQAHIAWLHQQIAQFDEDLRQLIRSSPLWREKDDLLRSTPGVGPVLATTLVAALPELGTLSRRQIAALVGVAPLNRDSGTLRGRRTVWGGRAQVRAVLYMSTVVAVRHNPVLIAFYQRLRAAGKAPKLALTACMRKLLTILNAMLKHHRRWAPVRAQHA

SEQ ID NO: 41547 - protein, 339 aa, unidentified
MNEVTLIGIDLGKHSFHLHAQDAAGRMVFRKKLSRQQLLRTLAKVPSCRVVMEACAGSHWLARQLAGMGHEPRLISPQLVRPFVVGNKNDFGDAQAICEAACRPSMRFVSPRNETQQTVSAMHRLRERLVRERTATVNQIHGFLLEFGISLPRGAALMSRLPTVLDHETLPPRLVGLVVRLHAQVHYLEEQIRQVVQDLKASLREDDKSRRLLEIPGIGPITASALAVELGDARQFANARQFAASIGLVPRQYSTGGKPTLLGISKRGDRNLRRLLVQCARAVMQHTASRTDALSLWVKTLSTRRHSNVVACALANKLARIAWAILARGTHYQARALTT

SEQ ID NO: 41548 - protein, 453 aa, unidentified
MAKKAKKLHTSKGIELKIVNPNAAGIDIADTEMQVCVPAGRDGENNRRFGSFTRDLNEISEWLKACGIDTVAMEATGIYWIPLFFKLQQDGFDVQLCNAREVKNISEKKTDEADAEWLMLLHSYGLLKPSFQPENTARQVRNLARHRSNLLRSAGKEVQHMQKAMEQMNIKLTNVLSDIVGVSGQRIITSILTGERNAEALSQLADGRCKRSKEEIALSLEGTWDTDHMFELKQSYELYKVYQEKVAECDREIEAMLKGFIAKIDTDMAKLIRCDKTICKKNAVGFDVESYAYGLWGVNTMSISGMSAGSVLQLIGELGTDFVKKFDSPAKFCKWCNLVPNNKISGGKLISSRVPKRKNPVGQVFRQCANTVSKSKNPMGFYFRRIKSRGGHMAAIVATAHKIAEIFFIMVRDKVAYDEGRVGLDEETLLKRKIERTQRALDALNAKLYATAS

SEQ ID NO: 41549 - protein, 403 aa, unidentified
MWEAPVKIQRTSVGLDVHARSVLGCALDGDTGEVFQRRLCPDHGEIVAWLGDLPGPVAVTYEAGPTGFGLARALTAAGIFCEVAAPSKLIRPAGDRVKTDARDAAHLARLLHLGQITAVTVPPASQEAARDVVRAREDCREDLMTARHRVSKLLLRQGIIYSGGKPWTGRHEVWLRAQRFDNPALQLSYEAAFDAMLACVDRRARLDDAITKLAADSEFTPVVHRLGCIRGIATLTAFGLAVEIGDWHRLTGRTIGAYVGLVPSEYSSGETRAQGGVTKTGNGHARRLLVEAAWHHRSPYRPGAELRRRWDLAAPAARARGQSANRRLHTRWVGFDARQKRPVIANVAIAREWPAGAGHWQLCPTDPPTIVQRNNAEERQASRSDPRLSYEQLRCQTTDDARR

SEQ ID NO: 41550 - protein, 412 aa, unidentified
MRVIVERCCGLDVHQETVVACLLIGAPGDRPTKETRTFRTVTRDLEALRDWLAAAGVTHVGMESTGVYWRPVYAVLEGHFDLIVGNARHIRNVPGRKTDVKDAEWIADLVRHGLIAKSFVPPRPLREMRELLRYRRKLTESQAAERNRLLKLLETANIKLASIMSDVFGVSGRAMLRALIDGQASVEAMADLARGQLRRKRSDLILALEGRMEEHHRFLLATQLRRLEAIEQDIAALDLRINERLEPYRMPHALLTQIPGVDWLVAAVIIAEVGVDMSVFLSVYHLSAWAGVCPGSHESAGRQKSGRARKGNVHLRTMLVGAAISAARKRGSYLKDKFHRLKARRGAMRAALAIAHKILVSAYHMLAKGLAYHDLGEAYLDQIGQSRTVANLKRRLERLGYHVTLERTTQAA

SEQ ID NO: 41551 - protein, 424 aa, unidentified
MKVTYQTCCGVDVHKSFLVATIVKTTGGIEPYYQKKRFSTFNNSILEFKQWLLDNDCHDVCMESTGKYWVPAFNLLEDEINVVIANPKWVKAVKGNKDDTKDSKWIGDLFRLGLVKGSYIPCKAVRILREYTRYSYKLVSCRSSEKNRYQNALTVCNVALDSVVSDIFGKSSTSIIDYLLDQSGTSINHEEIASKLLRSLKSKEDAVIESVEGYQMTDAQKYRVRLVRAHMDYITAEINDVDKMIEKMISSNPDFENAVQFLCTIPGVKRDSAITIISEIGTDMSQFSSSKRLCCWAGLTPGSNESAGKKKSVRITRAGVYLKPALVQCAHAAVKSDKSPYYKKKYEALVKRRGKKRAIIAIARMILTAIYQMLSTGEQWNPSDLYKIDMPVALVEKQKAKAIKQAKKLLQREGLLPPDESLAS

SEQ ID NO: 41552 - protein, 317 aa, unidentified
MKTQVFVGLDVSKHHLDVAVRPQGRHFVTNNNDRGIKQLVKRLAALKPLLIVLEASGGYEFLVTAALAEAQLPVALINPLAVRKFAGATGKLAKTDKIDAQVLAHFAEALRPEPRPLPDQDQQLLKAALQRRLQVVKMIGQEKNRLEKTFIPALRQDIQAHLAWLQQRLEQLDRDLNDQIRRSPLWQDRDRLLRGIPGIGPVVSRAVIAQLPEAGMLPGKKTVALVGVAPYNRDSGRFRGKRMIRGGRSYLRRMLYMAAVVASRWNPVIRAFYQRLLAAGKPKKLALTACMRKLVLIINAMVKNNQPWNQFHPGTLT

SEQ ID NO: 41553 - protein, 345 aa, unidentified
MKLYGGIDLHSNNSVIAIINEQGETLSCKRLNNDMSVILSFLAPYKDKLTGLVVESTFNWYWLVDALMDAEFKLHLANPAAIQQYSGLKHADDHSDARWLAEMLRLNILPEGYIYPRELRAVRDLMRKRMDIVQQSTKNLLSVQSCYMRHLGYKLGSNKIKQMAAIRKGVDTEQVHADFSSMSTALSVISNLSLIRCAQQQINAIEGAILKQTSLSPEFINLSSIDGIGNTLALSIMLETGTIKRFDSPGNFSSYCRCVKGARYSNGKKKGATNQKNGNRYLAWAFTEAANFAIRYNPTVKKYYQRKLAKTNKVVAIKTVAHKLARACYHVLKDNVPFDEHKAFA

SEQ ID NO: 41554 - protein, 338 aa, unidentified
MPIVTLGIDLAKNVFALHGVGPTGKLELMRPDVRRGRLLEIVASLPPCLIGMEACSGAHYWAREFQRFGHTVRLMAPKFVAPYRMSGKRGKNDANDAAAICEAVTRPNMRFVPIKTLDQQADLFLHRARQGYIEERTALINRLRGLLSELGIILPLKASAMRKQAHVVLEDLPGWCNTVVGDMLSHLGRLDERIDEYDKHLCQMAKRNDKARQLMKLAGVGPTTATAIVASVGNAHDFQNSRQFCAWLGLTPGQHSSGGKAKLGRITKTGDSYLRTLLVMGARSLLMKAAAHTDPVSRWALKLKERRGFGRAVVAIAAKNARMCWAALRLGDAFKIPV

SEQ ID NO: 41555 - protein, 364 aa, unidentified
MAMDDDIRKGIVEVVGLDLGDKRSQLCVLDRDCGEVLEEGTVPTTREALERRFSTVRPMRIALEAGTHSPWVSQLLEGLGHDVIVANPRRLRLIYTNRRKNDRVDARYLAQVARLDPRLLAPIRHRGEEARAALALLRSRDVLVRTRTKLINHVRGMVKSVGGRLPGCSAGAFGTKKMADELPALVKEALLPVLEVIDDLSGKIRAYDRRIERLAEESPVAGHLMAIRGVGPLTALAFVLTLEDPDRFPKSRSVGAYLGLAPGSDQSGDANPQKRITKEGDAFVRRLLINSAHYILGPFGEDCDLRRYGLKIAARGGKNAKKRAAVAVARKLAVVMHCLWVTGEVYDPLYNTRRSTATKTVTEA

SEQ ID NO: 41556 - protein, 474 aa, unidentified
MRKQAKQRPDLQAVPLLKHEPLYIGIDVGKMKHVAGFVSTTLLERHQRFEACPALAFENSREGFRALIERIQSLAPLEHCFILMEKTGHYHFALQQYLQECDLPVYTMHVQTRPAGMLKTDKRDALGLANTLYNQLQLGIQVADKTHLVRRAEPPTAAAAQLKGLIRHRYELVRESTQRKNKLTAICDEIFPELTSVLKDPNLPTALTLREKFPTPHAIATASLTALQEVRGYTRTLPDSKLLELQRLAASSIGTKDVTRQRSLVLEQGQLMKELRLLQEHIGQLESEIKTIVDQAREGKILLSMGIGPIQAATIIATIGSILNFPNAGTLKSYCGWAPMREQTGTTFDRSHLTARGSRTMRQMMVLIVANLTRQETEWSYLYKRLVQAKCPYDEHTGERKGKLRIMGRVAGQMIETMYALLKKDVEILSKITPGQEPPPPILYDPALHRRHREGHYQPLKSSSPPSIIMLQPK

SEQ ID NO: 41557 - protein, 341 aa, unidentified
MKKFIRIGVDLAKNYFQIHALESESGSTVTRKLKRSKMHEFFSQIEPCLIGLEACGSAHYWARELKAMGHEVLLMPPAYTKPYVKRGKNDAVDADAICEAMSRPGMRFVPIKSAEQQATLMLHKARELLIKQRTMSVNALRGHLSEFGIVAAKGIGRVDELLDLAESDATLPNAAKAGVKVLAQALEGIDKAIDDLETEITSAHAQNEMARLLDKVPGIGKLIASAIAASVPDPSVFKSGRDFAAWLGLTPRQNSSGGKQTLGGITRQGNRYIRKLLVLGATSLLNVLGKRKGALRDWIVGLLAKKPARLVTVAIANKLARILWAMMNTGECFRSEMFAKA

SEQ ID NO: 41558 - protein, 356 aa, unidentified
MTNQATQYLALDVHQATIVATLRSADGSVRMRATVPTEARAVVNLVRGAGPHVRVALEEGTQAQWLHDVIAPVADNVVVCSTRGRSEIENKNDRIDADRLSELLRIGAVKAVFHSAFDTLSLKELVRNYLTLVEDATKTKLRIKSMFRARGILTPGRQVFIPQRRDEWLDQLPSAGARMRAEHLLTTLDTLTALRRRAKAAMVVEAQKRTAWKILRSIPVLGPVRISCLMAIVVTPYRFRTKRQLWPYCGLAVVTRSSGEREFADGVLRRRRKHAPATRGLNRNYNRTMKNVFKGAAAAALIKAGPLKDFYEHCLERGVRPELAKLTLARKIAAVTLRLWKKGELWDPKKLTMQTT

SEQ ID NO: 41559 - protein, 355 aa, unidentified
MSSEKYIGLDVHQATISVAVLDSTGKLVMESILETKGATILEFFAGLRGTVSVTFEEGTWAAWLYDVLKPHVAKLVVCNPRKNALLKDGNKSDRIDAHKLAELLYLNKLSSVYHGETGVRMLRELARSYLTIVKDLTRVMCRLKAVYRSWAIPCAGRDVYYTRHRDEWLGKINEAGVRRRAERLYQQLDMLQYLRQQARRELLAESRKHAITVKLRQIPSLGPIRSALAVALIQTPHRFRTKRQLWAYSGLALETRTSAEYCYVKGGLRRSKKQISIRGLNKDHNHDLKGLFKGAATRASVLPGPFQDFYQRSLAKGIKPTMARLTLARKIAAITLTLWKKGENFDADKLKSQAA

SEQ ID NO: 41560 - protein, 312 aa, unidentified
MAHIVKAAGIDVSKPWLDVAIWPTREEVRVSHDAAGLATLIGWLNEHGVRRVGLEASGGYERDAIDALQAAGFEVALLNPLRVRRFAQAKGRLAKNDRVDARTVAQFTLVMLDREPAPRRRDLDALAELLTYRRQLNDWCTDCVNQREHLRDAALRASVARRLTSLRLEIKKIDQRLAEMIAGNNDWNALARRLRTVPGVGPILAATLIALLPELGTLSRRAIASLVGLAPFDDDSGGHRGERHIKGGRKAVRDTLYMAALSARQHNPVIAAFAARLAGKKPKVILVACMRKLLVTLNAMVRDGTDWRLTGA

SEQ ID NO: 41561 - protein, 424 aa, unidentified
MRLMLKIVYPICCGIDVHKKFVIATIATTNDKNVTSYQTRRFNTFKNDLIALNNWLVENKCKDVCMESTGKYWIPVFNVLEDFCTITLANPRYVKNIPGKKTDKRDSIWLADLHKHALVKGSFIPSKPIRELRDLIRYKSKLTNVSSSEKNRVQNSLTVSNIMLANVVSDTFGKSASSIIKHMIENPDIIDFDYSSMLHKSLKKKSDEIEQAVAGKFSKEQAAKLSVCYEHYNSVEKCIEILEATILELSLPFKEQIDIIATLPGIKQASATAILSEIGTDMSVFTSDKHLCSWAGLTPQSNESAGKKKSVRISRAGVYIKPLLVQCANAAVKDKSCTVFKNRYEAIKKRRGHKRAIIATARMILTCIYHMLSKNEPFNPLLYDDNAKSKKRNQQDSLSIEQAIAFLQANGYTVNISDLVAITN

SEQ ID NO: 41562 - protein, 349 aa, unidentified
MLHAGLDLSRRSLEVHLLAENGSTVSTMSVPPDLDGLRGLVRKVALLPGGRQVLAVIESMNGARFVHDTLELEGWQVEIADAAKVKGLAPLACKTDRIDAWVLAELSRRDLVPSIWLPDPATRSARELARWRLHLVRHRTALKNRVHATLVTFGHPCPVADLFGLKGRDLLRRLQFPEPWLGDLEAALRLIDTLNFEIATLENELKAEGADHPYVRLLLSVPGISWVLAYTIASEIGDISRFASPVKLCGYTGLCPRVYQSGQSDHRGALSKNGPKYLRWALIEAATHAASHPLYAERYQYMARRLGRQRGKKVARVDLARRLAEAIWHMLTTGEVFAPAGLKASKAAA

SEQ ID NO: 41563 - protein, 344 aa, unidentified
MNKLSRVGIDLAKNVFQLHGVDRHGKAVWRRRLTRDKWLRVLLEKVEPGCEIGMEACAGAHHWARQLQAKGFTVKLIAPQFVKPYVKSNKNDANDAEAVCEAMSRPSMRFVAVKTVEQQDIQAAHRIRSELIGHRTAKANQIRGLVAEYGLVAPQQLAQLRAAVPAWLEDAENGLTSRFRELLSSLWNDLKALDHRVKELDHEIDGIAQSDPVAKRLQQLRGVGPMVATALVATVGDAEQFANSRQMAASLGLTPKQHSSGGKDRLLGISKRGDAYLRSIMIHGARSVIRTAKLKDDRLSQWVTNLAERSHPNVAAVALANKTARIAWAMLRYRTDYEPDLVTA

SEQ ID NO: 41564 - protein, 341 aa, unidentified
MQITTIGLDIAKNVFQIHGIDAAEKVIVRKQLRRGQVTAFFEALAPCLVGMEACATSHHWARELTKLGHEVRLMPAKDVKAYVKRNKNDAADAEAICEAVRRPTMRFVRIKSAEQQGQLMLHRARDLLMRQRTQVINALRAHLAEFGITAAQGREGIKELLAIVAHEEGSRLPSDAHASLTVLATQLQAVQTMIGSLEKRIVAQHRSNEASKRLETIPGIGVIGATTIAAVVPDPRVFRSGRDFAAWIGIVPRQDSTGGKQKLGPISKQGDQYLRRILIVGAHAVLRRARQQPETYPWLTQLLARRPFKVVAVALANKMARIAWALLAKGGTYRAPQLVAA

SEQ ID NO: 41565 - protein, 352 aa, unidentified
MLYTGIDYHKKYSVVSTQDATGARVREARIDQNDPAAFAAYFQSLPEPSRVVVEACWNWGWLYDELGGIDRVEDVVLAHPFKTRLIADAQIKTDKLDARALATLLRGNLLATVHAPDPANRARKHVIRQRLFLARVRTMVRNRVHTLIARQRNLARPVFSDQFGKKGLHWLRTLTLAEPDATLLKQDLATLEQLGTVIKELEGQISATNTADAATARLQSLPGVGPILAAVMAAEIDGIARFARADKLCCYAGLVPTTHSSGGKTSHGRMLPFANRWLKWAFIEAAWVAVGCSSYFGDIYTRHRRRGKKANTAITIIARRMCRIAWQLLHDGRDFCPNPPKLTLSPVAPSKD

SEQ ID NO: 41566 - protein, 342 aa, unidentified
MDEYDGRQFVGIDLHRQRSVIVRQSESGEQLSAVRIHNDPLALQLELERAGTDPEVVLEATYGWYWAVDVLQAGGAHVHLAHPLGVKGFRYRRVKNDVRDAGDLADLLRMGRLPEAWIAPPQTRELRELVRYRAKLVAIRSGLKAQIHAVLAKAGVLIAVSDLFGVGGRQRLAKEALGGAYAERVRSVLELIDVLDGHEAQFAEMIAKRLDAHRGYQAIQQVPGIGPVLAAVFVAEIGDVNRFGDPAHLCSWAGLTPRHRESDTVVHRGHITKQGSKLVRWAAIEAVQRHQTTAKIVADKDRIEARRGKNIAKVAAARKLLTLVYYGLRDGHIRALDRARAA

SEQ ID NO: 41567 - protein, 341 aa, unidentified
MNNISLVGIDLAKNIFQLHGIDKQRKTIIKKKINRANLMDIIRNINPCKIAMEACAGSNYWGRIFRSMGHEVMLISPQHVKPFVRGNKNDANDAQGIVTAAMQDGMPSVPIKSLEQQDIQLIHRRREELVRRRTALTNQARGFLTEYGIVMRQGMTFFTKEIPEILENAGNELTQIAREEIYEIYQEVLHLIRLISQYDKKLENICLRNENCKRLMKLKGIGPLTASLLVVKIGDAKNFKNGRHFAAFVGLVPKEHSSGGKQCLMGISKRGDITLRNLLINGGRSVAKISDKKITPLNSWVNRIKQDRGFNKACVAIANKNARHAWAIMYYGEEYKYQLAS

SEQ ID NO: 41568 - protein, 421 aa, unidentified
MKKRTYRKMDVKEVDVAALAAEVGSGRVVFAIDVAKVDMVAALVAGDGRVVRTVCWKNPSENGLVLALLGGLRRAGLSVEAVMESSGTYGDVLRHQLLGYGVPVYRMSGKRVHDAAEVYDGVPSLHDAKSAAIIAKLHRDGASTPWGPLSEEKRELKAAIATMDLYREQHQRLIHSLESSLARYWPELTEHLELSSATLVALLARVGGPHDVAGAIEQSRGLLHGMSHGLMSQETIEAVLQSATSSAGVRLLRQEREALMTLAAEAHRSLKEFKKAKLAVERLSTSGAAQRLAPTTGKATAAVLIADVGDPRDYASTRAYLKGYGLNLKEKSSGKQKGQLSITKRGPGRARQYLWLAVFRWLQKDAVARAWYAEKIKRDGGRRARAVIALMRKFAQALFHVARGVPLDSSKLFDVSRLRLT

SEQ ID NO: 41569 - protein, 354 aa, unidentified
MKYYTSTTQFNCGIDLHARQMYVCVLDRDGKKLVHTNIKNNDFAYFLKLVAPYRHDLTVCAECMFGWYWLADACADAGIHFVLAHALYLKAIHGGKNKNDRIDSEKIAHLLRTNFIPPGYVYPADKRPLRALLRQRLLYVWNRSELLSRLQSHQLAYNRPTHRHTPYNHDSWSAQLLTAEPDPVRQFALQNDLALIGHYDTQLAALEKELLKLTKQTATRDFTLLQTTPGIGDYLGLTILHEIGDIARFPTVKNFLSYCRLVKGTVASAGKIKGLRGKKLGNPYLRWAFGEAAVVAKRDPLVIGPLAQRLEARLNNKFKANTVLAIKLARAVYFMLKQKTVFDPERLVAALSKN

SEQ ID NO: 41570 - protein, 366 aa, unidentified
MRKHHHFGTFDAVRRGHPLHHYAGIDVSLELSSVCIVDAKGKIVREAKVASDPDALVAFFKQLGFRVVRIGLEAGPLSQWLYAGLAQAGFEAVLLETRHVKAALSAMTVKTDRKDARGIAQLIRMGWFRPVHCKSLGSQEVRALLVARKQLLGKLLDVELSIRGILRGFGLKMGVVTRKTFEARARELSSGQTMLETVVGAMLTARAALQSEYAKLHKTMLVIVRDDKICRRLMTAPGVGPVVAITFKTAVDDPTRILKSKAVGPLFGLTPKKYQSGETDVTGGITCVGDTMVRTALYEAANILLSRVTRFSALKRWAVEVAKRRGLKRAKVALARKIGVVLHRMWVDGTDFRWTKAELGSGVAAH

SEQ ID NO: 41571 - protein, 412 aa, unidentified
MEVLYERCCGIDVHKSSVAACIVLDRGQKPRRHLRRFGCTTHELRELAEWLRSFDVRHVAMESTGVYWKPVWNVLEEHFHMVLANAQHIKAVPGRKTDMMDCQWIAELLRHGLLRGSYVPSAVIRDLRDLTRTRATLSQEQSGISSRIQKLLESANIKLASTVTHTMGKSGQAILDAIVNGEDNPERLADLALGKLRSKIPQLQLALDGRIRDHHRFLLDSLLRQYRFLEAEIQALDTRLEQLGEQHQELADTVARWITVPGVERVAAWTLVAEIGSDMTAFPSAAHLASWAGLCPGNHESAGKRLSGKSRKGSPWLRRMACQSAWAAVRTKNCYLSAQFKRLAARRGSKRALLAVAHSLLVIGYHLQSKGCVYQELGGDYFDQLHAEKLKRHLVKRLESLGVRVTLQAQAR

SEQ ID NO: 41572 - protein, 459 aa, unidentified
MSKAKKNKKKTLPQGGAGIKMKRFELIYPRSAGVDVGSMLMVVSYTDREGLSHVRPFDSFTDSLHELAALLKTAGVQEVGMEATGSYWMTLFTILEDFGMRVTLINPSHYRNVAQKTDVNDAQWLHQLLSYGMLRHSHIADEPYRELRQYIHGRDTCKDQKSDTLNRIQKNLTQMNVKFQHLISDIEGVAGMKLLRLIAAGATDPDTLLAQVNHALLKASPEDLLSSLKGDYRPHLVTMLRLNLEAFDFQKKQMLAYETYIEGTLQRLVHQKDDALTKPIEKKKGLVRKNQYHFNLKDYLLAILGVDLTEVDGLDEIGLLTILSVTGTDMSKWPTANQFASWLNLSPRQRITGGRVVGHEKRVTHNPASQAFRLAAFSLWQNKGPLGQQYRKLAGTRGKKKAIKAIARKLAVIFYHMVLKQQPYDPKKIAQDPEKQLARKIARLQKDAAKLGWTLQKVS

SEQ ID NO: 41573 - protein, 437 aa, unidentified
MNQTKLNRKTTAASGRGDFAALIGLDWASQRHALCLYDCATEKRENSTLEHTPEAIAQWAQGLEQRFGGKKIALCLEQAKGPLIYALLEYSFFVLYPVNPATAARYRQAFKTSRAKDDPADAQVCLELLLHHREKLTPWLANDGTTRELSRLLEARRSLIDLRTLLTNMLRDALKSYYPQALELAGQDLFAPLGCQFLLKWPSLEQLQKARTESVRKFYYAHNCRRMDVIEKRLHTIAEMKPLCRDRALIEPARIQVKMLARQLLQLGTALTEYDSRIEHLFAQHQDASIWQSFPGAGPTLAPRLCCAFGSERSRYQSALSIQEYSGIAPVQERSGKNQHWIHRRWARPHFVHQSFFEYASQSALHCPWAKAFIQDQLARGKTHPTAVRALAFKWQRIMFVCWRDRVLYHETIYLDSLKHRGSYLARKLDQELPKAA

SEQ ID NO: 41574 - protein, 369 aa, unidentified
MGEYSEGFVAFDVAKTKHAVAIADGGRDSEVRFIGEIASSPAAVERLIGKLAGRYGKLHFCYEAGPTGYGLHRQIEALGHPCLVVAPALIPKRPGERVKTNRRDAVTLARLHRAGELSGVWVPDAVHEAVRDLVRAREATSNDRRRKRQQLLSFLLRHGRVYTGGGHWTLAHRRWLAKQSFAHPAQQVVFQEAIDAIEDAAQRLRRLEQQLAVIVPSWSMAPVVEAYQAMRGVSFLVAVTFAAEIGDVRRFDNPRQLMSFLGLVPAESSTGETVRRKGLTLAGNRRARRVLVEAAWTYRYPARVGESLRARLERLSKTVREIAWKGQVRLCARYRRLSNAGKKLPVVVAAIAREMAAFLWAIGREVTPA

SEQ ID NO: 41575 - protein, 413 aa, unidentified
MERLLERCAALDVHQASVSACVRVADGQGERREFAEAFGTTTPDLLALGDWLRGHGVTHVAMEGTGVYWKPVYYALEGEFELLLVNAAHVKQVPGRKTDTKDAAWLCQLLECGLLRASFVPPRPIRELRDLTRYRKTLIRDRASEANRLHKVLEDSGVKLSSVASNVLGVSGRLMLQALCQGGNDPDALAELARGRLRSKLPALRRALEAHFRDHHAFLVAQILAHLDYLDEAIAACSARIEEQIAPFASALTLLETVPGVGRRNAEVIVAEIGTDMSVFPSSRHLASWAKLAPGNNESAGKRKSGSTGKGSPWLRSALVESALAATRTRGYLRAKYWRIRQRRGHQRAVIAVAHAILEISYQMLTTGELYRELGDDFFERRDNERATRRHLHALERLGYRVTLDAVPGAEAA

SEQ ID NO: 41576 - protein, 336 aa, unidentified
MNGSIGRWVGIDVAKSKLDVAMLDEYGKLKSHVFTNDAKGHAALMTWLMQRCGSQQHMRVCMEATGCYGEALAISLADAGWCVSVVNPARIKGFAQSELVRNKTDRADAALLARFGQALRPEPWVAPSLEVRQLRALVDRLHSLKEMHQQEANRLEAAMNQTGMRESIESHMKWLQADIKQLERQIDDHIDGHPQLREDAKLITSIPGVGNTTAAKVMAYLGDVRRFKNAKALAAFIGVTPRLKLSGSSVRGRSMISRSGHAAIRHALYMPALVALKHNPIVKTFGERLKNAGMAPKAVVAACMHKLVHLIYGILKSGTAFNANFVVVQLDSKDGI

SEQ ID NO: 41577 - protein, 320 aa, unidentified
MNSIIIGIDVSKETFDAAVLINNKVQTRKFNNNSEGFNKLVTWLKSRGIGHVCMEATGIYWKSLAKYLYDYGYKVSVVNPARIKGFAISKLSRTKTDKADSVLIADFCEAMKPEAWYPQPLYIQELQQLVNRLNVLINHKTQETNRLEGASKAIANNIQMHIEFLETQVKEIEQLINSHIKNNKDLHDKAMLLESIPGVGAKTQAIVLAFFADIEKFSSAKQVVAFVGLNPKHRQSGSSVRGVSRISRTGNSDLRKAFYMPAMSALRYNCIIKQFSQRLSDSGKPKMLILIASMRKLLHIIYGVLKHNSPFNPNVSIIQK

SEQ ID NO: 41578 - protein, 419 aa, unidentified
MSFKIIKNNCCGLDVHKTWIFASIGITDSNNRTEYKQARFSSFTKGLNELCDWLAKYNCKDVCMESTGKYWIPVLNILEQRSLWVTLSHPKYTKPMKGNKTDRKDAKWICDLYMCGMVKPSFIPPADIRELRDLVRYRFKLTCMITGEKNRAQNCLTVSNLKLDDVFSDVFGKSSRSITEQILQHPGETFDVAPFVDGRCKTPIVEIQAAIDGAISKEQAVKLRQCLDHIDELNKHISEVEQEILRLSDKYEAALNLIRTVPGFDKNPLTAIQVLSEIGGDMSVFPTAKHLVSWAGCCPRNDQSNQKIKSTRISRAGSYFKPVLVQVANALIKSKKHSEFTNRYKRIKARRGHKKAIIAICRMILTAIWHILSDLKPYTSEGFLESRPVKGEKVLSTSQAFNLLKQRGYIIKDEPLSVS

SEQ ID NO: 41579 - protein, 372 aa, unidentified
MSLRGVRDREPLARRTAPVPPLATTAGELWDRRRSHARPNSRQTSIARTRQVTVAKMICGVDVSSFSLEACIGPQGPARSFPNTPEGSAELLAFCRQHGVELVAMEATGGYEKQSFSLLWAHGLPVALLNPRAVRRFAEGMGLLEKTDRIDAGVIAWFAAVKRIPACAPVSAEQQRLKALVTRLRQLTELQAAQRNQRLLVRETTVLASFRELLALVASQIRTLETAIAALIAADPLWQKLDQAFRSIKGVADRTVARLMAEMPEIGSASNKAVSKLAGLAPLARDSGKSQGQRTVRGGRRDVRAILFVVAGVVRRYDADFAAFHQRLSAAGKPKKVIRIALAHKLLVRLNAKAREVRNEFARRTSPPVALS

SEQ ID NO: 41580 - protein, 397 aa, unidentified
MFYLGIDIAKHKHYASIIDQTGKPITKPFPFRNHKEGGQALLNWMYRYIESPTEIMIGMEATGHYWLAVYSFLLDHGFSVVVLNPIQTNAWRKGTEIRKRKTDAIDATMIADIIRFGRFVETPLVDEKMFALKQMSRFRNALVSNMSDLKRKALVVLDQTFPEYQSIFSDVFGKTSSQILLEYASPSDYEQISIDDLTQIIEQTSRNRLGKKTANKLMELASNSFGVTFCKDAFSFQLKMLMEQIRFIEDQIKECEEEMSQLLIDLDTPIMTIPGVGPILGATILSEIGDIHRFDKPSKLVAYAGIDASVSQSGQFEASGTSISKRGSSHLRRALFQAAITAHKHDPVLKAFYEKKRKQGKHYYVCIGAVARKLCYIIYAILKSNKPYEVPPHTTET

SEQ ID NO: 41581 - protein, 395 aa, unidentified
MDGPVISFDVSKGESHMRAFVSSEKPFGPVRRISHNAQGFSLVEELYESLRNKTGVEPSAVYEATGVYASPLLMFLLEKGYPIYRISPLESAKMRKAQIRPTKNDSLDTGTIARVFYTRMLKRFAEEDSICQNLKEMSRELEYLTEQATAEKNRYHRLLDQCWPLFDMVLDYDSKLSINVVRSFGHPSMIRTARGVIRSFGYDPSSESDFRRDMAGKITAYSKATISGCRPDSYVVEEIKAMAEEMLRTKDRLDGLAKRMESLASGLPEYSLLLTIPQVSYRTASAVIAEIGDLSKFGSASALVAYCGTDPAVLQSGKQTGEHLGITKKGNARLRTVLYLAVTRMCMNSPESKVAKFVSNKKGSLSTKAAKIAGCNKLIRIIYAMLTNGTVYSES

SEQ ID NO: 41582 - protein, 453 aa, unidentified
MQTQRHNAKRQAVSGYAVLGIDPAKANHHGAILNADGLQQSKSFSFDVSRTGFDAIWESIEKRLSAFGPKEMIVAIETSCNLWCTAANYFYAKGYTVVLVKPLTTYHSRSLMKSDFSRTDPKDAYLIADNAQKGYYDQYHVFEPHLEAMHQLSISYDKLSKDCVKAKLRLRSLMEKYFPEYLDAFGISTKTSLYLLERYFLPRHFLDLDISQEAPRLLKLSQRHHGRETLEDLKSWAKTSIGVPVDPIVEDALRLVLDGWIRSLHQAEDQIKSVLKALKGLASQFSEFDILSSIPNISDNLAALFIAETANPSRFDHYKQVEKLAGLNLRLSQSGQYAGQRRISGIGNNRLRRIIYQMTVQTARVVPQVRCRFLRRQLKRKCYNKSIIAASSQLLKLIMVLLKEKRPYQHKKDWNRELGKLERLYQKQKIKTNPVHKNSHIRRQALIAKNKAA

SEQ ID NO: 41583 - protein, 378 aa, unidentified
MRHVIAFDISMGKSYMVIYNVQKQCIFESEINHSKPDFEELRKRIDQLTNENRKSPHIVFEATGVYSRQLERFMQDNKYEYCLLNPLEAKLQCDSLRIHKTDRSDAHQLALTHFTASRREKASTDHLFYQLKSLSRFYSELDDELSVIRSRMHKVIQLTFPELEQIFTIKSDLFLNFVQLFPHPDLIKNLSKTVIKNRIRTNTNKNISISIAEKKAMKVLDAAKDSYPAVRQDDVLCEQLKSYAKRYQELLHQKEQCIEKMVRLAEIGDITRFKNNKQLNAFAGIDIRRFQSGKTFFKDKINKRGNKHLRKLLFLIIQNMIKQRRYGQNHIVEYYDKLKTQPYNKCHKVASIACVNKLLKLLFYLITHNTHYDYRLTT

SEQ ID NO: 41584 - protein, 344 aa, unidentified
MTSIDYIGLDIHKKTISFCAKAQDGTILDQGTIVARRDTLLAWAKARPRPWIGAMEATLFTGWIYDLLKPLAQELKVAHPAMLKAITAAKKKNDQVDARTIADLLRCNLLPECYMAPSAIRDLRRVLRYRNLVVRQATRMKNRIAGLLMETGTPYNKERLHGRAYFSELLGGLREVPRSVVELLQLSRGQLEFFATIQRRLLKGLCQNPDLSERVARLQTIPGVGEIMALSWALEVGEVKRLPSIAQAASYCGLTSAQHNSAGKEQRGPISKQRNKHLQTILIEAAKLAPRHNPQLAVVHERELQRGDRNQATLAVARKLVAYLMAVDKSGKPFAMRASGEEAA

SEQ ID NO: 41585 - protein, 317 aa, unidentified
METNSGPYIGIDVSKAMLDVSIGVSGEQFRVENNDAGMKKLVERLEAVRPSLIVVESTGGLEKLVVVELFTHALPVALVNPGRVREFAKSTGRLAKTDKLDARILAHFGEAIHPALVILPSEEEQYLSALMNRRRQVIDLLTMEKNHLLSTPVKVRPRVEQSISTLQAQLDELNQTIDQFIDHNDAFRKKEDILRSLPGVGPITAAILLSDLPEIGSMDRKKIAALVGVAPYNNDSGHHSGRRRIKGGRESVRHVIYMAALAATRFNPVIKSFYQRLIERGKSFKVALVACMHKLLIILNAMIRDLSVWHPKASLDV

SEQ ID NO: 41586 - protein, 368 aa, unidentified
MNESTIWVGMDVHAKTVVLAELVGESREPLVREVPNDPRKLRETFGRLMKRGRVQACYEAGACGFEIQRMLDGMGVACQVVAPSLIPSKPGDRVKTDRRDAVKLVRLLRADELTAIVVPTSDQEAARDLVRARDDLRRARIAARHQLSKFLLRHGRHYTAGVAWTQKHGNWLKSQKFEQSLLCVTFDHYLSQLEYLDLRMAALDAEIAKLAKSPPFETRVAALTCLRGVSTLTAMILLTELGDLRRFKTPRQLMSYVGIVPGERSSGESVRRTGITKTGNAHVRRALVEAAWGYRSARTTLGTRAASCVQAQPREVASIAVKATTRLARRFGRLSARGKKPQVVVTAIARELCGFIWALGVAELPKAA

SEQ ID NO: 41587 - protein, 339 aa, unidentified
MVKAYIGLDVHKDKIVIGMAMSGGQVFIHGKCSSDIRVFLKALRKALKKYDLKKEDVRICYEAGPCGFPLARHLLRIGFAVEVIAPSLIPTKSGDRVKTDKRDARKLARLYRAGELTAIHIPDKDDEVIRDLCRARTDAVDDRTRTKQRVGAFLLRNGHHYTGRSNWTEAHHRYLRELVLIDPVQKLILEEYIQALDATIQRVESIEQHMRIRLQDWQRREFVEALQGLKGFQMVASMVVASELGDLTRFSHPRKLMDFLGLVSSEQSTGDRRRQGAITKCGNSHVRWMLVEVAHSYRLPPKISKELSKRQQDLNGAVKTVSWKVSLRQECVTPFEWLG

SEQ ID NO: 41588 - protein, 343 aa, unidentified
MQIRSVGIDLGKTTFHLVALGDNGKVLLKKKFTQKQLITFTANLQTSLIGMEACSGAHFLGRALRAQGHDVKLIPAQFVKPFVKSNKNDFIDAEAIAEAVDRQNMRFVPIKTDDQLDLQALHRVRDRLITRRTSVINQLRAFLLERGLVFAKSPARLRERMPEILENADEDLTPRMRNLLALLWNEWKDLELQIAEMNDEVEQIASSDAACVRLRQIPGIGPLVATAIVAAIGNGAAFHKGREFAAWLGLVPKQYSTGGKAKLYGISKRGNNYLRKILIHGARAVVLRSKRERIAMGSWLTALEARAPRNVLIVAAANKLARIAWAVLASGQDYRAVQESVAA

SEQ ID NO: 41589 - protein, 309 aa, unidentified
MIGIGIDVSKERLDVAQYRAGKPFHVPNGLKGWASVIARLPTPSEVRIVLEATGGYEQGLLDHLTQAGYAVSRINPRQGRDFAKATGQLAKTDALDARLLARMAATLDDLVIYQPPSAAQREMAAYVTRRRQVDADCLSTRQQLAQIVQPGLRAGVERTLAALQAERDALDAALGEQVKAMPLTPVLRGMKGVGPLLLAVLTGLVPELGHLNRRQIAKLMGVAPLNYDSGQMRGQRHVWGGRATVRAVLYMATLSAVRYEPTIKPMYQRLRAAGKAGKVAIVACMRKLLVILNARARDHYLSITPPVAA

SEQ ID NO: 41590 - protein, 388 aa, unidentified
MIQVDDLSRSLIAFEQISTLVIVVELSQSSWLAAGVVPGIERRPLKKLDPDPTALLHLVEGWRDRATKAGRAITRTVLAFESGRDGFWLARWLRVRGVETFVMHSTSVAVSREPRRAKTDRLDTEMLIRVFLGWLRGEPRHCKMVAIPTLEEEDARRPSRERETLVGERTRIINRMKAALVRLGIRGFKPGLLTAPQKLDALRTPEETPIPPNMLDEMRRDMARLAWVREQINAIEQARLERLERAPATGRHAMVRMLARVIGVGVETADMLVQEVLSRNLRDRRAVARYAGLTGSPDESGSKRREQGLSKAGNARVRRGLIQLAWRFLRFQKDSALAQWYRGRTEDVAGKRKRTMIVALARKLLIALWRLVTIGEIPVGVALRTAVA

SEQ ID NO: 41591 - protein, 329 aa, unidentified
MKKYIIGVDVSKLKLDYHCHGFYTSPEPVTNDLRGFKNLFAWIKKQVSKEVTNVIVVMEYTGIYTYNFERFLNQKGVDYVKRPALDIKRSVGIKRGKTDKADAKMISQYGWMRREELKAMKPLSDSEQELQQLMAYRDKLVADKASYQSRLKELHGQMKDKLSQHIIESTEYLMQVLAIEIKQTEKFIAELLSSQKSLNINFELMKTITGIGFSSAVHFLIATENFTRFNDHRKFACYCGVAPFEHSSGSSIKGKTRVSHLANKKIKSLLTMAAISAVQHDPQMKAKYEQKLKEGKAKMCALNIIRYKLIERIFAVIKRQTPYELRVAA

SEQ ID NO: 41592 - protein, 352 aa, unidentified
MRRSKHQMTSGEDLFIGIDLHKHRWHVTIRTFDVEVFSASIPGTWEALQRVLARYHGHPRQAVYEAGYFGFRLHDRLVDHGIPCIVTPPSLVPQEYGNRVKTDRRDSRKLAHLLAKGLLKRVWVPSEEELYHRQVIRRRRQLVRDRVRTQSRIKAELRFYGIHLEEPPGRWTHMYFESLRSFRFENRWMQESFNCLLDLYEFLTVQIDKQTKLLQELSETPMYRERVKILLSIPGIGLISAMELLLELQDVSRFRRAEQLAAYVGLTPSQYSSADKVRMGRITGIGKNTLRSLLVEASWTLIRKDQAMREKYDRIKIRSGGKRAIVAIARTLLLRMRRMLLDNQVYALDLAA

SEQ ID NO: 41593 - protein, 408 aa, unidentified
MEQVIERCCGLDVHKQTVVACVRVPGPDGTRVQQVRTFGTTAAELLTLRDWLEAQAVTQVAMESTGIYWKPIFYVLEEAFTCVLANAAHIAQVPGRKTDVKDCAWIAQLLEHGLIRASFIPPPPVRELRDLTRYRKAVIQDRSRAANRLHKVLEDAGIKLASVATDVLGVSGRAMLTALVEGTTDPGVLADLARGTLRRKLPALRQALAGRFRPHHGFLVGQLLAHLDYLDEAIATLSTQIEAAITPFAAMVTRLDSIPGVSQRTAEVLIAEIGVDMRVFPTAGHLASWAGVCPGNNESAGKHRSGRPRPGNRWLRMTLIEAALAASRTSTALGARYRRVMRHRGHHKAVIAVAHAMLVIAYHLLSRETTYHELGADYFDRHQTDRLRRRAVQTLERQGYRVTLEPAA

SEQ ID NO: 41594 - protein, 343 aa, unidentified
MLYAGVDAHRTATHVTIMDKDGKVLVRKRIPSSGDEMRKFFAHYQEPIKAVVEATYNWGPVYDWLDELVDDVVLAHPARVRAIADARIKTDTIDSQTLAHLLRADLIPEAYAPSKETRAIKRVLRQRLFFVRVQTMVKNRIHALLAQHAIELPDVTDLYGKAGFAWLQQLPLPTPDGQLLRDDLSLLTTLRELIIATDHLIAQLVKGDEIVTWLASLPGVGPFFAVLLRYEVDDVTRFRSAKKFVCYTGLIPSTYASNTRVYHGPLTKQGNKWLRWAFIEAVAPALRASSALRRYYDQIKARRGAHDARVCTARKLAELAWTVWTERRCYEDRSPRSAEKAAS

SEQ ID NO: 41595 - protein, 477 aa, unidentified
MNKKQGDNLQPPKAKSKRRRRNKGMCLEDRPVLEPNAAGVDVGAREMFVAVPPGRDENPVRVFATFTEDLERLTDWLEQCGVTTVALESTGVYWIPLFEILEQRGIRPCLVNARHMKNVPGRRTDWHECQWLQFLHSVGLLRAAFRPGQDVCAVRTILRHRNELVGAASQHVQHMHKALTQMNLQIHHVISDITGLTGRAIVDAILAGQRDGAELAKLRDPRIKADTETIRKSLEGNWRPEHLFTLGQSRDLYRIYQQQIVNCDLEIEKMLQGFAPRIDPGERPLPTDRKRNRAGSTRRRKNGHPHPEFDLRTEAYKLFGVDISQIPGVEENALPLFSEVGRDMSRWPTAGNFISWLALCPDNDISGGKLLWRGTRRVKNRAGHLFRMAAYALHRSLTPLGNYLRRMKAKLGPQAATMATAHKIAVIFYTMVKNQVEYDETLWATRDAQREKRLEAKLKRQAKRLGYELVPIEPKAA

SEQ ID NO: 41596 - protein, 345 aa, unidentified
MSHFVGLDVSQKMTAICVVDKDGRRIWRGQCPSVPEQISAALRRYAGDNARIGIETGAMTPWIVHELRNLGFEVVCLDARHARAALKMQINKNDQNDAEGLAQIVRTGWYRSVHVKSFDSHRARAILGARTQLVGMTTRLSNHIRGVLKTFGLLPGAMRGLPFDRKVEVLLEGRSDVAPIVRPMLVAWRQLRAQIAAFDKAIRAMVRMSGASRLLMSVPGVGLLSALAYVSTVEDPSRFARSRSVGAHLGLTPRQYQSGEIDRSGRISRCGDTLTRTLMYEAAGVILTRVKKASGLRDWAAAIARRSGPGKARVALARKLSVILHSIWRSGEPFRWSEPKHAVVA

SEQ ID NO: 41597 - protein, 346 aa, unidentified
MTIVKEARPVTGGVDTHAGTHVAAALDSVGGLLGVREFPATAVGYARLLGWLGGFGTVALVGVEGTGSYGAGLVRHLAGCGVRVVEVDRADRQDRRRAGKSDPLDAVSAARAALSGRARGAPKGRDGAVEAIRTLMVARRSARTGRTQAINQARALILTGPGDLRARFAGHTAAALVAGIAALRPRPGDVPGYATRIALRELGRRARFLDGQLGRLDELIVPLAAARAPGLLALHGIGPATAALLLIAAGDHPQRLRSEAAWAHLCGVAPIPASSGKVTRRRLNPGGDRQANHALWQIVITRMSSHPPTRAYVARRTAEGLSKKEIIRCLKRYVAREVYPHLRGGT

SEQ ID NO: 41598 - protein, 403 aa, unidentified
MTAFFAGLDWASQSHAVCIIDDHGNVRERVDIAHSAAGLTQLQRSLVRDERPPIAIERPSGIVVDTLLDAGFTVIPIHPNAVKATRPRYRSHGAKSDASDAYLLADLLRTDGHRFAPLPAQSDDIRALRALVRGRDDVVAARTQLANQLRSLLASFWPGAAEVFADVDSPIALAFVERYATPESAHRLGPKRMAAFCAQHAYSGRRSAQDLLARLQQAPAGVCAEMEMEAKGELARSLARALSQLVEQIRLLSSRIEHHVESLDDGRIVMRFPRAGRICAAQILAEFGSVRERFANEARLAAEAGIGPVTYPSGKSRTVTFRCACNHRLRAALTCLADNSRHASAWAAHVYNRARARGCDHPHAVRVLARAWVRVIWRAWTDRKPYDPTRHGAAQLIAKSAGG

SEQ ID NO: 41599 - protein, 312 aa, unidentified
MSIYVGLDIAKAHIDLAVRPHGTPQRVTHDEAGLATLITHLQTLGPTLVVLEATGGYEADVVSTITLAGFAVALVNPRQVRDFAKAVGHLAKTDTLDAHVLALFAERVQPEPRPLPDAAQRELIALVTRRRQLVEMLTAERNRVALARGAVKRDLHDHIHWLERRIRDTDRDLKTLIQQSPLWRAQDNLLRSVPGVGPITAAVLIADLPELGHLSRRQLAALVGVAPLNRDSGTSRGPRAIWGGRAPVRGSLYMATLAGIRFNPVLRAFYRRLRALGKPHRVAIVAGMRKLLTILNAMMKTQRPWQPLSLDN

SEQ ID NO: 41600 - protein, 343 aa, unidentified
MAIVAGFDVHRRQITFDALDTETGELSRGRIDSSRAAVRSWVEQFPGQQVEVAVEACTGWLFVCEELAAAGASPHLAEPAETKALRGKKRRAKTDRADARHLRQLLCEGRLPEAWLPPAHVCEWRTRTRLRKTLVDERTQWLQRIRATLFHHGIAAAEVPERLLGRRGRSFLEQVALPEAARERITVALTMIEALDEQLAPIERALRRLARRQPGCQALMREFGIGELTAPTILCELGDVSRLSSSRKAVRAVGLDVGVHRSDRRSRVGHLTKQGSPAARWALYEAAQSACRRASPDHAVYLELKARGLSHTRSSLTIARKLARRSFHALRELGPAALEPVND

SEQ ID NO: 41601 - protein, 315 aa, unidentified
MPPPCFVGIDVSKDHLDAHARPQGDAWRVANDDGGITALAERLAALAPARVVLEATGGYQNPLVAALAAAGLPVVVVNPRQARRFAEAVGRLAKTDQIDAATLAHFAEAVPAQPRPLPDAAARELRDLLARRRQVLQMRLAEQQRLPNAAGRVRPAIARHLKFLDRELRRLDDDLGAAVRASPAWRERDELLQSVPGVGPQVSRVLLAELPELGRLPGRRLASLVGLAPFSRDSGRRRGRRRIYGGRAVVRAALYMAALVAKRHNRALAAVFERLVAAGKAKKVALIAVARKLLTILNAIVASGTPWDEKRAARA

SEQ ID NO: 41602 - protein, 428 aa, unidentified
MAKSKAQSVIITDDDGLYYERCAGIDVHKKLLVVCLRIGRRTESREFGTTTAEIREIVAWLTSNGCQMVAMESTGSFWKPLYNIFEQESLPAMVCNAYHIKNVPGRKTDWNDAFWIAKCLAQGLLKPSFVPDRRQRELRDMTRFRKSQIEERSRNINRLQKFLEGANIKLGSWLSDVEGKSATQLLELIIGKPDFTIDDVKSCMHRNLKSSPEELFAALDGYIAPTQREFFSHVMDVIRTQTSQIEKTDALIKSALNEDEIKAVTALDTIVGIGTVSAEQIIAETGTDMRHFRDQHAFSNWIGVAPGNNESAGKRKSGKTIHGNKALKTTLTQCAKSAVKVKNSFFHAQYNRLVSHRGKNRATMAVAHSMAIAIFFVLQGMEFKDLGADYYTQFNREKKINSHLKQLSKLGVNFPDKILADAIERPPD

SEQ ID NO: 41603 - protein, 408 aa, unidentified
MTVVGIDVSKGKSMVAAMKPGGELVAAPYEVRHSDIELSHLALDVLCMEPDTRVVMEATGRYHEPVAALLHSEGIFVSILNPLLIKQSGAGSLRKVKSDPKDALKIAKYGLDNWSTLREYTPMEAIRQQLKLCARQCDLYNKNIVMLTNNLISLSDKTFPGVNELFSSPEKADGHLKWVDFYRTFWHCDCINRMSPDAFEERYKKWCKRKGYHFSTDAADALYAASCGLYTTLPRDNNAKLLVTVATDQLIALRENQSKLETEMLNLCKQLPEYETVMAMYGVGKSTGPHLMAELGDVRRFPHRSSIVAFAGVDPGVVGSGKMQLSSVATSKRGSPQLRKALFQVVSAYVKRKPENEAVYQFYAKKRDEGKPFYVCTTAAANKFLRIYYARVKECLNAAESATQAEEG

SEQ ID NO: 41604 - protein, 357 aa, unidentified
MIRAKVPKKISFEGKRLSVGLDVHAKQWNVSIYLEEVFMKQFQQVPSSRQLSRHIQENYPGAQVVCAYEAGCFGYWIHRELQQLGIECIVVNPADIPTTDKERKVKTDRIDSKKIAFGLSRGVLKGIYVPEKIYESDRQLVRMRSRIVKNLTQAKNQIKSYLRGQGIHIPKEYERSWSKRFMEWLKGLKGLHPSGTIIMEELVSLFESLRSQLLRLNKAIRDLLKEERYESRAKILLAIPGVGLITAMTYLTEIIEEQRFECFDKLNSYIGLCPTEYSSGEQEHKGAITPRAHRLRPLMIEASWIAIRTDPALASCFSDYVKKGMTKKRAIIKIARKLLNRMYTLLKKRQEYQTGIN

SEQ ID NO: 41605 - protein, 385 aa, unidentified
MQINMGQSRFAPFGLPFLGFAELNEGRQTVTASYDYHIGVDYHKSYSHLVVQDSSGKTLRSGRVKNDRQALGSFLERYSENSHAVVEATRNWMVMYDWLDDICDDVVLAHPLKVKAIADAKIKTDKIDATVLAHLLRADLVPEAWAPGEKARELRLALRERMFYVRLRTMVKNRVVTVFDRYPEQTAQLKKLGDLFGKAGRAQLAAIRVSEIDRIQIDRGLEFIGDIDGRIKQSEATIRAMTKTNGNVKLLKTIPGIGEFFARLIEAEIDDISRFRNPKKLAAYAGLVPSTYSSGGKTYHGKIIKQGNKWLRWAFVEAVAPAIATDPQLRAQYEHLKFRGTNKARVAIARKLLTIAFQILRDQRPYEQRDANSEEGASSTISRLS

SEQ ID NO: 41606 - protein, 342 aa, unidentified
MEHIAIDLGSRESQICVRNEQGEILEERRYLTAKLSRFLAKRTPGARVLVESSAEAFQVAEWARQHGHEPRVVPSSLVRALGVGERGLKNDQRDARKLSEMDCRMNVPCVHIPSALSRDRQTEVTARQALVEVRTKLVNTVRSFLRTKAHPRVKGTPESLAKNLRLVLLNTPDGLPDYLERLLATIEDLNERIKAADEALEELAEQDPVCRLLQTMPGVGPVTAVCFATAIDDVQRFEGAHKVSSYLGLTPGENTTGFKTKRTGMTKAGSSRVRWTLNQAAWTMVRSRPNDPLVQWFQQVAGRRGKKIAITALARKMAGILYAMWRDQKPYNPAKAVQELQP

SEQ ID NO: 41607 - protein, 397 aa, unidentified
MIYAGIDIGKDKHCIAAISETAEVLLKPTFVEQSHEGFQKIAEGLRRLGDPSQVKIGMEASGHYWTHFFHFLTEAGWTVELFNPVLSNSQGRCHLRGRKTDKDDALAIAKTLRDGGYTPWAIPSDEHGKLKLLCRQRSFVVSELANAKRRLTGLLDLAFPEFAALFSDHHGKAPVAVLREAPTAKALAEVSVRKLSNVLSKNSNGRHGLELARKLRKAAQQSIAHAQDTEEVGGLIQGMLDHLGFYQEQIQKLETRLKEVFKSIADPIKEIPGIGEKTAPVILAEFGNLSRFTGGYKKLLAFAGLDPRIRQSGRWHGTVKMSKRGSPALRTALFQAASMGRLHNGDLQAIYHHHRHIKGKNHRVAISHVARKLVQIIWATCRNRNAFDPMKICPISS

SEQ ID NO: 41608 - protein, 354 aa, unidentified
MIIIGADYHPGFQQIAYVDTETGELEERRLEQPGEAEKFYRELAAQGKKVRVGMEASGHARWFERLLAELNFELWIGDAAEIHRKRERKQKTDRLDAQHILRLLLKDDFPRIWVPSWENRDLRQLLWHRHRMVQARTRIMNQLQAVALNEGLRSKKRLWREQGREQLEAFRLAPWASRRRHDVLELLDRLNPTIAALSQAIEQEVEKCPEAQRLMTHPGVGPLTALAFVLIIGGADRFQCGKQIASYLGLVPLEDSSGNRRRLGHITKQGNSLLRFLLVEAAQVTVRSLPEWRSKYVHLTMRRGRKIAKVAMARKLAVRLYWMMRKGWDYEQVKKFGSHAGQPGHRHGVKSNIE

SEQ ID NO: 41609 - protein, 439 aa, unidentified
MPTPSLPVLDPTAAAIDVGSEQLHVSIAGGPPKVFGTTTGELHALRDYLLAQGVRSVAMEATGIYWLCPYEVLEKAGLAVVVVNGKYVKNLPGRKTDMSDCQWQGTLHAHGLLKPGFVPPEHIRRLQDYLRLRTDHIVMAGSHEQHMQKALERMNLKIHDVISDLTGVSGLKMVEAIVAGQRNPVALLALCDPQIQKNKAGRLRAALEGTWKDEHLFALRQAYELWQFYQKKIAECDQAIEAVLQVVAGPEDPKNPAPPATKRGGVNAPHITGLHGMLWRLCGGKDPTQLPGVADYVLLQLLSEVGTDLGKNWKTEKHFTAWLGLAPGSRQSGKRRGSQRRSRNRAGRLFCVIARSVGRSVDKALGGFYRRLKGRRGGLVANLALARKLAELFWRLMVHGVNYVEQGLKKYEEKVAQTEQRLLQKLAKKYNLVLQPKVA

SEQ ID NO: 41610 - protein, 428 aa, unidentified
MADITHTTTKPHLLAIDIARRFNAVFIELASGEQRRFKMTNSAQDFDRLVHFINATAGVWRAALEPTGDYHRPIAHRLIQAGVEVVIVSSVAQSRYREAKFNSWDKNDPKDASIILDMLKHGMVMRYVDPMVAGHHDLQELSKTYYQVTRARTKVLHAIVNHHLPLYFPEMQRYWQTTRIEWWLRFMLEFPTPAHVRRLSKEAFIKQAWELVGRKVEKTAKLTEIWQMAEHSAALPHAPDCLAVETFRVSLRQAQHLNELRRSLEQCAQLVLASNKDYEQLISLPGIGPIIALTVLAEVGDIRRFAHHRQFLKYCGFDLAKLQSGAQRGREQLSKRGNARLRLAFWMAGQVAIRLRENAFKDKYDRYIRSDPGNADLRRKALTAVAAKMARVAYSIIKSGQPYQRFYEQSLPSGSIPISRAVEAAPYH

SEQ ID NO: 41611 - protein, 389 aa, unidentified
MIYVGIDVAKDKHDCCILGTEADKLYPVFTIPNNKAGFDELYEKIFSVTNDKTKIKVGLEATGHYSLNLLGSLIDKGLPTCVINPLHTNLYRKGLSLRKTKTDKVDARSIAMMLMTNKTLKPYLDTSYHSEELKSLTRYRFDKVQERAKLKSSVARLVNILFPELEKLFPSLHMASVYALLSKLPGASYITECHLTHLKNLLETASKGHYGRDMAITLRNTARDSIGSVIPAKSMELKHTIYLIEVMTEEIDEIEDSIKSIMDTCNSPIMTIPGISYRMGAMILAEIGDFTRFNYADQILAFAGLSPSTYQSGQLDSSYSHMEKRGSRYLRYALFNAAKFVCKWDENFGAYLSKKIGEGKHYNVAIGHATKKLVRTIYRMELTGEAYRR

SEQ ID NO: 41612 - protein, 360 aa, unidentified
MEHYGAIDVSLEWSSVCVVDAAGQIVREAKVQSEREALVAFFERSGLRFTRIGLEAGPLSQWLHAGLVEAGLPAILIETRHVKAALKAMTVKTDRNDAREMAQLMRMGWLRPVHAKAPVVQEIRALLTARKLLVAKLRDVESSIRGILRGFGLKVGAISKGKFEARIRELVAGQAMLERAAEPLLRARAALRAEYATLHRELLRTVREDEVCGRLMTIPGVGAVVAMTFRSAIDQPRSRAVGAHFGLTPKKYQSGEIDRTGRISKVGDAMVRTALFEAANVMLTRAVRSSVLKAWALRVASRHGMKKAKVALARKLAVVMHRMWGSMARPFTGAGPRDRRRLSRPAPPSPPWQPGDAWIG

SEQ ID NO: 41613 - protein, 467 aa, unidentified
MNSIVLTANVQPNLDVNYIGMDVHSDNVVVCVRRNTINSSGQLVGKTIKTKKVVIKNSQEPLVELLSKYADGQQHIMTAESTFNWYWLADIAEDHGWNFRLADPCTVSQANIKAANDETDAEYLADRLRTGSLKSTSVLPRQLRGVRDLMRHRLRVMQEVSDKKVRLSNLYHNHCAHPMHGKLLAALQDAYDEINIDAVLESGICNNGSELIIGDLLTGLREAETRLAKIEAAVYARIDEIDSYKAERMLLKTSMKGCGDVLSAIIVTEIGDISRFRTMGDFVSYCRLAPTSKLSNGKSKGQGNAKNGNAYLSWALTELATLMARFNEPIRRYLERKQEKTGLRVVAVRALAAKLARCVYQVLQKKESFDLGLAFGSKPTHGQMTAAAEAAQTPPEPALPPVPAVAGEHHCPAEESDAPIVVKEPVPVKSKRSTRKKAVSAASSEPAVAAEGRRPRVRRIGLRHVVP

SEQ ID NO: 41614 - protein, 341 aa, unidentified
MKDYIGLDVSMKETAVSIRRNGERVWRGKCVSDPAVIAQLVRKRAPAVDRIVFETGPLSVWFYHALRAEDLPAICIDARHAKSALDMAPNKTDANDADGLAHLAEIGFFREVRVKGFESMLVRTLIAARNRLVRITVDLSNHIRGFMKTFGLLIPAGKGSTFEGHVRRLLSDQPKLSEILLPMLDAWCATRLQAARLARQIAAEARQNDGCRILMSIPGVGAITATSFVAAIESPDNFRKSRSVGAWVGLTTRRYQSGEVDYKGHISRRGDHHLRGLLYEAASVILTRCSAESDLRAWGLKLRERVGFKRAAVALARKLAVTMHAMLRDGTLFERAMRPTA

SEQ ID NO: 41615 - protein, 371 aa, unidentified
MNFIGIDLHTNRFTCCYRNEMSPTDNPVKGREIKTFELNESGLTDFYQTLTSDTYVLVEATITTFCFIRLFKDIVKEVIIANTYELKQISMARCNTDKIDADKLCRILKMQIISGEQLISPVVLPPEDIQDLRSFFTTYRLMKKQSIQLKNRIHSLLKERLLGFTQEEIFDKKNRERIRSILKGSPMNIQVNLLLDRLEREEAEVKELQNQIMLHASPFMSQIEILTSMKGVSVFIAIAIIADIIDVKRFRNSKAFTSYLRSAPKVSNSNTSVSIKGTNKKGRKLSATLLTQSLNHVLDASPKLRRWYDRLCEYKKPGMVRTGLRRRVFAEIFQMLKKGEYHYAREEKKHEAKMSQYRVFLKKRKILLEIA

SEQ ID NO: 41616 - protein, 354 aa, unidentified
MSNKSIATIATMGIDIGKNSFHVVGLDRRGAIVLRQKWSRGQIEARIANMPPCLIGMEACVGAHHLSRKLQALGHDARLMPAKYVRAYSKGQKNDFRDAEAIAEAVQRPTMKFVATKTADQLDLQALHRVRERLVRQRTGIINQIRAFLLERGIAVRQGLRFLHTELPGILGKRSDVLSPRMMRIIEDLACDWRRLDERIEGLSANITSLVEKDPACERLMTVPGIGPIISSAMVAAIGTGDVFSKGRDFAAWLGLVPKQISTGDRTILGKISKRGNRYLRVLFVQAAWVVLIRPQSWERHGLKSWIEAAKKRLHHNVLAIALANKLARIAWAVLNKERNFEVTRTTAPSSQPA

SEQ ID NO: 41617 - protein, 525 aa, unidentified
MVTKSKKQKRSSKSKPKRRYIGKPGGVIQERVQEARPEQFGIVSVDCAKKRSKWMLCDFYGRVMIEPTVVEHNHGALLAMTTQIQQAIEAEGVIDSIAAVEMTGVYHRPVQAALRKAGFDTRIVHPFASSHYRKPLHPDIKTDDNDLEAIFHAAINGYGLSILEVDPVYRSLQRLARHRRNLVKQRARLQIQIRALMHQSMPGYADLFEDGKLFSKSVAMPVAKQFSSSAAAKKAGSEGMAKYLKSQKIRFQIRTLERIAAWASIAADPDPLGPMLTDQWKQLAQLHALMTTQVEATERETAGFLVKTPYILLLSVTGINVVSAGELAGEAGPIEHYASVTALNGRAGLYPSRYQSDEVDRSASVAKSCNRRLRAACVLVAKNLIKCHPYYRGHAALLKSRNVATVDQQCRIANRANRMIFQIVSGRQVWRGKGIDREYLLLKLREFHRTHHSTLEQTVVDMNEAFAWLPKSSYAAEAKPLAELARKKRRGATSIGDLLLPLLIRLGVGSENTLESSSSEARSPQ

SEQ ID NO: 41618 - protein, 280 aa, unidentified
MDRYIGLDAHASSCTVAVIGPSGRKLQSQVLETNAKALISFLETIPKDRHLCLEEGTHASWLYEVLKPHVEEIVVAGVRQSRGPKSDKRDAFKLADELRVGSIEKRVYQESGGFAALRALSQAYTTLVTDSVRIQNRIKGLYRSRGIATSGRKVYLPASRQAFLERLPGWLRLRGSALYLELDAVNALKKQAAKSLLEEARRHPPYRLLRTCPGLGPIRTAQLLSIVVTPYRFANKRSFWAYCGLAVVMRTSSDWARTQDGKWVWAALQRTRGLNPDLLT

SEQ ID NO: 41619 - protein, 371 aa, unidentified
MEKYKFVGLDVHKETIAVSVAEADGGEVRYQGEIPNTPDAVVRLVRRLRKEEGVKLSFCYEAGPCGYGLHRQLLDLGQVCQVVAPSLIPKKPGDRVKTDRRDSLNLARLHRAGELTAVWVPDGAQEALRDLTRAREDMKHLQRQAKQRLLGFLLRHSKRFEGKDNWTQAHFRWMEEVKFEQPVQQIVFQEYVDSVQAMTRRVRAFDEQMESAARDSVFWPVIEGLMALRGVKLITATTIVAEIGDLRRFATAPQLMAYLGVVPSEHSSGESKSRGGITKTGNGHVRRVLVESAWQYRYPARKTAVLQRRAERASEQAQEIAWKAQKRLCARYRLLEARGKLKVQVCIAIARELAGFIWAIGQTLPQPAARA

SEQ ID NO: 41620 - protein, 297 aa, unidentified
MEQSSTLYVGLDVHKDSIDIAVADAPRDAEVRHLGSVAGGVTAVSKSMRRLVSAGHRLHIVYEAGPCGFVLQRHFTALGWRCDVVAPSSIPHPSGERIKTDRRDAMKLARLARSNDLAVVRVPDGADEAIRDLVRARDDAVREQRNGRHRLKALLLRNGTPYAGKCSWTAAHLRWLATIKLEHATQQISFQEYLHSITESGARIGRLEQAMRDALPDWSLRPLVQALQALRGVQLIAAMTLVAELQDFLRFDNARKLMAYVGLVPGERPGTSRPRRSSRATVWARPLTVQVTASTTH

SEQ ID NO: 41621 - protein, 437 aa, unidentified
MRVLYEHVAGIGVHKDMIKVAIRSPGEKPWTRKTEILEFRTFYGVLQEMARLLRRRGVTHVVMEASGVYTDPVCYALCEQDFAGVAVVNPAHARALRGHKTDAADCRRLAELFECGLLRGSYIPPAELREVRDLTRYRMKTVQARTSEIQRLGKALESAGIKLGSVASDITGKSATAMIDSLIDGERRGAVLADLAIGRMRTAGKLADLSMALTGRFTEHHALLCRLHRDRIAGLDAAVADLDDQIAGRAGRWQRELDLLKTVPGFGDVVAQTWLAEIGPAPHRHFASHEKLASWVTLCPGNNISAKKRKHGRTGDAGTYIKPMLIQAAWNAIRPKGRLQARYSRLVRRFGGEKNPGAKKKAITAIAHTLLKIASQVLKSEVPYQDLGADFCTRRESPDQQRAYLERRLRKLYPGCAITITISPPEAVLTSTVSNAP

SEQ ID NO: 41622 - protein, 415 aa, unidentified
MLPPEMRGVVGIDVAKTSPVVCALEAPGGAVRLKSTSIPASAAGYAQLVGWLRAWGQASTLLIGLESTGSLWEPLYDRLVQEGYGVALLNPHQTASWAASLGLRAKTDGIDARTLARGLLAGWARASTVPDETVQALRTLTRTRRDLVVSQSAARQRLHDELVPVFPELVGQLPDHADLGAPAILRLLAVYSSAHALAYAPLDDVARLLAEVSQRRWGRPHAQALQEVAHVARTSAASTRAVAARGVVVRTLALHLLDLHARVAELETALAELLRTDPPSQQLQAEVPGLGPLWTATIRAELGDVSRFSRVDQVVAYAGLEPRTHESGRFAGQRRLSKRGPGELRHALYMATLVAVRFRPEWQTRYQRLLDRGRAKKEALTILSRKLLKVIYYLLRTGASYDPAYLNPGPPAGRG

SEQ ID NO: 41623 - protein, 366 aa, unidentified
MKKISTVQVFGNEIFKEQKLTIGVDLGDRWSFYCVLDEAGKIILEQKVSTTPEAIKQTFGKIPQSFIAMETGTHSPWVSRLLTELGREVIVAHAQKVELITKSNRKDDRHDARTLARLARIDPELLGPVRHRSAKAQIHLTMIRARAELVSARTALVNAARGLAKSFGERLPKCGTQQVSGKLAEGVSAELRDVLAPLLREVASLNERIKEYDERMEKIAKEVYPEVSLLQQVKGVGTQIALTYVLTIEDPYRFPKSRAVGCFLGLRPGRRNSGESEPQKKISKEGDRYLRTMMVQGAHYILGPFGEDSDLRRWGRKLAERGGKNAKKRAVVAVARKLAVLLHRLWVSGEVYEPLRNSQKAMRAVA

SEQ ID NO: 41624 - protein, 362 aa, unidentified
MPKMIWLGMDVHAASITVARYQDQAATAMVQTIANDPAQVRRLVRRLPAGCDVRACYEAGSCGYGLHRQLTALGVHCDVIAPALIPRRPGERIKTDRRDAEKLGRFYRSGELTTITVPTPSQEGVRDLVRAREDVRRDRTAARQRLAKFLLRHGHRYPGSHWTKRHWEWVCGHTFDGPARTVFVHYCDHVLALNERLAHLERELRTLAESAAYQPVVTRLSCLRGLATLSALVLIAELYDLRRFRTPRELMAYLGLVPSEHSSGARERRGRITKTGNALARRLLIEAAWAYRHPARQTRRVHQALTTQPPEVHAISDRALHRLTARYRRLLSRGKTPHHAVTAIARELCGFVWAIALVPDLA

SEQ ID NO: 41625 - protein, 366 aa, unidentified
MKKISTVAIEKIQIFKGKQLTIGLDLGDRTSHYCVLNEAGEVIVEDKLATTPRRIEEVFSRIPRSRIALETGTHSPWVSRQLTQLGHEVIVAHARKVRLIWESSRKDDRLDARTLARLARIDPGLLGPVRHRSAKAQIHLTVIRARATLVSARTALVNAARGLTKSYGARLPKCGTEQIHRKITKELKPELREALNPLLAEIESLNARIAEYDTRIEQIAKEVYPEVSRLKQVKGVGPLIALTYVLTLDNPYRFRRSRDVGCFVGLRPGRRNSGMSEPQLHISKEGDRYLRTLLVQGAHYILGPFGQDSDLRRWGLKLSERGGRNAKKRAVVAVARKLAVLLHKLWVSKEVYEPLRNNRKQMAQVA

SEQ ID NO: 41626 - protein, 347 aa, unidentified
MRFYTQQHKHYCGIDLHAKAMYVCILDQSGTKRVHKNLPTTPEAFLRAIAPYREDLVVGVECIFTWYWLADLCQQEGIAFVLGHALYMKAIHGGKAKNDKIDAHKIAVLLRGGMFPLAYVYPPEMRATRDLLRRRCHLMRKRAELLAHIQNTNSQYNLPEIGKKLAYKANREGVEEHFPEPSVRKTIELDVALIDHYDKLLGEVELYITRTAKGHDPQSFARLQSVPGIGQILALVILYEIQDITRFPRVQDFLSYGRLVKCAKESAGKRYGLSGKKIGNPQLKWAFSEAATLFLRQSQPGKAYFAKLERKHGKGKALTVLAQKLARAVYFMLSRHQAFDLTRLVSA

SEQ ID NO: 41627 - protein, 454 aa, unidentified
MCLEDRPVLEKNAAGIDIGSREIFVAVPPDRDQNPVRVFATFTENLQELAVWLLRCGVTTAAMESTGVYWIPLYDILEQHGIKPCLVNARHMKNVPGRRTDWHECQWLQYLHSVGLLRSAFRPAAEVCAVRTLIRHRGELVQAASQQIQHMHKALTQMNLQIHHVISDLTGVTGLAILDAILAGQRDPVTLARFRDPRIKATEETIRKSLVGNWRREHLFTLKQSRELYRIYQQQVVACDQEIESLLNQFTPRVDTAEKPLPPDRKRNRAARKRRKKTGNPDTTFDLRTEAYKLFGVDVTQIPGVETIALPLFSEVGRDLSKWPTGRHFASWLALCPDNDISGGHVLWRGMRKVNNRAGRLFRLAAYSLHHSLTPMGGYLRRMKSKIGPTAATTATAHKIAIVFYTMVKNQVEYDETLWAMLDINRQKYLEAKLKRQAKQLGYELIPIGEKPAA

SEQ ID NO: 41628 - protein, 347 aa, unidentified
MSITMIGLDTAKSVFQVHAVDDTRQVVIRRKLLRSELLPFFEKQEPCTVAMEACGAAHHWARVLTGLGHNVKLIAPEAVRPFVKRGKKNDAADAAGICEAAFRPGVRFVPIKGLEQQGVLALHSARSLLVKQQTMLANAIRGLAAEFGLAVPLGMGRLGELMALVDAGEAVPAKAQQALTALSDQCRALDESIETLEAEIVAHARHDDTARRLATIPGIGPITASLIAATVADIGVFQSARHFAAWLGLVPRQHSTGGKTRLGRITKAGNREIRRLLVLGATSMVRRAPGWNSAAGAWARGVLERRPARLVTVALANKMARIAWAVMTRKEVYHAKGRVAVAAEAMA

SEQ ID NO: 41629 - protein, 376 aa, unidentified
MLQPRQREKLAGGTSVKEHAMSEKLNSAVAVIGIDIGKNSFHLVGHDKSGTIVLRQKWSRGQVETRLANLSPCLIGMEACVGAHHLSRKLQMLGHDARLMPAKYVRPYSKGQKNDFRDAEAIAEAVQRPTMKFVATKTAEQLDLQALHRVRERLVSQRTGIINQIRAFLLERGVAVRQGLRFLRAELPGILATRSDVLSPRMLRVVEDLAGDWRRLDARIEGLSGEIEALAQQDQACVRLMTVPGIGPIISSAMVAAIGTGDVFSKGRDFGAWLGLVPKQISTGDRTILGSISKRGNRYLRVLFVQAAWVVLVKLGPKHWERYGLKSWIEAAKKRLHHNVLAIALANKLARIAWAVLNKERAFACVKTDATASRPA

SEQ ID NO: 41630 - protein, 388 aa, unidentified
MFFLGIDIGKNTHVASLLDEKAKIIFKAYSFANTLDAAEALLLKLEPYKDSLEIGMEATGHYWLSLYSFLAEHKFIVHVLNPIQTDGWRKGIEIRKRKTDVIDSVLIADLIRYGNFLETSLADEDILSLRNLSRFRVYLVNSVSDLKRKAIAVLDQIFPEYASVFSNVFGQTSKELLKSLSLPSDYENLSATKIEEVLSNITQKKKASKTISTLSDKASRSFGISFCKDSFAFQLKLIIEQICFIEEQIASVELEIDQLMSKLGTNIKTIPGVGSVIGAVILGEIGDIERFDNPSKLVAYAGLDASVSQSGEYEASSGKLSKRGSPYLRKALYMAAQRAEFCDPVFHAYYEKKRNEGKHHLVATNAVARKLCHTIYAILKKDVPYEVQ

SEQ ID NO: 41631 - protein, 417 aa, unidentified
MTVNSLMQRRSAIKPDTLVVGIDVAKSNHVARTLVPGGAISRPFVFSNNREGFIALAAEIEARKPVPTSAVIVGLEPTGVYWLNLARWLVEQGYQVVQVSGLYVHRAKELTDNSRGTSDGKDALLIADLVAQGKYLGFVRPTGVLADLRQLVTLRQRLVQERTARYSLLHHSIELLFPEFRAVFRGVTGPGARRVLRHFPTPAAVLAHSADEMRRLLSADGRRRVNSTKLAQLRAVAEQSVGACEGTTGMQYALMDTLRELDSLDSRLHDVELEIGRLLAQIDETPILTSLVGPMTAAIILGETGGLRQYSCAVAVLKLAGLNLYQISSGQYRGDRHISRMGRSLLRQALYLAVLQHTHRGAPLYPYYAELLRRGKPKPVALVALCCRLVRLLYALVRDGRCFSPQPPENNQPSAAA

SEQ ID NO: 41632 - protein, 431 aa, unidentified
MNCNTQNAKLGTITEKTLVVGIDVGSETHYARAFDWRGYEYSAKAFRFSNTEAGFASFLTWMQDIAKDNGKQAVLPGMEPTGHYWFELGKFLQDNGLKPVLVNPHHVKKSKELDDNNPSKNDRKDPKVIAGLINEGRFSYPYLPEGIYAELRSASNLRFQAQEELTRVMNRIARWFSIYFPEYKDVYGKKDSKSGIMVLEQAPLPADIKALGVDGVNKIWRDAKLRGAGLKRAKKLVEAAEHSIGSQEGLTAARMEIKNLLADYKTYSSRLDELVELIDKLMTEIPYVDKLLQIKGVGIKTVSGFVAEVGDIRRFDNPKQIQKLAGYALVEDSSGKHQGETRISRRGRKRLRYLLFEAALSLVGKNKEFRELHDYYTHRPENPLKKKQSLVAVACKFLRVAYKILTTGVDYDGGKMLNDIKRPQKQLPQAA

SEQ ID NO: 41633 - protein, 391 aa, unidentified
MIYVGIDVAKDKHDCFIINSDGEVLFKAFSIANNRNGFNDLYQKIESVMEDVTKVKVGLEATGHYSYNLLGYLIDKGLPTYVINPLHTNLYRKSLSLRQTKTDKVDARTIASMLMSDVNLKSYSDTSYHNEELKSLTRYRFDKVKQRAKLKSSVSRLVCILFPELEKLVPTLHMASVYTMLSEFPDAKQVANAHLTRLTNLLSESSKGRYGKETAITFRNAARTSIGSNMPAKSLELKHTIKLIQELTSEIDEIENEIKLIMDEINSPILSIPGINYRMGAMIIAEIGDFNRFDSPDKILAYAGFSPSTYQSGQLDGAYSHMEKRGSRYLRYALYNAAKYVCNWDPTFAEYLAKKRAEGKHYNVAISHAVKKLVRVIYHLEKTNQQYIKAV

SEQ ID NO: 41634 - protein, 357 aa, unidentified
MSTMPCLPVEVILGVDTHRDTHAVVLVDLVGRLIATATFPTTRPGLRALIKWAQQRGNVRRAGVEGTGSFGAGLTRALHHEGIEVIEVTRATRVGGRHRGKNDTRDAEAAARSVLSGQATAAPKARDGIVESIRVLRNTRASAIKARTQAILHIKNLIVTAPDELRETLSPLTNRQLVKRCARMHRSARRDSLAATRHALRSLARRHQDLDSEIAELDQLLGELIAQAAPRLLKQPGIGPEIAARMLLVAGDNPTRLRNDAALAALCGASPIEASSGKTTRHRLNRGGDRQGNSALWLIANNRMIHHPQTRDYVKRRTTDGKSTKEIRRCLMRHIARGIYPLLIADLHDAHQQSALT

SEQ ID NO: 41635 - protein, 430 aa, unidentified
MMTPMNTTSITDFAATIGLDWADRKHDLWLCPAGQAKAEHLRLEQTPEALHEWAAKLRARFPDRRVAIAVETSRGPVISALMAYDFIVLFPVNPKALKDYRAAFCVSGAKDDRTDAMLLEELVRLHRDKLNALEPDTELTRKLAGLVENRRHLVDERTRLVNQQHSTLKTYFPLALDLLEDQMNTLLAAEFLVRWPSLAALQKETPKALRAFFYKHNSRNAKRIEQRIQAVPTAQPLTTDAAIMEPACALVSARAAMLRPLLKAIHHLDQAIAQAMDQHPDAAIFRSFPGAGPALAPRLLVAFGTNRERFGSAAEVAQFYGIAPVVQQSGNSKTVHMRYRCPKFGRQSFHENAACAFKKESWARAYYDQHKHDDKHHPACRSLAFKLIRIYFACWRDKTTYQTDLYVQALQNNGSPLHKALKTQPAPSCE

SEQ ID NO: 41636 - protein, 349 aa, unidentified
MVADEVDYVVGVDTHRDEHVLAVVTAPAGAVVAKQAVGANSRGHREALRLAERYAPGARAWAIEGAGHYGSGLARYLSEHGEAVLEVSRTPRNERRLRGKDDQLDAVRAARAALASETLTLPRSGERREALRVLLIARRSAVDVRREALVQLRSVIVTAPDRLRDELRGLPVGRLLARCSRLRRSAAAPADELAVRIVLCTLARRIEAATAEAAELEREILAHIRALAPQLLDEPGVGPIVAAQLIVAWSHSGRLRSEACFARLAGVAPIPASSGQTVRHRLSRGGDRQLNRALHTVILHRRQHDSATRDYIARRVAEGKSTRDAVRLLKRYLARHLYRLLQDQELLMA

SEQ ID NO: 41637 - protein, 389 aa, unidentified
MWVMRAVCGLDVHKDSVYLCILCETGEIFENVYGVLTHQLKDMCRAMKARGVTEVTMESTAVYWIPIWRVLEPHFRLKLVNPYFIKQLPGRKSDVKDAQWISECTLKDLVRGSFVPPERIQQLRQYDRRIFDLDVEIVRKLSKLDAVLQRCNIRLSNYVSNTDTKSYKDVVDELCKGVTDPEELIRKVHGRIVNKHGRETILASLTGVVSEAEKDAMRQLRTEINLAEEHKQECQDKMLSICKTYYPKELKRLMTIPGIKERAATSLIAEIGVDMTKFQTAAHLASWSGLKPRNDESNKKIKSRRITHGNVFLRKTIIECAWGASRTRDCFFSRFSFHQTQVRKKNKMKVLVAVARKLLIAVWHVLHDGTDYKDFGANDCDASAVENNG

SEQ ID NO: 41638 - protein, 437 aa, unidentified
MGNCAGIDWASEKHDVLIEGPAGEELLAETFAHDEDGVSGLCGALACFDVELVAIERTDGLLVDRLLEAGVRVLALHPNQVKAARDRFRASGGKSDRFDRFVLCELARTDSHRFRILEPDSDQTKALRALVRAREDLVGARVALANQLRAELQRFWPGPVGLFSAIDSPISLAFLARYPSPVDARGLGEKRLAAFLKAQQYSSHKTAGQLLARLRSAPTGRAGEAETRARRSVVARLVATLQVMVKQIGELESEVSQSLDIHPDGEIFRSFFRSRDSVICAATLLSEIGDCRARYPHRDAIAADGGQAPVAKESGKRKHAKFRWACNKRLRNALGTLAHSSRQWHPWAADRYGHARQRGHNHRRALRTLGRAWSRIIWRCWTTHTPYDPARHTGLQQHILVTIPGPSGPRPDLTATQRMAGETVTRRATRRVERASA

SEQ ID NO: 41639 - protein, 390 aa, unidentified
MYIVGIDIAKRFHEAAIIDRNGKVVVKRIRFANSHTGFLSLMEAVRKLDASAEFGMEATGHYWLPLYAHLRQAGQTVRVINPLQSDALRNMYLRRTKNDTIDALIVAEVIRFGRYCETQVAPENIVALRELCRQRFFVVDMASDFKRKIIALLDQTFPEYEKLFSDTFGKSSVELLANYTTPEEMLSVDTQILADLLNKASRGRFGLDKANQIQQTAKNSFGIMLASSSFSLIIRQYLEQLKSFESSIAAFDAEIARLMTGFDTKLETITGIGTTLAAVIFSEIGGDIKKFSSVPKLVAYAGLYPKLRQSGESKTDGRMSKRGSPYLRRAVWLAASVAAFKDSAISAFYQKKRSEGKDHLTAIGHVCHKILAIIFAVLRDNKPYVPTPTT

SEQ ID NO: 41640 - protein, 454 aa, unidentified
MTSTGTVHSPTTIQARAGIDCAIVANHQCELIEYRDDGTTRTTRKTIPSTAAGMNELTRFLAAVDVAVDVVAEPTSLTWVGIQAAVGAAGGRFYLIGTRHSSRLRAAVAGKNKSDVIDAHLLAKALDLFDLEPLVVADVGSEAIKRSALSRGDARVHYDQCWRRLRSYVAATVPDIDKILAGSRTRTLAVLGRWPDLRALARAHRSTIAAVLRQHSYCSGRQEQIADQLRSAAAAWVSILEDYYDLDFWRLKVAGMLADIDQAADRFDRYTEQLDGLWHAFYGPDDLLLSVPGTGPITAATIRGWLGDGSRFARPEDFASYCGLTPSNWSSGTMEHKHRAISKEGPSALRMAVFLAANAARTSDPQLARVYHRLMVDKGQHHNKAVCAVARKLAERIWIVVHRNAPYEYRDDDGAILDITQARAIVRERYQVPAEVRARHRNHTTAQRRARLAA

SEQ ID NO: 41641 - protein, 454 aa, unidentified
MQLWCGIDWAENHHDVSVVDETGTQLARMRIEDTVAGFSQLMSILTEQQRSSAEPITVAIETAKGLLPAALRAAGVPLVAINPLAVSRYRDRHSPSRAKSDAGDALVLANILRTDPHSHRPLPADSELAQSIHVLARAHQDAIWDRMQIASKLRSVLRQYYPSFLAAFPDLASREARAVLHLAPSPAQGQLVRKSALTAALRRAGRTRGIPAAVAVIHAALRREQLHQPPLVEAAMAEHATALLHALDAAVTAVARLEESLTTAFNQHPDAGIITSFPGLGTVLGARILGEIGDDRTRFATARGLKAFAGTAPITRASGMKTIVTRRVVRNKRLGQAAYLWALPMIAHSPAAHAHFTARREHGDSYSAAARNLTNRGIGMLHHCLQTRQHYNETRAFPGHPAQRVTPDRPLAGQAYQETGAHPHPAPGHNDQRPVTSIAPPASQACQKTEAQPA

SEQ ID NO: 41642 - protein, 351 aa, unidentified
MDVIGVDCHKEMHAAVLVDAHGHEQGRWQGENSLSGWHALVDWGYSHTTSVVWGIEGTGQYGRGLAQLLVASGQTVYEVNPRLTAAQRRVSRTRGKSDATDALAIARVVQQEPSLPVVQSVDATAVLAVQVAARAALVGDCTALRNRLHQHLAHLRVYRATPWPKLTSRTGVTALTDLQLPDADALAQAHAQQVRLLTQQMLLVMAQIDELTRSIETLSTGWTAPLQAVIGVGRLSAGMLAAHLGGKTFETDAALAMYAGVAPLDASSGRQLRHRLNRSGNRALNAMLHRIALSQSRHSPEARAYLAKQRAAGKTAKEAMRCLKRMLARLILTAWRQCQPPPLAHISLPLT

SEQ ID NO: 41643 - protein, 352 aa, unidentified
MTKFSVYIGIDWANDKHDACIQVANSNAREFEVIKHSPKSINEWIANLHNKYKGQIAVAIELSKGPIVYALQKFDFVTIHPVNTSMLAQYRKAFSPSGAKDDPTDAELALDLMLRYPNKIKALKMESESVRKLPYLVEQRRKLVEDKRRFSNRLIVTLKEYYPHLLDWFSHRGSGIFCDFITRWPNLQKLKRARPETLKKFFSSYPGRTASYSVKRIQSISEAEPITLDNAVIESHQLLAVALANQLLVAVKVIEVFDREICKLFNALPDAELYKSLPGTGPCLAPRLLVAIGENRSRFNSASEIQLYAGIAPVTVHIGQKSWIHWRYQCIKFTRQSFIEWAAKSIKRSYWA

SEQ ID NO: 41644 - protein, 386 aa, unidentified
MSQPNNLRRCHTTLDQDSSLIAVVEMSRSSWLVAGIVPGISRQPAKKLKPDQTALLGLLRRWQDEAAKAGRRISRLAVAFEAGRDGFWLARWLRARGIEAYVIHATSIAVSREHRRAKTDRLDTELLKRAFIGWLRGEPNHCSMVPIPSLEEEDAKRPNRERESLVGERTRIVNRMKSLLARLGIRDFKPTLRKAPEHLATLRIAEGMQLPPNTLAELRRDMARLRFVMDQITEIEQARLDRIAQRPEEGMHAMVRVRAGVKGIGVETADMLVHEIFSRPLRDRRAVARYAGRTGSPDESGGRRREKGLAKAGNARVRRGMVQIAWRFLVFQKDSALSQWFRFRTENARGTRKTMIVALARKLLIALRRFTRTGELPEGVALRASA

SEQ ID NO: 41645 - protein, 362 aa, unidentified
MRNITIGIDLAKSVFSTCTVDATGRVVQRQDLRREAFASWLVQLPAGTLIAMEACSGAHHWARRGFEHGLQPRLMAAQFVKPFRKSQAAKNDRNDAEAIATAARQGNMRFVPVKSIDQQARLAEHRVREGYKADALAASNRLRGILAEFGIVVARSDAALRRLLARLDELAIPASTREALDQLQRHWSALREHETTCSRRILAQSHDDERCTRLRRIIGIGPLTADALVATIGNGHDFRNGRQLAAWLGLTPSQHSSGGKARLGTISCRGDGYLRTLLIQGARSSLQRAQVVAVAKATPEQIWIRDLASRLPFGKVVVAIANKHARQAWAMLARGEDYDAHAWLKHPMVQRPASKRRQQACS

SEQ ID NO: 41646 - protein, 331 aa, unidentified
MATYFVGCDVSKKKLDLGLLLSLEPLKLRSKVVENHQPGWKTLIEWACRQANCSAGELHVVMEATGAYHEAAAYALVQAGVKVSVVNPALVRDFAKGLAVRSKTDATDRAVLARYGAITKPPRWQAPSPEVVELKGLLNRLQVIECDLARESNRLEKAQVSVTPQVVLDSLHKSLAFLEQEKADLERRINDHIEGHPQLKHDRELLESIPAIGRKTACRMLCVLHSRRFRAAASVAAYLGLVPVQHRSGTSVYRPPRLSKAGDGAMRAALYMPAIVASRLNPDIRAHYKRLLAQGKSKMSALGAAMRKLVHICFGVLKNQQPYQPRVAQTS

SEQ ID NO: 41647 - protein, 344 aa, unidentified
MKLFIGLDVSLAKTAVCVVNEHGKIVKETEVASEPEALAAFAGTLPGTVAIIGLEAGPLSQWLHRGLTEAGLDVVLMETRQVKGALKAMPIKTDRRDAEGIARLLHIGWFRPVHCKSVSAQEVRALLGARKAIQQGMIALEMSLRGLLRNFGLKVGAISRGRYDMRVRELVEGNAMLEAATVPMLKSRAALRSELANLEREVRGLAKDDPVCRLLMTMPGIGAVVALTFKSAVDDPARFKSSKRVGPWVGLTPSRHQSGERDVIGGITKAGDVNLRRALCQAATVMLHRGRPSWLRTWAARVAKRRGNKRAMVALARRIGVVLHRMWRDGTEFNHAIPPIVGSI

SEQ ID NO: 41648 - protein, 337 aa, unidentified
MPLFVGLDASKHTTAICILNAEGVLVAEGEVGTDPKEIIAFLRGRRERYRRIGIESMSFTPWLYDGLAKAGLPVICIEGVLKARLNKTDRNDARGIAELMRAGIYKAVHIKSAQSQHAKLLITTRKMLLSKSRDTENLIRQALLQYGLKLAAGGLRNTFHRRVDLVLRDANEPLRSVTEALLGARAVLVEKAKLIEGEIVAMARADPVCRRLMTAPGVAALTALIYKSAIDVPERFANSRDVGVHLGLTPRIHQSGPVERRSRISKCGDASARSTLFLAARIILVKVKKRSRLKEWGLEVRARRGFAKASIAVARKLAVALHRMWMTETDFCDAPVA

SEQ ID NO: 41649 - protein, 353 aa, unidentified
MRTYYVGMDVHRATIAIVVLNGAGKVVEQLVVETSATRVRCYLKQLQGRVYVTFEEGTQAQWLYDVVQPLVTEVIVCNPRHNKLLKAGNKSDRIDAQKLAELLRNGALKAVDHRDHGVRALKELVRNYDCLVSDTTRVMNRLKAMFRQQAIACGGHEVYRQDRREVWLAKLTERGAKARASSLYRQLAALKALRHEAKLAMVREARRGAAYLWLMSVPRLGAVSVAQLLAVVGTPHRFRTKRQFWSYVGLAVVTSSTADMEVVDGVLRRSRRPVATRGLNRNHNHLLKRVFKNAATSACQSAPFKQHYERRLQQGMDPALARLTVARQLSAITLSLWKRGEKFQAERMKRQAA

SEQ ID NO: 41650 - protein, 457 aa, unidentified
MTRRKHSRPARDIAPVHPHAAAVDIGATLHVAAVRPGCDPEPVRTFGTFTTDLHRLADWFEQCGVETVAMESTGVYWIPLYEILDQRGFEVVIVNARDAKNVPGRKTDVSDAAWLQRLHEYGLLRASFRPKGEIATLRSYLRQRERLLDQAAAHIQHMQKALTEMNLQLHHVVADVTGVTGLRILRALVAGERDPDTLAAYSDPRCKAPAETLRAALVGNYREEHVFALAQALELYDIYQAKVAACDQRIEAVLERLKAANPPPAAALPPARPRRRQANEPGFAVREALHAILGADPTQIDGIGPSLALTLVGECGTDLSAWPSAKHFTSWLSLAPHNKISGGKVLSARTRRSGSRAAALLRLAAVAVGRTATALGAFYRRLAARVGKAKAVTATARKIGVLFYNMLRHGMDYADPGASAYEARYRQRVLSNLRRRAKSLGYVLQKADPASAAIAVS

SEQ ID NO: 41651 - protein, 356 aa, unidentified
MDNRKYIGMDVHQASISIAVSDAAGKVLMECIIETKAATVLEFIQGLRGSLWVTFEEGTSAAWLYDLLKPHVTKVVVCDPRKNALLKAGNKNDRVDARKLSDLLRAGLLTPVYHGESGVRTLRELSRGYLAVSKDLTRVMNRLKAIYRSWAIPCAGQQVYSPRHRAAWLEKLREAGVRRRAEQTYQQLDFLMGIRKETRKELLAESRKHPARKLLEQIPRLGPIRVALLIALIQTPHRFRTKRQLWNYCGLGLRTRSSGEYRYTGGQLQHARKPPALRGLNINHNHELKNLFKSAATQAGTSKDDPLGEFYQNLLASGMEPPMARLTLARKIAAIALKIWKKGERFDPAKLKQQAA

SEQ ID NO: 41652 - protein, 386 aa, unidentified
MRKPNDLSRSVVSLNLDNTLIAVIEMSLSSWLVAGIVPGVERQPLKKLATDEDVLLNLLNRWRTEAEKAGRKIERIVIAYEVGRDGFWLARWLRARDIEAHVIHASSVAIPREHRRAKTDRLDTQLLKRVFVGWLRGERDHCKMVAIPTIGEEDAKRPNRERESLVAEQTRIINRMKATLARLGIRGFNPKLKKAPERLDDLRTPEGGPIPPNTLAELRRDMERRRIVSDQMKQIENARHERLEQAPDEEPHAMVRLLARVIGVGIETADMLVQEVLSRNLRDRRAVARYAGLTGSPDESGKRRREKGLARSGNARVRRGMIQLAWRFLMFQKDSALAQWFRTRTENAPSTRKTMIVALARKLLIALWRFVREGLVPDGVIMRPAQ

SEQ ID NO: 41653 - protein, 312 aa, unidentified
MAELSFGGIDVSKDRLDVLLLPEGLCFSVCNDAPGWAELIVRLRPLAVSAIGLEPSGGYERGIIRALLAAGLSVRRINPNKLRQFARARGVLAKNDRLDARLIAEYVAIMPTRVLQRDDAIERLAEIVTMRRQLCDEHVAAMNQATHLEDAMLRRISKRRLLRIEADILLLDKRLAELVAADPRLSHRYQLLISMPGVGPTLAYTLLATLPELGQIDRKQIAALVGLAPYDFDSGKLKGQRCIYGGRKPVRNVLYMAALSASRYNPALKAFSNRLAAAGKKSKVIIVAVMRKMIITLNAMLRDNTEWHPAAA

SEQ ID NO: 41654 - protein, 341 aa, unidentified
MERFIRTAIDLGKNYFQVHGLESEGGRSISRKVKRSKLHEVYSQIEPCRVGMEACGSAHYWARQLTAMGHEVVLMPPAYIKPYVKRGKNDVVDATAICEAMSRPDMRFVPIKSADQQAVLMLHKTRELLVKQRTMAVNALRGHLAEFGIVAAKGIGRVDELLALSKADAALPPIAGAAVACMAQHLEGLNLSIETVDEEIAKAHRQNPTSRLLDEIPGVGTLIASVTAASVPDPGVFKSGRDFAAWLGLTPRQNSSGGKEKLGAITKQGNRYIRKMLVTGATSVLRVAGKRKGALADWINALRARKPERLVAVALANKLARICWAIMTTGEGFRGDIYVKA

SEQ ID NO: 41655 - protein, 345 aa, unidentified
MKILALDLGNYKSVGCVYEMTSLSHRFTRVVTTPKAFHDLLVEEEPDRVVIEICPLAGWISDLIRSLGIELEVASTTHEAWRWKNVKRKNDRQDALKLAQLSALGQLTLVHVPEPGVRQWRALINYRQRLVSRRTKIQNHIRALLLRQAEPMVSGRSAWTRGGIAQLEALARPLNEVECEELWRGELALELEGLKALAEPLRQVEAKLDELGAVDGRVQLLRTIPGVGPRGAEALAAVIDKAQRFKRGKELGAYLGLVPKQIQSGESNRLGRITRQGNRVLRSLLVEISWSGLRYNSWMRSVYERVRRGSKARKKIAIVAVARRLLIRCWAMLRDGTTWRPATST

SEQ ID NO: 41656 - protein, 354 aa, unidentified
MYLGIDQHARQITISLRNEDGDVLQARQVSTQPAKINEFFQRLTRERLQGNEQFVAVLEVCGFNDWLIRMLRDYRCHRVLLIQPEERKMRKTDRRDAAALSELLWVNRDRLLAGKPVRGLRQVDIASTTDQENRRLTTLRKEAGRARTRMVNKVRHILRRHNLQWEMPTKRFPTLAAIAWLKKLVLPEVDRLEMDHLLDDLEQVKQRLGDLEKVIAERCSGSEDAVLLATIPGVAAFTATSLACRVGRVERFPRSHSLANYWRLTPGCRNSGEANQRLGRITKAGSSMARWLLAQVTHKVLRKDARLREWFKRIKRRRGATIARVAVMRKLATIIWHMLTKRISYLECRQLATQ

SEQ ID NO: 41657 - protein, 339 aa, unidentified
MYYGAIDLHKNNSVLGIINADGQRLYVRKIPNDLDLIKKALGPFAENLEGIVVESTYNWYWLVDGLQDAGYRMHLANPTAIQQYRGIKHTDDVTDAWWLAELLRTKQLKEGFVYPRAERAVRDLLRKRAHLVKQRTQNILSIQNLTSRNTGGRLNANQAKQLTEEAVLKFYDQEEERALAINCSLRVIQTLKREITLIEKQVKSKLKLSQPYQVLQSVPGIGELLAMVIMLEAGDMSRFPSVGDFSSYCRCVNSVRLSNGKKKGSGNRKNGNKYLSWAFMEAAHYAIRYYPVIHKFYQRKSAQKGMMVAQMAVAHKLARASYYVLRDQVPFEETKCFVN

SEQ ID NO: 41658 - protein, 386 aa, unidentified
MEKANDLSRSSTVLEQNSTLIAVIEMSLSSWLVAGIVPGLARHPLKKLGADPEALLLLLHRWREEAAKYGHAIARMAIAFEAGRDGFWLARWLRARGVEAFVIHSTSVAVPREHRRAKTDRLDTEYLKRAFLGWLRGEPNHCQMAGIPSLDEEDARRPNRERENLVSQQTSIVNRMKACLIRLGVRNFKPTLRHASERLEMVRTPEGAPLPLNTLAEMRRDMARLRLVREQIREIEAARSQRLQVSESRAHAMVKLLTGIIGVGIETADMLVHEILSRQLRDRRAVARYAGLTGAPDESGKRRREKGLARAGNARVRRGMIQLAWRFLLFQKDSALAQWFRARTAEARGGTRKTLIVALARKLLIAFWRLTMTGEMPAGIKLRPGV

SEQ ID NO: 41659 - protein, 406 aa, unidentified
MKQIVSVGIDVSKGKSTVCAMIHPNTIIKESFEVLHTVEEMSMLADYIGSLDGEIRIVMESTGHYHLPVAQFLYQKGFFVCVENAYIIRQFSRIMLHGAKTDPLDAKKLAKYGLAYWSELKPYKFHPSCYTKLSLLSKQYQTYIKLLIAAKQNVIHLMDEMLPGFKEALDTASSVQFSKVKYVDFAKEFYHVDMIKSMGKEIFRENYKQWCKEKGYRFQSEKADELFHLAEDGIPTLPTEFPSTRLCMEVATEQVSQLGYALEQILSQMQNLAKTLPEYQTIRQMGGMGEKLCVRFIADIGDVRRFHNGKALVAYAGIDAPPYQSGQYTGTKRRISKRGNSALRKTGYEVMKSLKSHPPKTDTRVYDFIIKKENEGKSKKQAKIAGLNKFLQIYYARVIEIYKNIV

SEQ ID NO: 41660 - protein, 427 aa, unidentified
MSEVESVTREPQFAALVSIDWADKKHVWCLQAVGTEKRESGELEHTPEAVEAWVGQLCQRFGNRPIAVALEQSRGALVFMLSKYEPLHLFPVPSTMAAAMRKALYPSGAKDDPRDADLLLDLLLQHRDKLRHLSPDTEATRRVQNLVEERRKLVDEKTAQTNRLTSHLKIYFPQMLQWFEDLGTELVGALLERWPTLEELQKVPPAKLRGFFRKQHCRDQELVERRILAIGQAIPAIRDRAVIEAKSTVVKVIVQLIRSLREGIANLDERIEEAAATHPDFFIFESLPGAGAVLAPRLLAAFGSQRERFGNAGEVQTYSGIAPVMEQSGKMKWVHFRWACPKFLRQSFHEWAGHSIGQSVWARNYYHQQRCKGRRHQATVRSLAFKWLRILFRCWKDRVAYDESKYLTVLAKRGSPFAVVVAAGKTL

SEQ ID NO: 41661 - protein, 431 aa, unidentified
MQLKQRARKLALVRGEPTVVVGIDIAKRKHWAWVVDGRTEVPVGSPFHFQNSREGFDRLLGKIARAKEKAGATRVVVGMEPTGHYWKPLAWYLQQVGFTVVIVNPAHVKASKELDDNSPTKNDRKDAWLNAQLVLQGRFSVPYLPDGVYAELRILTQARQQHRRKLNAALNQLQALLDEYFPEYTEVFADPLGQASLYVLQYRPFPQDVLAVPVTQLAAELRAASNRRVGLRRAQDLQEAARRSIGVPYGLDAARLQLRQILQEVIFWKERLAETEAAMAEALEKTGLARYLLSVPGVGVVTAAAFLGEVGDLRRYADWRQLRKLAGYNLTENTSGQRDRSRTPISKRGRPGLRHVLYQMAMTAAAKNREFRALYKHFRTRQQNPLKGKQALVALACKLLRVLFTLVRKQCSYDPARALGAWRAEQLGLAA

SEQ ID NO: 41662 - protein, 447 aa, unidentified
MKPNKPAKKRAPKFPKHLQHLNHQAAGIDIGSRSHFVAVPEGADEQPVREFSTFTDDLERLAEWLIACGVTTVAMESTGIYWIPVFELLERHGLEVKLVNARHVKNVPGRKSDVLDCQWLQQLHTYGLLRGAFRPADQVCTLRAYVRQRATLVRSASAHIQRMQKALAQMNLQLHNVVTDITGATGMGIIQAILAGERNPQRLAALRDKRCKNSEATIARSLQGNYRPEHLFSLQQAVDFYAFHQQKIADCDRRILEQLSQFDASDPQDTDGTPPGTMEEALQRMSGVDLSSINGISTNTALKIIAEIGIDMSRWPTVKQFTSWLGLCPGSKISGGKVLSSATKPVANRAAAALRMAAMTLFNSKSALGAYLRRQRSRLGAPKAITATAHKLARLIYSMLKHGTAFVDAGQEQYEERYRSRVIQNLKRKAQDLGYKLIPMQDETLTS

SEQ ID NO: 41663 - protein, 366 aa, unidentified
MQRERTSVGLDVHARSVVACGIDASTGEMFRARLGPQPEAVLGWLRELPGPVAVVYEAGPTGYGLARFLTDHNIRCVVAAPSKLQRPSGDRVKTDAKDAQHLARLLRLDEITPVVVPTVAQEAARDLVRAREDVRGDLMRARHRTSKLLLRQGTVWSGGTAWTVAHHDWLRRQTFSQSALTIAYDSALETVLLSAERRDRLDKAIVKMAADPAWSAIVTRLGCLRGVSTLTAFGLTVEVGDWSRFTGSSIEAFLGLVPTEHSSGGSRSQGSITKTGNTHARRLLVEAAWQHRRPYRTPSATLRSRWNQAPAAARARGHAGNQRLHQRWQVFTDRKKRPVVANVAVARELAGWCWSLATLDDTGAAC

SEQ ID NO: 41664 - protein, 445 aa, unidentified
MRDHSEAFIGIDTSKLRNAIAIAEGGRGGEVRYFGEIDSADAATRKLVSKLAVKYRSLTFCYEAGPTGYGLYRLIRSLGHECVVAAPSLIPKKPGVRVKTNRRDAVELAKLSRAGELTAVWVPDERHEAMRDLSRARQAAKKHLTSKRQQILSLMLRLGRHYPGKKTWGTAHMNWLTQQKLEHREQRIALEELLEGMRQEAERVERLEQAIREAVPEWSLAEVATALQAMRGIDLVAAVTVLAEIGDLSRFQSPRELMGYLGLVPSESSTGDKVKRGGITKAGNGRARRILVEAAWSYRHPARVSREKQPKVAAAPRRVREIAWKAQTRLCGRFRSLTRKGKLPSIVATAIARELSAFIWAINHEVMAPGEGLEIRNVPIARSVTPCSPPSRRGLATADEVAGAPRRPALTAAARGVPATARVGTKKRAPRSNKETGSEAESAGL

SEQ ID NO: 41665 - protein, 371 aa, unidentified
MLYVAVDQHAKQLTVSVRDEAGDVVLKRQVSTEWERVRRFWEEIRERSAVLGGFVVILEVCGFNDWLIVMLQEFQCSQIVMVQANERAATKTDRRDANRLGELLWVNRARIAAGQRVPGLKWIVIPSKEDAENRQLTSMRQRIVAQRTKCINRIKHILLKHNILQEMPTKGIQTIKATKWLRELSVPEIDRLELDQCLAQWALIEAQKKQIDQRIASRQEQDAQAQLLATLPGASTYSSLALSCRIGDASRFDSPKSLSHFWGLTPRCRNSGASTDRLGSITKEGSKVARFILGQLVLHVLKKDRWMREWYRRIKLRRGSKIARVAVMRQLTVVMWNMLRHREPYQCGGPEAVRQRRKPGPATPTNPALTS

SEQ ID NO: 41666 - protein, 486 aa, unidentified
MNPLYVGIDVSSKSNVVYLMLPNGDKLSNFELKNSQDGSSQLVKRILSALTSHSLDTVLIGLEATSVYGDNLVYFLREDATLDPFNRKIHVINPKQVNKFKESYNDLPKNDYVDSFVIADCLRFGRINKEVYLGDYRYLALKNLTRARYYAVCNLVKEKQRFMNVLFKKYSTMTQEKVFSDNFSTTALSVYEEFESAEALAKMDLQALTDFIMEKGKNRFPDPDSAAKAIQKAARSSYRLPKTVNDSVNQVLSISITSMKALESQIKEFDKAIAAQMELLPNVLTSIPGIGPVFSAGIMAEIGDINRFGNHAQLAKYAGLAWKQHQSEGFEAQTTRLINSGNRFLKYYLCEAAFSLVRCDKEYSDFYHLKYKEVNRCQHKRALALTDRKFVRLVFVLLKDNRLYRPAKQNNFYLLMSYALLIFKKHGRQGLGGCFLSTVRYMKDILFISHLTSHRWTILYNIFLHIFTSPFCSYFRHELASHTMIQ

SEQ ID NO: 41667 - protein, 424 aa, unidentified
MTVESKGALLVLFVGDDWAEAHHDIEIQDEAGRRLVRRRLPEGMVGIALLHELIGQHVGQDDGELDDPAQIVVGIETDRGPWVQALLAAGYQVFAINPLSVARYRERHTTSGAKSDPGDAKVLADLVRTDRQHHRPIAGDSELAEAVKVLARAHQGLCWMRGRQANLLRSTLREFYPGALQAFQELTHSDALAVLELAPTPGRGRGLSRSKIASALRRAGRQRNIEARAEQIHAALRAPQLEQPPLIADAFGATVTAYVTLLATSVAQVRSLEGQLEQSFGQHPAAEIVLSQPGLGTVLGARVLAEFGDDPHRYANPKARKNYAGTAPITKASGTRRVVLARVATNKRLRDALHLQAFAALSISPGARAYYDSRRADGHSHHQALRAVSNRLVGILHGCLRHGTFYDEATAWPRYQQQQDQAAA

SEQ ID NO: 41668 - protein, 342 aa, unidentified
MTQRYEGRQIVGIDLHRRRSVVVRMTPEGAPLSTVRIVNDPQSLAAEVAAAGAGAEVVLEATYGWYWAVDALADLDARVHLAHPLGVKAFAYRRVKNDVRDAADLADLLRMGRLPEAWIAPPALRELREMVRHRAGLVSVRSGLKAQVHAVLAKQGVTVVMTDLFGVGGQQLLDEVWLDPPYRAHVNSLRRVIDLLDEEIDTVRRQIATRLAGDPGYRAVQQIPGIGPTLAAVFVAEIGDVHRFPTPGHLASWAGLTPRHRESDTTVHRGHITKQGSALIRWAAIEAVQILPPSTPILGTTRTKVGDRRGRNIGTVAAARKLLTLVYYALRDGEVRALHRAA

SEQ ID NO: 41669 - protein, 481 aa, unidentified
MGQVNHLDVLDLANGEEVQPLYPYGVGIDCHRDFIEICILLREGVSIHKYEGTYKTSWEQLKKACEWVEALIHKKSCPTVLPKPLRYTLESTSTYHLPVILAFEGKPSVINPLLASKTRRKTDKLDARLMAYQAITGLWPSSFLASKEVQVFRLMMKQRNIHQASATALSNRINNYLLRFGHTIGSTGSVRGSTARAVIEDMCSPDFVFQEGKYSGLKEADYICPEGLPSDVKKLILEMYAELDKQNVLKQDYEKQALQKAKSMEWETRDGWVKGTELIKNLLTIPSVGEIMALAWLSEVVTPLRFEVKEKLIAFCGCDPSLKISAGKVTEHTRRGGNVRLHHHLVKVAGTCIIRHNEPFGQWGYSLMKRHPKGGYKKACGAVARRIATAMYFIHLSNQPFSYEKYNFYKIEVVEMPLEEMGFSSRVFNILNASGFKTSKDVAQQFLTSELHQLQGLGPKSILEVDTWIQNNKNKEYRKNN

SEQ ID NO: 41670 - protein, 365 aa, unidentified
MAIQSGKDQVVIAVDPHKASWTAAAVDASLAPLASIRVPVSRDGYRALRRFARQWPIAGWAVEGAGGVGAPLTRRLRADGIEVIDVPAKLATRVRVLSLGHGRKNDDADALSVGVAALTSRTLNTAETDAETTALRAVVEHRDDLVKTRTQTVNRLHVALTNLLPGGAGRNLGADHAAELLRGVRPRDAAGTTLRALAMDLVSEVRQLDRRIAKAATDIQTAVSASATTLTDLHGLGALTAGKILGRVGDVGRFRSAAAFASYTGTAPNEVSSGDVVRHRLSRAGDRQLNSCLHVMAITHVRQDTPGRTYYLRKRSEGKSHNEAMRCLKRRLSDLVYRRLIHDAAKRKASPGGHSGAALSSRAAG

SEQ ID NO: 41671 - protein, 343 aa, unidentified
MKITRVGVDLAKNVFQLHGVDRSDKLVWKRKLSRKNWLKVLLKETDSSCEIGIEACAGAHHWARILMHKGYQVKIIAPQFVKPYVKSNKNDANDAEAICEAMSRPNMRFVEVKTTEQQDLQAMHRVLDELKSHRTAKGNQIRGLVAEYGLVASRQLHVLRRAIPDWLEDAENGLSDSFRQLLEGLREDLVRLDERIAEVNDAIEQIARSHPMARRLQQLRGVGPLVSTAMIASVGTGKQFGRGRQMAASLGLTPKQFSSGGKERLQGISKRGDAYLRRLLIHGARSVVTHAKNKDDRYSRWMTELAKRSHTNVAAVAVANKTARMAWAMMVNETDFDPALASH

SEQ ID NO: 41672 - protein, 427 aa, unidentified
MKEQSRTIVGIDWSADSHTCYDLQTDKSFKITDSVEGYEKLLKNYPEAVFVIEEANNRIGDYLLINNREVYVLPPCRSKEARKYHFSSGTKSDGLDAKAIALTFKEHPSYCLKARYSKVGVKITKLVTAYNIVSKTHSQQCNRLYSLLLRYFPEYLHIMDKQYRSDTSLRILSVCPTITELKKVSNEKLKKILNKENYRMTSSLRNKLDRIRSEGISWEDTSCEGKLILLLVNTLLSLRKGLEVLKKEMEKTLKNSPYRIILSIPGVKAVIGSYIVKAYLTHDFKSYQEIQKYAGTAPLLFQSGRKSIMLMRKKCDNDLKGMIHMAAFASLKTCGWARNYYRRKRKEGKTYGHALRALGNILLKIAFSMLSKMKEYDETLFLNAKGIKTTQLNDTSFSETFPYPEYSQDAQLSLAATKDVVDNLIVT

SEQ ID NO: 41673 - protein, 316 aa, unidentified
MGGEKVYVGVDVSKERLDVAVRPSGECFTETNDKRAVTRLVKRLKALHCTRVVIEATGGYETIVVAGLYAAGVPVVVVNPRWVRNYAKSIGWLEKPDRIDAKLLALYAEHAELKIRQLPDPATRQLADLCARRIDVLDMTEAERNRLEHASGVVQRAINRHIAYLRKELKDIERDIDGAVRSSELWRHKDELMDTIPGVGPTLRAAILAWLPELGELNRGEAAKLVGIAPLPEDSGKIRGLRFIQGGRAPLRKVLYMGTMGAMLHNPHLREYYDGLRTRGKLHKVALVATMRKLLLILNAIIKTDTAWSESCLENA

SEQ ID NO: 41674 - protein, 352 aa, unidentified
MDSLTDLREVVDVVIGVDTHVNTHSAAVVDAATGGVLDEITVDATAQGYAELIEFANNHPMLRAWAIEGTGGRAGLSRHLLGLSEIVIELDRPTRAARRNGAKSDPLDAIRAAREAMARPRLGTPRIGGERQALSVLLAARRSAVNASTDAQLQVFSLVIAAPEPIRARFRGQKLAAMLNTAAKLRVQSSWDVETTSTVVALRTLARRAHAMLKEARELQKAMVAIIRSWRPDLLEEFGVGPIVAATVLCAWSHPGRIHSEAAFAMLAGVAPIPANSGQVTTRHRLNRYGDRHLNNALHTVVASRIQYQSATQAYVARRTAQGKTKREIKRCLTRYVARDLYRLLENGAATA

SEQ ID NO: 41675 - protein, 403 aa, unidentified
MEHGTGRFGAVDWASAEHRACIVDDSGTRLDEFAVAHSAAGLHELCARFARAGARRVAIERPDGPVVETLMAGGLEVVVVSSRAVKALRTRFGLAGNKDDRGDAYVLAECLRTDGHRWPSLEPDKPETLALRAAVRARKDLVATRVATANQLRAHLLLVFPGAVGLFRDLDSDISLRFLERFPSPDKASWLSTKRLAAWLRANAYCGRVPAEALMHRLEGAPAGTASAAQAQARITLAVVGVLRTLVAAIATLDADIAEQLALHPDAFIFQSLPRSGTLRAAAMLAEIGDCRARFPTPDSLAALAGAVPSTRSSGKHRVVTFRWACHKKLRDALVDFAQDSVRANPWADSLYRRHRAKGKTHPHAARIVTRAWVGVIWRCWHDRVAYEPARHRALQRVLEVAA

SEQ ID NO: 41676 - protein, 309 aa, unidentified
MTEDSIGIDISKDRLDAFRLGDGAERSFNNTPAGFRALRRWLAGEMPARLVYEPTGACHGGFERALAGHLPLVRVNPLQARRFAQARGVRAKTDRVDARMLAAMGAAFALEPDRPRPEELYELKELQMARSALVKDRTRLKNRLGTLRLALTRRQTRARLAQIARQLAALDAEIAARLRRRRARALDILTSIPGFGATTAASLLIEGPEVGALGRKQIASLAGLAPIARQSGRWQGQSHIWGGRKYLRDALYMPALVAIRHNPDMKAKYDQMRARGLPPKVAITAVMRSLLELANALIRDNRKWKPKPT

SEQ ID NO: 41677 - protein, 353 aa, unidentified
MNSVKYVGMDVHKSITVIVVLNEFGQFESRSQVRTKAENICDFFRGISGKVEVVFEEGTHSAWLYKLLKPLVASVTVCDPRHNKLIEDGNKSDDEDAETLAHLLRLGAVKAVYKGDDQQQQLKESCRAYDNLIEDSTRVQNRLKAIYRGRGISCSGHDLYRADQRSDWLAKLGEDAARFRAESLLEQLESLSQLRKQAKQRLLAQARTHADYRILVKLPGFGPVRVAQLIAAVGTPHRFRTKRQFWPYCGYAVVTRSSADYQIVEGKIVKQRKKVSTRGLNRNHNPQLKQVFKGAALAALRHKAIKAYYERLISSGARPELARVSVARKLASIALTVWQRREEFDVKKAFTQN

SEQ ID NO: 41678 - protein, 372 aa, unidentified
MTAKKEAFVGIDVAKLRNAVAIADAGRDGEIRYIGEVDATPDSMKRLIGKLASKYDRLHFCYEAGPTGYGLHRQITELGHFCMVAAPSLIPRKASDRVKTNRRDATALARLLRAGELTAVWVPDPAHEAMRNLIRSRTAAVETVRVHKQQVGAFLLRHSRIFPRRKNWGARYRRWLQEQSFEHLADQIVLQEYVEAVRLAEERLGRIERAIVEFLPRWSLAPLVDALQALRGVDLVTAVCFVVEIGDIRRFASPRQLMGYLGLVPTERSTGETIRRGSITKMGNSRIRQLLVESAWTYRFPPRVGAKKLLKLDRVSPKVREIAWKAQTRLTARYRAFSARGKKTTVACTAIARELAGFMWAVAMEVPPTAAI

SEQ ID NO: 41679 - protein, 363 aa, unidentified
MQEEKRRYVGIDLGKREYTMAIIGKDGKMKIHQGKTSPQGRQALNKLLEKGDKVALEAGNLAFIMAYEIQEQVGCEVRVLNAAKLPFIWDAPTKTDKEDAMKLAHLVEERRDEKLPIVPLPSRQEIARRKLLANYGREVKNRTRLINLLHAMFVHQGHTTVVRKNLATAEKRREAVKLLTGREREEAEWLLKHLELYDQRIKELKEAITAEAKTDEGMKNLQTIPGVGPVIAYAFAAHVGDGSRFSAGAQVSNFIGFVPRLDYSGTIQHHGHITKQGNGYLRGLIVQAAWSMIRCKSSSSLKERYLCLTMFGGKSKKKTIVSIGRRLAELMYSVLRDKSSFEERVWAGRKEYLAKLNQLKKSA

SEQ ID NO: 41680 - protein, 343 aa, unidentified
MNITTVGIDLAKSVFQVHGVDERGKGLLRKSVKRSELTKMFANLPMCLIGMEACGSAHYWARRLMELGHTVKLMAPQFVKPYVKTNKNDASDAEAICEAVARPNMRFVPVKSVEQQAVLAVHRARQGFVVERTAQANQIRGLLYELGIVIPKGIRHLEQHLPQILADAENGLPETSRGLFARLFAHLRELGAQVRELEQQISAWHRESEASCRLEAIPGIGALTASALVASVGDAKTFKNGRQLAAWLGLVPRQNSSGGKERLLGISKRGDTYLRTLLIHGARAVLFHRMRQPQHSDGWLMRLRARRNPNVAAVALANKNARMVWALLAHHREYCAGYAAAAA

SEQ ID NO: 41681 - protein, 348 aa, unidentified
MTMTIVEADRAVTGGIDTHGEIHVAAALDEVGGLLGAESFPANPDGYAALFSWLRSFGSVTKVGVEGTGSYGAGVTRFLARQGVEVVEVDRQNRQARRQSGKSDPLDAVEAARAALSGRARGKAKSRDGSIEAIRVLVVAKRSARTSRIKALTQMRQLTFSAPDQLQSRLKGLPIAQFVSVAQGLRPTRSADPVTAATKASLSSLAHRVADLEDEIARLDAMITPLLEAAAPELLAVYGVGIDTAAALLVAAGDNPERLRSEAAWAHLCGVSPLQASSGKVTRHRLNRGGDRQANRALWHIVITRLASDPETQAYMERRVKDGGSKLEAIRMLKRYVAREVYRYLSRA

SEQ ID NO: 41682 - protein, 400 aa, unidentified
MPDGIRWVGLDVHARESTLAVFDQATGEVATRRVVGRPHELLPWLRGVERPARMVYEAGPTGYGLARRARAEGIELDVCAPGKTERPPADRVKTDKRDAIRLARLLAAGELTLVTIPSVQREQLRDLVRCREDIRVDLMRARNRIGKFLLRREIYWEGRGETWSRKHRSWLTSVRFADLASRATLADYLHAHDVLVARRDQVEADLAQVALSAPCAHTVARLRCLRGIDTLSALGLCAEIGEWERFDHPDQLASYLGIVPSEHTSGQQRRLGSITKAGSTHARRLLVEASWHYRRGPAVGQALERRQRGQAPQIIHISWRAQRRLNARWRQLKNARHKPGGIVAVAIARELASYCWQIATWTPHPDGVPPTSLPAGDPLTHAAPLPPKLTRARGRLTTSR

SEQ ID NO: 41683 - protein, 372 aa, unidentified
MKTKNITPSVVSTTTPTPATMVPGGFTLGLDLGDRSHHVCVLDAAGQIVREASLPNTRPALAQLLADFPRATIALEAGTHSPWISRYLTDLGATVLVANPRKLHAISRSERKCDRRDARMLARLARVDPALLHPIQHGTAQAQHDLLGLKLRDALVRTRVNLINAVRFTLKSLGHAVRNPSSESFHKTVLADVPADCLPVVQPLLTVLAQVTEQIKGMERDLVQRSKKDYPVTQRLQQITGVGPLTALCFVLKIGDPQRFSRGRDVGAYLGLCPRRDQSGGTDKQLRISKCGDGLMRRLLVSAAHYVLGPFGPACALREHGQRLTGTGSAREKKRAVVAVARKLAVLLLSLWKHGTDYEPRATAAALVLTPA

SEQ ID NO: 41684 - protein, 341 aa, unidentified
MSTKLYIGADVAQAKFDAAVWQGSAGTALNTFSNTTAGFEQLAERVLALLPTADTQVVLVLEPTGGYELGLVAFAYAHGWPVCLPNPKQVRDFAKSRGRRAKTDAQDALLLAQFGAEQQPEPQQELPAHIQELAELLHRREDLQQLKRSESNRLIGFQQRPRPAQAVIQSLERTIAALDAELAAIEQAIDDLIKRDPDLKREVKRLRSVPGVGEKNVLPILVLFYRWRARTAGRGTPKGLVAFVGLDPQPYDSGRSVHKRATISKMGDRSVRHYLYMGALGGVRGKNALRSFYHRLVSRGKAKRLALVAAAHKILIWAWAVFSQDVDFDPSRFPQEATAAI

SEQ ID NO: 41685 - protein, 343 aa, unidentified
MDHFAGLDVSVKETSVCIVDDTGRIVREVKVSSEPEALLAVLTNPACHFKRIGLEAGPLSQWLFSALAEAGLPVICVETRHMRAVLKAHINKTDRNDARGIAQMMRVGLYRPVHVKTLRSQKQRMLLTHRQLLQSKAIAIENDLRATLRNFGLKVGVVGTVKFEARIKELVENLPDLVVLVEPLLMVRRVLREQVSILHRRLLAIVRDDDVCRRLMTVPGVGPVVALTYRATVDVPSRFRNSKAVGAVFGLTPSKHQSGESDRTGGISRCGDEMMRMMLYEAAHIMLVRSAKWSWLKAWAMKIARHRGLKKAIVALARRLAVIMHRIWVDGTEFRWTREVAAA

SEQ ID NO: 41686 - protein, 356 aa, unidentified
MRLLQSQTWEPSVKQIIRIGMDTSKHIFQLHGVDAAEQVVLRKRLGRKQMVEFFAKLPPTVIGMEACGASHYWARVLEQFGHEVRLIAPQHVKPYVLRNKNDGRDAEGVCEAMSRPRMRFVPVKRAEQQAALMLAGVREQMVARRTQLSNTIRGYAAEFGITAAKGLDKIGPLLAQIAQDESVPTIARDLFALQGRAYAQLQVELKAIEARLRAWHRSNADSRRLAKIPGVGPIGATALVMKTPDPHAFPSGRHFAAWLGLTPKDHSTAGKTRLGKITRAGDERLRSVLVAGATAVIQQAKHGRGHPSPWVVALLKRKPPKLAAVALANKIARIAWKLMATGESYDGARMLGALTA

SEQ ID NO: 41687 - protein, 326 aa, unidentified
MTTIGIDVSKAKFDSAWLRDSETGKVKTKVLKNNSTGFQALIAWAEKNTGQPITNIHFVMEATGIYHEALAYALHEAGAKVSVVNPAYIHSYAKSQGSRIKTDKKDSITIAYYGATQTPSLWQPEPGEIRQLKALIARYEAIEKDIQRESNRLEKAEITQVSAEVINSISTIIDELTKEKNRIRKLIDDHIDQNPQLKNDRALLESIPCVGPVISQYMLALIYSRHFSTAKQCSAFIGLNPVTHESGTSVRSRPRLSKVGNAKIRAKLYMAAVVAIKHNPDIKQQYERLLKNGKSKMAALGAAMRKLVQICFGVLKHQTPYQAQAV

SEQ ID NO: 41688 - protein, 410 aa, unidentified
MEVLHAHCAGLDVHKDSVVACARHMVDGKVTTVVRTFKTTTQELMALSGWLSTEGATHIAMEATGVYWKPVWHILSDGEFQLILANAAHVKNVPGRKTDVNDATWLADLMAHGMIRASFVPDEPTQQMRDLLRTRKQIVRERSSHIQRIQKTLEDANIKLDSVVTDILGLSGRRIIDALIAGQTMPQALASLAHRRIHASTDELEASLRGRVTRHHRFLLKLHLDQIDAFDTTIAAIDKEVDGNVEPFRAAIEMLSAIPGVGELSAAVIVSEIGIDMSRFETAGHLISWAGLCPRNDQSAGKRRSTRMKKGAPWLKSTLIQCAWCASRSKNSYLQAQYLRLRSRRGAKKAVCAVAASILTIVYHMLKNGTVYQDLGASYFDNRAKDKQALRLINRLKNLGFEVQIKSLAA

SEQ ID NO: 41689 - protein, 397 aa, unidentified
MEIQDETGRKLAVRRLPEGAAGIAQLHELIAAHLNADGDPGQVVVAIETDRGLWVQALAAAGYQVYGLNPRQVARFKERYNLSGAKSDPADAHALAGMVRAERHQLRAVAADSAGGQAVKVAARAHQTLIWERTRHTLRLRSALREFFPAALLAYADLGLTGADTLELLARAPAPAVAAKLTAAQISAALKRARRRDVPTRTQAVNDALRGPQLAQPAAVTAAYAAAVQAAAAVLTTLNEQIRQLEARVEAHFLQHPDAEIYLSQPGIGTVNGARVLAEFGDAPGRYASARARKNYAGSSPITRASGRSKIVLSRFIRNDRLADALQSQALSALTASPGARAYYDKQRARGLGHNPALRQLSNRLAGILHGCLKTTTCYDEAIAWPGAVVHPEPLAA

SEQ ID NO: 41690 - protein, 344 aa, unidentified
MRISVLGVDLGKNVCSIVGLDASGAVVLRRRVRRDTLIELVAKLPACIVGMEACCGAHHIGGVFAAQGHDVRLMSPEYVRPYVKAQKNDDRDAEGIAEAATRPTMRFVEMKTVDQLDMQTLHRSRDRLVGERTALINQLRAVLLERGIVVPQGKHKFEQYLIIMMDEHEGEGLSARMRMLVTDVRAQWRDLDRRIGAFDAEFARWAKENEDARRLGTIPGVGVTISTALIAAVGNASTFEHGRDLAAWLGLVPRQSTTGGKPRLMGISKRGNKYLGKLLIHGARAALRHVAEKDTALGRWAKNLLSRVHHNVAVVAFANKLARICWAVLRSGQKFAANGAPSAV

SEQ ID NO: 41691 - protein, 376 aa, unidentified
MSNVNFVGLDVHADTIAVAVAESGGEVRSLGKIPNQLESVRKLVKRLGAVSKLKACYEAGPTGYVLYWQLTQLGVACDVIAPSLVPTKAGDRVKTDRRDAEKLAKCLRAGELTAVWVPDEAHEALRDLLRAREAAKKDQLKARQRLGKFLLRHGKRPEGTKAWTQQYMQWIRAKVHFPHAALEVTLSDYLEEVEHCTARIGKLDKAIDEAVKQAPTEIRAVIEALQALRGVAQTTAATIVSELGSLSRFENPRQLMGYSGLVSRESSSGNKVQRGGITKTGNGHLRRVVMESAWAYQHRPKVIGDLLRRQKRLKLSEEAIQIAWKAQQRLHKRYKTFAAGGKNKNQIITAVGRELLGFIWAIARETEKQQKNLKAA

SEQ ID NO: 41692 - protein, 414 aa, unidentified
MYFIGIDWADQKYDVVILDDNGHYACPKFEIDKTADGFDRFIKKLNRLATNSADFKISIETPHNLIVDYLLDKNYPVYLLPPSSMRSFRKRYRSTNARDDHYDAFVIADVARTDKTCCKIIERSSQLTQEITELVFDHHRIVEKQVAIHNAFKEVLKSYYPEYIHFFKNISCQSSLAFFQQHPTIYDAKQLSKKQLIDFFKAQRYFRTESVHKIYRILNSNHLKVEEHIIRIKSSKALFYATILNTFNIYCQDCFNNIKQRLEIHPDADIFRSFPGVGDLSAARLIALFKDNRNLHQTPFPLQAKAGTCPVTEITGHDKKRNKIHKIVYFRKGCNKIYRDFIHLIAFSSITKSEWCNQYYRQHRKMGHSHSQALRCLANTQLRILFAMWKNKTLYDENIYLAQRLRHENKCKKK

SEQ ID NO: 41693 - protein, 388 aa, unidentified
MKENSRRVIGLDVHPDSFAGAILRGRDPATAQVESTSTRVALPQLEAWAERHTRCEDVLVLEASGNAFAVAERLRSAGRKVVILDSHQAGKVGKVYCANDRIDAVKIARIYLSGLSTVVWQPDQKTLERREVFSAYQAVVKESTRHKQQIRAMLNEHCVRLEPGFRLSHPTAMNRLHKLHAWSPVQLMLLEQMHAGLVAARARRQKLRHYMAKEVLNEEAFLRLSRLCGINLITLYGLVAAIGDVTHFSSSKKLVAYLGLNPSVCESGNWLSGSGALKRHGRGPLRALLIQSAKKLLQVSNPLQKWGLAIAARRGRNKASVVVARKLAVAVWHVFQGHAIGAIERIQSLHLKLFKFATDLGLKEIKALGYDSKEAFIQKKLYVLKSYP

SEQ ID NO: 41694 - protein, 387 aa, unidentified
MAQVIIGVDPHKRSATIEIINAREKTLGQGRFGTDRDGYQAMLAAGRKHKDRVWAVEGCNGIGRHIAQRLVADGETVVDVPAKLSARARVFATGQGRKTDPVDARSVAVVALRTEGLRQVVTDDTTVALRLLVDRRDQLGRARTEVVSRLHHLLLELVPGGAKKDLSAQQARALLNTVRPRDVVGKTRRRLASELIGELVVIDKKIKTAKQELTDLVNSTGSRLMNLTGIGPSGAARLLGDIGDIARFASRAHFASWNGTAPIDASSGDQNRHRLSRAGNRRINRALHIMAIVQLRRDTEGRRYYRRRLAAGKTPMEALRALKRRLSDIVYRQMVADAKLVRTGPGGHAGATLQSSAADPNPEIDTSEKSLPGPAIPQPRTTLAAAS

SEQ ID NO: 41695 - protein, 368 aa, unidentified
MNTVKFIGMDVHKKMITIAIADEDRQKQPRGYGSITNDPDALDKFCRKMVSTATRLHFVYEAGPCGYGIYRHLSQKGFDCMVAAPSMIPKKSGDRIKTDHRDASMLARLHRAGELTAVYVPDDQDEAMRDLTRAREDAVMATRKAKQRLNAFLLRNGLTFTGRCKWSKTFFNWLADIAMSYPAQQVALQEYIDTVHENQNRVNRLTDQIRQMVPDWRLAPLVSALQAARGVSLIVAVTLLAELGDLGRFDKPSQLMAYLGLVPSEHSSGESIKRGRITKTGNSHARKMLVEAAWAYRMQARVSCVLLKRQKGVSDQVCQIAWKAQLRLCARFRRLAAKGKPKQKVVTAIARELSAFLWAIAKQLQPVV

SEQ ID NO: 41696 - protein, 366 aa, unidentified
MTSLALAAERIYLGMDVSRDKIAVAVLRPGEDVPAVEVISHDGEMVRRLIGKFADRSVLAACYEAGPGGYELHRLLTSMGVACDVVAPALIPKAAADRVKTDRRDSVRLALSHRAGLLTAIRVPSEQEEAVRDLVRTRADLVDDRKRMMQRVGALLQRHGRVWRAPRWTYEHRAWLDRQSFAEPALQAALRTYLAAVDARDAELAVLESQLRGCWASVDPLAQMVRQLGCYRGIAELTGLTLAAEVADFRRFPSAPAFMGFTGLTPSEYSSGARTRRGGITKAGPQLIRSTLIEAAWAYRHRPAIGATLKRRQAGCAAETLARSWKAQQRLHATYAKLTRRGKIPSVAVTATARELAGFVWAEMTS

SEQ ID NO: 41697 - protein, 343 aa, unidentified
MQTITTIGFDIAKSIFQVHGVDAGGQVIIRRQLKRRSVLAFFQKLPPCLVGIEACGSAHHWSRELQALGHTVRLMPPAYVKPYVKRQKNDATDAEAICEAVTRANMRFVPTKTAEQQSGLVLHRARHLFVRQQTSVINAIRAHLAEFGIVAPVGRHGVEELLSVVTDPNDKRVPDIARACLSALGDQLQSIKQQILEFDRLIRAWHRSNEMSMRLEAAPGVGPVLATALVAAVADPKSFRSGRNFSAWIGIVPKQHSSGGKNRLGNISKQGDRYLRGLFVAGALAVIRYAKIHGTKHRPWLTALLARRPTKVAASALANKLARMVWAMMVKGERYKEPVALAA

SEQ ID NO: 41698 - protein, 420 aa, unidentified
MSKQNVELAAFIGLDWADQTHVVTLQEAGGDRRRENFTLDQTPEALQTWIHQVRIRFGGRPVAIAVEQVRGALIYALMHVEFLHIYPVNPQTLAKMRQAFYPSGAKDDPRDADLLLEVLLTHRQHLRVWVPDDVLTRSIQLLTEGRRHLVDERTALTNQLTAALKTYFPQALDWFGDMHTARACAFLHRWPSLQQLKRATSSSIRKFYQSQGYRGHDKLEQLLGNIKQAQPLTEDGAVLLASTMMVQALVTQIPSLTESIERYDQQIASRFAQHDDSTLFGSFPGAGPALSPRLLAAFGSDRNRFEFAAEMQQLSGIAPVTEKSGKSCWIHWRLACSKFLRQTFHEFAGQSILGSDWARAYYDQQRQRGKSHHAALRALAFKWIRIIFRCWKNRTLYDETLYCKSLQLRGSSLAVALTTK

SEQ ID NO: 41699 - protein, 405 aa, unidentified
MERVIERCAGLDVHKKTVAACVRVRGTQHVRTFGTTATELLVLRDWLFAHEVTHVAMESTGVYWKPIFYVLEDAFTCVLANAAQIAQVPGRKTDVKDCMWIAQLLEHGLIRASFVPPAPIRELRDLTRYRRALIEERTREANRLHKVLEDAGIKLASVASDVLGVSGRAILAALIEGTTDPMVLAELARGVLRKKLPALRHALMGRFREHHAFLVTQILAHLDYLDELIATVSGQVEVAIAPFADELARLDTIPGINQRTAEAVIAEIGVDMTVFPSARHLASWAGLCPGNNESAGKHRPAHARKGNRWLRSALTEAALAGAVRSKKGALAARYRRVMPHRGHKKAVVAVAHAILVTAYHLLARQVTYTDPGADYYERRHADRVRQRAVQTLERQGYRVSLEPAA

SEQ ID NO: 41700 - protein, 354 aa, unidentified
MLTVIRKEPEMKINYIGADVDCIMTELAVERNGVIVARDRVPTDIRSLSGFLNSITGKKIMVIEEGTMAGWLYRNLKSKVDEFIVCDPRRNKLISCDGDKDDTIDAGTLAMLLRGGYLRKVYHTDDDDRLALKEVVALYHDRVRESVRQMNKLRDCCRSHGIKIPAGTVKHLPVRAQWLKQLGPPVLARQLSIRWIGFDAVATQVKMARQEMTRRSKSYPIIGFWKDLPGVGPIRAITLFAYLDTPWRFGDPKKLWKYCGIGLKRFASGSDKEGRPKTGKLRLFRGVNRRLKDAIMGAALSAICQSSNPFADHYERMVRNGVTPSNARHTVARKMLSVMWGMWKTNCRYDENLV

SEQ ID NO: 41701 - protein, 447 aa, unidentified
MAQRKRPTTPSAISLTHPNAAGIDIGSAAHFVAVPPERDDEPVREFASFTADLHRLADWLDACNVDTVAMESTGVYWIPLYELLESRGFTVLLVNARHVKNVSGRKSDVLDCQWLQQLLSFGLLRGAFRPAEQVCVLRSLSRQRTMLLRSQGRCVQHMQKALTQMNIQLTNVISDVAGETGQKILRAIVAGERDGQVLAQLRNVRIRASEDEIAKSLQGSWRAEHLFALKQALDAFDFCGTQLAECDAQIQAQLLALHVREDEPAKGKKRSRARNAPKFDLRTQLFQMCGVDLTRIEGIDVTTALVVVSEVGANMGKFPSDKHFASWLGLCPGTKITGGKVMSGKTKRSANRAAQALRLAAAALRSSQSALGAYYRRLCARMDKPKAVTAAAHKLARLIYAMLTHGQEYTDRGQDYFEERYRQRVLHNLAQKAKAMGMQLIPADNPA

SEQ ID NO: 41702 - protein, 412 aa, unidentified
MEVLYACCCGIDVHAKMLVACLLKAGKKEVRTFSTMTEELVRLLEWLSQEGCTHVAIESTGVYWRPVFNILEGTLDVLLTNARDAKGYKARKTDVIDAEWLADLLRHGLLKPSFIPPLPIRELRDLTRYRESLVREQTALANRIQKLIESANIKLGQVASDALGASGKRMLRALAAGETDAEQMSHLAQGIRKRKQPQLQQALEGRFTPAQQWILGQLLDQYEQVEAALQRVGERIGQEVDTSADPFVPEAVKLLDTIPGVGETVAQTIVAEIGVDMDRFPTANHLASWAGVCPGNNESAGKRKSGKTTKGSRYLRAALVQAAWAASHQKETYLAAQYKRLVKRMGKKKALVAVGHSILVIAYHVLQTRTSYQELGSNYFERRNVDKQRKRLIRQLESLGVKVTVEEIQEAA

SEQ ID NO: 41703 - protein, 449 aa, unidentified
MAKRIVGIDLAVTGLHRAAVYDSVSVAFVGKSFTFNRSYKGFMLLLHKATSGFSGEVLFVMEPTSGAWKPLSVFLMAKGYMVYLVKPQKVYDLRKFLKKHTKSDRIDAQALAKLPIIDPQGIYPLTLAQPDVEALNRYCRQRERIMRSISARKTRIQAYFTTINPLLMDCFGEHKYTHCCRAFLRRYADPFKVVKLGVKRLSNFLHNHAFGTPEPSLAEKIYEASRSAVSIYCEAQAKQMLSFSWEQFQEEVNIELDLMEYEEKKVKYLDEKIAVLYHKIDPGKVLRSIPGIGPVIAPSIIGVTGNPERFANIRAYKAFCGLVPRKKQSATLDIKGLRITKTGQRILKKGYCLAAETARRYDPEAACLYHRLRTKGRHHNQAICAVASNLAGRTYSVMKRNGLGTETKTQNPSNLRYIIHDFEGKDINLKQGRILVVERYLTKTNRESA

SEQ ID NO: 41704 - protein, 401 aa, unidentified
MRYAGIDWADEHHDVVVIDENGRRVGAMRVAHDVEGVEALVAFVRTAGGDEEVAYFVETTNGLLVSTLLEAGVAVYPITPGTIDRKRGPARAKTDALDAYLLARTGRSDLADLRRLQPDSPLISELKTLTRDQETLVRDQTRLLNQLTACLKAYYPVALTLFSKLHQGLTWAFLEAYPSPEAAAAVRAEEIHATLGALGHSPGLAKAQELAVAVQTPQLQAPPPIARAKERFMLVLVAQLRVVCTALAEYEREIAGLFAQHADHTLFASLPRAGKRLAPRLLAEWGDDRTRYADATAVQALGGTSPVPHASGKFVSAHKRYACSKPLRNALFQFAWQSTLKEEWAAAYYQRKRRDGKKHAVAVRALANQWVRIIFAAWRKGETYDPAVFLAAQRAHAPRAA

SEQ ID NO: 41705 - protein, 413 aa, unidentified
MDTLIERCAGLDIHRDTVVACVRVPGEGRRREQEVRSFSTTTGGLLRLLDWLASYRVTLVGMESTGSYWKPVLYLLEEHCECWLLNAQHLRNVPGRKTDVADAEWICQLLEHGLVRPSFVPPRPIRELRDLTRYRKAQIDERVREVQRLDKVLQDAGIKLSSVASRVLGVSTRRMLEALVAGTHDPELLAQLAKGRLRQKLPALREALTGRFRSEHHGVLVSQILAHIDYLDESIATLSARIEEVISPFTEQVELLRTIPGVDRRSAEMLIAEIGVDMRQFPSAHHLASWAGLCPGNHESGGKRRTGRTRKGSKWLRAGLTESAKAAARSKGTYLAARHARLKSRSGAGTATGATRHAILLAAHAILEHNVAYLELGPDYIHRRHDPAQQTRRLVRQLERLGHTVTLQTADAA

SEQ ID NO: 41706 - protein, 371 aa, unidentified
MNGYILEAAPTACAIELKIDKRPKAKRILLGIDVHLRGYQAARKVDEGVIGVVDTFRSEVELLLHVEKQRLRAEEVVVVYEAGPLGYTLYRKLKAAGVLCYVCSPDGAEQRRKRRKNNKIDARNLTSKLFNYLNGDKEALQLARVPTEAQEQLRLASRQHDQLVEERKRLGAKGNAMLLSQGFGSWSNWWRPKAWAQLSVLVPAWLLERLQIWVDVLKMLDEKLSQAKAALARACSGPRPKGVGALSQMQLQSEVLDWHSYPNRRKIACLAGMVPSEWSTGDSERRGSITKVGVPAIRRIIVEMVWRMIFFQPQYKPVQKWQEVLRGSNPALKKKAVVAIGRQLIVDLWRLETGRVTAQELNLVMIEASGV

SEQ ID NO: 41707 - protein, 358 aa, unidentified
MRIIGVDLHTRQQTIAMLDTETGELVEKTLQHDGDEVRKFYSALPGQVLVGIEATGSMHWFLELLEELGIDHQVGHPSEIRKAETRKQKHDRRDAALLLKLQVENRFPSIWMPSTALRDLRTLLLHRHQWVRMRTRVQNTLQAIALSRGLRRGKALWGQTGQHTIASLPLPPHTAYRRTELQDLYHKLHAQIDELDKRVGDQALQRPGAKLLMSHPGVGPVTALATDVFLGDPARFADGKAVVSYVGMIPSEYSSGGQQRLGGLSKQGNPFLRFLWCEAAVHAVRRDPELQRFYRRKLAQKGLGKARVAAARKLGIRLWIMLRDQIDYQEFCRRGQMRQKNGGACAGMPEVGHSPAMQ

SEQ ID NO: 41708 - protein, 326 aa, unidentified
MTVYLGIDIASKKFDVAELCDGKYRCKAFENSSAGFLALYKWLGQSTMPDIHACLEATGDYGTSLATFLYENKIKVSVVNPARIKGFGASELSRTKTDKADSKLIARFCKAAVPDGWKPTPAPVRKLQVLVRRISALNGMLRMECNRRENADAHIQASLDRMISLLKTEIEVVRQEIKDHVSSDDELKKQDALIQSVPGIGAVSSNLILSFMSGKGFRKAKEVTAYLGLNPRHHQSGSSVRGKTRMSKMGDARLRSALYMPALVALRYNPDIKAFGQRLLLAGKPRMLVVGAVMRKLIHIVFGVLKSGTAFSSRIAAHSVVTSRPQ

SEQ ID NO: 41709 - protein, 368 aa, unidentified
MPKSTTLFVGLDVHKESIAVAHAEAARDQPPHFVGTIGTRHVDIDKMILRLHGKAPHLLFAYEAGPCGYVLHRYLKDKGLDCLVVAPSLIPKRPGDKVKNDRRDAVELARLLRSGDLTPVYVPSIEDEAIRDLCRARDAARLTLKDAKLRLKSFLLRLGLNYTGRANWTDAHRRYLSKVVCPTPAQQIVFQESIRAVDEQIDRLNRIEQELLELAPDWRLWPVVLALQGLRGVQMIVALTVVAELGDLTRFDNPRQLAAFVGLIPSEHSSGEKRRQGGITKGGNSRARRALVEAAWAYRYTAKISPSIQKRLENLPRSVQDIAWKAQVRLRFRRLTYRGKHSNVAVTAIARELIAFMWAIAKEVPVKA

SEQ ID NO: 41710 - protein, 449 aa, unidentified
MSDRSGVSRGDRNRNARLARLREAVPLSNAIAGIDLADSKQMVVVTDHESRVLARRTFRRRAWELGMALDWAAARAAAAGFAGVTVAVEPTGHRWRVVGQLAGERRMPFVCVQPLMSAWARRAEDLTFDKTDDKDAVLIARLAGQLRCYLPEPTDAIWGRLRQLGIRRARLVADQVAQVQQMRDLLECAWPAVLDAARQPFKSTTWHAALTVALARADGGDLARVTWLGRRRFDTAVRRQVARWDAVHPWQKIIDAVLAACADPAGVTELRHGALERVQLLLADWRDTRARLADTEQRMVTVLDELGLTSLVTSITGLSAVGAASILAETGDPARFTTGRALVKHAGLAPRQKSSGNYTGRTRTTGQGRPALRLAAWRAVWGALKSNPVYATRFAYLTSREHNKLSTGQAHAAIAAALLRHLHAVITTGQRWDPAIASGGRPNQTLIAA

SEQ ID NO: 41711 - protein, 343 aa, unidentified
MKITTVGIDLAKNVFQIHAVNKHGKVVVKKQIKRNQVIPFFTNLEPCLVGMEACGGAHYWARKLEQLGHTAKLMAPQFVKPYVKTNKNDAADAEAICEAVTRPSMRFVSIKNGEQQALLSVHRARQGFVKARTAQANQIRGLLTEYGILIPQGIRHISKRLPEILEDGENNLPGVFRQLLQRLGEHLKELARQVDELEAQIQVWHRENVASQKLAQIPGIGPITASALVATIGNAKCFKNGRQLAAWLGLVPRQHSSGGKPTLLGISKRGDAYLRTLLIHGTRAVIRVAESKPDHAGSWLGQLIERRSKNVAAVALANKNARTVWALLAHDRNYESGYEPSAA

SEQ ID NO: 41712 - protein, 343 aa, unidentified
MEAYSGKQFVGIDLHRRRTVIVRTTESGEVLETVRIVNDVERLASVMARAGQCPEVVLEATYGWYWAVDALQAGGASVHLAHPLGVKAFEYRRVKNDVRDASDLADLLRMGRLPEAWIAPPATRELRELVRHRAKLVGLRSHCKAEIHAVLAKCGVQVLMSDLFGVAGTQLLDRLDLPSPYAARIASLRRLIDDLEFEIDLFAGIVRGRMAREPGYTAVQNIPGIGPTLAAVFVAEIGDITRFASAPKLTCWAGLTPKHHESDTHVHRGRITKQGSRLVRWAAIESVKNLPAGTVAGVLRERVADRRGRNVGAVAAARRQLEFVFYALRDGHVRALEHLPGVA

SEQ ID NO: 41713 - protein, 343 aa, unidentified
MNGTQIGVDLAKAVCEIAVSHTPGRVQERRRLSRATVMNFFAERAPAQVVMEACSSAHHWGREFQRLGHSVLLLHPSDAARYRDGNKTDRADAKALLEAVRNEALDPVPVKSLEQQAVGALHRLRQGYLQTRTARINAVRGHLREFGCVIPIGARHVLPQAYAALESGAIPQLLRPALTTVLDEIAALEAKADAVRHELTQLAEQMPEAQLLLTVPGVGVLTATALVALVGNIQRFPSGRDFAAYLGLTPREHSTGQARRLGAITKRGNSYVRMLLVHGARSALRAGTVVQQPDDLRTWARTIALRKGHNVAAVALANKLARVCWRVWRDGRPFERREATERR

SEQ ID NO: 41714 - protein, 415 aa, unidentified
MALKIVYKICCGIDVHKTFVVACIASTDCKGVTTYEHHRFSTYTKGLKDLLQWLLKHNCKDVCMESTGKYWIPVYNVLENDCTVVLAHPKYVKAIRGKKTDKKDAKWIADLFKHDLVAGSFMPPADIRQLRDLMRYRSKLTCFMSSEKNRLQNCLTVSNIQLGNVVSDTFGKSALAILDKLLENPADTSFDLEPLVYKSLKKKLPELRDAIDGYITPEQAGKLKIIKAHYENLESRKAELEELILALAAPYQQELAILQTAPGIRSDFTAIGIISEIGTNMEAFLSAKHLCSWAGLTPTNNESAGKKKSVRVSKAGCYIKPLLVQCANAVIKSNKHPEIRNRYLRIKKRRGHKKAIIAVARMLLTALYHMLKNGENYNAELYRKSDPLPVDREITVEQAIIIARNQGYKIKSATA

SEQ ID NO: 41715 - protein, 309 aa, unidentified
MEIVVGIDVSKERLDVAILPQEEVFAVGNDHAGIDELAERLKGIGVDAIALEATGGFEMLAVAGLSAAGLTVLVVNPAQVRAYAHAIGRRAKTDPIDAAVIAAFVLATKPEIRPLRDAETQALSELVARRRQIVQMIVAEENRLRMALAKQAQKSIKRLLTALRRELESLDADLDSHIRKSPVWRVREALLTSVPGVGATTARTLLAELPELGSLDRRQIASLAGLAPWTRQSGKWKGKSFIGGGRSKVRAVLFMAALVASRYNPDLKAFRDRLVAAGKPKIVATVATMRKLLTILNAIIRDGRPWQNA

SEQ ID NO: 41716 - protein, 428 aa, unidentified
MAAGIDVGSEKFFASIGGGEPKVFLTVTEQMKELCQHFKAEGVSTVAMEATGVYWINLYGALEEAGMKVVVVDGRQCRNFPGRKSDMKDCQWLAVLHAHGLLTSGFIPPADIRRLRDYMRLRGDLVSMAAQHVQHMQKAMDRLNVKIHVVISDITGVSGMRIIEAILAGERDAEKLVKLCDEQILKSKRGAVVQALRGLWREEHLFALRLALESYQSYQRQIAQCDQKIAQALKEMSADRATPELGRPKELRHNAIVLEDLQKQMAQIYGKDLTKLPCINQSTAAMLLAEIGNDMSRWKDWRHFGSWLALAPCCAQSGRSRRRVKRYLTPAGRLLCRAVQCMAVGKHTWLANFYRRIRAKRGSKVAIKATAYKVAKLIYLVLTQGWDYVEQGMAKYEQRVREMQFRALQKLAKNLDFVLVPRAFVSAR

SEQ ID NO: 41717 - protein, 346 aa, unidentified
MNYYAGIDVSLEQSSVCVRDGDGKIIREAKVASEPEALIAWFAGLGLALSRIGLEAGPLSQWLYAAMQQAGLAVELLETRHVRNAFKTMPVKTDRKDARGIAELMRMGWFRPVHCKSMSAQETRAILTTRRLIEAKLRDVEMSVRGVLRGFGLKVGKTTPANFADRVRELVGGHSTLEVIAASLLAVREVLRREFGAYEKRVRTMARHSEDARLLMTTTGVGAVISLTYASAIDDPERFKNSKQVGAHYGMTPQRYQSGETDYTGRISKIGDESVRTALYQAAHIILTRPVKASALKTWGMQLAKRIGMAKAKVALARKLAVILHRMLVERKPFDHKLLVNQAAAA

SEQ ID NO: 41718 - protein, 353 aa, unidentified
MMIIGCDFHPSFQQIAYVEQETGEYEERRLIHRGEAEAFYRSLAGRSVRIGMEATGNDRWFHKLMSDLGHELLVGDASAIHASAPREQRTDKRDARHILRLLVENRFPSIWQPSVGNEEQRQLLLHRCRLVRMRTRIKNQLDSIAKSEGLTGSRAWKAKRRQQIEALPLTGWYAERRKDLLALLDEMDKRIEPLDKAVKAAAEQNAEAQLLMTHPGVGPVVSLAYVLIMGDWRRFPRGKQVGSYLGLIPAEASSGKHQQQMGHITKQGNTLLRWLLVEAAIKAQSKDPSWHRQYVRLSMNKHHGVAKVAIAHKLAVRLYWMLRSGQNYTQIVERGSHAGQSELAGGRGLRPIN

SEQ ID NO: 41719 - protein, 440 aa, unidentified
MRRRTRMGNCRVQESAAHRISMSTEKRKVCGIDVHKAFLVATVLDREGKSKTRRIQQNTESLLELRDWIQSENCESVAFESTADYWRSLYLVLVGRVPVNIANAHHIKHVPGRKTDITDSRWIAQLELNGLITPSRIFAGEMYDLRSLTRSRELLVQNRTELKNKIHHLLDSTSIRLSSVLSDLFGKSGTIILKGLVQNKPFEEIIESLPKKMRGSANAISSALPASIPPVFLVLLQSYLKLVDDLDNEIKLLEGRIREALINKSREIQILTSIPGIGFIGASTLIAEIGNVHDFEDADKLTKWAGLTPSVYQSANVTRTGSITKQGSRHIRWILVELGHVAIRSPGRIRTFFERLMPKKGYKKAIVAVARKMLRIAWHLLVHDEVFVDDFPRSKQVKFPKMPKKIQAVGINRIIELLSAASEVIFKDRNQEIFRLGLSD

SEQ ID NO: 41720 - protein, 390 aa, unidentified
MMLPNGDKHSNFSVASSHEGSIQLVKRIYSALTSHSLDTVLIGLEATSVYGDNLVYFLREDATLAPFNSRIHVINPKQVKRFHDAYNDLPKNDYVDSFVIADCLRFGRINKEVYSGDYRYQALRNLTRARSFTVQNLIKEKQRFMNVLFKKYSTMTQEKVFSNTFSATALAVYEEFDSAEALANMDLHELTDFIIEKGKNRFQNPDAVAKAIQKAARSSYRLPKTVNDSVNQVFSISITSMKALESQIKEFDKAIKAQTELLPNVLISIPGICPVYSAGIMAEIGDINRFDNQAALAKYAGLAWKQYQSGGFEAEVTRLIPSGNRFLKYYLCEAAFSLVRCDKEYSDFYHLKYKEVNRCQHKRALALTAHKFVRLVFRLLKDNRLYCPAK

SEQ ID NO: 41721 - protein, 412 aa, unidentified
MKVVHEICCGSDVHAKMLVACMVTAEGAKHIRTFTTMTADLLQLRDWLEAARCTQVAIEATGVYWKPVFNILEDAVPVMLVNPEHARALRGRKTDVRDAQWLAELLRHGLLRPSFIPPPEIREVRELTRYRETVVREQAAVRNRIQKLIESGNIKLAQVASDALGTSGRQMLWALARGEDDPMTLAALAQGRLKEKGVELQRALNGRLTVNQRFVLGELLVRWEELERADARVTLEIDQYMCARPKLARAREVLDTIPGIGPRVAEVVVAEIGVEMAGVFLTAAHLASWTGLCPGNKASGGKRLSGRTRKGNPYVRAALVQAAWGATRKKNCYLSSQYQRLVKRLGRKKALVAVAHSLVIIIYHVLDSDQSYTELGGDYFDQQHVEQQRAYYIRRLQMLGLAVNVEAMPAAA

SEQ ID NO: 41722 - protein, 427 aa, unidentified
MPYRIAGIDVHKKMLAVVVADVEIDGDFHFERQKVGTTPSDLRGLAAWLVAHEVEEVVMESTAQYWRPVWETLEQHWRPRRRGRDGAPRLAGTLHLAQAQSNRGPGGRKKDFPDAERLVKRLVAQELTLSFVPDTEQRLWRTVMRRKYQITRNRVQLHNRLEALLEEAHIKVSSLVSDLLGISARRMLQALADGETDPAALATLAAPRLRATPEQLCDAFQACPTLHPVYRRLLTLTLEELRVIEDHLGQLDQQMADLLAEHHDAVQRLAEVPGLGVDSAQQIIAEVGATAATFPSPKHLASWMGACPGNEESAGVNYSHRCPKGNRQMRRILNQAANAAVKAKGTIFAVVYRRLVPRLGHAQAIGAITHRLCRLIWKILHERVRYEERGPSVTAEAKKVRARKMIRELRSLGYRVELLPAPSNSPA

SEQ ID NO: 41723 - protein, 343 aa, unidentified
MDHIAIDLGGRESQICVMSAEGEVLSEERRPTRGLGAYLAKRPAGRVVVESCAEAFGVADEARKAGHEVAVVPATLVRSLGVGMRGIKTDMRDARNLAEASCRMKRLPMVHVPATASRERKAVCGLREVLVGTRTKLVNSVRGWLRTVGVGPMLRCRPEGFPTRLRKHVADRGGVVPPAVERVLGLVEAVNIQIASADKELKTVADKDSVCERLMTVPGVGPVTAVRFAAALDDVSRFDSASSVQSYLGLVPGENSSSDRRKITSITKAGAPHVRWALVQAAWSAWRCRKNDPMVQWAMEVAKRRGRPVAVVALARKIAGIMYAIWRDSSVYDAKQGAMPPSA

SEQ ID NO: 41724 - protein, 324 aa, unidentified
MNLPSLGIDIAKVKFNVCLLHLSGKLKHKMFANSAAGFAQLQQWLEKHEVAQVHACLEATGTYGEALSHHLHDRGHTVSVMNPAAIKAFAASRLSRTKTDRVDAELIARFGLAHEPPPWTPPAPEVRELQALVRRLESLVEMRVAEENRLSAGLTVVAVRTSVEEMIAHLKHQITRTEKLIRKHIDKHPGLKQQRELLNSIPGIADTTAALLLAEVPHIKHYRSARQLAAFAGLVPRERQSGSSVKGRVRLSKIGNARLRKALYFPAITALRCSPFFQQWAEGLRQRGKSKMSVIGAVMRKLIHIAYGVLKSGRPFDPELAKSA

SEQ ID NO: 41725 - protein, 411 aa, unidentified
MDVFCGIDWAEDHHDIVLVDRDGQLLARRRISDDAPGLAALLGLLAGHGDSADDPVPVAIETPRGLLVACLRATGRKVYPVNPKATARYRDRHSVAGRKSDHGDAVVLANVLRTDLHAHRPLPADSELAQAIAVLARAQQDAVWDRVTAHNKLRSHLREYFPGFLAAFAGTRDGIMRPEARVILAAAPTPAAASKLTPAQLRALLKKAGRSRGIDAEAQRLREAFRKEQMRQLPLVEQAMGRQALALLRQLDAACASADDLEAAAIESFNQHPDAGIITSFPGLGPLTGARVLAEIGDDRSRFQDARGLKAYAGAAPITRASGKSRSVTHRKVKNNRLASAGYTWAFSALTASPGARAHYDRRRDDGDRHAAAQRNLFGRLLGCLHHCLTTGQDYDETTAFPAQAAPPAAA

SEQ ID NO: 41726 - protein, 344 aa, unidentified
MDYFAGLDVSVKDTSVCIVDDTGRIIREVKVLSEPDALLTVLKNPVHHFKRIGLEAGPLSQWLFSALADAGLPVICVETRHMRAALKAQINKTDRNDARGIAQMIRVGLYRPVHVKTLRSRKLRMLLTHRQLLQSKAIAVDNDLRGTLRNFGLKVGIVRAARFEARIRELVEGLPDLAALVEPLLVVRQVLREQVAVLHRRLLAVVRDDEVCRRLMTTPGVGPLVALTYRTTVDVPARFRKSKSVGAVFGLTCSRDQSGERDRAGAISRCGDKMMRTMLYEAAQSMLVRSTRWSWLKAWAMQVARRRGKKKAIVALARRLAVILHRIWVDGTEFRWTREAVPAA

SEQ ID NO: 41727 - protein, 346 aa, unidentified
MTIVDSRAITGGVDTHADSHVAAALDPIGGLLGVESFATTPDGYRQLLSWLGAFGEVDLVGIEGTGSYGAGLSRHLQAAGIRVVEVDRADRQDRRRRGKSDPLDAVSAARAAQSGRATGMSKGRDGAVEAIRALMVAKRSAKSERTQTINQARAIVLTGPDDLRIQLAGLSAAEFVAKVAALRPRQGEIVDYATRMAVRELGRRVEFLDEQLERLDELIVPLVRIQAPVLLTLFGVGPDTAALLLIAAGDQPDRLRSEAAWAHLCGVAPIPASSGKVDRHRLNRGGDRHANNALWRIVITRMSSDLPTRSYVERRLKEGKSKMEIIRCLKRYVAREVYPYLRPGAD

SEQ ID NO: 41728 - protein, 347 aa, unidentified
MRFYTGQHRFFCGIDLHARSMFLCILDSQGNVLIHRNIKANPDDFLNVVAPFREDVAVAVECIFSWYWLADLCAREKIPFILGHALYMKAIHGGKSKNDKIDALKIATLLRGGMIPQAYVYPAQMRATRDLLRRRMHLMHKRAELLAHIQNTTSQYNLPEFEKVIAYKKNRTGIAEAFSDPTVRTSIAADLELIDHYDDLLKRLELFILRSARVHDPNALLLLRSVPGIGKILSLVILYETHDIRRFPSVQHFASYSRLVRCSHMSAGKRTGSGGRKIGNAHLKWAFSEVAVLFLRANPQAQAWLARTASKYGKPKALSILAHKLGRAVYHILTKERAFDMNRFLDE

SEQ ID NO: 41729 - protein, 338 aa, unidentified
MTECKSSAWIGLDVGKKTFSAAIDLPVDGRRRKLTDIPCREFARTPKGVEDFFAWTEKTATGLPAGIVMETTGCYSQHLADWIGKSRPSIPVTIENARALHAFIQSLNLPHKTDRLDAQAIARFGTERRPAPSVRPSPAILALRELSRERSALIKARTELRNRRDSLSTEVARRHNARTLAALTTQIQMLDDEIKACVVEDEELLAEVHVMTTMPGVKFVSAYSILAEIGSLKQYSAKELSAISGLCPRILDSGTSVHSSYMSRRSSARLRQILYLDSVIATRKIPVLSEFYSRLVSKGKKKMTARCACMRKMLLMLRAMVVAATPYSENIEKISASA

SEQ ID NO: 41730 - protein, 350 aa, unidentified
MWYVGLDIGLKWHYVVVMDAEGRIHQQQRLPHDPLLIQRFFETLAGPAQVVLEATGNWVAVYERVEPYVQEVVLAHPLKVKAIASARIKTDKIDATTLAHLLRANLIPRAYIPPRAVREWREVVRHRAFLVRLQTRVKNRLHTLLAKRGVTPPGHSDLFGVAGRQWLTSLGLPDPYGAMRTRYLALLERFAHQIREVERTIDQTVQTTLEARLLETIPGIGRYLALLILAEIGDIHRFPDPKHLVAYAGLCPSTYASGQTVRHGRLTHQGSPWLRWALVEAACHVWQVPQSRLCRVYHQLCQRRDAKTARVAVARKLCTILFAMLRKSEPYRDCPVSPLDPPRRLDAACR

SEQ ID NO: 41731 - protein, 420 aa, unidentified
MGAIRVCFKVVCGLDVHQAEVVACLSIQDARGRLKRVTRRFRTVYSELLQLRDWLVSEGCEALGMEATGHYWKPIYSVLEGHVQMIVGNPTQMKGLKGRKSDQQDAEWIADLTRLGLIKPSFVPPPDFRALRDFLRTRRGMIQARTTLQNETLKVLEVGGVKLSSFMSSVFGVSGMAMLRALAKGESVVGQVHLLAKGKLRSKLADLRLALEQPLPLHLQQILATQLERMDQLEGHLSTLDARVEERMAPYEAERRILMDISGLGRTSVNVILAEIGVDMGVFPTPAHLAAWSGLAPGSFETGGKSKRAPTLKGNTYLKTMLVECAGAAIRSKGTFFSAKFNQLRRRGLDYRKALVAIAHKLIVVIHRVLSGKTPFVDLGAAHCEQRNRARTIYNLTRRLETFGFAVTLQKLRIESEPLQ

SEQ ID NO: 41732 - protein, 327 aa, unidentified
MEWTVAIGIDTHRDVHVAVALDRLGQFRGSLELAVEERGFAQLVRFARSFGEPAFAIEGTGSYGASLARALLAEGFLVYECERPERRSRQDKNDLIDAEAAARRLLSGQRLALPRSGAGREQLRLLLAERRSAQQARLQALNQLKAAIISLDPPLRARLSRLQPASLARAPFLRRKPLLTPLRRLARRIGQLQAELVEIDAELAELTRALCPQLLAEAGVGPVCSAQVLVSVADPARLRSEASFAALAGVSPIEASSGQVKRHRLNRGGDRQLNWALHMSALNRIRHHSETQAYYERLLRDGKSKKEAIRIVKRVLARRLYRTLVAA

SEQ ID NO: 41733 - protein, 309 aa, unidentified
MNPTPPTYVGIDVAKKDLAVSGQNMKKIYTNTPLGHAWLIKALPANAHVVMEATGGYERALTLALHAQNIPVSVVNPRHVRDFAKAMGQLAKSDNIDAQIIVAFAQTKRPAADQAPSSSLIELEELMARREQLVALRTIEKNRQEHHRLKLLQVRSQKLLITIKLQIEELEQKASELIAADALLKTKRARMLQVEGIGEITVASVLAFMPELGSVSRAQAAALLGVAPFVCESGMERGKRHIWGGRANVRTCFYMAAMTAMRDNRVLREFYQRLRAAGKPGKVAIIAVMRKLICLLNHLLKKPDFLLAR

SEQ ID NO: 41734 - protein, 362 aa, unidentified
MRIIGCDLHARQQTVAMLDTKTGEVVKMTLTHEGDNVREFYSSLPHPVRVGIEATGSMHWFVDLTEELGIECRVGHPAEIRAAEPRKQKHDRRDADLILKLLVENRFPAIWLPSKELLDLRALLRHRHQWVRMRTRIQNALQSIALANGLRRGPSLWSQAGQHAIASLSLRPHTAYRRSELQAMYAKFEAEIEILNQRVEEQACERPGARLLMTHPGVGPVTALATEVFLGDPARFADSKALASYVGMIPREYSSGERQRLGGLSKQGNPLLRFLWGEAGAHAVRRDPELKRFYRRKVVQKGLGKASVAVARKLGIRLWIMLRDQIEYNEFCRRGQKQQKSSDAYAGMPETRYGAKSHRPVD

SEQ ID NO: 41735 - protein, 336 aa, unidentified
MKEQQIKHEEGQIKKFIQKLKSEGTEIHCCYEAGVTGYPLYRYLKTLGVNCIIAAPGKIPRQSSDKIKTDKRDAIKLARLLRSGELESIHVPSEEDEAVRDYLRSRDSLRLDLGRNRQRLMKFLLRKGITYSTTKYWTASHYKWLNNLHFENEILQATFNDYYSRVRVQEENLKAMDQKIREIAESEPYREKVGILRCFRGVDYLTAMFLLSEVNDFKRFKTAGSFMSFLGLVPGEYSSGPKRKQTSITKTGSPRLRRILVEAAWQHRFPGTGSKVVVARRVGQSALVVSLAEKASLRLHKKFKSMQLRGKTPQVMITAVSRELSGFLWAAMNLVA

SEQ ID NO: 41736 - protein, 408 aa, unidentified
METIYASCAGLDIHKKTVEVTVRRMEQGRVRAETRQFGTMTRDLLALSDWLRSQQVTHVAMESTGVFWKPIYNILEGQFEVLLVNAQHVKQVPGRKTDVNDSQWLAQLLQHGLLRGSFVPPRPLRELRDLTRQRAQLVAEQTRVTNRLHKTLEDANIKLGSVASDILGVSGRQMLKGLIAGEENPEKLAEMAKRRLRGKIPELRLALQGHVTDHHRFMLRLLYQHLEEVEALVEELDQRIEAATHPFQEQIARLDEIPGIDRRLAEVILAEIGPDMSVFPTAHHLASWAGMSPGNHQSAGKRKKGKTAPGSRWLRQGLSQAAWAASHSKNSYLAAQFRRLAPRRGKKRAVIAVGHSILVIVYHLLQEGGSYRDLGPDYFDRLAPQRLTRYLVRRLEKLGHRVVLEDAA

SEQ ID NO: 41737 - protein, 345 aa, unidentified
MKQIIRIGMDTSKHIFQLHGVDAAEHPVLRKRLRRSELLGFFAKLPPTVIGIEACGAAHFWARELGQLGHTVKLIAPQHVKPYVKRNKNDGRDAEGLCEAMSRPTMQFVAVKTQEQQAALMLAGMRERLVSRRTQLSNAIRSYAAEFGVTTAKGLDKIEPLLAAIAANQTLPALARNLFVLHGREYAQLQAELKIIESKLQAWHRANADSRRLAQIPGVGPIVASTLVMKAPDPHLFQSGRHFAAWIGLTPKDHSTAGKTRLGAITRAGDERLRSVLVAGATAVIQQARRGRGHPSPWLLALLARKSPKLAAVALANKIARIAWKLMTTGERYNARMPDTLALAA

SEQ ID NO: 41738 - protein, 346 aa, unidentified
MTIVEAARAVTGGVDTHLDLHVAAALDPVGGLLGTEGFEATSAGYQALLSWLQAFGPVTKVGVEGTGSYGTGIARFLRGHGVEVVEVNRPNRQERRRQGKSDPLDAVEAARSALSGRAQGQAKSKDGAVEAIRVLVVAKRSARQARVKAVVQMRHLGITAPDQLHCRLKGLTIPALVAEGVKLRPTRSADPVTAATKASIATLARRVQALDQEIADLDGLIKPLVSAAAPELLALFGVGTDTAATLLVAAGDNPERLHSEAAWAHMCGVAPIPASSGKVERHRLNRGGNRQANSALWRIVMVRLVHDPDTKAYFDRRVKEGRSKREVIRMLKRYVAREVYRQLPRG

SEQ ID NO: 41739 - protein, 448 aa, unidentified
MGQGKRPASRGVVRRNVKLKALRELVGKDRAIVAVDLASQRQAAVVCDHDSVVLARRMFRGSAWCISEILAWAGPVAARAGFSGLVLACEPTGHRWKPLVVTARAAGIPVVCVQPLLVHRGREGEDFTRSRSDFGDAVIIARLTAELRCYLPYLPEGPWARLRHLGARREGLVRRAVAAREQVRDLLECAWPAVLEAAADPLESLTWRAALGVSADPAVIAGMSEQQFLAALRERLVALGGQKVWRRIAVAVHAAAADPGGIAAERDAIIERAAFAYQDWMSALAAQTEIEARMLAVLDELGLTALVTTIPGLSAVGAAVILAQTGDPARYDSPRTWVKHAGLAPQANESGKYRGRTRGSGRGRPELRTAAWRAMFGAVRCNRVYAARLVLLTTRQVNRLSRGQAHAALAAALLRQLHVVVTRRVPWDAAIASGATMPADTQVVMAVA

SEQ ID NO: 41740 - protein, 420 aa, unidentified
METIETAYKVAGIDVHKSMLAVVIADVAREGEFQFERRKFGATESELRQLAMWLTEHRVREAVMESTAQYWKPVWQQLEGQCELYLAQAHSNRAPRGRKRDFADAERLLRRHVAGELILSFVPGPEQRLWRTMTRSKLQLTRDRVRIHNQLESLLEDARIKLSSCVSDLLGLSSRRMLKALAEGETSAARLAAMADPKLRATPERLQDALHAAATVSVLHRQILGLFLARLELIEDQMEILDKSIGEALHGYHDAVLRLAEVPGYGIDSAQQVIAEIGPAAATFPSAAQLSSWVGTCPGREESAEVSRNNRSPKGNRMMRRVLNQVANAAVKTKGSVFQAVYRRLLTRLGHNKAIWAIAHRLCRLTWKILHQGVRYIEQGNRPNPKAVKTRMNKLIRELRSLGYQVQVAPLATPKNAAIE

SEQ ID NO: 41741 - protein, 345 aa, unidentified
MRLLYGGLDVGSSNCHFTALDGDGAIEASAEIPTSELHITALLSSFKSDEKLKLHLEASELSRWIRSVVTERVPNVEEVVISDPKRIMWITRDPQKGDKVDSLKLADLLRHGTTHPVYYSDNGKMSSFKKCVQNHESLVKERSRSMHKIKAGLRWLGIIIKDDSPFRKSQRERILGEIEDPLQRLDIEDQYVLLDQKGELCKRAEKRMKKFSKNWPIIEKFMEVPGIGLILACRFFAYVQTPWRFSTKRKLWKFFGLGITDRSSDGKPLGFKRLDWNGVPTLKGLSSTAFRIAIGRCEDNSFRRTYYRSLRNTNNAVHARLTVQRKIVTVLWTMWKNNEAYDDSK

SEQ ID NO: 41742 - protein, 482 aa, unidentified
MKKKNIFQNRSQQLLRLFEKAGNRLKMMCVPIDYAKKDHIVMFCNGYGDILRKPFSVINTLEGVKYLIDQVMRSCRQRHIKKEYVFFGGEDVNSYAENFANALRTKGFLVANVNAHDAKKQRENLQASTDRIDLMGIAMMLLNLRAKCSPAQDGIYRNLRTLVRHRKKLVVMKTEVKNRVHTLVDRLFPGFLNEKNTGINPFSKSSLVLMEDRFSAQQIRRRQQRTLVKILKRCATPDADSVAAKLHSYAAQVITTPDEYVATLQFSLEHHIKHYRCLQENIDQLLSEIALVLSQTQGAFLTSIKGVGIVLAAGVSSEIGNPFEQKPLNNLTSYSGIIPRVKQSGGIEGHTHTGRVSKRSNHLLKDCVVQSAFQIGLRGPQPLLQDYKRRQAAGQHADFGIGRRFLRMAMCLMRSSQVYMPPKLRSPKIQMHDRAGHYLTAWPLLRDKWKKAHAQQAAFAKDQPLGQWRQIVQELYDIKLKL

SEQ ID NO: 41743 - protein, 405 aa, unidentified
MLEAIVKRVAGIDVHKMVIVVTVLLTQENGEIQKETREFRTFRKHRRQLARWLKRCGIELAVMESTGIFWKSIFETLETACIDAYVVNARYVKNVPGRKTDVMDSEWLATLARAGLLKPSFIPPKDLRELRLIGRHRMKLQGMLAGEKNRLHKILDDAGIRLGGVVSDINGVSAKEMIAGLIENKPVEELVLCARGRLKAKEKELYDSLSESISERHRFLLRKIQSHIQHLEQEIQDLDDYLFAAMTPYQKQWGILQTLPGVDRFSAAMLLIEIGTDMEQFGSPGQLASWAGMCPGNNESAGKRKSGRARKGNGSVRRVLCEVANAARKTNSQFKGKYQGLVIRRGHKRTIIAVGHKILRVIYAMLKNNQPYWDPGIDYEELTVKRNAPRWLRALGKYGYLPAQA

SEQ ID NO: 41744 - protein, 345 aa, unidentified
MEQINQIGMDTSKHFFQLHGVNAAEKVVLRKKLRRKEMVAFFKALAPTVIGIEACGASHYWARLLRSFGHEVKLIAPQLVKPYVKRGKNDGADAEALCEAMSRPTMRFVPVKTAEQQAALMMVGLRDRLIRNRTQLSNAIRGYAAEFGLTAAKGKAHLVPLLERIQADESLPIAARELFSLQAKDYAQLQAQIDEVDAKLMAWHKADECSRRLAKIPSVGPIGAALLMMKTPAPEMFRSGRQFAAWIGLTPKDHSTAGKVRLGVITRAGDEALRSVLVAGATAVIQHVRRGGRGSPWIVDLLKRKPPKLAAVALANKTARVAWKLMVTGDSYAAKSAPAALASAA

SEQ ID NO: 41745 - protein, 414 aa, unidentified
MTKNKINNLTTKTLISAVDFSKSKHTAYFTTLTGIDNKPFEFANNREGFDRYWRKLQEFKQKHGFEDVVVSFESTGSYGVPFIHYLRNKGVKMQQVNPKHTKRTKEVSDNSPNKTDDKDPWVIANLILMGSGLTVNIAEGKIQELRNHIYNREALIDDQNRLINRIESLLAVYFPEFLKLFDTIMAKTSLYILKYYPLPQDLLKADPDRLTNELRKISRGRVGPEKTRRIIDNAGKSIGITEGTDSFRQNIRNFLEQIETINKQKKQVESQLSELLKEIPVSKILLSVKGLGEVSVAAILSEIIDFKSFGTIREINKYTGFNLFEISSGKRQGRRRIAKRGRALLRKTLFFATLNMVKKGGIFHEDYQRHINKGMPKMKAIVAISRKLLRMLFAMARDEETFNINKLNHIKQAA

SEQ ID NO: 41746 - protein, 326 aa, unidentified
MMHPAEAFKPAPTDALITIGIDVSKDHLDAARHPSGDSLRVPNTRKGHTELLRWLGNSGSIARVVFEPTGPYHRMLEERLASVGLQIVKVNPRQARRFAEAAGRLAKTDRIDALMLARYGALLEPVTRPVRSDVQNQLAELVAARRGLMRDRTATLNRLKTLTIELLKRHARHRLRQIEAQVASLDAAIDAIVLGDPVLCRRRDVLASIPGLGLITAHTLLADMPELGAMDEGQAASLAGLAPITRQSGTWRGRSFIQGGRASLRQALYMPAIVAMRFNPDLKRVYDRLIAVRKHTKIAITAIMRKIIVLANALLRDNRLWSPKAS

SEQ ID NO: 41747 - protein, 424 aa, unidentified
MQVVYPVCCGIDVHKTFLVATIIKTNQDGLTPTYSKKRFSTFTRELRALKQWLLENGCKDVCMESTGKYWVPVLNVLEDEINVTIANPKWVSAVKGNKDDVKDSKWIGDLFRMGLVPGSFVPDKDIRVLREFTRYRCKLVAMRASEKNRFQNAFTVCNLTLDAVLSSMFGVSATNILDYLMKTDNIDPAHCASLLRGRAKEKADKIADAVEGFAMTDAQKTRVNIIQSHFTTIDELLARLDCEIAQLIAPFESQIALLCSIPGVDRDTAITIVSEIGTDMKQFSSSKRLCRWAGLTPGNNESAGKKKSVRITRAGVYLKPALVQAAHAAVKCTSQPYYRNKFERISKRRGKKRAIIAIARMILTAVFHMLSNGEYFNPCDLANADVPDSIRKSRLLHSVRSAVDLLVTLGVVSSDNVCLSALVV

SEQ ID NO: 41748 - protein, 342 aa, unidentified
MQTVNDNTDVQTKAVQQSEYKPEQKPEHIFIGIDVSKLTLDVDAYPNPTPRSFPNDDVGRAELVRWLHQLQPTLIVVEATGGLQTPMVATLVADGLQVAVVNPRQTRDFARALGILAKTDRVDARMLARFAQAIRPEARPQPAPETVALAGVLARRQQLVEMLTAENNRLLMAHPLVAKTIKQHITWLQKRLAASDADLDNMIRKSPVWQHKAALLESVPGVGRVTATAMLAQLPELGMLSNKQIAGLVGVCPYSRDSGAMRGRRTIWGGRASLRAVLYMAALVGSRYNPVLKAFYQKLVKAGKPKKVALVACMRKLLTILNAIVKHDRSWKFDEVVATKPA

SEQ ID NO: 41749 - protein, 314 aa, unidentified
MADPCSVGIDVSKATLDVAWSTNPTTRWQTTNDDAGWTALVAHVRALQPTVIVLEATGGYEIGAASALSTAALPVAIVNPRQVRDFAKALGLLEKTDGIDAAVLATFGARIQPTPRPLPDDLQADLQALVTRRRQLVDMLTAERNRVLLARGAVRKNVVAHIAWLEKQLGKTDRDLRTQIEASPIWRARDQLLQSVPGIGPATSARLLASLPELGTLSHRQISKLVGLAPLPDDSGRRHGYRRVQGGRGDVRSALYMATVTAITHNPTIRAAYRRWRAAGKLPKVALVAAMHKLLIHLNAMLRHQTPWHPPATA

SEQ ID NO: 41750 - protein, 360 aa, unidentified
MIVQGTSVGLDVHALSVVAHAVDEETGKVARARLCPDHGEVLGWLHQLRAPVRVTYEAGPTGFGLARAITGAGMECLVAAPSKLQRPAGDRVKTDARDAAHLARLLRLGEITAVRVPEREIEAVRDLVRAREDARADLMRVRHRLSKLLLRQGIVYSGGTPWTCVHEEWLRRHRFDDIHLKAAFDHSFDAVLAATAARDRLDEQIMVVAASPRFADPVNRLGCLRGISALTGLALTVEIGDWSRFCGSSIGAYVGLVPCEYSSGNSRVQGSITKAGNTHVRRLLIESAWHHRKSYSTSGPTLRARWAKVDPALRARGHAGNRRLNKRWRSFTERGKNPLVANVAIARELAGWCWSLATMH

SEQ ID NO: 41751 - protein, 323 aa, unidentified
MEQNEVILGVDTHLDTHVGAVISETGKLLGTLSVSADTAGYLKLLTWANSHGHLRRAGVEGTGTYGAGLARVLRDHEVEVLEVNRPDRAMRRSRGKSDPTDAENAALAVLSGRATAIPKEQSGAAEALRAVSVARRSAVKAKTQAINQLRSLLVSAPQDIRERLLKTKTAECVTICARLRSLGGTPVLQTLAEMLRLLAKRWLALAEELNTLDAMLDQLTRQHAGRLRERFGVGPQTAAVLVSVAGDNPERLKNEAALAALCGTSPLQASSGKTVRHRLNRGGDRSANNALWTIAMVRMRSDPRTQAYVEPGKACRTKRFIAV

SEQ ID NO: 41752 - protein, 453 aa, unidentified
MAKKAKKIQTGKEIALKIVNPNAAGIDIADSEMQVCVPADRDDDSNRRFGSFTRDLGEISGWLKACRIDTVAMEATGIYWIPLFFRLQDDGFDVQLCNAREVKNITEKKTDKSDAEWLMLLHSYGLLKPSFQPENAARQVRNLARHRTNLLKTASKEVLHMQKSMEQMNIKLTNVISDITGASGRRIITAILAGKRDPKELALLADERCKRSRDEIALSLEGTWDADHMFELKQSWELYQVYQDKVEECDREIEKLLKTFVSRIDDDKAELVRTKKRINKKNAVAFDIESYANAIWGVNVMAITGMSSGSLLQLIGELGADFTDKFGSPAKFSMWCNLVPNNKISGGKLISSRVPKRKNPVGQVFRQCANAVARSNSPLGFYFRRIKSRAGHMSAIVATAHKMAEIFFIMVRDKVPYDEGRVGMDEETLLKRKIERTQRQLDKLNAKLYASVC

SEQ ID NO: 41753 - protein, 421 aa, unidentified
MTPTSHTTFAAFVGIDWADAKHDGCLQAAGSAKRECFQLEHTPEAIDAWVTTLRTRFHGHPVALCLELTTGPLVSALRKYDFLVLFPINPLTLARYREAFTPSRAKDDPTDAELQLELLLTHRDKLQPLQPQSPTMRALAQLVEHRRRVVGDKVRITNRLTSALKNYFPQVLQWFQDKDTRIFCDFLSRWPTLKAAQLARRSTLETFFRDHHVHTADVLATRLHAIKTATPLTTDEGIIAPNVLLVQTLVSQLRVTLDAIEAFDQAIAQRALHHPDFPLFQALPGAGPVFASRLLVAFGEQRERYASAAARQKYAGIAPVTERSGKKAWVHWRLQCPKFLRQTFVEWTAESIRHSFWAQVYYQQQRDKGNTHQAAVRALAFKWIRILYRCWQERTPYDESTYLQALMRRNSSLIPNRVKAS

SEQ ID NO: 41754 - protein, 531 aa, unidentified
MGYIAIGGDVSKGRLDIVIRNESGTRLHAGVYDDTAAGHQAVQREVSALRERHPVEVFLVGLESTGGLERNWLAFFRDERRWVKGMRVHRLSPVQVQRHLSTELHRSVTEVSAADGIARYLLERMGERAMRDDAPSAAVLFYRTVRSVMHRRLEVEQQLHAVLIQIHPELVQYCRSGFPLWIIDLLERFPTAIELANARVAAVDAIRNVLPDRAARLVAAARESVASLIGPAARATITLLIAQWRDLTRTIDAGKTTIATLIVEDPLHREQARLLATLPGIGEWTAQILTLELGDFARFRDDRTLVAWCGLDPHEDRSGDGVIRRGISHRGNAHVRRALFMPAFTAAKRLPAIAALDQRLRAAGKPPLVAAVACMHKLLRIAFAIVRSGKPYSEHHEAERMTQATAQQSARSQAPQVIASAPSPASTGPAAPVTAAVPAYETPPPARPRVRGQGLKGMRTGERRNHPDHDSCAEKPAGGHHAPPRSAARRSSTGQHDAQPRGRASWTVVQSGLRRALSPGTTRVPPSTRGH

SEQ ID NO: 41755 - protein, 386 aa, unidentified
MPQPKDDLSRSLVALDQHSSLIAVVELSLSTWLVGGMVPGIERDPLKKLVPDEDGLLKLLHRWRDEAVKAGHQINRMVVAFEAGRDGFWLARWLRSRGIEAYVIHPTSVAVSREHRRAKTDRLDIALLKRSLLGWLRGEKKHCSMAAIPTLEEEDAKRPNREREQLVGKRTGIVNRMKAALVRLGIRGFNPKLRKAPQQLATLRTPEGGTIPPNTLAELQREMAHLSFINEHIKQIEDARLIQLKQAPQHGSNAKVVQLGRINGIGIETADMLANEVFSRDLRDQRAVARYAGLTGSPDESGRRRREKGLAKAGNARVRRGMIQLAWRFLFHQRNSALTQWYRQSVAAGKKRTTVIVALARKLLIALWRFVTIGDVPQGVILRTAS

SEQ ID NO: 41756 - protein, 320 aa, unidentified
MNEILSETVVELKFVGIDVSKDALDVCIDPPGLAERFANDDAGIAALSQRLKALSPTLVVMEATGGFETHAATALAGAGMPVAVINPRQARDFAKASGELAKTDAVDARMLALFGRAIRPAVRALKDETVHELDGLVTRRRQLIDMRTQETNRLTTASKLQKKQIDKHIAWLNKRIDELDRGLTKRLRNSEVWRTKDDLMQGIPGVATVTSLSMLAKCPELGTLNRRQIAKLVGIAPLANDSGKRRGKRAIWGGRADVRSVLYMASLSAMRYNAVIKVFADRLRAAGKPPKVVIVACMRKLLTIMNAIIKNNTPWNPTIA

SEQ ID NO: 41757 - protein, 386 aa, unidentified
MPQSNDLSRCLISFRQDETLVAVVEMSKTSWLVAGMIPGVARHPLKKLVPDEKALFELLERWRDEAVKAGKIITRITVAYEAGRDGFWLARWLRARGFEVYVVHSSSVAVTREHRRAKTDRLDCEMLKRVFIGWLRGERDHCRMVAIATQTQEDAKRPNRERENLVGECTRIVGRLKAGLARLGIRSFNPKLRNAAERLESLRTPEDVPVPANTLCELRRDMARLRFVKDQIKQIERARVRQLEQAPEQGPQQMVRLLARVLGIGIETADMLVHEILSRNLRDRRAVARYAGLTGSPDESGQKRREKGLSRAGNARVRRGMIQLAWRFLMFQKTSALAQWYRVRTKDAGGAVRKTLIVALARKLLISLWRFVTTGEVPVGVTLRVA

SEQ ID NO: 41758 - protein, 370 aa, unidentified
MHKPTTVFVGLDVHKETIAVAYVSHERSAQVNYLGQVGTRQCDIDKLIRRLQSKAQRLVFAYEAGPCGYVLYRYLTLKGFTCLVVAPSLIPKKPGDLVKTDRRDACQIAHLLRSGDLTPVYVPTVEDEAIRDLCRAREDALLVLKAARFRLKAFLLRLGMHYTGRANWNDAHLRYLSKVVCPTPAQQIVFQESLNSITEQHQRVDRLEAALAEILPSWRLSPIVSALQALRGVQLTVAVTVVAELGDLTRFDNPRQLAAFVGLTPSEYSTGSSRRQGPITKTGNSHARRALVEGAWAYRFPAKVSPIIQKRLEKIPTPIRQIAWRAQVRLCQRYRRMVGRGKHPNVVVTAIARELAAFMWAIARQVSIAV

SEQ ID NO: 41759 - protein, 348 aa, unidentified
MRVYKAQHSYYCGVDLHARSLFVNILDDTGKTRLAQDLPASPATFLDAVKPYRQGIVVGCECMFAWYWLADLCERESIPFVLGHALAMKAIHGGKAKNDKLDAEKIAGLLRGGFFPMAYVYPKAKRETRDLLRRRSFFVRQRAQLIAHIQNTNSQYNHPPFDKKLTYKGNRNTQIVDRFEHLSTRLSITADLNLIESYDTEIASLETHLVKSAKIDDPSTFAFLRTIPGIGPILGLVMLYEIDAISRFAEVGNFLSYSRLVTCTHESAGKVKGVGGRKIGNAHLKWAFSEAASLMLRSFPAAKSWMQRQSKKRGKKKAHAILEAKIGRTVYHMWRKQVAFDAKKFLAS

SEQ ID NO: 41760 - protein, 341 aa, unidentified
MTITRIGLDIAKSVFQLHGVDARGKTVLRKTLARGEVLSFFGNRPACLIGIEACAGSHYWARELIKLGHDVRLMAAQFVAPYRKGGKNDATDAEAICEAVGRPNMRFVPVKSEEAQAVLAVHRARALTVSERTALVNQVRGLLGEFGIVARAGIAHARKLLAQIGAGERSLPVLARETFGELHDRLRALDERVVAYDRKIAALAQQSEAAQRLMAIEGIGPVAASAIVASVGTATTFSSGRQFAAWLGLTPRQHSSGGKTVLGGISKRGDVVLRTLLIHGARSVLRLSAARHDRKSQWLEGLKARSCNNVVAVALAAKNARIIWAMLTRGTEYRSVTSATA

SEQ ID NO: 41761 - protein, 359 aa, unidentified
MRIIGCDLHARQQTIAMLDTTTGEVSTLTLMHEGNQVREFYSQLPRPVLVGIEATGSMHWFLNLMDELGIECQVGHPATIRAAEPRKQKHDRRDAELILKLLVEKRFPAIWLPGKELLDLRALLLHRHQWVRIRTRIQNALQAIALANGLRRGPSLWSYDGQAKIAFLPLLPHASYRRSALQGLYRKMEEEIENLTQQVAEQAEQRCRSRLLMTHPGVGPVTALATEVFLGDARRFVDGKALASYVGLIPGERSSGRRQRLGKITKQGSPLLRFLWGEAGTHAVRRDPDLKRFYRRKLVQKGLGKTRVAVARKLGIRLWIMLRDEIDYEEFCRRGQKQSGEACAGMPETRMVNDRRAID

SEQ ID NO: 41762 - protein, 458 aa, unidentified
MPRGRRRRVTRPVTMPILHPHAAGIDIGAIEIYVCVPLDRDPEPIRRFGTFTEDLHAIADWLAHCGVTSVAMESTSVYWIPLYQVLESRGFAVCLVNARHVKNVPGRKTDVQDCQWLQYLHSVGLLRGSFRPPETVCAVRTLLRHREALIQQTTAHTQHMQKALNQMTLQLHHVLSDVTGVTGLAILDAILAGERNPVVLASHRDYRVKASRETIMKALVGEYRPEHLFTLRQALASYRHVQALIEECDGEIYRLIGAFPATADLTERPLPAVPTRRMPHVKTPRFDLRSEFYRVLGTDLTAVPGIQITTVSTLFAELGPNLSAFPGGAHFASWLGLCPDNRISGGKVLSVHTRAVKHRVARALRLAAQSLGRSQSVLGAYFRRMRAKLGAPEAITATAHKLARIVYHLLVTHEPYDETRIARAEQQYQRRTEARLRSQARALGFQLMPIGPVVSTVS

SEQ ID NO: 41763 - protein, 489 aa, unidentified
MAKTKRKQSTFERLRRGELNRKQRRNLARRLAGNDPGLTIIHSNAGGIDVGNESHFVAVPPDRDANPVQEFGCWTADLKRMAEWLKACRIDTVAMQATGVYSIPLYDILTGHGIQVVLVNAQHTKNVPGRKSDVQECQWLMKLHTYGLLRDSFRLEERMEGVRTIWRLRDRHVKDASRAVQHMQKALTKMNIQLANVISDITGVSGQAIIGAILEGERDPWKLADLKHEMVKASREEVARSLEGNWRADLLFELQQAVDSYHFVHQQMRACDRQLESFLASLPTRILERPNQPDGAPAATAKKTKKPRKPKKARRNQPTVDLTTELKRICGVDLTSIDGIDVITAQTIVSEIGTDISKFKTEDHFASWLGLTPAKDITGGKIIGRGRRKVQNRVGGALRMAATTLIQSKTYLGARYRHLRQRLPSYAAAIKAMARYLAVLVYRVLTHGEAWVDRGAAKFEQNRSERELRSLTSKALAKGFKLVPIPVTS

SEQ ID NO: 41764 - protein, 345 aa, unidentified
MQSMYYIGLDVHKKTISYCVKDGSGRIHAEGTIPATRLTLDMWMKTLPQPWTAAMEATIFTSWIYDHLLPHAAAVKVAHPLMLRAIAAAKKKNDRIDANKIADCLRCDFLPECYMASTEIRERRRTLRYRNLLVRQAVQMKNKIAVLLMETGVGYNKQKLHKVGYFRELLASNQDIDEGLKPLLRLCRETVVRLGKTESALVRSLQRDSLLVERVERLMTIPAVGPITALTWALEVGDVQRFSSIKKAISYCGLCGAERSSANITMRTPLSKQRNKHLQTVLIEAAKMAPRNSPELAMVYQQEKQKGNANRATLAVARKMVAYLVAVDRRQNGFLVVENKNRTAA

SEQ ID NO: 41765 - protein, 430 aa, unidentified
MKHAPEHTTGTNVAIRLPAAPPGGLTAGLDWARDDHVVCVVDTSSGAVRDRFTVEHTAAGLSAAVIRLAKLGCAEVAIERPDGPVVAELLEAGLMVVVISPNQLKNLRGRYGSAGNKDDRFDAYVLADTLRTDRARLRPLTPDSPATVALRGTCRARRDLVGHRVALANQLRAHLQTAIPGAVGLFHELDSAISLKFLTRFDTQDKLDWLSPKRLAAWLANAGYSGRIDPAVLHGRLAAAPRGLTGADGAAPAHTTRALLTVLASLVQQIKALSEQIGEQLDLHADAHIFTSLPRSGTVRAARLLAEIGDCRARFPTPEALACLAGVAPSTRQSGRSRSVGFRWACDKQLRDAVCDFAGDSRHANPWAQDLYTRARGRGHDHPHAVRILARAWLYVIWHCWQDNTAYQPTQHKALQRLLATQDKINADAA

SEQ ID NO: 41766 - protein, 324 aa, unidentified
MTTYIGIDVSKDSLSVAMPKPTSGWKVSDHANSPDGIRSLINQLPDQAHCILEATGSYSVLVTYMLTQAKVTISVINPKQSHHFAKMHLSVTKTDPRDAVLLAEYGRVIQPSVYQMSSDSLLLLRQKRTLLRQYQKQRVALFNLRESFQPLPLQDATVQQSLQQMIAHFQAAIAQLKAEINQVCQQDFADQYKRLTSIKGISHQVATALIETTNGFRDFTSAKALAKFIGVAPIIYQSGKVGITRGINRSGDAHLRGQLYMASLSAIRYNKPCREFYQRLKAAGKASNVALMAVVNKLLRQAYAVVKFNEDYDPNYQPILRSIA

SEQ ID NO: 41767 - protein, 401 aa, unidentified
MNAIGIDVSKGKSKIAIIRPYGEVVAKPFDIAHYPDQLAELCEYIHSLDGESRVVIEYTGKYSDPIANFLCAAGIFVCMVNAKLIHDYGGDTIRRVKTDKVDALKIAGYCLDKWSKLERYEPAPDDRKMLKTYNRQLSEYTKIKSMLKNNLISLLDQAFPGINELFSSPAREKDGHEKWIDFVLKFPHCNTVSTLSRQAFVTKYEKWCRKNGYKFCPHKAEQIYAAALNCLPTLPNDDFSKTLIIQTVNQLNSICETIAAVKTEMGKIASALPEYDTVLAMHGVGKTLAPQLIAEIGDIRRYPKRSSLARFAGIEPPENQSGSYNQHSRRISKQGSPHLRKALFQVMCCVLQNGNFNEPTFQFIDRKRSEGKPYKVYMIAGANKFLRIYYARVTECLELTA

SEQ ID NO: 41768 - protein, 463 aa, unidentified
MQKNCDKNSKPDKEVGIEGLPLIRPNVAGIDLGSETHWVCAPNVDRTGLEEETFGATTPELERMAEWLKARKIESVAMESTGVYWIAPHEVLERHGLEIVLVNTRELARVPGRKKTDRVDCRWTQRLHSCGLLKGSFRPNEPVCLLRTLVRDKGNLVAEAGDWLRRMQKSLDQMNVRVHRAVSDIDGVTGMRIVRAIVAGERDAHELAKLRDRRCGKSEEEIVEQLSGHWREDHLFSLRQALKMYDAIQERIADYEREILRKLAEMERAECHGQEPPKLKNPQKAKAIQKRGEEPLRQALYRLSGVDLTGIDAIGVETVQVVLSEYGPDLSRFPSEKQFVSHVTLAPRQALSGGKPVKKKKRGSASTRVAAALRMAALSLRHSQTALGAYYRQISRRIGGDVAVFATARKLATLIYRLLRWGQPYVDVGAAAWENRYRQARIQRLAATAKDLGYQLTPNPTKA

SEQ ID NO: 41769 - protein, 411 aa, unidentified
MEEKLVVAGVDVHKKMLAVVVVDEAQPQQALEQRKFGTNGNELKHLAAWLDSHAVSLVVMESTALYWRPVWLALEGQYALHLAQAQSNAAPRGRKSDYADALRLARRFLAGELRLSFVPDAEQRTWRCLSRSKHQKRRRRVQIQNQIEALLEESQIKLSSVITDLLGATGYRILKALAKGETDAAKLVELAADNLKASKEQLAEAVSGAMQSRHRVVLAMQLEELDLLDKHIAELGRQLGKALQGNQEAVLRLCEMPGVREDAAWQMIAELGPEAAVFATAQQMASWIGVCPGQEESAGQSKSNRSAKGNRTMRRVLNQVAWSAVRTKDSFFRELYHRLIPRLGIHKAIWAIAHRMAKVVWKVLHDKVHYIERGPLALDPVAMKRRVTKLARQMRRLGYTIEVKPVAVATT

SEQ ID NO: 41770 - protein, 453 aa, unidentified
MAPALNHILSQAINGKRTHSNLADKQGPRSYYEFEGELFSMGKKTAEVELYYERCCGLDVHKKLIVACFRDGSKSEVREFGATSKELQQLAQWLMDVRCEMTAMESTGSYWKPVYNILELLGLDLMLVNATHVKMLPGRKTDVNDAQWLSRLLAQGLLKSSFVPDRTQRELREVTRYRKSLSEERAREINRLGKMLEGANIKLTSIVESVLSASSRKLLDVALTGEPITDMTIETLIHRSMLGKSALLVDAMDGILSKTQCLLIRAVLDHIDDMTRRISDLDEIIKNEMVEYDMAIELLDEIPGVGVVSAQTILAEIGLDMARFPTAGHLAVWSGLCPGNEQSAGKKKNAPTRKGNKTLKATMIQCAQAAVLKKDSFFRAQYDRLIVRRGKSKAKVAVAHSMITAIWNMLKHGSVYKDLGGDYYNRMNPERKIAVYLKKLKGLGWEPPITATA

SEQ ID NO: 41771 - protein, 359 aa, unidentified
MKFVGVDLHKQTITMCVVDAALKVLARRRFGNRPTEPIVQFLAGLGEFAIVCEATASYEWFVQLVEPLAQQVVLAHPGRLRVIAESTRKSDRLDARILAEMLAEHRIPRSYRPTPRQRAHRRLVRHRTYLTRRITSVRNKIRHILADYNLDRPDLFTEAGQDYLARQSLASEDRWVIDQLSLERTLYLQQRRGVDRRLAEFAAQGSPQEQADRRRLRTIPGVGEVTVEVLLAELAGVERFSSAKKVVSYAGLVPGQRESAGKRKNLSIEKTGSPLLRWALVQAAWQLVQRSPKWGHIYDRLAQRVGRKKAIIAVTRRLLCVAHTLVLKGEDYREIGPAIPARGSAARTSRRSRRQEAAM

SEQ ID NO: 41772 - protein, 428 aa, unidentified
MPLAGNVPPGASEPASELLIQYLLQHLLVQTQISHQFLHQPLIFILQLPQTPQPGHAWTGKFFLPVNGMDYLLPLRLTVRNVLSRRITMNIVYLGIDLAKNVFQLCGLNQAGKPVYSKRTGRKGLLQTVANIPACLIGVEASTGAFYWQREFERLGHKVKVISPQYVKPFVRGQKNDGNDAQAIAVALMQPTMQFVPPKILEQQDIQALHRARQRIVNHRTATVCQIRGLLLDRGITIGAAVSRVRRAVPLILEDAENGLSARMRRTIAELYDLFNDPGRRINFFDKEIDAVFRQSEACQRIAKVKGIGPKTATAVVAAIGKGTEFKNDRHFAAWLGLVPRQHSSGDRQVLINMTKKGDRHLRTLFIHGTRAVVRVATNNNDGCLHQWVNQLKERCGFNKTAVAVANKNARIIWSMLRNEIEYQSIGS

SEQ ID NO: 41773 - protein, 390 aa, unidentified
MSVPSHAAVSIQLNAIFVSLELSRSTWLVTSLSPGRGERISRHPVKGSDVPMLLERFAQLQAKAHERTGEQYPLVVIQEAGLDGFWIHRCLVREGIESHVVDAASIAASRRSRRAKTDKLDGEALVRTLLAYKRGEPRVCAMVAVPSVEDEDRRRICRERRSLVVERIRHINRVKGLLFAQGVGDYEPLRANRRAQLEELTTGDGRPLPRHVKREIDRELDRLELVMRQIKEVERERDAMLELEPEADTATEEYPAPATARLLQLRGIGPEFASVLYAEAFFRSFSNRRQVACYAGLAPSPWQSGAMDREQGVSKAGNKRLRVTMIQVAWLWLRHQPASELTRWYEERVRTNGGRVRRVMIVALARKLLIALWQFSSAGVVPKGAVLKAA

SEQ ID NO: 41774 - protein, 433 aa, unidentified
MSKFFYSPTVGIDVSADFSYVAILAPNGDIYRKAFKIKHDVSGFNHLQKEIKKVEEEFNMKTAIFMESTGVYHLSLFHFLNKTFDNTFVINPLVTKCNKNVDIRKVKNDKKDALSIAKIGKFQNIKLSQGVSLDIFLLKSLIREYYKLNDTCSTYKKKLSTDLRVIFPGYKDVFSNVTSNTSIDLLSNYQTPESILNAPEDKILDILITKSKKGAKWAQNKYLKLIDIATEATIIGLPLHGLSVKITSTITLIKAIESEIQNLLTEIEALISSNNFPEQIKKNIELIDSIPGIGRLTAITLMAEIGNIGGFIKPKHLVAFFGIDSSVNESGNFKGNQNKISKRGTRIGRRALYAAALACIRTNRNGVPINKILLDYYQTNLNGKKSKVALVAIMHKIINYIFAVLRNQTRFEVRDPKLHKQMFLENKALNNAA

SEQ ID NO: 41775 - protein, 354 aa, unidentified
MKRTTKYVALDVHQATTVASVREQSGRVIARSVLPTDGPALVEFFRGMRGSVHVALEEGTQAQWLHDLLVPVADRVVVCDLRGERRRGNKADKVDADELSSRLLRGDIRPVYHAGTGRTSLRELTRAYVNVVEDSTRTMLRLKALFRARAIRAPGKRLYNPEHRGEWLAKLPDPGARFRAEVLLSQLDVLQELRPRAKRAMVAEARKDPAWSVLCSIPFYGPVRVSLLLATMQTPWRFRSKRNLWAYAGLAVVTESSADHVFVAGRAVRRGRKPLTRGLNKNHNRVLKDVFKSTATAALGRPGPLLDLYRGMVGPGMREEMARLTLARKIAALTLRLWKTGEIYDPSELTRQQT

SEQ ID NO: 41776 - protein, 351 aa, unidentified
MMIIGVDYHPSFQTIAFFVEETGECGEQELNHSDGQAEKFYRDLKQRGICVRVGMEATGYARWFERLLAELGFELWIGDPAEIKAKRVKKQKFDREDARLLLRLLRENNFPQIWVPGPENRDLRQLLWHRHRLVQMRTRIMNQLQALAMNEGYRWKKKLFSEQGRVQLEKLALAPWASRRRRELLELLDRMNPTIEELTAAVEREARKRPEAMRLMTHPGVGPLTALAYVLIIGTPTRFQCGKQIGTYVGMIPCEESSAHKQRLGHISKQGNSLLRFLLVEAAQAAARIHPDWRRRYLHLAMRRHKSIAKVAMGRRLGVRLYWMWRNGCEYSQSLEFGSYVGQLGTGHGVK

SEQ ID NO: 41777 - protein, 548 aa, unidentified
MILHAVGDPGQQALMMNSVKKLGQIQINHRLISLFQVSCCFGNGGVSPAFWPEPVTAGMEGRLEDRSQYLKNRLLHRPIHNIRNAKPPLPAPGLRQPDPADIAGSVAFRQQIAAQTSDDRRCFRFRRLDRLSVHSRSHGEVDSDRRSGRVWLRTPTLETAMQIITHRHEALSAIRSDLGVIFVSLELSRSTWLITSLSPGGGEKMSKHSVPAGDICALMARFSEFKQKAFARTEKSFPIIVIQEAGLDGFWIHRVLQNEGIESHVVDPASIATSRRRRRAKTDRIDGEALLRALLAYKRGEPRVCAMVKAPTPEEEDRRRLCRERKVLIAERVEHVNRIKGLLFSQGVSGYEPLRRDRRRRLDELKTGDGHALPDHLKAQIGRELARLELLLEQIKAVEAERDALLAAQRVAAPRPAAMLLDIKGIGPEFAAILWSEALFRHFDNRRQIASYAGLAPTPWQSGSVDREQGVSKSGNPRLRTTLIQLAWLWLRHQPQSALALWFKERVGRNGGRFKKTTIVALARKLLVALWKYVTAGVVIEGAVMKAA

SEQ ID NO: 41778 - protein, 332 aa, unidentified
MGQEKMSKAVTSTEDQITIGIDISKDYLDVHHHPGDLAQQFTNDRKGHAKLIVWARSQHPTRLIFEATGAYHRALEMALGDRAREGGKAALPGVKINPLQARRFAEATGKRVKTDQVDVAMLARFGALMQPDVPSAKDETIDKLSELMAARGALVKDQTAARNRAKNLTLVLLKRQSEQHLKQIETQIDAIDQEQKAILATHPSLKIRFDILVTMPGLGAVTALTLLIGMPELGFMDAKQAASLTGVAPVTRQSGTWKGKSFIHGGRANIRHALYMPALVAIRFNPDLKAKYLALRLAGKPAKVAIVAIMRKIIITANAIPRDNRMWTAKAA

SEQ ID NO: 41779 - protein, 423 aa, unidentified
MEMMHERVAGLDVHKATIVACVRVGTGRKVTRECRTFETTTDGLLALLAWLVECRCSHVAMEATGVYWMPVWKILSDGDFALIVANAAHIKNVPGRKTDLNDAMWIADLLACGLIKASFVPEEDVQELRSLLRTRKQLGREQTRHVQRIQKTLAEANIQLDSVLSDIMGASGRRIIEAMIAGTRNPRQLASLASAQIKATPKQLYDALHGRLTDHHRFLLKLHLRQWDGLDTTIREIDLEVEARITHMDKEVKAGEAPFCDLIALLCTIPGVSTLSARTILSEIGRDMSRFPTAGHLVAWAGLCPGQNESAGKRKPARLRKGAPWLKTMLVQCAWAAKRKKDSYYKAQFFRLQARRGPQKAICAVAASILTAIYHILRDGTEHHDLGADHFNRHSAERQTRRLVAQLSKLGFEVQLQRTAKAA

SEQ ID NO: 41780 - protein, 402 aa, unidentified
MNCVGIDVSKGKSMIAVMRPFGEVVISPFEVQHTASELSELARLLKSLDGETRVVMESTGNYHAPVAWLLHDAGLYVSVVNAMLVHDYGNNSLRRAKTDKKDAVKLANYGLDHWLTLPRYVPEEDTRLLLKNCYRQYQQYSKVQTMLKNNLISLLDAVFPEVNRLFNSSPRADGSEKWVDFVSTFWHCQCVSTLPLKSFSARYLKWCRKHGYYFSQEKAFEIHSKAKNCIGVMPRNETTKLLVQQAIAQLKATAAALAALKQEMQSLAAALPEYPVVMEMFGVGSTLGPQLMAEIGDVRRFHSKKALVAFAGIDAPPCQSGQMDIHSRSISKRGSAALRRTLFLVMGIYLQSAPLDEPVYQFMDKKRSEGKPYKVYMMASANKFLRIYYASVTAYLNTLARI

SEQ ID NO: 41781 - protein, 353 aa, unidentified
MYKVMNKKLFVGIDFSKETFDAAILKVSEESSIDLKIIGNEQFKNDVPGCKRFVKWLNKTCALAGDYSSVLVGGEDTGNYSITLPKQLYVLGIDCSLQNAYSIKCGSGKIVRDKTDKMDAEKIAYYFYRFRDQIRLYKPLSKDMESLERLYSYRYGQVRERARLKCQIKEYKHILKSEPNDETLKFMIQRLEKQERFLKREIKAIEAKMVEIIKANEELNEIHKCLLSVPGIGKITSLLLIVVTRGFTRFDNPKQLACFLGVSPHPNQSGTSVQNGNHRSWFADPYFASLLHMAALSASRFNSKFIDYKKKLKSKGKPHLLIMNNIKNKLLTVAFTIATRRTKFYSDYDAKRA

SEQ ID NO: 41782 - protein, 379 aa, unidentified
MAATCTREYSVNGPVLYLAFELSNSTWKLGFTIGPAQRPRERNISARDLKALEWEIEQAKERFELASDTTVVSCYEAGRDGFWLHRYLDSNDVRNMVVDSSSIEVNRRKRRAKTDSLDVMKLLSMLIRYCSGEKKVWHVVHVPTIEQEDNRQLHREMRALKKERTRHINRIKALLICQGVRTEIGNTFLHELDGVRLWDGSRLPEGLHALLKREYKRMMFVEAQISELEHERAEAVRSSTKPEHKMVRDLMRLRAIGINSAWMFTMEFFAWRKFRNRKEVGALSGLTPTPSQSGSSYREQGIGKSGNRYIRAMAIEIAWGWLRYQPESELTRWYQERFAQGGSRMRRIGIVALARKLLIQLWRYLETGEIPEGATLKTA

SEQ ID NO: 41783 - protein, 351 aa, unidentified
MMIIGVDYHPSFQTIAFLMEETGEYGEQELKHSDGEAERFYRDLKQRGIRVRVGMEATGYSRWFERLLAELGFEVWIGDPAMIKTKRVKKQKTDREDARLLLRLMREGNFPQTWVPTPENRDLRQLLWHRHRMVQMRTRIMNQLQALAMNEGKRWKTKLWSQQGRAELEKLALAPWASRRRRELLELFDRINPTIEELTAAVEQEVQKRPDALRLMTHPGVGPITALAYVLVIGTPERFRRGKQIGTYLGMIPSEDSSAGKQRLGHISKQGNSLLRYLLSEAAQAAARFNPHWRRRYMHLAMRRHKSIAKVAMGRRMAVRLYWMWRNGCDYSPALEFGSYVGQLGNGHGVK

SEQ ID NO: 41784 - protein, 410 aa, unidentified
MNCAAQPFRWCQQEELKMNPKTSKSRHGRKMPLVHPNAAAIDVGATMHMAAVRADRAPEPVRSFGTFTADLHRLIDWFTQCGVETVVMESTSVYWIPVFELLDARGFTVCLVNARDAKHVPGRKTDVSDAQWLQRLHSFGLLRASFRPKGQIVALRSYVRQRERLLEYAASHIQHMQKALTEMNLQLHHVVADITGATGLRIIRAILAGERDPQALAALRHYSCHSSAETIARALTGSYRAEHLFALEQALALYDAYREKVSACDVRIEAVLKELSIHRGRDHGAVPPPRRRHRTDQVNALAFDVRAALFALLGKDITAIDGLGAYLSLKLIAECGDDLSSWPSAKHFTSWLGLAPSNKVSGGKMLSSRTRRSGGRAAALLRLASPSDAPTPHLAPFIGGSRPASARPRR

SEQ ID NO: 41785 - protein, 415 aa, unidentified
MVDVIVERCAGLDVHRDTVVATVRVPGSGKSRRRRVQETRTFGTTIGQLERLSDWLAECGVTRVGMESTGCYWKTVFYALEDRFDCWLVNARHLRNVPGRKSDVIDSRWCCELVELGLVRPSFVPPPEIRRLRDLTRLRATQVQERTRAIERLEKVLQDAGIKLTSVASGVYSVSARAMLEALLAGVTDPAILAELARGRMRKKIPQLREALASRFDIGHHGVLVAGLLAHIDALDQAIGNLEARIGIATAPYADLIELLCTIPGVGVRIAEILIAECGLDMSVFPTVAHLASWAAICPGTNQSGHKRGSGKTRKGDTWLRTALTQAARGAARTKGSYLAAHYWQLRGRRGDPKAIGATRHDILTAYYHIVRDHVPYRELGPDWLARRRSPEQRTRRLVKQLEALGHRVTLEAAA

SEQ ID NO: 41786 - protein, 336 aa, unidentified
MKYIGLDVHSDHINCAVIDEQGNLIYHDCFNTSLKNLINLSEKLKHPLSLVYEEGELADWLYQGLRSSFEEIVVADPIENRLIYGGDQKSDPIDPLKLATLLRGGFINPVHHTWDHHRSQFKQLVFAYHDMAKQVTRTKNKIKAYYRKQGIIIKTDSVYHPDKRTLFIKESHHPEIIEKYYQFLDLFQQEKNRFERTLKKESRHYPIIRRFLKIPGVGIVTATTFFTIIDDPHRFVRKQQLWSYAHLGKSVHQSGNYEVTKRQRKGNRLLKYVIKIAAGDAVRQKTNEFTRAYIRMVNIQQKEPKLAYRIIARKLATIMWTMWKKNQSYLEEMSST

SEQ ID NO: 41787 - protein, 421 aa, unidentified
MGFIGGDRQARFVERVRGIDPTRLLAVPIDVGKASAAAMVCDFWGEVVTPPFTFPITEPGVQAFTFAVAKAEAARDAAWVRAGLEQAGHYHRTLLARLEQVGIEVALLNPAQVKENRNQSLLRSLKSDATDLGAMAELLVRGKGHPAAPTDDAMAVQAAWVAHRSRKIKARSALKNHVHASLDLVFPGLAACFSDVLEAKLGRLVLAEGMQPERIRRLGAECLRTFCSHRGVIVQRPKARQIVEAAKGALTLAPRVRGVYAGVLASDVALLETFDRAITQADAALGEVLPRTPAGILTTMPRVGIVRASSYGAGLGDPSRFRTAAQVYRMAGLVPRLYESAGKRRSHTSISREGKAELREAIIELGRALRQGDQDFARYADELAARGKASGVIACALGHRANRVAFALVRDQVPFDPKRWR

SEQ ID NO: 41788 - protein, 408 aa, unidentified
MLFVGDDWAEEHHDVELMDAAGRRLAAARLPEGVAGITRLHEMIGAQLGEHAGEGEVAIGIETDRGPWVSALVAAGYTVYAVNPLQAARYRERHGVSGAKSDKADAHTLADMVRTDAHQLRPVAGDSPQAEAIKVVARAHKTLIWERTRHTLRLRYALREYFPAALEAFDDLAAPDTLELLAKAPDPASAAKLNRSQIRAALKRARRRDIDIKTTRIQAALRSQQLGRAPVITDAYAATTRSIAAVLATLTEQINTLRGQVETHFGRHPDAEIILSQPGTGVLLGARVLAEFGNSPGRYADAKARKNYAGTSPITRQSGKRKTAHARFVHNDRLVDALMSQAQSALLASPGARAYYDKQRARGLDHHAALRQLANRLVGILHGCLKTRTLDDEATAWSHQHQDQRTAA

SEQ ID NO: 41789 - protein, 354 aa, unidentified
MKKLFIGIDFAKEKFDAAIIDAIGWKEFGDRQFGTFSNDRKGYRQFLKWVKGSCGNSTETEWLFCGEDTGQCSQGLSKWLYGKGLDIWIESPYAIKHSSGIQRLKTDKADASMIAEYGWRHQDKASLFKPLSESLEQLREVFLYRHKLVQQRVAMEIRDKGKDCEESSRGLSFIRRKAKHLIAELDRTIKECDLMIDRIIESDEELKANYKIVTSIKGIARQNGACLLIYTNNFNRFDMDARKIACYYGVAPFAKDSGKSIHSPAQTSHFANKLIKSLLTQGANIAKMFNPEIRGYYDRLIKRGKHKSVALNNVKNKLLRIIVALVRDKTTYDPKTFQYYQQRWKEKNENAFAI

SEQ ID NO: 41790 - protein, 398 aa, unidentified
MKEVASGRERITEMAVMIAGQSRFQPFGLSCWGFRDLNKGVGSMTASYDYHIGVDYHKSYSHLVVQDSCGKTLRSGRVKNDRQSLGSFLERYRENSHAVVEATRNWMVIYDWLDDICDDVVLAHPLKVKAIADAKVKTDKIDATVLAHLLRADLVPEAWAPSDKARELRVALRERMFYVRLRTMTKNRIVTVFDRYPEQTAQLKKLGDLFGKAGRIQLTQVAVSAIDRVQIDRGLAFIGDIDARIKQAEATIRAMTKANANVRLLKTIPGIGEFFARLIDAEIDDINRFRNPKKLAAYAGLVPSTYSSGGKTYHGKIIKQGNKWLRWAFVEAVTSAIASDAQLRAHYEHLKVRGTNKARVAIARKLLTIAFQILRDQRAYEPRGKIHEEGASTISRLS

SEQ ID NO: 41791 - protein, 343 aa, unidentified
MQTITTIGLDIAKSVFQVHGVDADGNIVIRRQVKRRYVLAFFQKLPPCLVGIEACASSHHWSRELQALGHTVRLMPPAYVKPYVKRHKNDAVDAEAICEAVTRANMRFVATKTPEQQSCLTLHRTRHLFIRQQTSVINAIRSHLAEFGVVAPVGRHGVEQLLGVVADAGDRRLPDVARACVAALGAQLRMLKAQILEFDRMIRAWHRSSETSRRLDDIPGVGPALATALVASVADPMAFRSGRDFSAWIGLVPKQNSSGGKDRLGNISKRGDRYLRSLFTTGALAVIRYAKIHGTKHRPWLTALLTRRPTKVAAIALANKIARMAWAMMAKGERYKEPAALAA

SEQ ID NO: 41792 - protein, 378 aa, unidentified
MTYKGRGRVVKLARAMQYLINTELSSHEETRFEFNRSTGAIKLGIDVHQDFYVVVEQVGGSNPKPAQRFQKQAFLHWAAKLKQSGAEVYAVYEACGFGFSLQRQLSALGIVCHVVCPQKLDERNKRVKTDGLDAKALCLRLDRFVQGNRHALAIVRVPTEEEERSRAIHRQREQLVGARKRLEAQGRSLLVNHGLEPVQNWWKPRTFAALAVPQWMRELLLNSQPILLALQEKIAALTLQLQSAAAPNQPRGLGKMTSVIIDREIGDWRRFNNRRQIASYTGLCPGEYSSGNTRLQSCVTKHGNPRLRAALVELAWRLARFQPNYKPVVKWRQILAKEALATGAARKKAIVAVARQLAVDLWRIKTGRLTAEQLGLTI

SEQ ID NO: 41793 - protein, 322 aa, unidentified
MDTPIFQTTIGVDIAKKKFDAACLIGGKFKHKLFTNDESGYTGFVTWFTAICADNPLICMEATGAYSLPLADFLLNQGYATSIVNPAKIHAFGKSELSRAKTDKADAKLIARYALSTQPPLWIPPPAVIRELKALTRRVEHLLEMIQMERNRLDTADKIIVDSIAKSIGFLETELTTTRKSIKDHINNEPALKQRSELLDTIPGIGEACISHLLIVMSEHHNFTHAKQVVAFAGLAPKLQESGKWRGNTHLAKNGDSALRKTLYMPAMCAWVHNPVIRVFCERLKANGKNGKAIVCAAMRKLIHIAFGVLKSGKPFDPNYAV

SEQ ID NO: 41794 - protein, 385 aa, unidentified
MSQFSGSRQAALDYNSTIIGAVELSEKKWVLAVQLPGVGRHSRHVLEACGDGLASFVERLKARCAAAGHRIARVILTHEAGRDGFWLARFLARRGIEVHVIQPSSLPVDRRARRAKTDIIDVEMLLRTLMAWLRGEPRVCSMAPIPSEADEEARRAYREREDLTGERRSIVNKIDGILATLGVKGYKALRRDRREQLTALRQPDGDPIPQKARARIERLLDRLDLVLKLIEHVESARDAVLKKDAPADEAERMIRSLTDLRSVGPDFATLLVREAFVRQFRNRRALGGYVGLGGTPFSSGGSEREQGIGKDGNRRLRAAMVELAWMWLRWQPDSALSTWFRARVGAMGGRIRKIMIVALARKLLVALWRYVKDGVIPDGAKMKAA

SEQ ID NO: 41795 - protein, 317 aa, unidentified
MTQTSTTAAGIDTSKSKLDVALHGRTGHWQLANSLAGWRELTVKLAKADVSRVGIEATGGYERGVVEHLRAAGFTVLVLQPIQVKAFGRVHLRRAKNDVLDAALIAACTAAIERIRDAPDPRLTELAEHLTFLEQVEDDIKRCKTRLEHIDQPTLRRLVLGDIARLKARRLAQIRHLARQLRTHHDLATRLDLLLSIPGIGQRTALALLIRMPELGRISRQEVAALAGLAPFDNDSGQHKGQRRIAGGRARLRRSLFAAALPAAFRWNKALIALYTRLTAAGKAHNAALIACARKLLIYANAVVQRGTPWREITIMT

SEQ ID NO: 41796 - protein, 412 aa, unidentified
MEVVYPCCCGLDVHKKSITACVLWAQGKGKSRKEKKRFGTFTHDLLQLADWLGQCGVTHVAMESTGVYWKPVWNILAEQFEVLLVNAQHIKAVPGRKTDQKDSEWIADLLQHGLLRGSFVAPQPIRELRDLTRYRVSLVQEINRVANRIQKVLEDANIKLASVATDALGASGRAILEAMLAGEQDSARLAEMSKGLLRNKIPELKLALEGRMTEHHRFLLRQLFEHLRFTESKLNEIEQEIDKRMRPFEDKVTRLCTIPGVDRVTAWGMLAEMGMNMNQFPSSGHLASWACLCPGSFESAGKRLSGKMRKGNVSLRRCLAQAAWAISMMKNNYLSALYRRIAARRGAKRAVMAVAHALLEIAYHMLKRKEDYRELGADHFDRIDVNRIRRSLVRRLERLGHKVTLEPLAQTA

SEQ ID NO: 41797 - protein, 377 aa, unidentified
MKRIKFVGLDVHAETISIAVAEQGGEIRSLGVISNREESIRKLVKKLGPVEELRFCYEAGPTGYALYWQLTRMGGKCEVVAPTLVPVKAGDRVKTDRRDALKLARNYRAGELTAVWVPDAAHEALRDLVRAREAAKQDELRARHRLSKFLLRHGRRPPMGVKAWSMKYLEWVKRELHFEQMAQEATLLDYLHEVEHGAARIARLESAITEAVKSAPPQMRAVIEALQALRGIAHVSAVTVVAELGELSRFTRARQLMAYGGIVPSEDSSGERSRRGNITKTGNAHLRRVVVEAAWAYRHRPSVGAKLRKRQAHVSEEVKEISWKAQHRLHERYRKLLGKGKNKGVVMTAVGRELLGFIWAIGIQAETAYKEPLPRAA

SEQ ID NO: 41798 - protein, 352 aa, unidentified
MKQLFVGCDAHKHYSQLEVQDSTAQVLRRIRIDHSRGAITSFFSKLPRGTPVALESVGNWYWIADEIEAAGCLPLLTNPGKAKSMMGNVNKTDKLDAGGLTTLLRLGSLPSVWLPPADLRDQRELPRTRMALCAWRTRIKNRIHSTLAKYALSPEDGSTLFSQRGRAWLDTAVGSLPPETGRCLTQELQLLDSLSEQISQLEDRIRAQISLTATMQLLKSVPGIGDMLAIVVEREVGTISRFFSPQRFSSYSGTTPRVSSSGGKTHYGKMRTESNQYLKWAFIEAANVVAAHHAQSGWTNRHCSRLYVRVRTRKGSSVAIGAVARHLAESVYWVLKKNEPYKEPSKVSPRQE

SEQ ID NO: 41799 - protein, 406 aa, unidentified
MELATLHKRVIGLDVHQAQITACAIIEDADGTTRIEQRQFGAFKRDRRALADWAAALSPDQVVMESTGIYWKSPYAALEAVGIRAQVVNARHVKNVPGRKTDVGDAQWLATLARAGLLRGSFVPPAKLRELRLISRQRQKLVGQLASEKNRLHKVLTDGGIRLGVVVSDVHGQSARAMVKAIIDGQPPHEVLKLASRRLKASREELFDALQGELTDSHRFVLDELMCHIEEIEARIARFDARLLDGLTDERNALALLQTLPGVDLIGAAMLLVEIGTDMDAFGHADRLASWVGICPGNNESAGKRKSGRVRKGNLYVRRLLCEFAHAASRTTSVFKSKFQSLVVRRGHKRAIVAIGHKILRTIFFMLKRREHYRDCATDYEALSVQRNAPRWIKALTKFGFIPQHA

SEQ ID NO: 41800 - protein, 419 aa, unidentified
MGKRRNRVCGADIHNELIVATIQCSDDTTLREEFGTTRSELERFKAWVISNGCEQVAFEATGAYWFPVYDVLSPSIDTVVGNPWMIKGLPKDKSDDHDSKSIASFCLNGQIKRSRVFSTDDRDLRTMTRARSGYVKTRTQFRNRIHKYLALRGIKLRSGIRGIFGKSGRHVLNGLVDGESTDTILDGIPSGRIRKKREIIKDGISIGFDDTTKLLVKDALEVLDNLETRIERMSREILRRTLNKSKNLAIVMSVPGISFVSGSQILSEIGDYRDFSTPEQLARWCGLTPGLNESAGKKRPCGITKQGSKHLRTILVEVAQVISRMKHNRFTGFFNRIMARKNRNVAIIALARKLICIIYHLLINQELFNPGLKKTTKSKSKRNAQAQESSMEDQLQDSVAAIVDAYYRINAKSVSKGGG

SEQ ID NO: 41801 - protein, 491 aa, unidentified
MEKSRDRQASVTNRRPDRNDGYPETFEPRPMSGDEMHTQMMSFEDSTIRDAGFRAESEESKEKEEVKQDDEMMAWIGVDWADEKHEVWEYEVQSGQKRSYEIQQTAESLQDWVGQLRSRYRSGRVAVVLEQSRGGFIYALMSTDFIHLYRVNPKSLAKYREALYPSGAKSDPSDAELLGEMVRQNPERFRSWKPGDEQTRSLQLLVEGRRKLVDDMTGLTNQLGSVLKTYYPQALEWAGELSGEQACSFLEKWPTLQELRKTRAFRIREFYERHGRPSREVLDERVKQIQKSQPLTSDTAVMLSGVMMVKALVGRIRPLAAAIERYDQEIERIFRQHPDRAVFESFPGAGKALSPRLLAAFGADRDRFQTAVNMQELSGTAPVTERSGKSIWIHRRWACPKFMLQSFHEFADQARRFCTWSKLYYQHQRAKGKEHHAAVRALAYKWIRIMFRCWKDRQPYDDSRYTQSLIKRKSFLAERLTATSSEMLPST

SEQ ID NO: 41802 - protein, 344 aa, unidentified
MEKHTVAAVDVAKVVFDVALSDEPGRVRLTRRLPRGGFLAFFGQLPAAMVVMEACGSAHYWARRIQELGHQVVLLPPHQVRPYVTRNKTDRTDAKGILEAYRNADIRPVPVKSVSQQVLVTLHRFRSGWVGARTAHLNTLRGLLRELGIVIPVGAEKVLPQVRTLIADADSEIPDALRPVLVASCDEIETLTERIKMAQRQIEAIAEQTPVVNLLWSIPGIGLLIATALVAFVGDIHRFPSGRHFASYLGLTPREYSSGMKRRLGRISKRGDAYIRMLLIHGARSILCHAKKAREHDRLRTWALELERRLGHNKAAVALANKLARIAWATWRNGRPFESLPKAA

SEQ ID NO: 41803 - protein, 349 aa, unidentified
MTMLADQFDAVIGVDTHQDTHTAAVVATATGAVLDELTVPTDPDGYDALVALADRHSGLRVWSIEGTGSYGAGLTAHLQDLGETVIEIERPNRPARRNGKSDAIDAVRGAREALAIEHHAQPRSRGPRAALAATLAARRSAVEASATAQRQLRALVLVAPEILRARFRGQSTIAMVATATSLRTSSRWDLETTTSATALRALARRINTLTNEADAHEATLRSIVASWRPDLLELTGVGPIVAATVLCAWSHPGRCRSDAAFANLAGAAPIEASSGKHTAHRLNRGGDRQLNRAIHVIALTRLRYDPATRAYAERRRAEPNMTDRKIRRCLKRYIARQLYRQLENPPSPT

SEQ ID NO: 41804 - protein, 483 aa, unidentified
MKSKPEEKAQKTTNHSMPKPWDEMNRQQRRATMRKIQSADLSLEVVHPNAGGIDIGNESHYVAIPPDRDSQPVRRFGCTTAELQAMAQWLSQCGICTVAMQSTGVYWIAVYDILEEAGLEVYLVNARDTKNLPGHKSDVQESQWLMKLHTYGLLRNSFRPTQEIRTMRTYWRQRNDLVQAAARHIQRMQKVLTQMNVQLANVLSDISGVTGQAIIKAILAGERDPHKLAAFRDVRVKASEEQIAQYLEGHWQEDLLFVLQQEKEGFDFCQKQMAACDEQLKQYLQQQEDRSQGAPLPEEKRKSRLKKKKGNMPQFELRAELFRMNGTDLTQIDGIDVLTAATVLSEAGSDMSKWADEAHFVSWLRLCPGNRISGERIIGKRRLPTNNRINVALKMAASSLRTSNTYLGAQFRRLRTRLGAPIAIKAMAAKLARLVYRMLRYGMKYVDQGAAFYELKHRELQVQHLKSKAAKLGYKVTPIPAAA

SEQ ID NO: 41805 - protein, 416 aa, unidentified
MNAVGIDVSSRKSTVAVLRPLGEVVCLPFDVTHDIAGLASLAEKLKALDGETRVVMEHTGRYYEAVEKALHEAGLFVCAVNPLLIKEYGANSLRRVKTDKADAVKIARYALDNWADLRDFTPMDAIRYDFKTLNRQFQLASKQRTASANNLIALLEQSFPGIRKCFDSPVRSDGTQKWVDFAHSFWHVDCVRKQPFAAFCERYRKWCKRHAYLFKLSNAEEVYALAKRAVVLTPKSKVVKVLVQEAVNQLSSISRSVEVYRAEMDRLAAMLPEYPVVMAMYGVGKSYGPQLMAEIGDVRRFERKQALVAFAGIDPMPNQSGDKNVRSNKSSKRGSPYLRKTLFNVIRTYLQCAPQDEPVFQFLNLKRAEGKPFYVYMLAAANKFLRRYYAKLRDYFASLDTLQSVAPIPTILKATL

SEQ ID NO: 41806 - protein, 344 aa, unidentified
MQHFAIDLGSMESQICVRTPDGEIALERKVATRSLKSYLQKQPPSRVIVETCAEAFRVADMATELGHEVRVVPATLVRSLGVGARRIKTDRRDAQVLSEVSCRIDLPTVHVPTHVARQRRSMCGMRDELIASRTALINCVRGWARTQLIKIVSGVVATFPKRMREAAIKQPEGLPEYAERLLQTIETLTERIVAADRELEELANEDALCQRLRTVPGVGPVTSIRFAAALDNCSRFASAHAVQGYLGLTPGENSSSQRQQRTGITKAGPAAVRRVLVQAAWNFRRTRPHDPISLWASEIEKRRGRFVATVAVARKLAGVLYALWRDGSKYEPNHQSKRSHDASI

SEQ ID NO: 41807 - protein, 358 aa, unidentified
MNRKAGMSAGQVIGTVDGQQVFGLDIAKSVFQVHTVDMGSGEIVNQQLKRAKVLTYFANRTPCLIGIEACGGAHHWARRLTAQGHNARLIHAKAVRPFVGGNKTDAADARAIWLAIQQPGTKFVGMKTLEQQATLVLHRQRELLMKMKAMQSNALRGLLYEFGATFARGRNALFAEIETALEALVGDIPQYVADSLREQVKRIKDFAKDIKAIEGRLAQRLRDDKDMQRVAQMPGVGLLTATAAIATMGQASAFKSGREFCAWLGLVPRQSGTGGKVKLLEISKRGDTYLRTLLIHGARSVLTHAKEPGPWLEQIKARRPVNVVIVAQAAKMARAIWAVTAKQEDYQRGYCSVKPKAA

SEQ ID NO: 41808 - protein, 339 aa, unidentified
MRLYAAIDLHSNNNVLVILDERDRIVLERRLSNDLPAVLAALAPHRKRIVAIAVESTYNWYWLVDGLMDAGYVVKLVNTAKVKQYDGLKYSADEHDARHLAHLLRLGILPTGYIYPKEERGVRDLLRKRLQLVRYRSSQLVSIQNLVSRNTGRGISSDQIRKLDDERIDSLCAGDQARILAIKSNLTVLNCLDLQIGQLEKTALKQARLKPAFKQLLTVDGIWHILAMTIMFEAGSMDRFVKVGDFASYARCVGSSRWSNDKKKGEGNRKNGNKYLAWAFVEAAHYAARYNERVRRFFQRKKAKRNTAVAIKAVAHKLARACYHVLKNQVPFDETLAFA

SEQ ID NO: 41809 - protein, 387 aa, unidentified
MSQVSDLSRSLAPFDQNTTLTVVVELSEASWLVAGMIPGIERQPVKKQDPDPVALLRLLERWRLEAIKAGKTIGQIALAFEAGRDGFWLARWLQARDIAAHVIHSTSVAVSREHRRAKTDRLDTAMLMRVFVGWLRGERGHCRMVAIPTLEQEDAKRPSRERESLVGERTRIINRMKAALARLGIRGFKPALRKAPQRLAALRTPEGVPIPPNTLDEFRRDMDRLAVVREQIDGIERARLARLEHAPAAGPHAMVRLLARVVGVGVETADMLVQEVLSRNLRDRRAVARYVGLTGSPDESGKRRREKGLAKAGNPRARRGLIQLAWRFLRFQSGSALAQWYRARTDGPKGARKTTMIVALARKLLIALWRMVTIGDIPVGVALRPTT

SEQ ID NO: 41810 - protein, 357 aa, unidentified
MFYVGMDIHKRFSQVAVVDESGEVVDQHRLNHTPREELTDYFKQFPKDTQVIMEPTCGWSWLSDDISDLGLEVILAHPLKVRLIAESQIKTDKVDAVVLAQLQRTSFLPQAYLAPKEIRKLRDLFRCRCGLVRLRTILKLQIHALLIRLGIFHSFSDLFGKTGRAFLEGLELESPYKENLGRQLRVIDLLYKEIRQIEKQIQKRVSQDPQAKHLPTIPGVGAILAYLFTTEIGEITRFSSAKKLASYCGLVPSVKQSGGFVHYGHLTKTGNTLLRWGFIEAAQVAIRFNPELKVWAEKIRRKKGSGVAICAVARKLVGIVYQLLTQERDYISRKDVTQANSWSSRPVHPLVVPPVAG

SEQ ID NO: 41811 - protein, 372 aa, unidentified
MEEYSEVFVGLDVAKDRHAVALAESGRTGEVRYVGEISSDSASVRRLVRKLGRPGVRLRFCYEAGPTGYGLKRDIEALGYECAVIAPSLIPRKPGDRVKTNRRDAEKLARLFRAGELTEIWTPDAAHEAIRDLIRAREAAVKDRTRKRQEIRSFLLRHGKIYPGLKAWGTRYLKWLHGLSFSYRSQQAVLQELILAESQCRERVARLEKAIEDGLLDWPLAPVVERLQALRGVQLICAATFMVEIGDVRRFANPRQLMAYLGLVPSERSTGDAVRRGGITKAGNARVRRVLAESAWTYRYPAKLGKRKYFESRHMPEVVRDIAWNAQARLTKRYRAMIARGKRSTVAVTAIARELAAFMWAIARADEQQAGT

SEQ ID NO: 41812 - protein, 355 aa, unidentified
MSEKLNSKIAVIGIDIGKNSFHIVGQDRRGALVLRQKWSRGQVEARLANLPPCLIGMEACTGAHHLSRKLQALGHDARLMPAKYVRPYCKGDKNDYRDAEAIAEAVQRPTMKFVATKTADQLDLQALHRVRERLVSQRTGIINQIRAFLLEREIAVRQGLRFLRAELPDILAKRTDVLSPRMLRIIEDLSGDWRRLDERIEGLSSEIEALARQDQGCARLMSVPGIGPLISTAIVAAIGTGDPFSKGRDFGAWLGLVPKQMSTGDRTILGNISRRGNRYLRTLFVQAAWVVLVKVGPKQWERYGLKSWIEAAKKRLHHNVLAIALANKLARIAWAVHNGRTFEYVKTNATASRSA

SEQ ID NO: 41813 - protein, 284 aa, unidentified
MPMLAEQVDGVIGVDTHRDTLTAAAVTRLGGVLAQITTSADAGGYQRLLDFAHLQLPGRRCWAVEGTGSFGAGLAGFLQQHGEQVLEVGRPKRPASRSGANSDALDAVRAAREALGQDHLATPRRRGEREALRVLLTTRRCATLARVAAIGQLKALLVGAPEELRAELRGRSTAGQIDYCAGLRERPTRSLEHQATVRALRATAARIQALAAEADQLQAELAELVGAIAPWLLEVPGVGPLSAAQVLVSWSHAGRFRSEAAVAALAGTNPIPASSGQVTRHRLM

SEQ ID NO: 41814 - protein, 364 aa, unidentified
MLILVIPSLFYHNSEQFIRPQSPFLGCKKYSRLFFPNTKCMNKNKQFLGIDISKDVIDVVDHQDHHHQYSNDQSGFKEFHKILTQQSHCVMEVTGSYYQGLANWLHSKYIDVSVVNPLSVKRFIQMRLKTSKTDKADAKMIRLYSEAENPDLWHPPSEYIIEANELHILIALLLRQRTALKNKLHGLSAKGVKKGAVITSIRRQIRNLNHEVSDLELKLEEVVKAHQADLISRLCSIPGIGKRTAIYLIVTTQGFEKFETSRQLISYFGLDPTIRESGSSVRGRSRISKTGNNLIRNLLFMCSFTACEHNKSCKEIYQRITAKGKPKKLALIAVANKLLKQSLAIAKSGLYYDENFRSVNLNNV

SEQ ID NO: 41815 - protein, 366 aa, unidentified
MDVLYPVCCGLDVHKKTITACLRFASARARAEEVRTFGTTTRELLRLADWLTAAGCTHVAMESTGVYWRPVYHILEASFEVLLVNAQHVKAVPGRKTDVKDCQWLAQLLEHGLLRGSFVPPAPLRELRELTRYRRQLVQEHAREANRVQKVLETANIKLGDVATDVLGVSGRAMLHALIAGERDPERLADLARGALRQKADALREALVGRFTLHHAFMLQGLLDHIEFLDQQIARFDERIEEQTRPFGPAIERLDTIPGVGRRSAEQILAELGDDMRRFPTAAQAASWSGICPGNHESAGKRRNGRTRKGNAWLRSTLVESARAAVRNRGCYLSAQYHRERLVQYHTRRLAELGLTVQLPGAQATA

SEQ ID NO: 41816 - protein, 375 aa, unidentified
MGHPSEAFIGIDTSKLRNAVAIAEAGRRGEVRFLGEVDTGEAATRKLVAGLAARYGKLTFCYEAGPTGYGLQRLIESLGHTCILVAPSLVPKKAGDRVKTNRRDAEGLAKLLRAGELTSVWVPDARHEAMRELTRARDAARADLTRKRQQVSSMLLRMGRYYPGIKTWGARHRAWLANLKLDHVEQRFALEELLLAERQAGERIARLEQAIRGAVADWSLASIVPALMAMRGIDLVSAVTILAEIGDLSRFASPRQLMAYLGLVPTERSTGESVKRGSITKAGNGRARRVLVEAAWAYRHPPRVGYEKQAQVAAAPRRAREIAWKAQVRLCARFRALSRKGKTSTVVATAIARELAAFIWAMHREVAGAKPARAA

SEQ ID NO: 41817 - protein, 342 aa, unidentified
MQIATIGLDIAKNVFQVHGVDASERVVIRRQLRRRQVLEFFKALPPCLVGMEACATAHYWARELMKLGHLVRLMPAKDVKAYVKRNKNDAADAEAICEAVRRPTMRFVQIKSAEQQGRLMLHRARDLLMRQRTQVINALRAHMAEFGIVAPQGRQGVKELLLIIAGAEDERLPVDAHASLVVLAAEFTAMQTMIGSIEKQIMAHHRSNEASRRLETIPGIGVAGATAIAATVPDPTVFRSGRDFAAWIGLVPREDSTGGKQRLGPISKRGDRYLRRILVVGAVAVLRYARQNPEKYPWLTRLLARKPFKVAAVALANKTARIAWALLAKGGTYRAPALVASA

SEQ ID NO: 41818 - protein, 391 aa, unidentified
MRIVGLDVSRSVAEIAYLEDGTLHAGGRTGLRRDELERFAAKLRATDHVVLEATGNTTAIVNVLRAHVARVAIANPLQVRLIAEARVKTDKIDAAVLAQLYASGFLPEVWMPDERTLALRRQIARRSQLVRQRTRLKNEIHAVLIAHLIERCPATDLFGKKGRAWLGVQPLPLDERLGVEQRLRELDRLGDDLREVEQALAQVTIDDARLRVMLTITGVNTTVAIGLLSAIGDIARFPSPEKLVSYFGLNPSVYQSGPAPARHGHITKRGRSYARAMLVEAAWGATQAPGPLRAFFLRVRDRRGQQIAAVATARKLAVIVWYVLTRGEPFAWDRPALTAHKLRALELQAGMPAQHGSRKGSAAAYSGVTSEFGKNRTLSNPSPQHSRTTGG

SEQ ID NO: 41819 - protein, 353 aa, unidentified
MVTVGIDPHKHVHVAVAVDADGKRLTRPLTVKNDANLIGVLLKWIRTITDGTTVTWAIEDGRGFARRLADGLLLAGHEVVWVPTRLMAAHRKLHAATGSKSDPVDAVAVAHAAIATPSLDRHRIDDRVRELRVLVDSRADLVRRRTIVINQIKAYTHLWLDHTPGDLTRRPGITSLTALVGTTNMSGHVRRALTEMITEIDGLNKRVRGLETTIRELVTPLAPALLEITGISHVSAAVLLAEIGDITRFNSSAKLARYTGTAPIPVYSSDKERYRLHRGGNRRLNSVLYTTSIVQQRFHPTRDTDRRRELRSDEIAAYLSNRAVQTSGSRDVRKLAAGTDNGLCLQARKGTSA

SEQ ID NO: 41820 - protein, 351 aa, unidentified
MPNKSNSIVATMGIDIGKNAFHVVGLDRRGAIVLRQRWSRSQVEARLANMPACLIGMEACVGAHHLSRRLQAQGHDARLMPAKYVRPYSKGQKNDFRDAEAIAEAVGRPTMKFVATKTADQLDLQALHRVRERLVSQRTGIINQIRAFLLERGIAVRQGLRFLRSELPTILSARSDVLSPPMMRVIEDLNGDWRRLDERIEALSEEIEAVAHQDLACERLMTVPGIGPIISSAMVAAIGNGAVFAKGRDFGAWLGLVPKQISTGDRTILGPISRRGNRALFVQAAWVVLIRIKDWERYGLKAWIDAAKKRLHHNVLAIALANKLARIAWAVLNKERPFECTKSPAAASQPA

SEQ ID NO: 41821 - protein, 355 aa, unidentified
MALTIVETRAITGGVDTHADTHVAAALDPIGGLLGVQEFPATTAGYAGLLSWLGGFGTVCLVGIEGTGSYGAGLTRHVTAAGVRVVEVDRSDRQDRRRQGKSDPLDAVSAARAAQSGRARGAPKGRDGTVEAIRALMVAKRSARSERTQTINQARALVLTGPDDLRARFAGHTPAALVTETASLRPRPGDVVGYAVRIALRELGRRAEFLDGQLQRLDELIVPLITARAPGLLALYGIGPNTAALLLIAAGDHPERLRSEAAWAHLCAAAPIPASSGKTVRHRLNPGGDRQANHALWRIAFTRMGSDPATRAYVARRTAEGKSKAEIIRCLKRYVAREVYPTSAQAADAPAPGTA

SEQ ID NO: 41822 - protein, 420 aa, unidentified
MKKHSKSCRQSEPTTKRAKSRGPVQRDAKEVMAEVLEKLTGRGVLDTRVESGRARKGRRENTVGPNLDRLTVGVDLGDRWSQYCILGLKGETLAEGQLRTTQEDVREFFQALTAARIVIEVGTHSAWVQDVITEWGHEVLVANPRLMEGSKGRKRKSDRIDANKLARLGRVDPQSLYPIRHRSREVRQDLVVLRARDALVSVRTELINTTRGLVKSMGTRLPRCSSPSFAQKVKDAIPVEVREALLPLVQLVETVNDGIARYDQKIEELGREKYGHTTLLRQVKGVGPITSLAYVLTLEDPQRFSSSREVGPYLGLVPKQEDSGDSQPQLGISKAGDRMLRRLLVGSSHYMLGAFGPDTDLRRYGLRLCECGGKNAKKRAVVAVARKLAVLLHHLWVTGDVYEPLHHSGAETRTAQATAA

SEQ ID NO: 41823 - protein, 346 aa, unidentified
MPIVGGLDIHRKQITFDYVDTATGEVQRGQIAPADRVHLAGWLARRFPGGQDADFALEGCTGWRYVAEELAAAGIGAHVGEPAETAALRGPKKRAKTDRADSRHMRQLLADGRLPECWIPPSCILECRALLELYHDLRTAHTAWVQRIHAVLFHQGARQLGEGHLRTEEDLAQLRAIAAAQLSPAGQLQVATALDMLTALEDHRDAVRRRLLEAVRHLAGAKVLQQRLYGVGPITALALTCWLGGAGRFSSARKAVRFAGLDVTVYSSAGKRSPGHLSRQGPEVLRWCVYEAGKAHARASAPDHAYYAAVKDRIDGKRAAISEARKIIRRACHILAELGDDALTMT

SEQ ID NO: 41824 - protein, 366 aa, unidentified
MKKSSTVKKVLKQDKKLDGQLTVGLDLGDRNSRYCVLNERGEVVLEDRVVTAQKAFQEAFGEMSRARIALETGTHSPWVSRCLEELGHEVIVANARRVRLITQSSSKDDRLDAKKLARLARIDPDLLSPVRHRSKEAQTDLIMIRARAVLVSARTKLINAARGITKSYGERMRKCGGHQMGEELAASLSPELRFALQPLLAEIEALTQRIKEYNHRIERLAKERYPETALLTQIKGVGPLIALTYVLTVEDPHRFQRSRDAGAFVGLRPKRRDSGSASPQLRISKEGDSYLRTMMIQGAQFILGPFGQDSDLRRWGLGLAEHGGKNGKKRAIVAVARKLAVLLHKLWVSGEVYVPLHVQTCPQAAA

SEQ ID NO: 41825 - protein, 376 aa, unidentified
MDTSTAAGSILHCALELSKNTWLLGIQFPDRPQPSLYPIKGGNTEDLMAKLTAARDRCAKLNGRAPSIVLCYEAGYDAFWLARFLKARGIECLVVDSASMQVNRRARRPKTDRIDVGKLLRGLIAWLQGDRHVWSVVRIPSVDEEDLRRSHRERDYLVHERTAHINRIKGLLFAQGIRGINVKRQYKTLNVDKLVTGNGHPIPPRLASEIVREIARLALVQEQIATLERERDERPTPCTATEKKRAQLMQLNSIGPAISAVMTREVYYRQFDNRRQVAGFLGLAPSPYDSGETERSQGISRAGRGQVRGTMIQAAWLWIKHQPRSTLTRWFLERTVGQGGRVKRIMIVAVARKLAIALWRFLEHGLVPQGAILSSK

SEQ ID NO: 41826 - protein, 434 aa, unidentified
MVMKKVVNNELKKKLNLKRQSSSGYDIVQWSTSGRELTLTRPMRTRERPVPPEANRSKNTNRVPSFEDLYKAASERTRSLKFFQKEVLVMFYVGIDWATDHHNIFIADESGAKIDSFCIPHNPKGMSLLRDKLRNLLIPKEQILIAIETPRNLLVEFLLNEGYSIYPINPKSVDRYRDRYRPSGARDDSFDAMVLANIIRTDRDQFRAILPNSALARELKILTQDEQRLIHLKTRLVNQIQACLKDYWPTALELFSEIDQTVTLDFLLKYPRPEIIPLAELKKFLQKHHYPLSEEKAKEIHKKLSRPQIFVEDFTIRAKSRLLITLVGQLKALITQLDEYQREITKLFNEHPDCPVFKSLPGSGPKNGPRLLAEMGDNRQRYSKAKNAQCEAGTAPITDASGKSKIVRMRYSCRKPFRNVLYQFAFSTLTKRLG

SEQ ID NO: 41827 - protein, 315 aa, unidentified
MSDVPCFIGIDVAKAQLDIALRPSGERWAVPNDASGVAMLVERLQTLHPTLIVLEATGGLERAATSALAAAGLPVVVVNPRQARDFARATGQLAKTDALDARALAHFADVIRPTPRPLPDAQTQELRALLGRRQQLIGMRTAEQNRLAGASERLTKDITAHITWLNVAIATLDDDLETMLRASPLWRAKDDLLQSAKGIGPVSAHTFLLELPELGTLTRQQIAALVGVAPLNCDSGTLRGKRTIWGGRAHVRTVLYMSTLVATRFNPQIKVFYERLLAAGKVKKVALTACMHKFLTILNAMLKHRTPWQPQEVQS

SEQ ID NO: 41828 - protein, 322 aa, unidentified
MEMTGKIVGIDVSKDRLDVHVLPEGAQFIVARDGKGLADLAERLLAERVALIALEATGGFESIAAAALASAGLPVAVVNPAQVRHFAKALGQRAKTDPIDAAVIARFAEATRPPVRALPDQATRLLADLVARRRQIVEMMAAERQRRSPTTVRRLLRSIDRLLAALQKELSAIDAGIDASVRGSPLWRQTEDLLASVPGVGPITARTLIAEMPELGTLGRRQIAALAGLAPFVRQSGQWKGTSMIAGGRKTVRTVLFMAAIVAGRYNPVLKAFRQRLIDAGKPKILAAIAVARKLLTILNAIVRDRRHWNGTAAAAAGPSSR

SEQ ID NO: 41829 - protein, 367 aa, unidentified
MIKNSTAFVGLDLGDKRSNVFMLDQGGELIEETRIPTTEPAFRRKFASLPPCRVAMEAGTHSRWASRLLEQLGHEVLVANPRRLRLIYESSRKTDEADAEHLARLARLDPQLLSPIRHRGPEAQAHLTVIRSRDSLVRARTLLINHVRGSVKSSGARLLACSADSFHHRVEPSIPAELQPALLPIVQTIASLTAQIHAYNRQVEQLCQEQYPETQALRAVGGVGPIVSLAYVLTLDDPDRFRKSREVAPALGLVPKRDQSGSRDPQLRITKTGDSYLRRLLVGSAQYILGPFGPDCDLRRWGLKLAERGGKNAKKRAVVAVARKLAILLHRLWVTGDIYDPFYHSHPDQTSATQTHLLVRQPEAVCA

SEQ ID NO: 41830 - protein, 385 aa, unidentified
MTNEMLQSNATNTPARAPTRLLVAMEMSLKTWRLVMAPEGGTRKRVKTVEAGNYLAVEAAVVEAKARFQLLAETPVVFCYEAGRDGFYPYRRLTAEGHTVWVIDSASIEVSRRRKQAKSDGIDGDKLAELMQRQARGEPKALRIVRVPPPDVEDQRLLPRERERLLQDLGRLHNQIESILFAQGYREVPKTAGALRTWVAARPELPPHLRERLGREIERLALLERHCHAVETALAEQVRQNPHTGMMAVAWSLMQLCGIGLIGAWVLASEIFGWRQFRNRREGGAVLGLTPTPYSSGQSEREQGISKAGNRRARALLVELAWLWLRYQPDSALTRWFQARFGGGGKRLRRIGIVALARRLAIALWRYTAQGVIPEGARLKSAATA

SEQ ID NO: 41831 - protein, 449 aa, unidentified
MNPTNSLESMTLVHPNAAGLDIGSREIWAAVRPDLPGDTVRRFATFTPDLEALADWLQECGVETVAMESTGVYWIPVFELLERRGFQVYLVNGTHIKYVPGRKSDISDCQWIRKLHSLGLLNPSFRPDAEMRSLRSLLRHRAQLIEHRAPHILHMQKALTQMNLQLHHVLSDITGQTGMQIIRAIVAGERDPKVLASFRHPNCRSSEETIVKALTGHWQEELLFVLQQSLELYDAYTAQIQACDAQIERLYAAIKPRWDAPDDLPDLPPAKNGSKSKNKPPDSTRQHLFRITGVDLVSVDGISASLAQTIISEVGTDMSCFSTVKHFCSWLGLAPRNDISGGKIIRSRTLHTKSRAKQAFLQAAASVTRSDSAFGAFYRRKKAQLGPMQALVATAHKIARTVYFMLKNKTPYHDIGAQGYEQQRRERELRALRRKAAKLGFELNPKAAA

SEQ ID NO: 41832 - protein, 383 aa, unidentified
MGCAGLPSRSGLGGDRNHGGADMAQARTWVAFDVHTTGVVAAVLERESGELRVQRLAAGSAAATEFAAGLAGPVRATYEAGPTGFVLARRLEAAGIECVVCAPGLIPRGAADRVKTDRRDAERLVRLLVAGELHRVAVPTVEEEALRDLVRAREDLRGDLMRARHRLAKLLLRHEVRFEGPQANWTRAHLGWLAGVRLAQPASQRALEDYRGAVGALMIRREQLEAEIARALPSSPWAQTARRLMCLRGIDTLTAAGLCAEIGDFRRFGHPAQVMSYLGVTPSEHSSGERHRRGPITKSGSQHARRLPLEAAWHYRRQPRVAGSLARRQRDGEPEVIAIAWKAQRRLHHVWQRMEQRHKRRTIIAVAAARELAGFCWAVATTD

SEQ ID NO: 41833 - protein, 346 aa, unidentified
MPQHERFIGVDYHRKASYLTVMDSRGTIIKEGQIENQQEAVATFLQQAQCDGNATAVLEATRNWTVMYDWLEALVDEVKLAHPLKVKWIAEAKIKTDKIDARVLAHLLRTDLLPTAYVATPAAREVRAVLRQRMFFVRVRTMIKNRISVLLDRYPDLSAQQPAEDRFSQAGLAWLHQLPLKPTDQQLLAEDLQLYAAVAARIAQTEALVTTLAQDDWRVTLLRTIPGLGAFFAVLIAYELDDITRFAHEKKLCSYIGLVPSTYASGGRTFHGRLTKQGNRYLRWAFVEAVWPAIRTDASLRRYYEGIKTRKGSNPAKIATARRLVTLVYRVLRQRRAYEVRSSQLP

SEQ ID NO: 41834 - protein, 374 aa, unidentified
MDVHSTSYTLCAMEPVLGGEDRIFANIQVTSDYRNVIQFIDKLKEKLGSSGSYSIECGYEAGCLGYSLYHQLTKAGVKCTILAPTTMLTQQGKRVKTDKRDAVMIAQCLSYGGYHAVHVPADKDVSVKEYLRMRDDHKVALKKIKQQINAFCLRQGYFYAGNKWTIKHLNWLKKLVLSDLYRETLNEYLTSYEEQIAKIERFDKRIEELAEDSDYQENVKKLGCLLGIKTHTALSLIVETGDFKRFRKGNTYAAFLGLAPGESSSGEKINRTGITKAGNSHLRMLLIEAARGMCRGRIGYKSKVLRSRQDGNPTEVIAYADRGNTRMRSKYYRMIRHGKKDNVAVAAVARELACFIWGLMTNNITFKEEGTKAA

SEQ ID NO: 41835 - protein, 411 aa, unidentified
MKVFCGIDWAEGHHDIALIDDSGQLIAKKRIRETVAGFAELTDMFAAAGDSAEDPIAVAIETPRGLLVAALRATGRPIYPINPMAVARYRERHTVSRGKSDHADAMTLANILRTDQHVHRQLPADTHLAQAVAVLARALQDATWRRTKASNELRSLLREYYPGFLEAFAGKMTSNLASADARAVLAIAPTPAAAAKLSKARIAAALRRGGRLRRIDTTAAHLHAALREPQLRQPDLVEQAMGRQALALLAVLDTECRNVDQLGGAVADAFQQHPDHAIITSFPGLADNTGARVLAELGDDRTRFTDARAVKAYAGSAPITRASGRTVSITHRRVKNDRLAAAGWSWAFAAMAHDEHAHRHYRHRRDRGDRHAAALRHLFNRMLGQLYFCLQTGQQYQQHKAFAAPQLDLRD

SEQ ID NO: 41836 - protein, 387 aa, unidentified
MYFIGIDISKFKHDCAIIDEAGDTVTASWSFANNCEGFSLLKQLLDALDGQKKIGFESTGHYGHNLKLFLEANNFSFMEFNPLLVSKFVRSKSLRNTKTDSLDAVSIAQYLMTVEYKPYPPSFYHMDQLKSLTRFRDSLVRQHSRQLVELTNILDKVFPEFKPFFDGRFSATALYILTHYQSPEKIANMNAKSYEALRKKSRGKFSMVKFAQLKTLAKNTVGRSDAFLLKQMEITIDIENQLDAKIDEIESQILECIHALNPPILTIPGIGELTAAIILSEYGNINKFENPAQLLSFAGLEPGYYQSGLAEHQGHMVKHGSSHLRYALMNACLPLITYEPVFAEYYAKKRAEGKPHRVALTHVAKKLLRVIFTLQTKNISYDPTLIR

SEQ ID NO: 41837 - protein, 408 aa, unidentified
MTVVGIDVSKSKSMVAAMKPGGELVAAPYEVRHSDIELSHLALDVLCMEPDTRVVMEATGRYHEPVAALLHSEGIFVSILNPLLIKQSGAGSLRKVKSDPKDALKIAKYGLDNWSTLLEYTPMEAIRQQLKLCARQCDLYNKNIVMLTNNLISLSDKTFPGVNELFSSPEKADGHLKWVDFYRRFWHCDCINRMSPDAFEERYKKWCKSKGYHFSTDAADALYAASCRPYTTLPRDNNAKLLVTVAADQLIALRENQSKLEAEMLNLCKQLPEYETVMAMYGVGKSTGPHLMAELGDVRRFPHRSSIVAFAGVDPGVVGSGKMQLSSVTTSKRGSPQLRKALFQVVSTYVKCKPENEAVYQFYAKKRDEGKPFFVCTTAAANKFLRIYYARVKECLNAVESATQVEEG

SEQ ID NO: 41838 - protein, 351 aa, unidentified
MMIIGCDFHTRYQEIAWLDLETGETGERRLEHAGEQVREFYGALRGAVGVGIEATGYSQWFERMLHQMGHEVWIGDAAAIRASVVRKQKTDRRDAAQVLELLHTNRFPKIWVPTPEQRDLRQLVLHRVKLVQMRTKVQNQLQAMAMEQGICRKKKLWTVQGRAELERLPLDRWAQRRRQELLQLLDQMNESIRELTGEVERQARQHPDAALLMTHPGVGPNTSLAFVLTIGPVERFARGKKIASYLGLNPSEHSSGGRQRLGSISKQGNATMRWLLVEAGQMAVRGDADLQRVYQRLKFRKGSAVAKVAVARKLAVRLYWMLRDRCDYATLVRMPGSSSSAVVPEESESGR

SEQ ID NO: 41839 - protein, 346 aa, unidentified
MQPQTIGIDLGKTIFHLIGMNQNGGILMKKRLSRSQLVTLLANTPPCLIGMEASCGAHHLGRELRTFGHDVRLIPAQFVRPFVKSQKNDYVDAEAIAEAVQRPTMRFVPIKTEDQLDLQALHRVRDRLVERRTGVINQLRAFLLERGILVRAGRNYLQQALPDLLAAAEERLSGRIFRLLEQLVNEWALIEKDVERLNAEIDSICASDPSCQLLMTVPGVGPIVATAMIAAVGNGAAFSKGRDFATWLGLVPRQHSTGGKAKLLSISKKGNEYLRRLFIHGARSVMARTKRDRHRFGEWISRLETRAHHNKVGVALANKLARIAWAVLHHSVPYIGAGPVYTGASE

SEQ ID NO: 41840 - protein, 358 aa, unidentified
MNAITTPTNTILALDLGKFKSVACAYERATTQVRFDTVTTCRKELLRLLEQHRPTVVVIEACTLAGWVHDLCQEHGVPCKVANTASEAWKFQHTKRKTDKDDALRLAQLEALGQLPTVTIPPHQTRQWRSLIAYRQTLVGRRVAVQNRLRALLVGPGLPAPRGHKAWTELGLQGIAQYAQPLAACGPDELWRGLLDLALTELRQTRELLDQAEAKLDALAQDDAAVQLVETIPGVGPRTAEAVAAYLPDPQRFATAKQVSAYAGLVPRQYQSGEVDRRGRITKRGPALLRKLLVECAWVMLRYNRWARAVYQRLSRGKARKKQAIVALARKLLVRCWAMLRDGTSWRQEAAAAPGAGT

SEQ ID NO: 41841 - protein, 395 aa, unidentified
MFIVGIDIAKRSHEAIIIAEDGQVVRKAFSFRNNCTGYNLLLEQVRRLTLVKSQIVFAMESTAHYWLALYARLLKDGYTVIVLNPIQSHSLRELYIRKAKTDARDSLIIADLVRFGRCKASNVPQDKILALRELCRSRAYLVDMAADLKRKLIALLDRIFPEYESLFDSVFSKASIAVLSKYSTPQKVKNANLRKLTDILMESSNGHFGEWKAHQLKEAACSSFGIDDSGGVYSTLLGMFLEQILSLTAQADSLEKQISVFFQEFNNPLTSIPGVGTVLAATILSEIGDITRFSSADKLLAYAGLDPSVKQSGEFKSNQNRMSKRGSPYLRRAIWLASTVAVHRDPMFQTYYEKKISEGLHYMNVIGHVSRKMTAVIFAVLRDGQPYQPVLSTAG

SEQ ID NO: 41842 - protein, 338 aa, unidentified
MLYTGIDLHKRTVVIATIDETGKVHSETSLPTSRSAVARYFHWLPEPTIATVEATSSWYWLRDLLEQQDVPLTLAHAKFVKAIAYAKVKTDAVDALTLAQLHRADLIPRAHMVSPELRPFRALLRTRLHLVEKRTSAKNSVQRLLEQYNVPEPLRLPDEATLQASLYAEQIELLGDQIHRIEQQLQPELIPNPDIQRLLWIPGVGKIVAFTLYLEIDGIERFPTVRQFFSYCRVVPGADNSAGKRRHGRRKDGNRYLKLALSHASVRAVQYFPEIKRFYQKKARQKNPAIARTLVQKEIARSAYIVLKEQVDFNHTFKGLPLSKRKASKWPRQASPDA

SEQ ID NO: 41843 - protein, 341 aa, unidentified
MEHTTIAVDLAKSVFQVAVSHRPGHLDEERRLPRDRFLAFFAQRPPATIVLEACGSAHYWARQLQPLGHAVRLLPAHDVRPYVRRNKTDRTDAKGLLEANRNEEIHPVPVKTIEHQAIASLHRLRSTWLATRTARLNTLRGLLREFGIFIPTGSQRVVPRVRALHEAPAVPPLLHATLAAACDEIEMLEVNMRAVERQLAALADDLPDVQLLQTVPGVGLITATALVALVTDIRRFPSGRHFASFLGLTPREDSSALRRRLGAISKQGDVYVRMLLTHGARSLVWHAKAAGRPTSLQQWAMETELRRGRNVAAVALANKLARIVWAVWVQQRPFTANHRLG

SEQ ID NO: 41844 - protein, 358 aa, unidentified
MDSSKVQPKLTAGLDIGDRYSYLCLIDQENGEVMEEGRLRTNPEAFLRRFSSEQPMRIAIEAGTHSPWASRVLEECGHEVLVANARKLRLIYANKRKTDEIDAENLARLARVDPKLLYPLKHRGEEGQAHMALIRSRQALIGCRTQLVNHVRGAVKSFGHRLPKCPARSFHKRASEHIPEALMPALGPILQTISSLTERIRDYERQLETIAKDYYPHETDLLRQVEGVGTLIALTFVLTLENPYRFEKSRSVGAYLGLVPACDQSGDRDPQKRISKEGDQMLRKLLVGSAHYILGPFGSDSDLRRHGEKIASRGAKNAKKRAAVAVARKLAVLLHSLWVSGELYEPLRKAQHSGGQAA

SEQ ID NO: 41845 - protein, 403 aa, unidentified
MTNKNIVCGIDVHKEFLIGTILGEGDNKKVERYETDHESILKFRDWLRENRCERAVIESTGVYWVPVFLALEGVVDIVVANAYQVKQIPGRKTDESDSEWLAKLLRGNLIRPSYIPERNIRDLRDLTRLRTKLVHVRTDFKNRVHKVLERANIRLSAVLSDLFGKTGLQILKGITSGKSLDEVIGGIKNKRIDKKEVEEAIKGNLSESDVFLLEYCVKMVEILGSEIAEIENKIEERIKGMEKELKIVMSVVGVGKTAAQEILAEVGDIKRFPEDKNLASWAGLAPSVYQSGGKNLTGRTRKGSKWLRKTMFQVAMAASRNKKSELREFYLRIKAKKGHKVAIVALARKILCIIHHLLTTGECYTEEGISKKPIKLKSHETKDFEIKRAIRILHKAGYTISQG

SEQ ID NO: 41846 - protein, 443 aa, unidentified
MSTNYNEALLQVRLQAGKLLGKCNPKKKGKTMKETIYVGIDLARANSRVATLDSSGEAIFKPFDITNSREGIKKLLSKLSNYKTGQITCGMEISSNYWENMCSYLKEKDISPILLNPYQVKKYRQATGVKIKTDSIDAEAIASLICGRKYESLYIPDDAVLELRELVRIKYSFQRRVKDLKRSVLALLHLVFPEYTRIISYPFSKVSIEILSKYPTSCHMAKSSVSKLVKIFRRYQGCNFSIDKAKDLISAAKDSFYSGKAPRSRGMTISMQMDEISSLASKIADIDNEIKSIIDPKDPSGGSSAYNILNSIKGVGIGTIATFMGYVGDVGRFSSSDKLISFIGFYPKIFESGKYKKKNPTIQKAGPRELRYMLYLASVACIKHNSQLAKYYHDNVSAGMPAKKALIKVAVKLARMMYSMLKHKTEYESSRVFMQSLSLKNAA

SEQ ID NO: 41847 - protein, 287 aa, unidentified
MAPDMSITVGVDTHADAHVGVVLDLLGRRQGEALVPNDESGYRGLLRWAHSLGEPTCFGIEGTGSFGAGLSRFLRSEGVRVVEVNRLSRQHQRRRGKYDAADAEAAARAVLSGEATGEPKSADGCVEMLRALKVARRSAVKAKTQAANQLHALVMTAPERLRADLRGLAVKRLAEKAATKFALRSVARRYQQLSEEIAQLEEQIKRLVREASPNLVALDGVGSDTAASLMIVAGDNPDRLRSEAAFAHLCGAAPIEASSGKVVRHRLNPNGNREARAGRSTWSRSIA

SEQ ID NO: 41848 - protein, 351 aa, unidentified
MLIIGMDVHAPETMLFWLDTETGETCQPYARPTVEVVAHAAGLSGSPKVVVLETGSQSAFLARELMTLGCEVHVVDAFKTRRVLEGMYGLKKTDKIDARGLATAWSEGALRRAEVWVASAEQQALRELTRARATLVATGARYRGQIRQLLARENQCCPFSDLLGSKAQAWLDAIGPSLSAAAQQVLAAYRRQLAQVRDEVEALNAAIEAATTADEDVELLQTLPGIGAPMAAALKAEIATIDRFDSANELRGYSGLVPRVVQSGERMRYGPLTRAGNPRLRRLLILAAQHFVQSRAGRDTALYRWYVAQVFRHGRNPAKVALARRLTTILFALLRDRTAYRPDYSPLPKAA

SEQ ID NO: 41849 - protein, 347 aa, unidentified
MTIVEDKRAITGGVDTHAGMHVAAALDPIGGLLGVQEFPATAAGYAGLLGWLGGFGTVALVGIEGTGSYGAGLARHMAASGIRVVEVDRSDRQDRRRQGKSDPLDAVSAARAAQSGRAAGAPKGRDGAVEAIRVLMVAKRSARNERTQAINQARSLIVTGPDELRARFARHTVANLVSDLAALRPRPGDVPGSATRIALRELGRRAQFLDTQIERLDELIIPLVTARAPSLLALHGIGPDTAALLLIAAGDHPQRLRSEAAWAHLCAVAPIPASSGKVTRRRLNPGGNREANHALWRIVITRMSSHAPTRAYVDRRTKEGLSKKEIIRCLKRYVARQVYPHLRPGAG

SEQ ID NO: 41850 - protein, 385 aa, unidentified
MAPPARPEIVIGLDVGKSSHWACVVTREGELLASKPVLNRENAIDGLYAQYPGALVVVDQVRNIGSLALSRARLAGMPRAYLPGLAAHGASRLFAGDAKTDERDAMVIAKTALGIPDALLPVADRPPEIEAARSLAAQRDFLTCENTRSKNRLRSILLESCPEFEAHADLSDPATLKLMAAVGGPWSISEASPQAVGALTRGCGRAKVAALVESVGSSSRPHPAAVACEDRAVRLLARRISENAAEIESLTSEISALLSADETYRCLLTVPGIGPRTASELVISIDIADFPSHDRLASYCGLAPRNRRSGTSISSVSASRQGNKRLKNLLIFSCNCLARSRNRWGEYYARCRDRGMPHGKALKAVARKRLKVIYAIMRDKVPYSA

SEQ ID NO: 41851 - protein, 442 aa, unidentified
MAMRKREDSPEMFPNAAGIDIGGSSHWVAVPRTADDEPVREFGTMTDDLNAMADWLLACGVDTVALESTGAYWIPVYEVLERRGLAVWLVDARQMKYVPGRKSDVLDCQWLQKLMSLGLLRAAWRPGDKVCVVRAVARQREVLLTEQGSWVQRMQKTLVQMNIQLTEVLSDIMGTTGQAIIRAIVAGERDPKVLARYRHGRIRRSADDIARALTGNWREEHLFVLKQALSMYDDIARHLGECDARLQTLVDESGSHHVDMGTGPRAGTRLRGNFDQRQRLANWAGVDLTRINGLGVSTVLTLLSEIGPDLSRFASVKHFCSWLGLTPGTKISGGKVLSSGTKRSANRARQALKMAAMTLSHSDSALGAFYRRLCARMDKPRANTAVAHKLARMVYFMLTRGEAFVDQGQQRYEEQQRQRSIAALKRRAARLGFRIESVPATP

SEQ ID NO: 41852 - protein, 461 aa, unidentified
MKKPKGRAAAKVDPGSRLGVIQSDVAGIDIGSREMFVCAPAGRGEDREMVVFATTTQQIQECIGWLKQKKVRSVAMESTGVYWIPVLEMMESSGLEVLLVDTRPLSRVPGRKSDAEDCQWLQTLHSHGLLRGAYRPNEQISELRTIVRQKAVLVREQADWIRRMHKCLDQMNVRVHHAVSDTKGATGMAMLRAIVEGERDPRNLAKLRDRGCQKSEAEMVELLTGNWRSDHVFNLKQHMTMYDNAVQQIAAYEQEIQRRMQEITPAGRRDLQAPPLANIEKRKTMKKRDQEGKRQALYRAMGEDLTTIDGVGVEIVEVILSEYGTEMSKFPGERQFVKHVTLAPHRPVSGGKVLRSKRNKQKGTRTAEALRQAASSLKHSRSALGAYYRRIARRKDSGIAVFAVARKLAGLVYRMLRFGQQYVDIGQAEYEKRYQETRIRALKSTASQLGYNIVKQEPVTA

SEQ ID NO: 41853 - protein, 319 aa, unidentified
MPSSLPLSIAAGIDTGQRFLDVGLAPSGKTFRVPNLAEGIGTIVDRLTRAGVRRVVLEAIGPYAQRLVQALAVAGFEVGIVNPRRIKAFRDAEGRRAKTDRLDARLIARFALTMSEAVRPVPTPEQLALKALSMRRRQLTEMIAMEKTRLKQAIEPLLLDSHRAAIAALSAQCASIEAELTRRLADDVELKRVFEILKSIPGIGDRVATVLVTDLPEIGQRDRKAIASLAGLAPHISQSGNAPPRAAIAGGRPCVRAALYMAALVATRAHPQMKPTYQTLRQQGKPAKVAIIAIARKLLVTANALVKANKKYLPNPKSS

SEQ ID NO: 41854 - protein, 481 aa, unidentified
MSRRKMSTFERLQRGEKLSRRERKQIGRQLQAEEPGLEIVHRNVAGIDVGDESHFVCVDPQRGQPPVREFGSWTAALHEMVQWLKSCAVERVVMQTTGVYWVPLQDVLERAGFAVVVVNARATKNLPGRKSDVQECQWIRKLDRYGLLRPCFQVPETIRSIRTLWRLRGRWVEDAGRTIQQIQKALTTMNVQLANAISDISGKTGMAILRAMVEGEHNPWALAKLRDERIRASEEEVAHSLQGNWREDVLFELDQVVKAYDFQQQQIAACDQQLEKYMKAQPTHSKAPAVPVEEGKPKAKRCRKKARKPRKNQPAFDLEGELKRVLGVDLTAIDGVKLMTIQTLYAEVGADLSAFPSEKHFTSWLMLAPKREVSGGRVIKHTSLHGRNRLANALRMAAESLKESDSYLGARYRSLRGRLGGVKAVKAMARYLGCLIYRMLTKGKAWVDRGAAWYEQKRRERELSHLQRRASAIGLQLVPTK

SEQ ID NO: 41855 - protein, 338 aa, unidentified
MNISLIGLDIAKSVFHLFAVNREGTLVRKKVLKRQEVAAYFCLLEPCVIAMEACGGAHYWARLLKAQGHDVKLIAPQYVKPFVKGNKNDYNDAEGIAEAAQRPTMRFVPIKSVAQQDVQMIHRLRERQIKGRTALVNQIRGLLAEYGIVINRGVAAVRHELPRILEDAENDLSVLARESFATLYDELIELEIKLKRCEQKVQALNKSLEPCQRLQETPGIGPLTATAVFAAAGNGHDFVNGRHFSAWLGLVPRQHSSGGKDTLLGISKRGNTYLRTLFIHGARAVLRYVATKTDRFSRWAQALIERRGHNRACVAVANKLARIAWVIIAKGERYQPAS

SEQ ID NO: 41856 - protein, 379 aa, unidentified
MGENITYVGLDVHKDGIVVAVAEGGLRGEVRDYGRIANTPAALQRLARKLGHEGVELRFCYEAGPCGYGIQRHLSAHGQQCVVVAPSLIPQRAGDRVKTDRRDAARLARLHRAGELTAVWVPDAAHEAMRDLVRARLDAVHALRRARQQLSGFLLRQGCHYGRPAWTKLHRPHGSSPWAEGSRLTGLRFEHAVHHIVLEDYIQAVEAAEARRDRLTAQIEAMLPDWTLAPVVAALQTMRGMALVNAATLIAELGDLSRFSNPRQLMAYLGLVPCEHSSGASVRRGGLTKAGNSAARRLLIEASWTYRFPARVSRELLLRQESQSKPIREIAWKAQLRLCARYRKLARSGKPANVVTAAIARELAGFIWAIARRVPPAAG

SEQ ID NO: 41857 - protein, 344 aa, unidentified
MDHYAGIDVSLECSSVCVVDASGKIIREAKVASEPEALIGWFGSLGLGLARVGLEAGMLSQWLYAAMKQAGLAVELLETRHVYEAFKSMPVKSDRNDARKIAQLMRLGWFRPVHCKSITAQEIRAMLTARKLVQSKLLDVENSLRGILRGFGLKVGKTTRTNFAGRIEELVKGHPNLQTIAEALLRARAVLLAEFNGFEKRVRALSRLHDQARLLMSTPAVGPIVSLTFACAIDDPFRFRSSKQAGPHFGLTPKKYQSGETDYTGRISRHGDASVREALYEAAHIMLTKPVKGCSELKSWAMRIARRAGTNKAKVALARKLAVIMLRMLKDNAPFNPAAKAATA

SEQ ID NO: 41858 - protein, 482 aa, unidentified
MSKPKKHSKQFVEKKTGQGKRGLKRKGMCLEDRPILEANAAGIDIGAREIFVAVPPDRDEHPVRVYPTFTEDLEQMAQWLVSCGITTVAMESTGVYWIPLYDVLEKHGVRACLVDARGMKNVPGRRTDWHECQWLQFLHSVGLLRAAFRPEGAVCAVRSMMRHRSELVAMTSQHVQHMHKALTQMNVQIQHVISDLTGVTGLAIVDAIIAGQRDPMVLAKLRDPHIKADEETIRKSLVGNWQPEHLFTLKQSRQSYQHYREQIAACDEQIEKLLVAFQPRVNPEEKPLPPDRKKKQSGRRKKNVNPKTGFDLRTESYKLFGVDLTQIPGLMAIVLALFSEVGRDMSRWPTASHFISWLALCPDNDISGGRVLWRGMRRVQNRAGHLFRLAAHSLHHDQTPMGDYLRRMKSKLGPVGATTATAHKIATIFYTMIKKQVEYDATIWAERDAEREKRFEAKLRRQAQQRGYKLVPIEENPARVSA

SEQ ID NO: 41859 - protein, 343 aa, unidentified
MEFYVGLDVSLKQTSICVVDQSGSVVREGVVDSDPEAISVYVRSKAPGAVRIGLETGPTSTWLWTELKRFGLPVICIDARHAKAVLKMQINKNDRNDAIGIARIMQTGWFKEVHVKDIDSHSVRTLLASRALLVKIKRDLENHVRGLLKNLGLVIGRATFNVFAARAEELIEGRPDLVAAVRPLLEARNAVEQQVSELDRKVMKLARLDAQVQRFMTVPGVGPITALAFKATIDDPARFARSRSVGAYVGLTSRRHASGEIDWSGRISKCGDAMLRSYLFEAAGVLLTRVPKWSIVKAWGTRLAKRNGLRKAKVAVARKLAVILHRMWIDGTEFNWSKKEIAA

SEQ ID NO: 41860 - protein, 335 aa, unidentified
MKHYAGIDLSMETSHVCVVDADGRKVGMQCVDSAPEAIAAVLERHGPIERAVIETGRMSPSVALGLRELGIAIVCIDARQAHQSLKAMKANKTDPHDAAGLAQLARTGVYKEVHVKSPAAHGVRSVITARGHLVEARVRLDNTIRGLCATFGIRLGAGQGERFIARMRAAASIPGLGEAVASLLRARERLVEEIGQMDRQLKAISTASPACQALMSIPGVGVQTSAAFAAAIDDASRFKRSRTAGAYFGLVPRRHQSGELDWTGRITKQGDGTVRKLLYEAANSILTRTRQSFALKTWALKIAKRRGLRKARVALARRLAVIMHAMLRDGTLFEA

SEQ ID NO: 41861 - protein, 424 aa, unidentified
MAGVVIGIDPHKGSHTAVALDVHEKQLGRLRVRASSRQVDGLLEWASGWPRRRWAIEGARGLGQLLAQQLIASGERVLDVPPKLAARVRLLDSGQINKNDPNDARSVAVAALRAHELPELAAEDHAMVMRVWARRYHDLARLRTQVVCRLHAVVCELVPGGVRKYLRASQATDVLDRIVADSPVAQAKLELARELVADLERIDAQRREAKRRTARAVAATRTSINDVYGVGPIVAGTVLGYVRDIRRFPTRDRFASYNGTAPIEVSSGDRKIYRLSRRGNRQLNHAIHMAAISQIRHHDSEGRAYYEKKIAEGMTGKTALRALKRKISDALYARMIDDARRLAAKDPGGHTGNDSASSAAGSHPETPALRKSHSRATANSKTGTGQRPLTLRPAPDRRRTSRRAAGVQVEPRLGPHRGRRQDRP

SEQ ID NO: 41862 - protein, 407 aa, unidentified
MSYKVAGIDVHKKVLMVVVCEVAEAESLPQRRRFGTTTSELRRLSQWLRASGVEEAVMESTAQYWKPVWYELEPHLRLQLAQAFSNRAPRGRKHDFKDAERLVRRLVADELRLSFVPTGEQRAWRTLTRMKVQLSREASRLHSQLECLLEEMRIKLSSVISDLLGLSGRRILQAIAAGESDPQRLASLGDHHLRCTQEQLIDALSGNPQPLHRQLLALYLERYQLIQQQIEQLNRMTAAAMQTHSEAVTRLAEVPGFGADSAQQVIAEVGAEAATFASAAQLSSWVGTCPGQHESAEQNHSSHSAKGNRYLRRILNQAAHAAVKKNGSHFQAVFRRLLPRLGYKSAIWAIAHRLCRLVWKILHQRVRFLEPGSEPSPRAKRQRAQRLLRSLRRLGYQVTVNPLPAEA

SEQ ID NO: 41863 - protein, 404 aa, unidentified
MYNAVGIDVSKGKSTIAVLQPGGVIVRKPFDVFHTSQSLKELSNYLASLEGDTRIVMECTGRYHESMANSLSNAGFFVTVVNPHLIKNFGNNTLRKVKSDPADAKKIARYTLDNWAELRQYSCMDNTRNQLKTLNSQFSFFMKQKVAAKANLIALLDNTYPGVNKLFNSPAREDGSEKWVDYAYSFWHVDCVRKTGLKAFTVRYEAFCRKHHYIYQPSKPEELFNASKELVAVFPKETSYKLLIQQSIQQLNLASAHIEQLRREMNALASTLPEYEVVMGMYGVGKTYGPQLIAEIGDVSRFTHREAITAFAGVDPGVEQLGQHNSKSNKASKCGTGRLRKTLFQVMTTLLQNAPENEPVYQFLNRKRSEGKPYYVYMTAGANKFLRIYYGKVKAHLRSLEQNE

SEQ ID NO: 41864 - protein, 343 aa, unidentified
MEYYVGLDVSLKQTSICVVDQSGSVVREGVVDSDPEAISVYVRSKAPGAVRIGLETGPTSTWLWTELKRLGLPVICIDARHAKAVLKMQINKSDRNDAIGIARIMQTGWFKEVHVKDIDSHSVRALLASRALLVKIKRDLENHVRGLLKNLGLVIGRAKFNVFAVRAEELIEGRPELIAAIRPLLEARNAVEQQVSELDRKVMKLARHDAQVRRFMTVPGVGPITALAFKATIDDPARFARSRSVGAYVGLTCRRHASGEVDWSGRISKCGDAMLRSYLFEAAGVLLTRVPKWSAVKAWGVKLVKRNGLRKAKVAVARKLAVILHRMWIDGTEFNWSKKEIAA

SEQ ID NO: 41865 - protein, 415 aa, unidentified
METQRNRVCGADIHKKFLVATILSRDGTKKTKRFGMTLDDLLDFKSWVMENQCEQVAVESTGVYWIPIHSVLENAVDLIVANAYKIKHIPGRKSDLIDSEWIAELCLNGMIEPSRIFPKDDRELRRLTRAREGYVNDMTREKNKIHHALESCGIKLSSVLADVFGKSGRYLLNCLLKGIELEEMIEGIPVKSVKLKADQIKEAVKGSLETTQIILIRGGLELIGSIQRRIDELEREIKNRIASRRADLKIAMSIPGIGFISASTILAEVGDFNDFDKAEQLAAWAGLVPTVYQSADKLITGSITKHGSRHIRRILVEVAQAISRSNKGKLKRFFRRVQAKKGYNVATVALARKVLCILYHLVVNREMYQEDDVVRTKTVDVNYSSLPTKLGFEEMIQILTKAGYEIRKTTSGTGG

SEQ ID NO: 41866 - protein, 371 aa, unidentified
MGEIITFVGLDVHKSTIAVGVADGGLRGEVRFHGKIANTGPGLRRLVEKLSRPERRLRFCYEAGPCGYGVYRQLRALGQECIVAAPALIPRRPGDRVKTDRRDALMLARLFRADELTSVWVPDEDHEAMRDLVRLRQVSKGDLRKARQQLQSFLLRHGRHYMAGKSWTKRHGRWLAEQKFEHPAQQLAFQEYLHRIERAEELCARLEQSIRELIPHWSLAPVVEAIQALRGVAAVTAANVVGEIGSFSRFPNPGQLMAYVGLNCSEYSTGTRIRRGSITKTGNSLARTTLVEAAWSYRFSARVSQTIKERLEGLPEPIRNIAWKAQVRLSKRYRHLVACGKPTPVATTAVARELLGFIWAIACLVEAEQAG

SEQ ID NO: 41867 - protein, 449 aa, unidentified
MSRPQVIDDEEHERIHDKVAAIDVAKDAGVVCTRTPHPSRPGARRSRIWTVKARMNTIRALGRQLHKDGIEIVTLESTSDYWRIWFFVLEAAGLAVQLDGAAQAKNLPGRPKTDKLDAQWLARLTEMGLLRASFVPPKAIRDLRDYTRARTRLVQERTRCWQRLEKLLEGAQVKLSSVASKLTTVSAQDMIRAMIAGQRDPRVLAALARTGMKAKHDELVQALDGMSGDHHGELAQLLLDQIAGLDGKITQLGTRIEQAVTALPDAWGINAGGTTGPQAGTGPDAAVIPAVTRLAEIPGISENLARAVIAETGLDMRRFPTAGHLVSWAGLCPTARQSGPRTRAGKKGQGNTWLRGHLGQAAAGAARTATFLGERYHRIARRRGKAKAQVAVARSILVIIWHLLADPSARYTDLGYGYYQDRTDKDRKLRNHMRQIEALGFTVTLNKTA

SEQ ID NO: 41868 - protein, 342 aa, unidentified
MSKLDTAGTEVSAKELLVALRRDGIVEPLATFPNTGEGHQTLLRYLRRKGRVVRVCLESTGLYGLDLALALSEQEGIEVMVANPRAVRHFATALMKRSKNDQIDAGVLEEFAARMPFQPWQRPSVAAFTLHALARRLGELVEMQVAEKNRRHAAELSQAIPAAIRRDLARSIRAQERAIARLTREARRVIAQDPNLTERFELLDSTPGIAETSAIQILAELAVLSPDLEARQWVAYAGLDPREHTSGSSVQKKTRISKAGNAHLRRNLYMPALVAVQHDPYLRAFYLHLLLRGKLKMQALVAVMRKLLHAFHAMFKTHQPFDGSKLFRLSSTCLQEVALAAS

SEQ ID NO: 41869 - protein, 415 aa, unidentified
MKVVFPTCCGVDVHKTFLVATIITTPADSLQPNYQKKRFSTFNSDLNRFADWLLEHNCLDVCMESTGKYWVPVFNVLEKRGIRVVIANPKWVKAVKGNKDDTKDSKWIGDLFRIGLVKSSFIPDLNIRILREFTRYRYKLVSMKSSEKNRFQNAFTVCNVALDSVVSDMFGKSATAITDYLTSDESFDSEHCVSLLQRSLKKKAEQVLESIEGFSIASEQKARIKIIREHYDFLEKMIAKVDTCVSEMVEKHEGEINLLCTIPGIDRNSAITIISEIGTDMRQFGSSKRLCCWAGLTPGNNESAGKKKSVRISRAGVYLKPALVQVAHAAVKDKASPYYALKYERIAKRRGKKRAIIAIARMILTAVYSMFCTGEVWNPVDLYKVDMPEHLKEQQLAKAIKQATRFLEKQGLSVA

SEQ ID NO: 41870 - protein, 413 aa, unidentified
MDVLHPRCCGLDVHKSSISACILLREAGGVQKHQRRFGAMTQELQELAEWLRQFGVSQVAMESSGVYWKPVWNILEGQFTVVLANAQHIKNVPGRKTDQKDAEWIAQLLQYGLLRPSYVPCEIIRDLRDLTRMRASLSQEASRLSSRIQKVLEDANIKLASVATNALGKSGRAMLEDIISGEDDPEHLASLALGHLRVKIPQLRLALEGKIRSHHRFLLRRLLDQIQFVEHEIALLEERLEDIGRQRPELSQAVARWDTIPGIDRVAAWALLAEVGDNMAQFPTAEHLASWAALCPGNHESAGKRLRGATRQGSPWLRRMACQCAWAAARTKNTYLSSQFRRLAARRGKKRAIIAVAHTLIVIGYHLQKNQSNYDDLGGNYFDRIHSDGLKRYLVKRLQQLGHKVTLEPIEAA

SEQ ID NO: 41871 - protein, 335 aa, unidentified
MTYIGIDVSKDTFVVAYSPDKNSKTKTFKNTTRGIHEFIRTISKDEHHCVMEATGNYSALLVYLLSEAGITTSLENPLKVKNFARAMLSTVKTDEIDARLIALYGEKMQPAPYKLRSDAILTLKQKRTVIRQLKKQLIATKNLKGSMEALPFFDAKCRKSVEKTIAFLEKQVKDLEEDLASLAKSEYKKQMDLLTSVKGIGITLAAALIMATGGFTYFDNAKQLTRHLGLSPTYQQSGTSVNFKGHINRNGDSSLRSQLYIAACSSLRCNAECRAFLTVCGLRASLGKSLLLPWLTNSSDRLLPLSFRRNPMSMVIFLQRSNSCISPRCTGIDKI

SEQ ID NO: 41872 - protein, 337 aa, unidentified
MGNITMGLDVGDRFSQLGVVDRDGVVIQEDRIPTTRVALCERLAGPPARVVLEAGTHAGWMSRELTALGHEVLVANSRKLRWLYHNEHKTDRVDATYLARVGRWDPTLLAPIRVRSAGADGALRLVRARASLVRARTRLINHVRGAVKSVGGQLPPCDATSFARRVAAHLPAELHAALEPLLAQIAGLTQTIARYDRLVEHLAAQVYPETARLRQVAGVGALTALAFVLTVDDPRRFGDGRAVGAYFGLCPRRADSGAHRPQLGITKCGDGLVRQLLVQAAHYILGPFGPDCRLRRWGLELARRGGKNAKKRAIIAVARKLAALLYSLWVHDTRYAP

SEQ ID NO: 41873 - protein, 494 aa, unidentified
MKARNNSAVRRSKNKLLRRGQPLQPSAQMPVIHSHAAGIDVGATSHWVCVPEDAVAEGQSSVREFGAFTKDLDELVEWLLKCQVKTVAMESTSVYWIPLFQKLEAAGLEAVLVNARHVRHVPGRKTDCKDCQWLQRLHSYGLLNGSFRPSDDICCLRSLMRHRDNLSKGCGQEVQHMQQALNYMNIHLHHAVSDLNGETGLRILDAILGGEREPKELVKLRDPQISRSTVEEMEAALHGDWREEHLFVLRQSLENYRHLLKQMEVCDEELEKVLAKVVVNPATVVEAERPKNPPAAEPKTKKQKKFKKLKAGTGLKRDLSAELTRICGVDLTRIIGLNVLGVLIVIAEIGVDMSRWRNAKAFCAWLGLCPGNKISGGKVLSSHTVHVVNRVAILLRTVAPAVGRSDTWLGIFHRRMRARLGPAAANTATARKLACMIYHLLKYKEEYIDVDCLIYQEKIRKSRIKKLCQQAEELGFEIYKKQRVGEEIVFEAIN

SEQ ID NO: 41874 - protein, 343 aa, unidentified
MDYFAGLDVSVKDTSVCIVDSTGKIVREVKVASEPDALLAVLRNPAYDFKRIGLEAGPLSQWLFSALAEAELPVICVETRHMRAVLKAQINKTDRNDARGIAQMMRVGLYRPVHVKTLRSQKLRMLLTHRKLLQAKAIAVENDLRATLRNFGLKVGVVGRVKFETRIKELVESFPDLVALVEPLLVVRRVLREQIAILHRRVLAAVRDDEVCRRLMTVPGVGPVVALTYRATVDVPARFRKSKSVGAVFGLTPARDQSGERDRPGAISRCGDEMMRTTLYEAAQVMLLRSAKWSWLKAWAMKIAKHRGMKKAIVALARRLAVIMHRIWTDGSEFRWTRGAAAV

SEQ ID NO: 41875 - protein, 402 aa, unidentified
MNAVGIDVSKGKSMVAIMRPFGEIVSPPFEIKHTTSDINSLVELINSVEGESRIVMEHTGRYYEVLAHQLSKANLFVSAINPKLIKDFDNDSLRKVKSDKADAVKIARYTLDKWQNLKQYNVMDELRNQLKTMNRQFGFYMKHKTAMKNNLIGIIDQTYPSVNTYFDSPARSNGSQKWVDFASTYWHVDCVRKMSKNAFIDHYKNWCKRKKYNFSKSKAEEIYEKAKELVPVLPKDNITKLTIKQAVDQLNSVSTTIESLRTLMNETASKLPEYPVVMAMKGVGTSLGPQLMAEIGDVSRFTHKGAITAFAGVDPGVNESGSYEQKSVPTSKRGSSDLRKTLFQVMDVLIKTHPQDDPVYQFLDKKRAQKKPYYVYMTAGANKFLRIYYGRVKEYLASLPES

SEQ ID NO: 41876 - protein, 356 aa, unidentified
MNIRRVQHFVVDGKEVFVGLEDSKKTWKLAVRSEGMLIHQASMEAKYLVLIRYLRNNFPNCTIHFIYEAGFKGFNLYDRLVDDGIDCIVIPPHVVTEPKVNRVKTDKRDARRLALILENHDFRDVCHVPDRERREDRQISRTLVAIQKDIIRTRNRIRKLLDFHGVEVSFPDRWGRDEFRSLKKLPLSEPLRISLDVLLTQVEELWAHQTVLRDALRQLCHKERYHKAYEIARSLPGIGWFTAIRLVLELGEDLSHFTSGKKIASFVGLTCSEYSSGQTEWKGHITGMGSRFIRAALIENSWAAIRKDPVLLAKFNRIWRASGSKKKAVVAVARMLIVRLRACVILGTPYSLGVVR

SEQ ID NO: 41877 - protein, 358 aa, unidentified
MNRKSGMSAGQVIGTVEGQQVVGLDIAKSVFQLHTVDMGSGEIVNQQLKRAKVLTYFANRAPCLIGIEACGGAHHWARKLTAQGHSVRLIHAKAVRPFVGGNKTDAADARAIWLAIQQPGTKFVGMKTLEQQATLVLHRQRELLMKMKAMQSNALRGLLYEFGATFARGKNALFAEIEAVLEALVGDIPQYVADSLREQVHRVKDLAKDIKAIEARLAQRLRADKNMQRVAQIPGVGLLTATAAIATMGQASAFKSGREFCAWLGLVPRQSGTGGKVKLLEISKRGDTYLRTLLIHGARSVLAHAKEPGPWLEQLKARRPANVVIVAQAAKMARAIWAVTAKQEDYQRGYGSVRPQAA

SEQ ID NO: 41878 - protein, 371 aa, unidentified
MGKHRLAFVAFDSAKNQHAVAVADGGRGADVRYLGEIDNSPDAVRKLVAKLTRQYERLHFCYEAGPTGYGLHRQLTELGHVCDVVAPTMIPKRSGDRVKTNRRDSVALVKLLRAGELRAIWVPDSVHEAVRDLTRARATAMVDLKTKRQQLLSFLLRHGRGFPDGRNWTKTYERWLAKQTFAHPAQQIVFQDQLEAITTAQARLAALEQQLREIVPTWTMAPVVAAYQALRGVSFLVAITFVAEVGDVRRFATPQQLMAFLGLVPSERTTGDTIRRGSITKTGNHRARRVLIEGAWTYRFSARVSETLRTRLKDLPSSVRAIAWKAQVRLCARYRRLIARGKKTPVVTTAIARELSAFLWAIGQQVAPQTG

SEQ ID NO: 41879 - protein, 318 aa, unidentified
MKKAFFCGVDVSKDKIDVCFLTSILSEKAKFETLPNNHELIKVYFDSFKNDEILVVFEATSNYHLALQRALSDLGIRYCVTNPYKSSLFLKHLSTIKTDTSDSYGLAVYARTFKSEIAPDKYNAEYLEIKSYNSTLNLLQKINTQLKNFKSSQKTLNNKIIDDVIANLIKEIAKLQVMLQKLAFDLVKKAIPETEEIIKENKGFGIDLALNLFPQLHFNRDKSEKQFISFIGLSPRIFQSGSSVHKSQKINKMGNSNIRRILFMTALCAIRFNAKFKARYERLLSNGKKKMTAIVAVMCAIVRYLKSLFPFNPEIKAI

SEQ ID NO: 41880 - protein, 368 aa, unidentified
MNSVKFIGMDVHKNSITIAIADQGRRGPVRTYGAINNDLGALDKFCRKMVSTERELNFVYEAGPCGYSIYRHLTAKGFDCMVAAPSLIPKKSGERIKNDRRDAKKLVRLHRAGELTAVYVPDLEDEAMRDLSRAREDAVAATRKAKQQLKAFLLRHHIVFFGRSKWSTAYFNWLSDIAMAHPAQQVALQEYIDAVHENRHRVDRLTEQIRQLVPNWRLAPVAAALQSARGVSLIVAVTVLAEIGDLSRFESPGQLMAYLGLVPSEHSSGDKTKRGGITKTGNKHARKVLIEAAWAYRMSPRVSRLLLKRQQGLSDQIRKTSWKAQLRLCARFRRMAARRKPKPVVVTAIARELSAFLWAIAKQVQPAV

SEQ ID NO: 41881 - protein, 344 aa, unidentified
MMIHFVGLDVSQKMTAICVVDNAGRRLWRGQCPTAPEQIAAMVRRHAGDDSRIGIETGAMTPWLVHELRALGLEVICLDARHARAALKMQINKTDQNDAEGLAQIVRTGWFRSVHVKSFDSHRARALLGARAQLVGMTTRLSNHIRGVLKTFGLLPGAMRGLRFDRKVEVLLEDRSDVAPIVRPMLVAWRQLREQISAFDKAIRVLVRSNSPCRLLMSVPGIGVLSALAYVSTVEDPARFSQSRSVGAHLGLTPRQYQSGDVDRSGRVSKCGDTLARTLLYEAAVVIMTRVKKASELKDWALAIAKRSGIGKARVALARKLSVILHSVWRSGKPFRWTEQAITG

SEQ ID NO: 41882 - protein, 342 aa, unidentified
MYYIGLDVHKKTISFCVKDGAGHVHLEGRIGSTRRELDAWISTLPQPRMIAMEATIFTGWIYDYLLPHADQVKVAHPQMLRAIAAAKKKNDTIDAGKIADCLRCDFLPECHMMPREIRDRRRTLRYRHLLVRQMVQMKNRVSGLLMETGVEHIKSRLHKVGYFHEMLSKNAEIDASIRPLLKLSRETIERCQKTEYALVSSLQRDPLLADRIRRLRTVPGVGPITALTWALEMGDVARFRTIRQAISYCGLCGDERSSADKVMRMPLSKQRNKHIQRVLVEAAKLAPRLSPELAMVHEREKQKGNSNRATLAVARKMVAYLLAVDRQQREFIPAEQRSSRAA

SEQ ID NO: 41883 - protein, 339 aa, unidentified
MEKNFKYFIGVDVSKNTLDYSVVKENKELFSFQSENSDKGIKSLIKELKSKGIKDLNEVLFCAEHTGIYNNPLIYFLKEKGGSIWLESALHIKRSIGMQRGKNDKVDAQRIALFAYKNREDAKVFEAPREIITELKYLSGVRSFHIETIKRCKVHLNEIKRFESKKLAKNYEANCKKSIAAHQSDLEKVEKEIQNLIKSDEQLNQLFTIVKSVDGVGNVIAAEVIISTNEFKNIKDPKKFACYCGVVPFDHLSGTSVRGKPRVSSMANKVLKSLLHMATLSAIQMEGEFKIYFERKVKEGKNKMSVINAIRNKIIHRIFACVRDNRPYQKIYSYKFVNP

SEQ ID NO: 41884 - protein, 343 aa, unidentified
MTNVTIIGIDLAKSVFQVHGIDATGEPVVRRQLRRRSVLPFFKKLPRCLVGMEACATSHHWARELEKLGHDVRMMPPRYVKPYVKRNKNDAADAEAICEAVQRPTMRFVPIKTSAQQSVLMLHRTRHMFVRQRTTLINAIRAHLAEFGIVAGVGRHGVEQLLDLIAKGEDDRIPSAARDCLMALAAQLELVKRQVTEADRRILICHRANKTSKRLEGIPGVGPLIATALVASIPDPHVFRSGRDLSAWIGLVPKQTSTGGKERLGSISKAGNRYLRQLLVIGALSVIKRAKQLGYTRHPWLVRLMERRSTKVAAIALANKIARIAWAMMAHNESYRAPQIAAT

SEQ ID NO: 41885 - protein, 351 aa, unidentified
MTGRAGNPESNIHGEYTMSDDCMYAGIDVSKDSLELVIRSSNQVSYLKSFANTKAGIRKVVSLITKPGLPCRVVVEPTSRYHVQVTLALAALPDCQVMLVNPLRARKFQEANGKRAKTDAIDARSLSKMAQKLEEDFIPYTPPADNIRELQLLGRRLANCVLQRARAKCRLKSYPVKDKVSNPCIASLKREIKFYKKEIARLLAKMQRIVDADAELRECYDLLLGIRGIARQSALQLLAELMALPAGMGPRQWVACAGLDPKPQQSGQHDPPMRISKMGNRYLKQVLFMAAMTTTHWDPQIKAYYDNLYNRKNSKRLAQVVVMRRLLHGFWHVIDRKQPFDASKCFAIPTS

SEQ ID NO: 41886 - protein, 405 aa, unidentified
MPSVIAFDVSMGKSYMVIYNADRVCIFEGEMLHKRSFFERLYNQIKALIQKDAQAPDIVFEATGVYSRQLERFFTEYGFPYCLLNPLESKLQTASMRMHKTDKSDAHRLAQTHFTATRRIKKPQEAYYDQMRALSRYYKELDEELSLIRSRIHTLLQLTFPEMESLFTQKSELFLNILQLFPHPDCVRHLSKTVVRNRLLTNTEKKLAPKTAEKKALQLLEAAQDSYPAVDAEDVRCDQLRVYAKRHLAILRQREALIKQMAELSKERKDYQVLISFPGIGPNTAVRLIGEIGDLTRFDNHKQLNAYAGIDIRRFQSGTLFYKDKINKRGNSYLRKILYFTIQNMIRQRRFGGNHIVDYYDKLKTQPYNKRHKVASIACVNKLLKSLFHLITHDLHYDYQLAAGK

SEQ ID NO: 41887 - protein, 362 aa, unidentified
MDTNGAEHPVERRVVGGVDTHKDLHVAAVVDERDRVLATRCFATTRQGYRQLLAWMRSFGEVQRVGVESTGSYGAGLLRFLQQAGIEVLEVTTPDAHDRRRRGKNDDFDAQSAAHAAFAGTRTVTPRTRDGMVEALRILNACRKTAVAARRVALQMIHNTIVCAPDGLREILRRMTRMQLVRTLAAWRPDLTGYRDVEAAYRISLKSLARRYLELHDEIADLDAMIGAIVEDLAPELVARNSIGRNGAAQLLLTAGDNPERLRSEAGFAALCGVSPVPASSGKTMRHRLNRGGDRAANSALHIIAIGRLRTDARTKAYVTKRIAEGHSKLEAIRCLKRYIAREVFLLIKQRQREINQTRIAA

SEQ ID NO: 41888 - protein, 484 aa, unidentified
MRSSIASLADENWWCRPVTSTHTGAGEPVAGVWRGGLGCHWIVATSTRVCVLAEVPPDRCREAMAAFRMKRRDAMEVMFDRVAGLDVGKETVTVCLRTPGTKGRRHAETRTFKTMSASLRVMRDWLVEAEVSIAAMESTSAYWKAPFYCLEEVMEVWLLNAAHMKAVPGRKSDVRDAEWIAQLLEHGLLRPSFVPPPEIRRLRMLTRYRVQLMGDRRRDIVRLELMLEDASIKLSSVASSLKTVSARAMLTAMINGETDPLVLADLAKGRMRRKIPDLAQALTGHFDANHARLARSMLRRLDLVDQAMAELDAVIVEACQPWAHQIELLQTIPGVGEKVAQVIIAETGGDMSRFPTAAHLAAWAGLAPAMNESAGKQSPAGKRHGNKWLTAMLVEAAGSVGRMHGKNYLAVQHARLMKRRGMGRAQVAVAHSILVSAYWMLKRDEPYHDLGADWHTRRNDQAHTRRLVAQLERLGHTVIINPAA

SEQ ID NO: 41889 - protein, 346 aa, unidentified
MTIVEAARTVTGGIDTHGETHVAAVLDQVGGLLGTESFEANLHGYSALFSWLAGFGKVGKVGVEGTGAYGAGLARFLARAGVEVIEVDRPNRQDRRRTGKSDPIDAVEAARAALSGRAHGHAKSRDGAVEAIRVLVVAKRSARQARVKALTQMRQLTFTAPDQLQCRIKGLSAPQFIAAAQGLRPTRSTDPVTAATKASLSSLAHRIGELEEEIAELDARITPILEAHAPELLGIYGVGIDTAATLLVTAGDNPKRLRSEAAWAHLCGVSPLEASSGKVTRHRLNRGGDRQANRALWIIVISRLASDPATQAYMERRVKEGRSKREIIRILKRYVAREVYRHLPRG

SEQ ID NO: 41890 - protein, 332 aa, unidentified
MCPFKKHFLINKDIKYFGIDISHLVFDVTDSDGNYYQFKNNGAGFKKFTKLLNSNCHCVMEATGYYHYQLAYHLLESGIRVSVENPLAVKRFIQMKLSKIKTDKSDSKLICDYANQVDLKLWQGSSKVEMECLQITRALSVYTKQSTMLKNKLHGEAVLGHPSKVVVTSLKRSLRQLQKEIKDLEDKLLVLVKQTHQDLLTRLKTIPGIGPKTAIMLVVLTGGFDRFTSASELCSYAGLTPVIRQSGSSVKGRPRISKIGNQKLRNLLFMCSFNACKYNKACRDLYERIVAKGKSKKLALIAVCNKLLKQALAIAKSGLIYEDTYRSTLVKN

SEQ ID NO: 41891 - protein, 373 aa, unidentified
MPKYSTAFGMDVHLRSTTVCALDADTGEAVTRRFPGNPWGEIAGWMDGFPGPSLAAYESGYLGFAPQRELAGLGVECVVAAVSKIPRSAADSASKNDRNDAARMAKAILAHDISPVWVPSPEVEGIRDLAGAYDGATARLATAKQRLLAFLARRGFVYGGTTPAGNPRKYWTYDFLRWLDKVRPEDDGGVRALAALRNEVEAAAEARADLLSEYGAAVDASPIAAEVAALQSIKGCAFALAAAFSAEVGDFTRFRSGRQVTAYFGLAPSQRSSGDSVRLGGISGAGNALVRKLAVEGSWCYAAARHQPKLMPRDTGVPLEIRMHGRKGSERLLRRREEMLARGVPAAKANAATAAELVRWLWALGMMCREGAE

SEQ ID NO: 41892 - protein, 353 aa, unidentified
MTPLVIGIDPHSRIHVAAAVDEHGRLVDTCEVGASPTQLGQLLTWIQALAVTKVAVEGSKGYGLPLARLLVAAGHTVVDVSSNLTADERKRSRRRGKDDEGDAVAIARIALRESDLPIMDPAHLDADLKLLVDARDQLVQEEARVRNRLHALLLNMAPGYHDTTGPLNSRPAFARARSLALRARKSDPIRAKLALAAIRRLNTLRDEQADLEKDIHGELERRSTTHLQSIPGVGPLVAAKILGEVRDVRHYPSAAAFAAHAGVAPVPASSGNTQRHRLARGGNRQLNRALFTIAMVQARWHPPAREYLARKRAEGKTPAEARRCLKRHLANVVYRALQADLATVQSAALSPAA

SEQ ID NO: 41893 - protein, 324 aa, unidentified
MLGLDVSKSSIAATLLDNAQRLCWERRVPNSPAGIELLLRETPMEHPWVLEPTGPYSTPIARRAVEAGRRVLLARPREAQAFLRSVQPRAKTDRLDSRGLARYAYAVPLPPYPLKSPALEELDQLLAARQGLAQSLTRLRQQRACLPAAGPALTAAISALQAQERVLDRQIAAQTRTAQVPGVDTLDRVPGIGPVLATAAAACLHAKQFAHPDQFVAYIGLDVRVRQSGKRQGQQALSKRGHAQLRRLFYLAAQANLRTKDPQNPFKLQYARERAKGLSSTAALNAVARKLARVCWSLMRHGTEYQPDRVHRQNHPATPLDKQP

SEQ ID NO: 41894 - protein, 349 aa, unidentified
MNDITTYGLDLAKQVFQVHWVDVRSGEIQRKTLRRAQVSTFFARAPRGVVAMEACGSAHHWARLLQSLGHEVKLIAAQFVRPFVKTNKTDAADAQAIWEAVQRPDMRFVAVKREQQQAVLSLHRLRDQWVKVRTLQANQIRGLLYEFGVVIPLGWRSLLKAATELLTEPTGSAVPVLLREPLLVQLQALRDATTRIVALEKQLENWQRAEPECRRIMAIPGVGPLTATAVIASVADARQFRSARQFAAYLGLVPRQSGTGGRVQLLGISKRGDTYLRTLLVQGARSVLLSQSRRGRSVDPWLGALLQRRPSHVVVVALANKMARTIWALLAQDRTFDAGWVGRRPCATH

SEQ ID NO: 41895 - protein, 337 aa, unidentified
MYYIGLDIHKKTISYCVKDAAGCVHREGKIGSSRRELDAWVRTLPQPRMMAMEATIFTGWIYDYLLPHAEKLKVAHPLMLRAIAAAKKKNDKIDAAKIADCLRCDFLPECHIAPTEIRDRRRVLRYRNLVVKQMAQMKNRVSGLLMETGVSYNKQRLHKVGYFGEMMSTNAEISDAVRPLLNLSRGMIRRSSKLEYDLVNSLERDPLLRERLRRLRTVPGVGSITALTWALEIGDYTRFNSNRQAISYCGLCADEKSSADKVMRMPLSKQRNKHIQRVLVEAAKLAPRLSPELAMIRARELERGNPNRATLAVARKMVCYMLAVERRQQEVVQNAAA

SEQ ID NO: 41896 - protein, 374 aa, unidentified
MEGTTFVGLDAHKDWISVALLLPGREAAIEWRIPNEAGAIKKMLRRVAHEAPREVRFCYEAGPCGYALQRQITTWSEASCMVVAPSLIPGKPGDRIKTDRRDAKKLAILFRAGLLTEVQPPSAEDEAARDLCRAREDAREDLVRGRHRLTKFLLRRGLVFTAGKRAWTKAHRQWLQGMHLEQAWDQVVFADYLHGIEHLEGRLALLADRVGDLSQESRYAVPVALLRCFRGLDTVAATSIVVELHTFHRFPSARKLMAFVGLVPSEHSSGQRRRLGAITKTGNSHVRRLLIEAAWSYRHPPRVGTLAQRRKGQPPRVIALADRAMQRLYRRYVRLTLRGVPSQKAVVALARELVGFLWAALSPLAMASELPQVS

SEQ ID NO: 41897 - protein, 425 aa, unidentified
MKNKFLTTLFVGIDVGSQVNAFHAMSFYGENLLIDEVTNNKPGTDSIIKSLIDCLNANDLKRIVIAFESTSIYSTHVASSFSSDTRLLPYDPHVYCLNPKTTASYRKTFVDMDVTDGLDAYLIADFARCGKITSKPWRGAQFLALQRLTRHRLHLIRSVTREKTYMTTNIYLKFSELATMEKDEHPFSNIYGATSTAVLTEFFSLDEIAYSSMEDLIAFVSEKSRNRFSDPHQTAKLLKKAARDSYRLDKVLYEPLNVALASSFNIMRTFEQEIKVIDKAIKKCIKGLNNTEYQSLISIPGIGPVLTSGILAEIGTITAFDSHNALAKFAGLTWRTNQSGKFKSDETRMTKTGNKYLRYYLIEAANSVKNHTSEYKQYYYKKYNEATTHKHKRALALTSRKLVRLIFSLLTKNQIYSSSKVGEIK

SEQ ID NO: 41898 - protein, 452 aa, unidentified
MAKKGKRRCDTLPVLHPDAAGIDVGASELYVAVSADRDPQPVRSFPTFTRDLHALADWLVHCGIHSVAMESTSVYWIPVYQILEARGLEVYLVNAQHVKNVPARKTDVSDCQWLQYLHSVGLLRASFRPPGFICAMRSLWRHRGSLIQMASEHVLHMQKALDQMNLQIHRVLNDITGVSGLRILDAILAGERNPLTLARLCHGGVKSSENVIAKSLEGDYRPEHLFALRQSLAAFRYYQQLVLEADREIQLQLAEMKTAATAQPTTPAQTKINRHYARHYEPRTFDLRGELYRVFGVDLTNVPGISALTAQTILCEIGTDVSRFRNASAFASWLGLCPEKKVSGGKVLFTKSRRVRSRVATALRMCAQSLHHAKDYLGEFFRRITRKLGRPQAITATAHKLARIIFHLLTTKEPYNESVFHKTEEETIRRAQYRLRKQAALLGFQVIPAENR

SEQ ID NO: 41899 - protein, 399 aa, unidentified
MSVIYVGIDVGKRKHEASFIDETGKQLGSSLVFDNSPQGVEKLLRRVASLGASEVVYGLEATGHYWLPLYAFLTATGCTVKVINPIQSDSLRNLYIRVTKNDRKDSFLVAEVLRFGRFTETKIPDEPLVQLRELSRLRVEFMQTVGDIKRRILGILDRIFPEFPGCFGNAFGQAAIQVLKTYSDPEQLANADLSELAELLKKYSNGRLSLDKARQLKERAANSFGVRYGLDAFTLELRLLLEQLEFIMGQVKQLDKAITNLMQEHQLILSVPGVGPVLGAAILGEIGDIKRFENAKKLRAYAGLDATVYQSGTFDGSRARLSKRGSPYLRRALWIAAGTARLHDPILKSYYERLIARGKHPKQAQAAVASKLCSIIFAVLSKNQPYDPDYLNRNLKDIP

SEQ ID NO: 41900 - protein, 350 aa, unidentified
MKKNERAKLAVQDFAGIDVSAHELDVAMRRGIDDQFTIATFSNNAVGHKALLRFWLHGKARVRVCVEASGNYTLDLALTLQAHPEVEISVINPRRARRFAESLGKRSKTDRVDAQVLCEYAWRMPWVPWQPPSAVALHLRAITRAIADLSSIHTQQNNRAHAAAASQALPALVVKEMQHHQKYLEQRMTRLRRQALCLIAEDPELDRRFRLMLTATGIGETSALQILGELAVLPDTLDARQWVAFSGLDPRLFKSGKSVEKRPRISRGGSRHLRRALYMPALVALRRDPYLRRFYQNLLVRGKARLQAVVAVMRKLLHALFAMFRTNQPYDGSKLCAVSPTAMPSLFALD

SEQ ID NO: 41901 - protein, 464 aa, unidentified
MTDKKPWRNRKERKEWGRRLQSEDPGLEVVHAHAAGIDVGNGMHYVAVRPDRDPQPVRRFECFTADLHCLAEWLERCGVKTVAMQSTGVYWIPIYEILEERGMQVHLVNARHTKNLPGRKSDVQESQWLLKLHTYGLLNNSFQPPSEIRILRTYWRQRAEHVHGAATCVQRMQKALTQMNVQLANVISDVSGLTGQAIIRSIVAGEHDPRKLAELSDPRIHASREEVAKSLEGHWRPELLFVLQQEVVMFDTYQQRIVECDQQLQKHLTSFADTIPLLPTAEEPKRKKSKPAKNAPRFELRSELQRITGVDLTRIDGIDVMVAQTLISEVGLEMSRWKTEAHFSSWLGLCPDNRTSGDKVLARGTRRVVNRAATALRMAAVTLMRSRTYLGAQYRRLRTKLGAPKAITAMAHRLARLVYRMLKYGQHYVDKGAEYYEHRYRRQQIEFLRKKAAKLGLQITLAQT

SEQ ID NO: 41902 - protein, 331 aa, unidentified
MNFYQGQHAFYCGVDLHARTLYLCIFSQAGDKLLHREVAAEPVTFLEAIAPYRAGLVVAAECMFAWYWLADLCAQENIPFVLGHALYMKAIHGGKSKNDRIDSEKIATLLRGGTLPVAYVYPKGLRETRDLLRRRMHLVHRRAEAITHVVNTNSQYNLPPFGKKLIYAKNREALKIAQRFADPSVRKNVEADLAVIDRYDEVIAELELYLERTVKVEDGQTYYLLRTIPGVGKILALVLLYEIHDIRRFADVGNFLSYARLIRPDHESAGKKCGFGQKKIGNAHLRWALGEAVALVVRDSDQAKKWLARRQKKSGKGKAMGILAAKLGRAI

SEQ ID NO: 41903 - protein, 372 aa, unidentified
MNNTTVYVGMDVHKESFTLADYTIETEKSSHNRRTSADYKEVLKFLEYLRTIYGNDTNFICGYEAGCLGYTLFHQLTDHNINCIILAPTTMLEKRSGKRIKTDKRDAELIAKCLAQHNYSPVHIPTAEDEQTKEFLRMRDDHKLALKKIKQQILSFCLRHNYRYDGKTHWTAAHLKWLKNLNPKALYKEILDEYLLTYTTLSDKIERLDKRIEELASKDEYRESVKKLCCFIGVQTHTALSVLVEVGDFKRFASAEKFASYLGLVPGEDSSGDDKTRLGITKAGNGHVRKLLTEASQCYSRGQVGHKSKALKAKQVGNTPQVIAYADKANERLRRKFYKMVLGKSKSHNVAKTAIARELACFMWGMMTDNIA

SEQ ID NO: 41904 - protein, 386 aa, unidentified
MKNQIKPIHDRNTSTPSPGQSNPAVAAAPAPPAPVRHVFMLGLDVDLLNVVTAIQCDRGAIALAQKFSRAQLLAWVQKQTAAGHEVHTVYEACGFGYTLHHALVAAGAHSLVTTPMRLSPERRRKNDRLDARALCVRLSRHREGHAHELKPIRIPSAAEQQRRELGRQREFFKRERGRLENHGRALRIEFEHQTLPAGWAGPRKWKQIAPQCSEFVRGQLEPVVLQIRACQARMQELTARIQATVAQEKIPTGLGALTVALLEGEVCDWKRFRHRKAIGSYTGCCPSEHSTGGVQRFGHIDRHGNKHVRVLLVEAVWRLLRWQPDWHARVKYLQKLKHGASLKKKIAVALARQLAIDLWRWRTGRCTAAQLGWTVESAKDEAGTAQ

SEQ ID NO: 41905 - protein, 344 aa, unidentified
MNITTAGVDLAKTLFQVHGVDQRGKAVVCKRLRRTEFIKFFVNRPPCLIGMEACASAHFWARRLIELGHSVRLMAPQFVKPYVKTNKNDARDAEAICEAVARPNMRFVAIKNVEQQALLGLHRARQGFVVARTAQSNQIRGLLAEFGFVFPRGISYLERQVPRILEDGDNGLTGTSRELFARLFGHFRELDRHAQELEGQIKAWHRQNTESRRLEEIPGIGPLTASALVASVSDAKAFKNGRQFAAWLGLVPRQDSSGGKERLLGISKRGDTYLRTLLIHGARSVLLHSKRRTDQATGWLADLVARRNPNIAAVALANKNARVVWALLAHDRRYQHKYAQGQAA

SEQ ID NO: 41906 - protein, 365 aa, unidentified
MTTRQCSTSSSTDPPVRREVVLGVDTHGEVHVAAVISPLGKILGTESFPATAAGYRQLVVWARKRGTVRRAGVEGTGTFGAGLSRYLVTQQIQVFEVNRPDRSARRLLGKSDPLDAQAAARAVLSGRARAQAKSGDGPVHSARIYKLAKDSAVKARTQAINQLKAVLVIADPALRERLSSLGNAELFRTCARLGPPDGGGDEDAVAQATHMTLRMLAERIEQLTGQINELNQRLTRLVEHHAPQLLVPVGIGPDSAVTLLITMGDNPERLSTEASFAALCGVSPVEYSSGRRSTRRLNYGGDRQANAALHRIVFTRLRHDHRTQAYYERRTQEGKTRREIIRCLKRYAAREVFNLVRTVSSVPLL

SEQ ID NO: 41907 - protein, 415 aa, unidentified
MALKIVYKICCGIDVHKTFVVACIASTNDKGITSYESHRFSTYTSGLKTLLQWLLDRNCKDVCMESTGKYWIPVYNILESDCSIVLAHPKYVKAIRGKKTDKKDAKWIADLFKHDLVAGSFMPPSDIRQLRDLMRYRFKLTCFKSSEKNRLQNCLTVSNIQLGNVVSDTFGKSAQAILDKLLENPADTSFDLEPLVYKSLKKKLPELRDAIDGFITPEQAGKLKIIKDHYDNLESRKAELEELILALAAPYQQELTILQTAPGISSPFTAIGIISEIGTNMEAFPSAKHLCSWAGLTPTNNESAGKKKSVRVSKAGCYIKPLLVQCANAVVKSTKHPEMRNRYLRLKKRRGHKKAIIAIARMLLTALYHMLKNGENYNAELYQKSDLLPVDREITVEQALMIARNQGYKIKSATA

SEQ ID NO: 41908 - protein, 350 aa, unidentified
MIHVGMDLHPKSSYVRAITDEGELVNGRRINHSDIDKLWDYLGQFGKEEKRVVFEATSNARWMYRLLKEDTTINPIAVTPHKVRIIAETVAKTDKIDAKVLANLSKMDALPRAWIPDEEVEDLRELTRHRADLVSQRTRAKNRVNGILIRRGIIRPYGDIFGKLGREWIDEIELPMAMRLQVKHWLDIINSCDRKIASVETKLYKHLAKKPRWSSDIKMLETMPGWGKLTALTILAELGDYRRFKRRSSISCFVGLVPTSKRSDRSIKYGKITKRGSIFLRRILIEVSIHGARKVPRYKRLFLRLKKAKGTNIAKTAVARQMLEDGWTMLVKREPFRSISVQAGNLARAG

SEQ ID NO: 41909 - protein, 428 aa, unidentified
MNYNQNEKIAQITSQTLIIGVDIAKFKHVARAQDFRGLEFGAPCHFENTQTHFEMFLDWIKQLMNENEMEKVIIGMEPTGHYWLNLAHCLKEKEIKFVVVNPMHVKKSKELDDNSPTKNDVKDAKVIAQLVKDGRYAEPNIPQGVYAELRVARKIRDLLSVDLQVLQGQIHNWLDRYFPEFLTVFKDWEAKAALQLLKLNVLPHELEHISNQEILIHLRKAVKRAVGLRKIHELKRAAKDSIGIREGSKMAKLELRTLLEKYELIIERFEELDSDIEELLEHIPGVPQMLAITGIGKETVAGFYAEVGDLANYSHPRQIIKLAGLNLKENTSGKHKGLTKITKRGRKALRALLFRVAMPLVAKNAAFKALHHYYTTRKSNPLKKMQSIIAICNKLIRILFAIGKKQCEFSEERMLRDIPHLAPIQNAA

SEQ ID NO: 41910 - protein, 349 aa, unidentified
MSRKSAPPTVSTIGIDLGKNSFHLVGLDQRGAIVWQLKCSRAQLERRLANIPRCLIGMEACSGAHYIARQLAALGHDVRLMPAQYVKPFLKGHKNDYRDAEAIAEAVQRPTMHFVAIKTPEQMDLLALHRVRSRLVGQRTGVTNQIRGFLMERGIIVRQGVVPLRRALPDILSLNTGALSPRIVNLIAELVQDWRRLDERIAAVSADIESLVEQDEACQRVMTVPGVGPIISSAVVAAIGNGAGFTQGRDFGAWLGLVPKQESTGDRTILGKISKRGNKYLRTLFVQAAHVVLARRPNAAMRGLWPWIEQASRRLHRNMLAIALANKLARIAWAVLARGRSYQPRIVAI

SEQ ID NO: 41911 - protein, 386 aa, unidentified
MQKLNDLSRSLTALEPNGTLIAVIEMSLSSWRVAGIVPGVERQPLKKLAVDESALLKLLHRWREEAEKAGRRIERIAVAFEAGRDGFWLARWLKARGIEAYVIHASSVAVSREHRRAKTDRLDTELLKRSFLGWLRGERDHCKMVEIPTMQDEDAKRPNREHDSLIGERSRIVNRMKAALVRLGIRGFNPKLKRATTRLDGLHTPEGEPIPPNALAELRRDMERRRLVNNQIRQIEEERLERIEQAPCDGAHVMVRLLARVMGVGIETADMLVHEVLSRNMRDRRAVARYAGLTGSPDESGRKRREKGLARSGNARVRRGMIQLAWRFLLHQKNSALTKWFRSRTESARGTRKPMIVALARKLLIALWRLMREGIVPDGVVLRPAQ

SEQ ID NO: 41912 - protein, 317 aa, unidentified
MTKIICGVDVSSTSLDAFVGPSGPACSFRNTAEGIAELAAFCRQQSVELVALEASGGYEKQAFALLWAGGVPVALLNPRAMRDFAKGMGLLEKTDRIDARVIAWFAAVKGSAPSFPASAQQQRLKALVTRLRQLTELQTAQRNQRLLVSEATVLESIADLLKVVASQIRMLEGEITALLASDPLWQRLDQALRSIKGVADRTVARVMAEMPEIGTLSNKAVSKLAGLAPLAHDSGKREGRRPVRGGRRNVRAILFVVAGVVRRHDPDFAAFHQRLSAAGKPRKVIRIALAHKLLVRLNARARDARKAFAVSGVCQSA

SEQ ID NO: 41913 - protein, 364 aa, unidentified
MERERTSVGLDVHARSVVACGIDDDTGEMFRARLVPQPEAILGWLSELPGPVAVVYEAGPTGFGLARYLTGQGVRCVVAAPSKLQRPSGDRVKTDAKDAPHLARLLRLGEVTPVAVPTVAQEAARDLVRVREDVRGDLMPARHRVSKLLLRQGIVYAGGTAWTAAHHDWLGRQSFDQPALAAAYDSAVETVLLTADRRDRLDKAIVKLAEDPAWSPMVSRLCCLRGVSTLTGFGLTVEVGDWSRFTGSSIGAFLGLVPTEHSSGASRSQGSITKTGNTHARRLLVEAAWHHKRPYRPSKALRTRWDQAPAAARARGHAGNQRLHQRWQAFDGRNKRPVVANVAVARELAGWCWSLAMLEDTTAA

SEQ ID NO: 41914 - protein, 315 aa, unidentified
MRSTITQSVGVDISKDALDVAVHPAGESFRIPNDPQGHRALIKKLKGFDIARIVFEATGAYHRLFQHALDAAGLPWVKVNPRQARRFAQAAGKLAKTDRCDALILARMGAALGLEPSAPLSQTVEAMKELVNARNALVKDRVAALNRQAITVSPLIKRQLAQRLRQVDSQIEAINKRLKSLRGADPDLGRRFDILVSIPGVGETTANALMAETPELGRLGHAQAASLAGLAPIAKDSGQAHGKRSICGGRPRARQALYMPALNAIRFNPQFKAKYQAMVKAGKPAKVAIVAIMRKLLILANALIRDQRKWSPPSP

SEQ ID NO: 41915 - protein, 424 aa, unidentified
MKITQTAEKIKLNLAMDISVDVHKDVLNFFFETKGREYADECQNRTSVIEKKLKAYHEIAVEHGIKTLRIICEPTGEYQNKLFRTARRMGFLTCFVNAESVAKFRVVETNDNGKTDTKDPRVIRTLGQLNKTIKHRILDEDYLALRKLNKVLDEVDEVKKGIRCRISKLLVELFCDYSFKKDFLYTPGGMALVEKFGCNPYRIVKAGYKRFSSMKKAAPGIRDKTLQRLWDDAQSSVLNEQPEEYIEIIEAQLNQLMEDYRRHTNRRETVIGKMIEVLNRLRERDQNIPQATEGVINDKHIARLLAETGPLSDFANWRMVMRYAGLNIRMRQSGKYSGQNKITKKGRPLLRKVVQQIVLPLVRQNWLYGTYYHRKKEIEKMPGNKAMTCVARHFLKKFYGWYKSGAAFSQQRFFACETQYRKAA

SEQ ID NO: 41916 - protein, 420 aa, unidentified
MGRLKIVYPVCCGMDVHRDFLIACIAATNAQGVTEYQSRRFSTYTGSLRELRDWLLANDCKDVCMESTGKYWFPVHNILEESCHVVVSHPKFVKAIKGKKTDKKDAQWIADLFKHDLVRGSFIPPKDIRQLRDLCRYWVKLSSYMTGEKNRAQNCLTVSNFKLDDVFSNVFGKSASAITTQLLEHPGEQFDVAPFVDGRCKTPIVQIQEAVDGIFTYEQAEKLKIIRGHMDSLERHKAELESLILEIAQNYLPQIELLLTVPGIHDAFTAIRILAEIGADMTVFDTSKHLCSWAGLTPQNAESAGKKKTTRIGKSGAYLKPLLIQVALAASRGEKHPEIYGKKQALQKRRGKKKAIVAIARRLLTAIYHILSKNEPYNPAAYIQEDKNPMARQISQEKAFEMLARMGFIVSNPSPLSSSG

SEQ ID NO: 41917 - protein, 367 aa, unidentified
MEQVTTIGLDLAKRVFQVHCVDAAGAVVMRRALRRRQVMSFFAKLPPCLVGMEACATSHYWGRELGRLGHDVRLIAPAYTKAYVRRNKNDAADAEAICEAVSRPSMRFVAVKSEAQQAAAGLHKVRQLLVTQRPMLINTLRGLMAEFGIVVAEGPSHVGELLAILVDLSDGRIPAPLRDGLIVLGDALRGLEARIEPVERMILLWGRGNASCRHLITIPGYGPILSSAMAAFVTDPAAFKSGRHFAASLGLAPRQMGTGGEVWLGPISKRGNGYLRRLLVNGAMSVLNTKRAKEDPWLARLLATKERKVVACALANKMARIGWAVMVRQEPFRRAQPSAPDLPELGAVLAAVKTAGAPPPAVAFGQS

SEQ ID NO: 41918 - protein, 313 aa, unidentified
MEEIWIGIDVSKARLDVAIGEAGEIWSADNDDLGIARTVERCSQLHPRLVVVESTGGLESRLVSELYLAKVPVARVNPGRVREFAKAAGLLAKTDKLDARLLARFGQAVKPAPTCLPSEEEQLLSAMVTRRRQLIDMRTAETNRLPTAHVSMQPNIEKLLTWLDEQISTLEQKINAFIQSHPDFKAKDDLLRSVPGIGPVTAAILLSDLPELGWLDRKRIAALVGVAPFNNDSGFHKGKRRVKGGRPNVRTVLYMATVSASRFNPVIRSFYEQLLKRGKLKKVALVACMRKLLTILNAILREHAPWCLSTTAS

SEQ ID NO: 41919 - protein, 351 aa, unidentified
MNEITTVGVDLAKEVIAVGAADRSGKTVFTRVFRRAAFAAWAVQLPPCVFGLEACGAAHHWARWLTSHGHTPRLMAAKNDRNDAEAVLTAVRQPNMRFVAGKSVEQQACLSWHRLRQGWSEERTALLNRLRGLLGEFGVWRGRSAEVLTRALPVLEQDEALPLMVRRLLTEARPHLARLDEAIARCEVEIKSHVKGNAVAQRLTAITGVGALTAAAVLATVSDARDFKNGRQFAAWQGLVPRQDSSGGHTRLGHITKRGDTYLRGLLTQGARSALQAALTKEPLRRTRLQAWIVQLHARVGYHKTLVAIANKHARMIWAILAKGEAYDPDAWRRWTRTAPSTPPAMCGVTA

SEQ ID NO: 41920 - protein, 325 aa, unidentified
MQGKEASEQETKAKSNVGIDVSKCWLDVHVLPTDERRRVANSCAGIRQLKRWLLRLDIALVVIEATGKWHRHVHRSLVASAIPVAVVDPYRVRMFAKAQGVLAKTDRLDARMLALFAAMMDPSVRAPAPQDMAELAELVTARASAVEAQAALKNQLCTAESKFLKRQLGRRIVRAAKDIAALDGEILQRIQANEALARRYAILTSIPSFGFAVAATLIACLTEIGSLTAKQIAMLAGLAPIADQSGEREGVRVIWGGRPAVRRILYLAALSAASANADMKVFYKRIRASGKPAKVALIAVARLAVLANTLIHEDRLWQHRAPKYA

SEQ ID NO: 41921 - protein, 452 aa, unidentified
MEREEKRLEQFRRLGKEIRGAQEHLVVGLDISKDIHNGLVRTVGGKIHRRLTFHNTREGFENLLLAVEAVKVQHGLSEVVFGMEPTANYHKPLGEFLINRDQQVVLVSPEAAKQNRPLLDGRWNKHDGKDCANVADLICQGKCLYYEYPSVELRDLRSLLSLNRKLKKLEQGLRLRIRNHLVAQYFPEMDQYCHWGATEGLALVRWCLDPAVMAALSDEELTQRLGSLGRTIAQRKRLSALKDQASSSIGCQFGSSAEFEGRSVVELLKEVRQAMLQTQDQIEQVCQKFQEYSCLLSIPGFGPTLSAMVLGAIGNPWRFQNGAQVLKMVGLDLSASQSGKSQGSPIVSKKGKAEIRYALYQAAMVASTRDKHFVAYFTDQLRGREKEKGIKTKKRVKLAAKMLMIAWTLMKKQERFDPKYLCAQTEPILTRKTTTSANGGIPKVQPGADRGL

SEQ ID NO: 41922 - protein, 355 aa, unidentified
MNSKKYIGMDVHKESISIAVMNDAGKIVMECVIETKASVILQFIDGLRGDLQVTFEEGTWAAWLYDLLKPHVTELVVCDPRKNASMREGNQSDKIDARRLAELLRLNHLSPVYHGEHGLRSLKELVRSYLTITKDLGRVMSRVKAIYRSWAIPCSGKQVYASRHRAEWLAKITEPGVRRRAEFYYQQLDALRALRQQVRRELLAEGKKHPAWKLLCQIPSIGPIRAAVLLGILQTPHRFRTKRQLWTYSGLGIETQSSADHRRVDGQLERAKKQVSIRGLNRNCNHDLKNLFKGAAIVAASKPGPFQEFYTALLTKGIRPEMARLTLARKIATIVLIVWKRGASFDAQHLKPQTA

SEQ ID NO: 41923 - protein, 403 aa, unidentified
MAMVFIGVDPHKLSATIEVVDDRETVLATGRFGTDKTGYAAMRKHVASYRQRTWAVEGSNGAGRPLAQRLLADGERVVDVPAKLSARARLFDTGHNRKTDAHDAHAVAVVSVRTAGLRVLSFDEGLEAMRMLADHRAELAQHRVQTINRLHRLLSELTPGMSKKDLTALQAKAILASVRPRDLAGRTRRRLAADLLADLVAVEKRTKASTKELKAMVQASGSRLMELPGVGPVVAARILADVGDVARFADRNRFASWTGTAPLDASSGEQVRHRLSRAGNRKVNHMLHIAAASQIRLDIPGRAYYRRKLAAGKTPMEAMRCLKRRISNAVYRQLVADARVIRPPMVNAGPGGHCGASQESSAAGSNPLTDTSDQPLPGPATPTLRPRTASRKITTHKTFEPAH

SEQ ID NO: 41924 - protein, 369 aa, unidentified
MAERTTRYLGLDVHKATIAVAVAEDSGAPVLFGTIVNEPKAVRKMVSRLGRDARLVAAYEAGPTGYDLHRQLVELHIEAIVVAPSLTPTRPGDRVKTDNRDALSLARLLRSGDLTSVWVPDREHEALRDLVRVREDAKAALLRARHHLSKFLLRQGIHAPRGGSWGQRHHQWLNQLTLPILAHQLVFADYLGAERAAEERVHRLERAIRDSIEQSPLLPLVAALQCLRGIAFLSAAILAVEVGDFRRFSSAPQFMAYSGLVPSEHSSGASRRRGHITHTGNAQLRHVLVQAAHNARFRPSREGAIRQRIEGLPPDLVHLSYSAQQRLHHRYWHLQRRLGTAKAVTAVARELAGFVWAVGHRMTEVPIAA

SEQ ID NO: 41925 - protein, 355 aa, unidentified
MDTIYIGVDFHARQQTLCYLTTKDGEVRTHELKHQDKTEVRAFYAQFSGRVVIGLEASGYSPWFEQLLEELGHEVWLGDATEIRRRARWRQKNDRRDAELILDLMAHDEFPRLHRPCPQSREILRMLRYRQKLIKIRTMGKNSLQALALQSGLAKRSQLFTKAGQQELRTATMSPVMQWQRDQWFQLLEPLNERLLETMLWLKLQTKDDPRISRLRTHPGIGLLTSLCVVHTLWPVSRFRNQRKVAAYAGFDPMERSSAERKHFLGISKAGSRVLRYLLVEAAHTAVKKDDDLKRFYQRLVERRGRPKAKVAAARKLLIRSYIMLRDEIDYAEFRRRAVAARLARQSTRPLVPEA

SEQ ID NO: 41926 - protein, 351 aa, unidentified
MIVIGIDPHKRTHTAAAVEQVTGELVDELTRPAREQGHGELVAWACSLADQRLWALEDCRHVSGQLERFLLARGERVVRVPPKLMAGMRRSARSRGKSDAIDALAVARAALREPSLPAAQLEGRSREIRLLCDHRDDLVGERTRIQQRLRWHLHELCPELELPAGALDRQVWLQRVARRLARLEQTTQVRIGRELVRRISELSRRANELERELEALVRSEAPSLLELIGCGTLTAAKLVGETAGASRFASDARLAMHAGVAPLDASSGDQRRHRLNRSGNRQLNCALHRLAVNQGRWHPGAAAYLERKQAEGKSRREALRCLKRHLARVVYKLLVDVNQPTAAPPAAFALT

SEQ ID NO: 41927 - protein, 384 aa, unidentified
MSAIIGIDISQNSSSYHLLDAGGIKETSGSFSMNRSGFESLLQRVSHVQDPRFFMESTGRYHITLAHFLLQEGHRAVIVNPVLIKQFSKANTLRKTKTDKIDAALIARYAKQAQEQISENTRTMDDRRLSVARRREQVAEQVATVKTQLKADLTVAWPEVLAKNVFTQGMLRLLSVYPCAQAIEEATDEQLALALKTPRGRGLSLSIKDLRALASSSIGIPSYGPLVKDSAQSLLFLQQKLDELTKTLVALVRQTQNLEMDIITSIPGIGEITAAHFLAEIESIDRFERYQNLIAFCGTDPGIYESGSILKKGRITKRGNPSLRKYLFLMASGVIRCNPYFKAFYDKKRDENFPHRKAMVALMNKLIKTLFAMLKKKEMFCIPT

SEQ ID NO: 41928 - protein, 429 aa, unidentified
MNYNTQNAKIASITEKTLIIGIDVGSETHYARAFSWRNYEYSKKPFAFSNDEIGFAAFKEWVNDIAEKHGMEVIIPGMEPTGHYWLNLGAYLQEQGMKPVHVNPHHVKKSKELDDNNPSKNDRKDPKTIASLVNEGRFSYPYIPTGIYAEIRNLSNLRIQTQEEITRIKNRMARWFSIYFPEIKDVYRNPDAVSGLMVIKQAPLPCDIRELGVEGVNKIWRDARLKGAGIKRATTLVTAAEHSIGNTEAPRSARKEIRNLLNDYEIYKNRMDELMEEIEETLSEIPYIDKLMEINGIGIKTVSCFIAEVGDIGRFDNPKQVQKLAGYAIVANSSGKHNGESRISHRGRKRLRYALYEAAISVIGKNKEFKEIHSYYRTREKNPLKKMQSVIAVACKLIRIFYTILTKGVDYDGQKMLNDIVRPEIQPAA

SEQ ID NO: 41929 - protein, 431 aa, unidentified
MLKINPLSTLYVGIDVSSKSNYVCALDFYKNKYINSSFANNQPGAEELALKILECLKEHPDITTIVAALESTSVYSIHIANYLSSCEELMRFKPYVFVLNPKCTANYKKSYIGLGKSDPIDAFVIADYARAGNIESEPWRGSQFLALKRLTRHRLHLVECMTREKTYLVSNLYLKFSELQMLEGDDQPFCDIYGATSSSVLMEYFSPEEILDSSEEDLIAFLAKKSRNRIKDISKTADLLKKAARDSYRLDKALYEPLNVSIASSFNCIETFKREIKVIDNAIEKEIKGLNPNTFIILQSIDGIGPVFAGGIIAEIGDITAFHSSDALAKYAGLTWKSNQSGDFDGEDTPMIKAGNRYLRYYLGEAANSMRKHNVEYGTYYRKKYNEVPKHQHKRALALTSRKFVRLVYGLLARNQLYSGVSLDTSIKDSN

SEQ ID NO: 41930 - protein, 343 aa, unidentified
MYYIGLDVHKKTISYCVKDAAGKIHQEGKIGSTRRELDAWIKTLPQPRMMAMEATIFTGWIYDHLLPHAEKVKVAHPLMLRAIAAAKRKNDKIDAGKIADCLRCDFLPECYMTSTEIRDRRRTLRYRGLLVKQMVQMKNRISGLLMETGVSYNKQRLHKVGYFAELMSGNAEIDDSIRPLLKLSRETINRSQKLDYALVSSLERDPLLAERLTRLRTVPGVGPITALTWVLEIGDVARFQSIKQAISYCGLCGAEKSSADKVMRTPISKQRNKHIQQVLVEAAKLAPRQSHELALIYEKEKQRGNRNRATLAVARKMVAWMVAVERRKQDFVPAEEFGGTVAA

SEQ ID NO: 41931 - protein, 346 aa, unidentified
MIIVGCDFHPAWQQIAVFDSETGEITEHKQIHGNGEAEQFYRRLPIASRIGIEACGNSQWFVDLLQRLGHEVWIGDAAQIRASYVRKQKTDRRDAAHILRLLIEGRFPRLWTPSAEERDLRQLLVHRHKLVAIRTRVKGGLQHLALNRGLQKKSKLWTAAGQKALRELPLDTWAACRREDLLGLLASLDKQISKLDAAVERAAEEHPQARLLMTQPGVGPITSLAFVLTLGDVSRFQRGKQVASYLGLIPRERSSGGKQRLGAINKQGNSLMRTLLVESAQSVTRLDPGFRKQYLHRCHRMAKGVAKVAAARRLAVRLFWMLRTNTEYPEIVRIESSPTLAVVSES

SEQ ID NO: 41932 - protein, 392 aa, unidentified
MASASVGGGRPNKIAMPCRARSGSLIVQRAGKRAHPTPSSTETMMRYYQGRHPFYCGVDLHARKMYVSVVDEAGTLVQQRNLDAGPERFLSLIRPYRTGLVVGCECMFAWYWLADLCRDEGLDFVLGHALYMKAIHGDKSKNDRIDSEKIARLLRGGMFPPAYVYPREMRATRDLLRRRSHLVRMRTDAIAHVVNTTSQYNLPAFDKKLRNAANREGVAEQFPDPSVRRMIESDLSLCDHLDEQIRTLELDLVRSARVDDPQAYQRLQTIPGVGKVLALVLLYELHDVGRFADVRNFVSYCRLVRPKHESNGKTTSAAKKKKIGSAPLRWALGEAACLMLREVPEAKRLVARLEKKHGKAKALAILAAKIARAVYWMLKRKEAFDVTKCFKP

SEQ ID NO: 41933 - protein, 413 aa, unidentified
MLLVQVFCGIDWAEDHYDMALVDQAGVVLTERRIDDDASGYQLLLALLGEHGDDQCEPIPVAIETPRGLVVACLRRTGRQVYAINPLSVARYRERHSVARTKSDRVDAQLLANILRTDRAAHRPLPADSELAQAIAVLAHAQQDAVWNRQQVANQLRSLLHEYYPAFVEAFKDRRPGGLAHPDACAVLAVAPTPTQAVRLTRPQLSAALRRAGRQRGIAAATVRRQAIFRRTSLRQLPMVEQAMGCQALALLKQLEAAGQAADDLAEGTRLVFQQHPQMAIFTSFPGLGELPAARLLAEIGDDSTRFADARGLKAYAGAAPVTRASGKKLIVLHSKVKNQRLAAVGYLWTFAALRLSTGARAHYDRRRVAGDRHTAAQRHLFNRFLGCLYFCLQTGQTYAEAQAFPVAQPIAA

SEQ ID NO: 41934 - protein, 346 aa, unidentified
MMLIGCDFHPSWQQVSWLDVETGETGEQKLVHAGGEAKQFYEQLAAPVLIGMEATGNSQWFIELVEDLGHEIWIGDAAQIRASYVRKQKTDKRDAAHILKLLVEGRFPRLWTPDREQRDLRQLVLHRHKLVLIRSRVKNELQHLSLNKGMQRKRRLWSQAGQQLLRELPLKKWAACRREDLLGLLTMLDEQIGKLDGAVEHAAEENPQSKLLMTQPGVGPNTALAFVLTLGDVGRFPRGKQVASYLGLIPREESSGGRQKLGVITKQGNRMLRMLLVEAAQVAVQHDPGLRKQYRHRCHQKPKAVAKVAVARKLAVRLYWMLRTNVAYPEIVRIESSSGLPLVGAS

SEQ ID NO: 41935 - protein, 339 aa, unidentified
MKQVRTIGLDLAKKVFPVHGVDAAGTVVVRRALRRRQVLVFLAKLPRCLVGMEAGATAHNWARELIKLGHDVRLIPPAYAKAYVRRGKNDAADAAAICAAVSRPALRFVAVKTAAQQAAAGLHKLRALLIKQRTLVINQRRGLMAAFGIVAAKGPGHVGALAAVLADPAAAPVPAPLGQALVPMAELWRDLERRIAALDRQILAWGRTNATLGHLLTSPGFGPLLASARAAIVGQPEACRRARDFAASLGLVPRQDGTGGKVKLGPISKRGNGDLRTLLVNGAMAVLASRRARRDPWLGRLLATKARKVAACALANKMARIAWAVMMRQEDFRARPQAA

SEQ ID NO: 41936 - protein, 344 aa, unidentified
MSDQKIAVLGVDLGKNSVSLAGLNAAGAVVVRKRATRDGAIKFAAKLAPCIVAMEACCGAHFMARILGGQGHTIRLMSPEYVKPYVKAQKNDDRDAEAIAEAATRPTMRFVTPKSEAQLDLQTLHRVRDRLVMARTALTNQLRAILLERGTTFPKGRKVLMRQLAEPAEAFEGLGERMRQLVEDVRAECAELDARIAALNDELAEIARQDESARLLATIPGIGVINATALVAAVGDASAFARGRDLSAWLGLVPRQFSTGGKTKLLGISKRGNEYLRRQLIHGARAALLRLKDTPTPLGNWLRGLLARSHMNVAVVALASKLARIAWAVIRHRTEFDRRALIAT

SEQ ID NO: 41937 - protein, 373 aa, unidentified
MPYFVGLDWASQEHTVCVINEHAQIIWRTTIPHTAAGLAELRTRLARLAPPATLPVAVERPSGLLIDSLVDGGFIVVPIHPNVLNASRPRYAAARGKSDAEDAFILADLLRTDGHRFRPLQPVSDETRALRALVRTRDDLVAQRTALANQLRALLESFWPGAAQIFAHVDSPIALAFLSRYPTPHSAHRLGEKRLAAFLRAHHYSGRRSPADLLARLQQAPLAPCGEAECEAKGHLVRALVAVLEPLVRQLQHVSSAIEHAIAIHADGPTLMSFPRAGRINAAQILAELGDDRRRFASFEHLAAEAGVAPVTQASGKHRAVTFRRACNKRLRRALTTFADNSRHASPWAAHVYQQARTRGCDHPHAIRILARA

SEQ ID NO: 41938 - protein, 337 aa, unidentified
MKVTLIGIDLAKSIFQVCGVNRAGKRDFNRQVRRNKLVALLLQYPDATIAMEACSGSNYWGRTLQQHGFKVMLIPPQHVKPFVKGNKNDRNDAFAITEAARRPDLKCVEPRTLAQTDMIQVHRVLHRMIRQRTALINQIRGFLNEYGVVVAQGKEKLLAAMPDLLEDAENGLTPASRALFHQMLEQWRQANEAIDRVEKGLKGQARTDDDAQRLMKMRGVAAKISTATIAHAGNGHGYKSGRHFSANLGLVPKEHSSGGQQKLGGITKRGNQYLRSLLIQGAWSVVRNADKNDDRMSRWARQLVERRGKHKAVVAVANKMARIMWSMLYHQTEYRAN

SEQ ID NO: 41939 - protein, 377 aa, unidentified
MTRISATPSNDQSIHAALELSKNRWLLAIQVPGRNKPSLHPIKGGDGEGLMAKLDAARERVAKATGQTPKVTLCYEAGYDGFWLARFLEHRGIGCLVMEPASLRVNRRARRVKTDRIDVESILHTLIAWCRGERHVCSMVVMPSVEEEDLRRCHRERDRLIRERKAHINRIKGLLFGQGIRGINVKSRYKTLTPASMVTGDGRPLPERLGREITREIERLAQVQAQIVDIEHERDHPATSCVATERKRHDLLRLKGLGPALSSTLTREVYYRQFANRRQVASYIGIAPSAYDSGDGRRSQGISKAGNRLARVAMVEAAWLWLRHQPDSALSKWFHERTQGPKGRIRRIMIVALARKLAIALWRYLETGLIPEGAVVR

SEQ ID NO: 41940 - protein, 417 aa, unidentified
MEIVHTHCAGLDVHKKTVVAAIIVPDEQSRLRREVRTFGTMTADLLALSDWLLGWGVTDVAMESTGEYWKPIYNILEENFEMLLANAQHVKKVPGRKTDVSDAEWLAELLRHGLLRGSFIPPVGQRELRELTRHRTNFVRERVTLVNRVQKTLESANIKLASVASDVVGVSGRAMLEAIIAGNASSAEMAELAKGRLREKREQLDRALTGRVKPHHRFVLSELLCQIDSLDESITRFDAEIEKYGRPFEQAVELLDTIPGVARRTAEVIVSEIGKDMDRFPTADHLAAWAGVAPGNNESAGKRYSGTARKGDRALKVALVQAAHAASHSRDTYLSAQYHRLAGRRGKKRAILAVAHSILVISYHLIQRNEPYCDLGIDYFDKQRPEATAQRLMRRLQRLGYDISRVQQLTTIPVAAG

SEQ ID NO: 41941 - protein, 391 aa, unidentified
MRRIGLDLGVRHIAYCEVAHGKVVDRVTVKSLSELRSRLGPGTEQAIVAFEACREAWFVHDTLKEWGHDPRMLDTTRVRQMGVGQHRRKNDPIDAEAIAMALDGGRIAEAHVLSPARRALRAQLSVRSALVSTRAQYVTTIRALARAAGVLLPTCDTSRFVQKLDTLDCDAHTCTLVAPLVALLRTIEEQLVGVEHTLAGMAAEDPVLNLCATVPGVGLIVGATFVSVIDEAGRFKNAHAVGAYLGLVPSESTTGGADKRKLGSITKQGNSTARTMLIQAAWTIFRSRDQNNPLKRWVAQVADRRHKRIAVVALARKLAGVLWAMWRDGTVFDARGLAEQSAKGTRKSAQLQLGHAEALTRSAAKLARPAKRAPAPPPKPRRPKSSRRVAM

SEQ ID NO: 41942 - protein, 405 aa, unidentified
MEIFVGIDWAEAHHDICVLDETGTVVAKRRIADGLEGVGQLHALLGDHATDPNQVVIGIETDRGLLVGALLAAGYQVYAINPLAASRYRDRHGTSGAKSDPGDAKVLGDLVRTDRHNHRPVAGDSELAASLQVLARAHQNLIWSRQRLVNQLRNNLREYYPAALAAFGTELAHPTTLGVLDAAPTPAIGRTLSRAKLVAILRRAGRERGLEEKAAAIQTQLRARQLAAPALVDAAYGTIVASTVRILREVNAELASLETELAPSFEKHPDAEIYRSLPGLGFVLGARVLSEFGDDRTRFAHPKARKNYAGSSPITKASGTRRVVLARMARNRRLADACHQWAFCALRSSAGAHDYYRVLRQRGKTHHQALRALANRLVGILHGCLDHRETYREEIAWPRSLTAAA

SEQ ID NO: 41943 - protein, 348 aa, unidentified
MAHFVGLDVSVKETSVCVVDDVGKVILEQKVPTEPSDIIALLTSLGVPFGRIGIEAGPLSQWLVNALTAAELPVICVETRHMKALLTAQQINKTDRNDARGIAQMMRVGLFKPVHVKTLAAQEQRMLLTSRKLLQRKLLDVESDLRGTLRNFGLKVGAVSRSRYEVRIRELVEGLPRLAAIVEPLLSVRRVMRQQVAVLHKMLLDTVRGDPVCRRLMTAPGVGAVVALTYRATVDQPQRFVHSRAVGAHVGLTPKRYQSGEIDYDGGVSKCGDALLRTMLYEAAQSLLIHSGKWSWLKAWGMRVAQRRGIRRAIVAVARRLAVVLHRMWVDGSEFRWGKDSAAAPTVA

SEQ ID NO: 41944 - protein, 421 aa, unidentified
MSSIENEITKTRNHSRQRGNMMRTVFGIDVSKASSEVAIVINGEKIHGYTMPNDAIGFTRLLDDLKTVQKPEIIFEATGVYSHRLQAFLEENGYAYTQLNPLEAKKQLDSLRVRKTDKIDAETLAISQFVLNRKPTYIQEEVYQELRDLSRFYQNLTEDIVRTKNRLHKVLQVTFPEMENILSTPTREQYWNLVMTFPYKDFVLELSKDELLEGIRQSTSKRISDKRVAYLAQKLAALANQSYCAVKKNSPILEEVRYYAKELLRLSEQRQAVLEQMVELAQPLPEYEILLSIPGIAETTATSMIGELEDIRRFQSANQINAFIGIDLRHYESGNFLVKEHITKRGNPYARKILFKCIHNIAAASHTNPCHIEDFYEKRKRQSQTTSTKPHTIASIHRLIRTMYYLITHNKLYDYTSTQNR

SEQ ID NO: 41945 - protein, 408 aa, unidentified
MDAYYIGIDWADAAHAACVVDAAGEVVWTGAIVHTAAGLAAWRERLEGWRVPGREIAVAIERPDGLLVEQMLAQGVPVYPVNPKALDRARDRFRVSGAKSDPFDAEVLAQWLRTDHAQWVPLQPQSAPAQELRLLTEDHQRLVRERTRLVNQVTATLKAYYPRALELWPDLTTASARGFLRAYPTPDALTAGTRAQWERFTRRQRMASRTRSELWARLRVPQIPVPPHLVRAKASLLGALLDQLDAVIRHLADYQRRIEDFFGSLPAAAWARTLPASQSGTTVATLWAQMGDAPGRWASWHHLQAHAGTVPITRTSGQQHSVRFRRACDHLFRAAMDRYAFLSMRQSEWARAYYRQQRARGHRHHRALRALAAKWLKILFVLWQRQEGYDETRHLAMIARQHLRAAAA

SEQ ID NO: 41946 - protein, 451 aa, unidentified
MTKKKLEMEIINSRCAGIDIGSRSHFVAVGQALDNVKEFGVYADDLTDICLHLKEQGITSVAMESTGNYWQNLYVELIKYGFEVTLANGKFTKNIKGKKTDVKDARWIQKLHSIGLLTGSFLPDETTEKLRTYCRQRQNMIDLAAEATHKMQKYLKILNFRLDVVVRDICGLTGMAIITDICKGNIDPEKLSEHRHGNCRKSKEEIAKALKGNNREDYLFGLKQELESYQFYQKKIAECDKQIGAFLKQQINTDPEKKKLKTTDKTHKRINKNAIKGIDINQASYQYFGGVDLMSIEGMGHATVLSIMSEIGPEGFHKFESAKHFTSWLRLAPNNKISGGKLLSSKTPKGSNRLKIALRNAANAIGNLKDTHLSNFFNRVCYKKGRTVAVSATARKLAVILWNMVVKQIPYKPPTEYLFLEEKRKLKLIERVKKQITKFDLTKEDFGFVTN

SEQ ID NO: 41947 - protein, 341 aa, unidentified
MKQVVLKQNVGIDISKNGFAVAFMYLLDNQRVKIKGTRSFSNNEKGFSEFLNWCSKFQIKGLSLHFTMEATGVYYEQLAYFLNQKRFIIHVVLPNMAKKFAQSYNQKIKTDKADAKVLAIMGIERNLRIWKPSSAIYRKLRALTRERELLIVERTKIKNQLHSQEHSVNAARTTIARMKEHIKYINKLLEKIEKELYKESKKDQLVWNKIEKIISIPGVSFITAITIIAETQGFVNIRNIKQLISYAGYDVSIKESGKWKGKSRISKKGNSHIRRVLYMPAIVSVRYSEHFNNFYNRVNKNKVSTMIGATAVQRKLLALIYTLWKNNTTYNEKIQNVKLVA

SEQ ID NO: 41948 - protein, 350 aa, unidentified
MLIVGCDYHPGFQQIAFVDTETGEFEERRLQHRGEAEKFYRDLAARGVKVRVGMEASGHARWFERLLAELQLELWIGDAAEIRAKRVRKQKTDRQDAQHILTLLVQDRFPRIWVADWENRDLRQLLWHRHRMVQTRTRIMNQLQAVALNEGLRCKKRLWGKKGRQQLEGLRLAPWATRRRRDLLELLDRLNPVIAELTHEIEQEVEKCPVAQRLMTHPGVGALTALAFVLVIGTAERFQCGKQIASYLGLVPAEDSSGERRRLGHISKQGSAILRFFLVEAAQVTVRSVPEWRSKFFHLAMRRGRKIAKVAMARRLAVHLFWMWRKQWDYQQLNEFGPYAGKPGTGVDVH

SEQ ID NO: 41949 - protein, 392 aa, unidentified
MEVFVGIDVAKETHWVCALDHAARVLLNRAVDNEQADIDALVRELVALGDDVVIGLDITGSLARFLEAVLLAEGLRLVHVPGIAVNRAGHGFAGGERKSDPRDAHTIADLVRTRSLRPILPHDETVIALRLKVTRRREITDDQTRRISRLRQLLGAIHPGLERRLDLTGKGPLVLISRYVTPGEIRSAGHKRIVAYLRKTPHLHAAEALARTALEAAQGQRTVVPGEAVFADMIREIAAEALEARQILARLDRDIEALLDDHPDGALIRSLPGMGAVLTAELIANIGTIDRFPSADALASAAGLAPVIRQSGMSRNWRRAHGGDKALKRVFFQSAFCAVSTRDPLSKAFYDRKRKEGKHHTQAIIALARRRITVLWTMIRSRQAFDPNRKAA

SEQ ID NO: 41950 - protein, 415 aa, unidentified
MTESYRIFVGIDWGADAHQVWVTDAAGTAVGEQTVDHTGTAIAALVDWIVGLAEGDARAAAVALETPRGPIVDACLARGCQVFAINPKQLDRFRDRFSVAGAKDDARDAEVLSSAVRTDRRAFRHVTAEDPLTVQVREYSRQDTELGEDLRRLANRLRDHLLRTWPELLRLVPAADEPWFWALLKRAPTPVEGRRMRPAQVRQLLRDHRIRRITAEALLTVLRAPSVSLAPGVREGVRVRILDLVDELPVLARQRRAAERRLATTLEAMTQGPDGESVREHTDVTVLQSLPGIGTRIAATMLAEAADALRDRDYHALRLLAGAAPVTKRSGKSCVVIMRYACNHHLQTALYHWARGCMQRDPRSRAHYAQLRRAGHGNARALRGVADRMLTVLIAALKTHMPYDATRRRPWAAGA

SEQ ID NO: 41951 - protein, 336 aa, unidentified
MTGGVDTHADTHVAAALDGIGGLLGVQEFAATPAGYARLLGWLQGFGAVGLVGIEGTGSYGAGLARHIAAAGIRVVEVDRSDRQDRRRQGKSDPLDAVSAARAALSGRASGSPRGRDGQVEAIRALMVAKRTARAQRTQTINQARALLITGPDGIRTRFTGQTPAGLVAELAALRPRPGSIVRYHTLLALRELGRRAQFLDGQLARLDKLITPLVTARAPGLLRIFGVGPDTAAMLIIAAGDNPGRLRSEAAWAHLCAAAPIPASSGKVARHRLNRGGDRQANHALWRIVITRMGSHPPTRTYVARRSKEGLSKPEIIRCLKRYAARETYRYLQPR

SEQ ID NO: 41952 - protein, 430 aa, unidentified
MGRLKIVFPVCCGMDVHRDFVIACIASTNSQGVTEYQSKRFSTYTGDLRKLAAWLKENHCSDVCMESTGKYWFPVHNILEKDFHVVVSHPKFVKAIKGKKTDKKDAMWIADLFKHDLVRGSFIPPEDIRQLRDLCRYYQKLVWNTTGEKNRAQNCLTVSNFKLDDVFSNVFGKSASAIISQLLEHPGEAFDVAPFLDKRCKASPQEVQEAIDGTFSPWQAEKLKVIRKHISNLDDLRDALQKLIFKLAEPYSRQIELLLTVPGISDPMTAIRVIAEIGADMRQFESSKHLCSWAGLTPQNNESANKKKTTRIGKAGQYLKPLLIQCAIAASNPRSKLYPEILAKYQILKKRRGTKKARVAIARRLLTAIFHILLNDAPYQPADSSAKDSAPEQRIISLSQAFALLARIGYVISEVADISDLPLVESASSS

SEQ ID NO: 41953 - protein, 409 aa, unidentified
MDQLIERCCGLDVHRDTVASCVRVPGPNGKRQQEVRTFGTTAAELLALRDWLEAHGVTHVAMESTGVYWKPVFYVLEEAFTCLLVNAAHIKQVPGRKTDVKDCMWIAQCLECGLLRGSFVPPAPIRELRDLTRHRRVLIQERTRAANRLHKLLQDAGIKLASVATNILGVSGRAMLEALVHGTTDPQVLADLARGRLRKKLPALRQALAGRFRPHHAFLVSQLLAHVDYLEEAISLVSEEVEGRLAPFAHHLTQLDTIPGIDKRTAEVLIAEIGVDMGYFPSDGHLASWAALCPGNNESAGKHRSGKTRRGNQWLRTALVEAAWAAIRTKDSALGARYRRVMRRRGHKKAVVAVAHAMLRTVYHLLAEGTTYREPGADYYDRRHAERVTRRAIQLLERQGYRVTLEPAA

SEQ ID NO: 41954 - protein, 458 aa, unidentified
MYRELFPLRQALSAELKANLSPAGPGIDSEHLLQSYLDRLTMYVGCDVADQILTFFAVDTAGEELGHVSTANDPPGFEQTWDWLEDLRSRHGLRIMLLAMETTGVYYWACWDFLAQRPNLARVLYNPRTTEHMTEVLSKKVRNELVDAYALAEQVRLGSTPEVVLSEDPDLLTARFCSRAARDLAGQINRKKNQLRALLRAYNPAISQVFPGSKFHHQAVYALLQQYVFPDECVDAGVEAITAILEVHCRTAFDRQHAQRLVARCRDTLSRPIRREEIRQRVHHLIDDITTCQKRKTYFNKAGYRLIENRPETPLLRDATGAGISNTLALVSEVGDVQRFKSGEHLASFLGLTTSKHISGTTVFVSKHITKQGSPNGRYAAVNIAQHMSQRVPKYQRMYERIKNRKPPRKGHYVALVAVARDFVTNVLYDMWRYQRPFFREVEDYRAYRRNNPRSDEE

SEQ ID NO: 41955 - protein, 420 aa, unidentified
MPNKSSKKAKSQRSRERALLQKVHLNAAGIDIGADAHWVAVPEDRDASPVRSFGVFTRDLILLCEWLKRCQVETIVMESTGVYWIPLYQMLERNGFEVRLVNAQHVKNVPGRKTDVKDCQWLQQLHTFGMLGGSFRPEAQMCVVRSYLRLRDTLSKDCNSLVQRMQKALTEMNVQIHRVISDITRVRILSEIGLDMSRWPSEKHFCAWLNVAPNNRISGGKILSSKPHKKANRAAAALRLAAQSAMQSKSAIGAFIRRIKSRLGAPTAINAGAHKLARLVYRMLKFGKAYVETGQEAYEKFFKERTLRNLQRKARELGFQVTPITTPTVQVPQKTRRTKSAFDGGKRLIPRLPGKPVLIAGRNAPPVTGGWVDFLLRSLNESQGAASSYQRVSRNPLPPDPLAFWRRYSPRVVVASASGQ

SEQ ID NO: 41956 - protein, 460 aa, unidentified
MLFAGCDWSDQWLDVAVLDRSGTVLAETRIIYAQSADPVARYREFLAPLGRRWRATVTGIEDVHLLFARSLAASGMEVVHVDPTRAARHRLARGISKTDRADARLIAAMTLAGECRPLVVHSPQAQALHVVAHAHRAAVADRAEAMHRLRAALTRFWPAAVAAWPKSVGGLRSAQARAVLAAAPAPRAAARLDRRRLGQLLTAAGRKRTVQDEAERLRMIFCRPVMLLDPHVEDAEALRVKHLLAALDHAARRADDLQRDLAQHYTAHPFHPLVCGIPGVGDILGAYLLAEIGDRPAERFGSGRSLAAYAGVAPVTWASGQTVRVAFRRASSVHLRSILHAVAFSMISHSPGAHAYYTLRRSHGDAHATALRKLGRKLVLCLYRCMASGLPYDDAIAFGYDPATQHAPTRPRRAPLDEAQIAQARDMLATPGATVTATAHRLGVSAQTIYRHVLGRPWKR

SEQ ID NO: 41957 - protein, 340 aa, unidentified
MQITTIGLDIAKNVFQVHGIDAAERVLVRKQLRRGQVMKFFEALPPCLVGMEACATAHHWARELTKLGHEVRLMPAKDVKAYVKRNKNDAADAEAICEAVRRPTMRFVHPKSAEQQGRLMQHRARDLLMRQQTQVINALRAHLAELGVVAAQGREGLKQLLAIIADKKDARLPIDARASLIVLAAQLQALHTMIGSIEKRLMVQHRANEASKRLQSIHGIGMIGASAIAATVTDPKVFRSGRDFAAWIGLVPRQASTGGKQKLGPISKQGDRYLRRILVVGAHSVLRRAKQNPEKYPWLTQLLARRPFKVVAIALANKLARIAWALLASGGHYRPRLAAA

SEQ ID NO: 41958 - protein, 340 aa, unidentified
MKQIKRIGIDLAKSVFQLHGVDAHGHGVLRRQVKRAQLSAFFAQCPPCHIGMEACGSAHYWARELGKLGHTVRLIAPQFVSPYRKNDKNDGNDAEAICEALGRPTMRFVPIKDEEQQAVLCVHRARSLLVEERTALVNQLRGLLAEYGLVIPRGVARLRAALPGILEDAENGLPLLAREVFADLYERLRGLDTHIAAYDRRITHLARTMAAAKRLMQVEGVGPLTATAVVASVGDARLFNNGRQFAAWLGLVPRQHSTGGKSRLGRITKRGDVYLRTLLVHGARSVLMRRTERTDAKSRWGAALQARRGFNKAAVALAAKHARILWALLAHEADYQLATT

SEQ ID NO: 41959 - protein, 370 aa, unidentified
MQENSELFIGLDVSKNSHAVAVAESGRDGEVRSYGEIGADAASVRRFVRKLDRPNVRLRFCYEAGPTGYGLKRQIEALGHECAVIAPSLIPRRPGERVKTNRRDAVKLARLFRAGELTEIWTPDEAHEAIRDLVRAREAAVKDRTRKRQEIRSFLLRCGRVYPGKKAWGTKYFKWLHELSFAWPAQLAVLHEMIIAETQCRDRVARLEKAIEDALFDWPLAPAVDRLQALRGVGLIAAVTFMVEVGDIRRFESPRQLMAYLGLVPTERSTGDTVRRGGITKTGNARVRRTLAESAWTYRYPARVGKKAYFATRHMPEEVRETAWKAQARLTKRYRALIARGKRSTVAITAVARELAGFMWAIARMDPMGA

SEQ ID NO: 41960 - protein, 325 aa, unidentified
MDRPVLGIDISKGSFDVFLIQGEKQQHRSFPNQAEGFELLSNWLRECGLPQVHACMESTGRYGEELAQYLYEQEHQVSVVNPSRIRDYARSKLIRNKTDKLDAKIIAIFCLNEKPALWQPPAPEIRELQALVRHLEALQDMRTQENNRLKSGNPSKQVCSMLQEHLCFIDQQIKQIKKRIKEHIDQHPGLKQDRDLLITIPGVGDSTAIKLLSENIQAFSDGRALAAFAGLNPSLCFSGTSVHHRGRLSKVGRSGLRKSLYFPAISAMRFNPQIRLFCDRLEERHKPSMVIIAAAMRKLLCLALGVLKSGLPFDPSYAQNACALP

SEQ ID NO: 41961 - protein, 310 aa, unidentified
MHDTIGVDISKDTLDIHRLSDGKHIRFGNDKAGLAALRRWIGKTRVRVVYESTGRYHRDMEGVLDTAGHALVKVNPGRARRFAQAAGYGAKTDRVDAAMLARMGAVLDLDAKPVRSDSMHEIRELHIARIGLVKDRTACRNRLHGARNKVVLAQLRARLKQVESQIEQIDTELQRLVANDPGLAHRFGILMSVPGIGPVAAVAMIVEMPELGTLDGKEAASLAGLAPITRESGVWKGRSRIGGGRRGLRKALYMPALVAIRHNQQLGQIYQRLYSAGKPAKLAITAVMRKLLILANALIRDDRKWADTAP

SEQ ID NO: 41962 - protein, 369 aa, unidentified
MSQPSTVFVGLDVHKDSISVAYAEEDRLKSAEFVGPIGTRQSDIDKMLRKFVSRRSTPIFAYEAGPCGYGLYRYLTEKGFACQVVAPSLIPKRSGDRVKTDRRDAIELARLLRSGDLTAVYVPSVEDEALRDLCRARDAARQVLRSAKLRLKSLLLRLGLHYEGRANWGDAHKRYLARVVCPTPTQQIVYQETLRAVDEQVDRLKRLEDELRERAAAWRLWPVVEALQALRGVEWLVAVTVVAELGDLTRFDNPRQLAAFVGLIPSEHTTGGKRRQGSITKTGNGRARRALVEGAWAYRHPAKVSAHIRKRIEKLPQVAQDIGWKAQVRLCKRFRRLNARGKHPNIATTAVARELVAFMWAIAKEVPVA

SEQ ID NO: 41963 - protein, 391 aa, unidentified
MVCVGIDVAKDKHDCCILDSDGMVRADCFTIPNNMDGFKQLLQTIRNCTKKSDKIKVGLEATGHYSYNILGFLLDNGLPTYVINPLHTNLYRKSLSLRKTKTDRVDARTIATMLLSDVDLKSYTDIAYHNEDLKSLTRYRFDKVQERAKLKQSVSRLATILFPELEGLVSSIHGTSIYALLSEYPGAKQISEVHLTKLTNLLTTASKGRYGKEKAIQIREAARASIGSVMPAKSLELKHTIKLIQELASEIDEIEDSIQKIIDELNPPILSIPGMGVNSAAVILAEIGDFSNFSSPDKILAYAGCSPSTYQSGKLTNCYAHMEKRGSRYLRHALYNATKYVCYWNPVFAEYLAKKRAEGKHYNVALSHAMKKLVRLIYALQKSGKTYLTAA

SEQ ID NO: 41964 - protein, 394 aa, unidentified
MFFVGIDVAKRKHEAVVIDDKGRIVQKSFSFPNSLSGYNSLISCVKRITSTRKDIVFGMESTSHYWLALYSHLIKDGYTAHVINPIQSDAFRGLFIRQTKTDPIDAVIIAEVIRFGKYSSTHFPQHKILALREMCRNRLYMVDAISDLKRKTIALIDQVFPEYDQLFSDTFLVSSIEVLYRYPTPKKLLHIHRDTLTNLLIKTSGGHFGSAKADEIIHAAKNTFGIDDPYDVYADLIKTFIKQIKFIQKNVSEIDQKITAIMDEIASPITSIPGIGVTLGAVILSEIGDISRFKSADKLAAFAGIDPSLKQSGDYSSIRNHMSKRGSPYLRRALWMACIPATQVDPMFRAYYLKKRSEGKSHMKTMGHVAKKMICVIYAVLRDNKEYQPVLTAA

SEQ ID NO: 41965 - protein, 426 aa, unidentified
MAYRIAGVDVHKKMLAVVIADVAVDGEFQFERRKVGTSPTPLRALAEWFVEREVEEVVMESTAQYWRPVWETLERHWQPCRRTREGAGPMSGMLHLAQAQSNRGARGRKKDFPDAERLVKRLVAQELTLSVVPDTEQRLWRTVIRRTWQVTRNRVQLQNRLECLLEEAHLKLSSLVSDLLGASARRMWQAIADGETNPATLAALGSRRLHATPDEFCDALGACTDLHPVYRRLLTLTLEELRVIEDHLAQLDQEMARLLGPYQPAVQRLAEVPGLGVDSAQQIIAEVGVTATTFPSPKHLASWVGVCPGEEESAGVSYSHRSPHGNRQMKRVLNQAANAAVKTKGSIFELLYRRLVPRLGHAQAIGAIAHRLCRLIWKILHDGIRYEERGGERQKQQVRARAARMIRQLRSLGYRVELVLPADSPA

SEQ ID NO: 41966 - protein, 363 aa, unidentified
MNEITTVGVDLAKEVIAVCAADRSGKTVFTRMFRRDAFAAWAVQLPPCTFGLEACGAAHHWARWLSSHGHTPRLMAAEFVRPFRKSRAAKNDRNDAEAVLTAVRQPNMRFVAVKSIDQQARLSWHRMRQGWSEERTALINRLRGLLGEFGVWRGRSAAVLTRALPELEHDEGLSLLVRRLLAEARPHLARLDEAIARCEVEIKSHVKGNAAAQHITKIAGVGPLTAAAVLATVTDARDFKNGRQFAAWQGLVPRQDSSGSQVRLGRITKRGDCYLRGLLTQGARSALQAALDKEPLLRTRLQCWIVQLHARVGYHKTLVAIANKHARMIWAILPKGEDYDPDAWRRWSPTAPATAAASSDATP

SEQ ID NO: 41967 - protein, 323 aa, unidentified
MNNLTLGIDVSMETLDVMLLKGKEQETRKFKNNQKSFEELVAWLDKKEAREAMIGLESTGRYGLPLGKHLYAAGLKVSMINPAWIKFHGQSQGVRNKTDKFDAFVIADYCRKNEMRLWEPPSPEMEELQEMTRFLGTLKKSQQQTKNRKKSGYTSIVVNEELNRVHDFFEREIEAMRDRILKHIHAHEELRKAYELILSVKGVGPISAPIFLAEIQDPNRFDNASQLAAYAGVTPKNHQSGKSINKPGKMTKAGNIYLRTALYMPALSAKDYNPLANAQYDRLIENGKPPNVALGAAMHKLLRIIYGVWKNGCPFDPDYGHSS

SEQ ID NO: 41968 - protein, 400 aa, unidentified
MRTVFGIDVSKASSEVAILVNGERVHGYTMPNDIIGFSRLMEDLKTVSNPEIIFEATGVYSRRLQAFLEENSYDYTRLNPLEAKKQLDGLRVRKTDKIDAEKLASSQFVLNRKPTYVQEEVYQNLHDLSRFYQNLTEDIVRTKNRLHKVLQVAFPEIENLLSTPTGEQYWNLVSIFPTKHWVLELSEVELKEAIRNSTSKRISENRVGNLTEKLVGLAKQSYAGISKTSPMVEEVKYDAQELIRLTNRREQVLQQLIALAEPLPEYKILLSIPGIAETTATSIIGELGDIRRFKSANQINAFIGIDLKHYESGDFLGQEHITKRGNPYARKILYKCIHNIASASHTNPCHIADFYEKRKRQSQTTSTKPHTIASIHRLIRTMYYLIMHNKLYDYSLAQSH

SEQ ID NO: 41969 - protein, 319 aa, unidentified
MFVGIDVAKAELVVSTQPTEERWTVANDERGVRTLVERLRSLEPQLIVLEATGGYELLCVAALAAAGLPVVVVNPRQVRDFAKATGQLAKTDRIDADILARFADKVRPTVRPLADADAQELAALLARRRQLLDMLQAERNRLGQVFGRGKQHVKKSLKSHIAFLEREVRMTDTDLGEMVRRSPAWRERDELLQSVPGVGPVLSRTLLADLPELGRLSRREIAKLVGVAPLSRDSGTMRGRRFVQGGRASVRAVLYMAALVATKRNAVIRTFYLRLLAAGKPKKLALVACMRKLLTILNVMVRTAQRWSVDGSSEVLLPA

SEQ ID NO: 41970 - protein, 423 aa, unidentified
MKRTYPICCGVDVHKTFLVATIITSEYVMPHYHQKRFSTFYNGLVAFKKWLLEYDCKDVCMESTGKYWVPIWNVLEDSCHVVIANPKWVSAVKGNKDDKKDSKWMGDMFRMDLVPSSYIPSKDIRILREFTRYRSKLVSMRSSEKNRFQNAFTVCNLTLDAVVSDMFGKSATDIENYLLDTDAVDPEHCVSLLRCSLKKKASDVVEAVSGFNMTPEQKERGRIVQEHFADIDHRIAQLDEIIGDLVAEYEGQISLLCTIPGIDRRTAITILSEIGTDMSQFGSSKRLCNWAGLAPASNQSAGKKKSVRISRAGVYLKPALVEAAHAAVKSTEKQPYYRIKFERLMKRRGKKRATIAIARMILTAIYAMLSTGEVFNPSDLKKFDMPEDLKRKQTLSSAKEAIKLLVSLGLVTAGSISLDALAG

SEQ ID NO: 41971 - protein, 387 aa, unidentified
MNYVGIDIAKLNHFASVLSSDGEILLEPFKFTNDNDGFQKLLSALDSFEKNSLIIGLESTAHYGYNLVEFLVSNNFKVCVINPIQTSSLRKNNIRKTKTDKVDTFLIAKALMLYPHRFCTTADIDLMQLKALGRFRQKLLKQRTRLKIQLTTYVDQGFPEIQYFFKSGIHHKSVYALLKEAPTANDIASVHMTHLAHLLESASHGRFKKDTAKELRVLAQKSVGTSDSALSLQVTQSIEQIELLDKQIHTVESEMERLVRFQDSVIMTIPGISYVNGGMILGEIGDITRFSNPCKLLAFAGLDPSVYQSGNFNASHTKMSKRGSKVLRYALMNAAHNVVRNNATFKLYYDKKMAEGRSHYNALGHCAGKLVRIIHKMLTDHVVFDLD

SEQ ID NO: 41972 - protein, 422 aa, unidentified
MDTIYDIACGLDIHKNSIVACIVKTDTILKKGDNTEIVELVKRNFTTFSDGLNELKEWIVANDCHRVAMESTGVYWHPVYDALEDAFDGDIEILVCNPRNMHNMPGKKTDMNDAEWIGRCLRSGMLTGSFIPPLVIRELRELTRYRKSIVEDIGTQKNRIEKTLQSAGFKLSTFLTDIFGVSGRNIIDVLIQKGYLAKDDVDILTKSISAEKKLEMKRLLTNKLSTHNQIVLKTKVEHLDELLSHLKKVEGLLHEITNQFEVEIKNLDTIPGISETSAKAIIAEIGVDMSKFKTAEHLCSWAGLSPGNNESAGKKKSTRTTLGNPYIKSLLVECAWTITRMRDCHLHGVYFRIRNKRGSKKAVVAVARKMLVIIYHLLKDKTVYDEQKYAMSKLRVEILELKRLTTQAKRRGYKLVPIEPNS

SEQ ID NO: 41973 - protein, 400 aa, unidentified
MISVGIDVSKGKSTVCLLKPYGEIVCKPFEVQHTEKDLEDLANLLQKLDGEIKIVMEATGIYHLPILTFLLEKSFFVSVINPLMMKRFSRDNSLRGAKNDRLDSVMIANYGIEKWYKLKKYEVNDRIYTELRLLGRQYYRFMQTHVKHVQELTHLLDYTAPGLKAMFNSWNEHGNRDKLSDFVERFWHFDLITSLSREEFVEQYLLWAKEKKYHQSRSKAEKVYDLASNGIPTLSSHTPSTQLMIQGAINVLRIVNNSLYHILSRMKELAKSLPEYATVRSMGGVGDSLAPRLIAEIGNVKRLRNGHSLVALAGIDPPPYESGQFVGTHRRISKRGSPILRKIGFEVMRMLKSHKEPEDNAVYNYILKKEAEGKNKKLSKIAGLNKFLRIYYVRVMEVYQ

SEQ ID NO: 41974 - protein, 328 aa, unidentified
MYLCILNQDGEILVHRNMPAGPEPFLKAVAPYREDLVVCVECIFTWYWLADLCAREGIPFVLGHALYMKAIHGGKAKNDKIDSQKIAVLLRGGMLPQAYVYPAAMRATRDLLRRRMHLMRKRAELLAHVQNTNSQYNLPGIGKNIAYKANRDGIAERFPDPAVQKSIEVDLALIGHYDHLLNDVELSIVHTAKQHDPQTLSRLQSVPGIGKILSLVLLYEIHTIDRFPRVQDFVSYCRLVKCAKESAGKRYGTSGAKIGNAYLKWAFSEAAVLFLRTNPAGQKYLARLEKKHGQGKALTVLAQKLARAVYYMLRRKTAFDMSMFLQSS

SEQ ID NO: 41975 - protein, 409 aa, unidentified
MYFVGIDIAKKTHQAAIICSDGKLIGKPFKFSNTVDGFNLFLEKLTAVNTDLSQFEIGMEATGHYWLNLYTWLSDKGFRLHVINPLQSDALRNLYIRKTKTDSVDAKIIADVIRIGQYSETQLADENIIALRDLNRQRFYLVDMAADLKRKIIAMMDRIFPEYQDFFSDMFGKTSVQIMKEYTSPEQILQIPTERLTQLLKKASRGRFTETKAKELKALAANSFAALLSSEMTTLLIRQMLEQLDLLEKQIADIEHIIAAQFAQFDTKLTTIPGIGTTLGATIFSEIGDINRFDKPKQLIAYAGMDPSVKQSGNFIGTQSHMSKRGSPYLRRALWLAAVVAVSHDDLFKYLFQQKMNAGKTYAQAMGYICHKLLNTVFAILKTGEEYKPVYPPQIDVSKFADQPINSQL

SEQ ID NO: 41976 - protein, 384 aa, unidentified
MKIYVGIDIAKLNHFAAAISSDGEIILEPFKFTNDADGFQLLVSKLESFDKNSIIIGLESTAHYGDNLVRYLVAEFYQVCVLNPIKTCQMRKNNVRKTKTDKVDTFVIAKTLMMQDDLRFITFFDLDMMDLKALGRFRQKTIKQRTRLKIQLTTYVDQVFPEIQYFFKSGLHQNAVYALLKEAPSPKEIASMHMTHLANLLKVNSHGHFTKEQSKELRVLAQKSVGANDSAISIQITQTIQQIELLDSQLEKIEAEMTDIMKFNDSVIMTIPGIGYINGGMILGEIGDIHRFSNPNKLLAFAGLDPSVYQSGNFQAKTTRMSKRGSRVLRYALVNAAWNVVRNNATITRLIMMPRELKAVLITMHLGTVPANLSESSRRCLLTI

SEQ ID NO: 41977 - protein, 317 aa, unidentified
MDVETTADRFVGIDVSKARVDVHVRPDGTAFGCATDPEGLSALVARLKPLSPCLVVLEASGGYERVVAAALAEAGLPVAIVNPRQVRKFAGAIGRLAKTDAIDAAVIAHFAQAVRPTARPLPDDLSVRLAELMARRRQLVVMINAEKQRLAKAQDRIAQRSFKAVLKSLEAERARIDKAIDKLIEASPVWCAQQDLLKSVPGIGDVVARTLIAELPELGRVDRHQIAALAGVAPMNRDSGRYRGKRKIQGGRVEVRAPLYMACLVAIQHNPALKSFYRRLREGGKPARLALVAAMRKLLTILNAMLRDRKPWASAQS

SEQ ID NO: 41978 - protein, 453 aa, unidentified
MSKINRPASNKKKDAAKRIRPVTRPDAAGIDLAALVHYVAVPPDRDPQPVQSFGTQTADLHKLADWLVACRIKTVAMEATGVYWVPLYQILEDRGLEVCLVNARHAKNVPGRKTDVLDCEWLQYLHSVGLLNASFRPPAPICAVRALVRHRDSLVQTGCEHLLRIQKALDQMNVQVHHAVSDITGMTGLAILEAILNGERDPQKLAQLRDPRCKKTQSEIAAALHGDWRPEHLFTLRQSLAAWRYHQTLITECEAELKKQMDTLADQTKDAVPAKAKPDQRCDETLRHHLFRKFGVDLTTADGMNTQTALVLLSEVGTDLRKFATADHFASWLCLSPDNRVSGGRRLSVATRTGANRLATALRLAARSLHRSQTALGDWYRRMKAKLGSAGAITATAHKLARILWAMIKHRRPFDRARLGNPELRQQRRENALRRAAKELGYLLQPIHPVPVS

SEQ ID NO: 41979 - protein, 362 aa, unidentified
MEYFCGLDVAVDETAVCVVDEHGEVHLTVKVETDPDALFVVLKPFVARLRRVGHEAGSLSPWLHPELSKRGLPAICLETQHVRAAMSAQRNKTDAADALGIAHIMRTGWFRQAHIKTQDCYQMRLLLTHRRNLKRKFLDLENAVRHSLKAFGIKLGGTSRGAFDQAVRTAVADDPLSAELMDAMLSARAVLWREYCRLHDLVVKIVAKSELCRRFMAIPGVGPVTALSFMTAIDDPSRFRRSRDVAAYFGLTSRRWQSGTSIDVQGRISKAGDADVRRALYEAASALMTRFRGRDKVKSWGEQLAKRSCHRKACVAVARKLAVIMHAMWSDGTFYVGDASATETDAAQRAHNKDRRLLGAHR

SEQ ID NO: 41980 - protein, 400 aa, unidentified
MNAVGIDVSKGKSMVAIMRPFGEVVATPFEIKHTEIELKKLVCILEKLPGETRIVMEHTGIYWQPIAKALHDAGLWVSVVNALLIHKYGNNSIRKEKTDKLDAVKIANYCLDHWLDLDRFTLIDPIRQELKTCHRQYDQYIKLKVNLKNNLITLLDGTFPGLNTLFKSAPRDVDGHEKWIDFAIKFWHRECVCGCTEKSFTNQYRKWCTKAGYRFNEAKAASIYAHAAAQVNTLPMSDAIKRLVILAASQLNTIIETLSVIQNEMLTLASKLPEFPVVMKMFGVGPVLGPQLIAEIGDVRRFHHKQSLVAFAGVDAPPCQSGTFESKNRHISKRGSPRLRKTLFQIMSTIIQHAPADNPVFQFLDRKRQEGKHYYVYMTAAANKFLRIYYGTVRAYLEDT

SEQ ID NO: 41981 - protein, 375 aa, unidentified
MHRRRVMGDRIGYVGLDVHKEGIVVAVAEGGARGEVREYGRIANTRSALDGLARKLGREGVKLRFCYEAGPCGYGIQRQLSAGGHDCVVVAPSLIPKRAGERVKTDQRDAVSLARLDRAGELTAVWVPDPGHEAIRDLVRARLDAVHALRRARQQLAGFLLRQGCHYRRPAWTKLHHRWLAGLKFEQAMHHLVLEDYIAAVEAAEARRDRLTAQIAAMLPDWTLAPVVAALQAMRGMALVNAATLIAELGDLSRFANPRQLMAYLGLVPSEHSSGASVKRGGLTKAGNSAARRLLVEAAWTYRFPARVSRELLLRQEELPKAIREIAWKAQTRLCARYRRLARTGKPANVVTAAIARELAGFVWAIARQVTIPAR

SEQ ID NO: 41982 - protein, 336 aa, unidentified
MTITTIGLDLAKYVFQVHGVDAEGNLIEKRRLRRSQVMAYFASIPPCLVGMEACATAHFWGRELAKLGHEVRLMPPQYVKPYVKRGKNDAADAAAICEAVGRPSMRFVPIKTEEQQAVLVMHRARDLLVRQRTQLINAFRGHVAEFGVIGAQGRWNVTRLLATVREGQAVPEPARAMVEMLAAQLDAIGERIDEIDARILAWHKANPVSQRLARIPGIGPLIGTAIAATVADPAAFRSAREFAAWVGLTPRQKSTGGRQRLGRISRQGDQYIRRLLIIGAQTTLLRSKAARANPWIQSLLARCPRLKVAVALANKTARIAWALMAKGESYRPMASA

SEQ ID NO: 41983 - protein, 356 aa, unidentified
MSRDIKYIGMDVHKEAIVIAVLNESGKLGMESVIETKASSILQFIHGLRGELHVTWEEGTWAAWLYDLLKPHVHQVLVCDPRRNALLKEGNKSDKIDARKLADLLRTGMLRPVYHGEHGLRTLRELGRSYQTISQDLNRVMNRIKALYRGWSIPCAGTQVYAPRYREEWLHKIEQAGVRRRAELLYQQLDGLQTLRRTLRPELLAETRKHKAAKLLRQIPCIGPIRAARLIALMQTPHRFRSKRQLWTYSGLGIETRDSAQYCYVHGQLQRTKKPQQIRGLNQNHNHEMKEIFKGAATRASCGVGPLRDFYVALLAKGMKPEMARLTLARKIAAIALTLWKKEERFDAEQLKPQVA

SEQ ID NO: 41984 - protein, 351 aa, unidentified
MGDRASRYCTLDEAGAKLKEDKLPTTKAGLDAAFGKMAPCRIALEVGPHSPWMSRHLAALGHEVIVANPRKVRLITQSVKKNDRMDAELLARLARMDPQLLSPIRHRGEEAQADLAVIRARAGLVDARTALINCARGLAKPMGERLKACDADQVKASLAEGLGERVRKVIGPLLQGVEAISQQIEVCDQAIAEIATRYPEVKLLQQVWGVGALIALTYILTIEDAQRFEHSRDVGPYLGLTRKQRDSGDSQPELGISKAGDGLLRRLLVQGAHCILRRDAPDSDLKAWGMARLQARPGQKSSKRAKKKVVVAIARKLAVLLHRLWVTGEVYDPHYNRKAAAAAKRKTRPAA

SEQ ID NO: 41985 - protein, 347 aa, unidentified
MLADQLDYVVGVDPHRDVHALAIVEVRTGGVVFEAAIAANGAGYRRALELATERAAGRRAFAVEGSGSFGAGLTRFLTGSGEQVFEVGRLRRERRSGGKTDALDAIRAARVVLAQERPARPRAGGQREALRALMAARDGAVNARRAGLCQLRDLIITAPEPLRSELRQLTRGRLLKRLTAVRPSRHSDVELRGTLHALRSLARRIEQLTVEERELGAEIETLTLELAPHLANEPGVGPLAAAQLLLSWSHPGRVRSEAAFARLAGCAPIPASSGQTTRYRLDRSGDRQLNRALHMILISRRRWHQPTIDYIARRRQDGKTTREANRCLKRYLARNLYRLLEHPPMTT

SEQ ID NO: 41986 - protein, 319 aa, unidentified
MAQHDLVVVGIDVAKDKVDACIRVLSQRQTCPSTVQGRRKLVAWLRKHRVSKAVMEASGGYERDWAKVLRESGLEVRIVDPKRVRSFAQSAGRLAKNDVIDAEMIAWFAEIFGEAPGQVHDAAQQELQALVKARLNLVDLKIRLEAQNGHSAPGQAQKGRARVLKSLLGEIAKLEVAISAKVRGTPHLAERAEIIESVPGFAEATAATLVAGMPELGQVSNEIAAALLGVAPYDDDSGKRRGDRHIKGGRRWVRNAIYMPCVGAATLNNPVFKAYYQRLIAKGKEPKVAVTACMRKLIIILNTMIARRQKWDPCRYAVN

SEQ ID NO: 41987 - protein, 346 aa, unidentified
MLHVGMDLSRRRIDVCVLDERGDLVEQAVAAPDADGLRVLADRYRGDDIRAVVESMTGARFVHDTLEGYGWEVEMADAARVKALAPLTAKTDRIDARVLAELSYRDLIPAIWLPPPKIRGMRELGRFRLHLVKHRVGLKNRIHSTLITWGLSVPVSDLFGVAGRHHLEELDLPDAWKTTTTATLEVIDHLTTQIAACETTLRQAALDHPDVELLQTAPGIGPILGYVIATEIGDIERFATPTKLVGYTGLCPRVMQSGNTDRRGPLTLHGPRWLRWAYIEAAVRASQHPTYQDRHQRTRRRLGPQRGPKVARVDTARRLATATWWMLTKHEPFAPASPPLSTSGEY

SEQ ID NO: 41988 - protein, 347 aa, unidentified
MRFYNKQHKHCCGIDLHARSMYLCIIDSQGELLLHRNMCATPETFLKAVAPYREDLVVAVECIFTWYWLADLCESQGIEFVLGHALYMKAIHGGKAKNDRIDSEKIATLLRGGMIPVAYAYPAGMRAGRDLLRRRLYFKRKRGELLAHIENTNSQYNHDVFSGKLTYRCHREDAADRFEDASARKNIAVDLEMISCYDHMLKELEEFIVSTANEHDSETIRLLRSVPGIGRILSMVILYEIHDIERFDRHQHLASYSRLVKCQRESAGKVSGTGGSKIGNVYLKWAFSEAAIGFLRKCPGAKPYYQRLVKKHGKGKALTVLAHKISRAVFYIWKRREVFEQEKFLAA

SEQ ID NO: 41989 - protein, 344 aa, unidentified
MLKVDFCGIDVSAKQLTVALRHDGRRLAVRSFPNTPQGHRSICRYLSKPDRLVRVCLESTGLYGLDLAIALAQFEGIHVMVANPRAVRRFAQALGHRSKNDRIDAVLLEQFAARMPFEPWQPPRAAALQLRAITRRIRALTHASTAEKNRLHAAGSSQTIPTILRRDLQSSIRHLQNSIQRLRQEALKIVAADALLKRQFDLMLTAPGIASTSALLILGEVATLSQDLDARQWVAHAGLDPRHETSGTSVNKPAHISKAGNKYLRCALYMPALVARRWQPNLKAFALHLQARGKKPIQALVAVMRKLLVALFHMLQRNQTFDGSKLFKLNDTPTPLHKHAQTAA

SEQ ID NO: 41990 - protein, 406 aa, unidentified
MAAVMIGAGPHKGSHTAVAIGAAEEPLGELRVRSSAVQAERLVSWAAAWPERTWAVEGAGGLGYLLAQQLVAAGELVLDVQPKLGARVRLLATGATNKNDPNDARSVAIAALRSATPRRVTAENHAAVLKLWSKRHRDLGRARTQVACRLHAVLCELVPGGISKQITAAQATIFLQQIELSGAVAVARCELAAEFLEDLRRIDAQLRDTRKRLTAAVQASGTTITDVFGVGPVIAATMIGYVAGAARFPTRDRFAAYNGTAPIEVSSGNRKIYRLSRRGNRRHGHAVHMAAVTQIRQPHSDGRAYYDRKIAEGKTRKEALRCLKRRVSDAIYARLQADARRAAAAVRTAGPGGQPGSDSVTSAAGSHPENRLFGQATPGPDTTLRPLGGRTPARPPAAPKKTRKAP

SEQ ID NO: 41991 - protein, 420 aa, unidentified
MSNKVIFNLDELFISVGIDVGADFSWMSIALPNQQFVGKPYKILHNSIDSLTTAVSKIKEAEELYSLESRIFLESTGIYHYPLFCYLRDKGFNCSVINPIITKNSTNINIRKVHNDRFDSKKAALVGLKPDLKVSLMPSDLALNCRNLCREYYDLMDNRGAYVNKLQGELRMAFPQYLGIFSKVTINTSLTLLETYTSPSAFLEADKQEIIDIIKSTARFGLTYAQNKYNAIIQAATDANQFGYIIDSNIKRIRLYISFIRKYDEEINNILESLHELVDANEDADFVKQIHLIETFKGAGFLSAVSIMGEIGDFSAFSKPKQLFAYFGLDPAVKQSGKFEGTKVQISKRGSAIARRVIHTLTLQSISISRNGEAKNPVLREYYLKKCDSKPKLVAMGAVSHKVCNMIFAILRDNKPSPAE

SEQ ID NO: 41992 - protein, 315 aa, unidentified
MTPAEVFIGIDVSKKTLDVSGYPEKYQAQFSNDEAGRIQLLDAMREIQPALVVMEATGGLEFEAAALLATAAVPVAVINPRHARDFAKGLGLLAKTDQVDAWALARFAAAVRPEQRELKNEALRGLEEVLTRRRQLVDMVTAERNRQGQASASMSDEIEEHITWLKRRIKIADLDLGKAVKASPAWKAKADILASVPGIGHVATMTLLAELPELGNLDRRALCALVGVCPFNRDSGTLRGKRSIWGGRASVRAVLYMAALVATRHNPVIKQFYQKLLDAGKIKKVALVACMRKLLVILNSMVHNNTQWTATKLNG

SEQ ID NO: 41993 - protein, 405 aa, unidentified
MIDWSAAKHDICVLNENGGVIATTVVPHTADGLLKLEALRQKLGVAPAECLVGIETAHTLVIDFLWARDYSHIYVIPPNVVKSTRGRYRQSGARTDTSDALLVADLLRTDLARLHPWRPDSLLTHQLRNRVGLVSHLTQTAVRLSNRLYAVLMRYYGAGLTIFSGLQTQIALQFLLAYPTPTAADALTFAQFKTFATEQHYPHPQKLAAAFARLKDAHPVSTAQTITVFEAEMQQLAQLLLEVVQAKRSQVRELQDLFMQHSDYAIFASLPGAGDILAPALLTKFGDDRQRFPNAESVQALAGTCPVTEQSGKRRVISFRTSCDHDLRAIVQQWAKASLKHSAWAQAYWQQTRPQCRSDSHGYRCLGNRWLAIAWKLWQTHTPYDEAYHLQQRLKRQQPRPAEHQ

SEQ ID NO: 41994 - protein, 370 aa, unidentified
MNQPTTLFVGLDVHKDSIAVAHAVDDRSAEVIYVGAIGTRQADIDVLVRRLQSKAARLVFAYEAGPCGYVLYRYLTRKGLQCLVVAPSLIPKKAGDRVKTDRRDAVQLARLLRSGDLTPVYVPSVEDEAIRDITRAREDAIADLKAAKFRLQAFLLRLGLHYTGRANWNASHLRYLAKVVCPTPAHQIVFQESVRAVDQQVERVQRLEAVLAEHVPSWRLYPVVQALQALRGVQDTVATIMVAEIGDLTRFDNPRQLAAFLGLIPSEYSSGERRRQGSITKAGNGHARRALIEGAWAYRFPAKVSVHIQKRLESLPKPIQDIGWKAQVRLCKRFRRLTARGKHPNVAVTAVARELAAFMWAIAREVPITA

SEQ ID NO: 41995 - protein, 340 aa, unidentified
MPLYGGIDLHANNSVVVLLNEQDEVIYRKRLPNELATILEQLAPYRPEVKGLVVESTYNWYWLVDGLREADYRVHLANPAAIQQYSGLKYTDDHSDARWLAHLLRLAVLPEGYIYPKAERAVRDLLRKRAHLVRQHTSNVLSVQNILARNTGSRFSIKRIQELTKQELKSLLAEETQVLAVTCSLTVLDCLRQQINMLEKTVHKRLYHTPSYEQLLTVRGIGTILAQTIALETGAISRFPTVGNYASYCRCVDSTKISNGKRKGTGNVKNGHPYLAWAYMEAAQFALRFQPEAQRFSQRKLAKSRNNTILARKAVAHKLSRACYYIMRDLVPFETTKAFG

SEQ ID NO: 41996 - protein, 312 aa, unidentified
MMEHYIGIDISKHCFDLYDMADGKNMHFQNNPKQIKQCTGELKKRNPKLIVAEATGGYEIPLVTQLQAEKLPLALVNPRRIRDFAKAIGRLAKTDKIDAQVIAAYAATLEPPKQDPIDANARKLKALIARRHQLTNMRTAEQNRTEHALDKTVAKSIKAVITTIDREIEKVEKQIKDHIDSQPLLKQKADHLKSIPGIGDTTAFMLVSELPEMGRLNRRQIAALLGVAPINRDSGTFRGKRMTGGGRKDVRARLFMATLVAVKHNPVIRCYYQRLLKNGKAKMTAIIASMRKLIVIMNTMIKKNEYWNTNYA

SEQ ID NO: 41997 - protein, 349 aa, unidentified
MSMVCGLDLHREQITFDAMEVESGEVWWGRVWQPDRERFRRWLRHDVARRAKGRPVALAVEGCTGWRYVVEEIGAAGFAAHLAEPADTQAARGRKRHAKTDRSDARLLRELLQRGDLPESWIPPMPVLEWRERVRLYKSLVDQRLMWTQRIHAELFQHGLAIPEAAIRSASTRAWLTGDDVNLTPAARPRVRVGYVMIDATDAEAVPLKEQLRHFGVRQPACRALVEHHYGIGGLLAVAVWSELGDCRRFSRSQQVVRHTGLDVTVDASDLRRARGHLSRQGPATLRWALFEAAHNASRAGSPDHAYYATVKDRHDDKLAAISVARQFARRCHHTLPNLDPDVVYAMPN

SEQ ID NO: 41998 - protein, 370 aa, unidentified
MKDDCTAMARGLTIGLDLGDKYSTLHVLSSEGELLDEGRVRTTQEALKARFSGFPQSRVAIEVGTHSPWVSRLLAECGHEVLVANPRRLRLIYENDRKDDKVDAEYLARIARLDPKLLAPIEHRTLQTQKHLTMIRARDALVRARSRLINLVRSSVKSVGGRLRGANPDNFHRKVVDDLPKELREGLSGVLEAIGCLNAKITECDKRVEEVSNLYPQTRRLRQVKGVGPLTALAFVLILEDPRRFKKSRDVGAYLGLVPRKSQSGDRDPQLGITKAGDTLLRRLLVNCAQYIMGPFGEDSDLRRHGEKIAKSKNAAQGNKNAKKRAVVAVARKTSVLLHRLWCSEEDYEPLRNTRKREARAKGRMVTSSK

SEQ ID NO: 41999 - protein, 338 aa, unidentified
MKLYCGMDLHSNNVVVRVIDTNDKTLYRKKLPCELGIILKALKPYSKTIEGIAIESTFNWYWLVDGLQEQGYKIHLVNTAAVKQYEGLKHTDDDSDAFWLAHLLRHGILPTGFIYPKEQRAVRDLARKRSQLVQNKTTQILSLQTLHIRNTGNALSCNAIKKLTVEDIKERYSDANLRLAMTSNLVIYSALKEQIRIIENAIVDQIKLDERFQSLMSIDGIGKILALTIMLETGDISRFENVGNYASYCRLVGSSKLSNGKKKGKGNTKNGNKYLSWAYVEAANFCIRYNEHAKRYYQKKSAKTKSVVALKALAHKLARASYYVMRDNVDFDSRKLFC

SEQ ID NO: 42000 - protein, 406 aa, unidentified
MIFVGIDWSEAHHDACVLDEQGTVLAKGRVSDDVSGVGRLHAMLADHAEDPAEVVVGIETDRGLLVASLVEAGYHVYAINPLAASRYRDRHAVSRAKSDPGDAKVLADLVRTDRRNHREVAGDSELAAAVKVLARAHQNLIWSRQRQVNALRNTLREFYPGALRAFTTAQLATTEACSVLAMAPTPTWAREKLTLARVRRSLAASGRKRNLDRRAEQILNALQAPELSAPRLVEQAYGDVVGSLVVVIDGLTHQIAKLEADLAERFEGHPDAEILRSLPGLGLVLGARVLAEFGDDPTRYDDARARRRYAGTAPITRASGTRRVVLARVARNRRLSDACYLWAFSSISASAGARRYYDAHRARGKTHHQALRALANRWVGILHGCVAGRELYREEVAWVAPVLEAA

SEQ ID NO: 42001 - protein, 359 aa, unidentified
MVTVVGIDTHKNTHTLVAVDGLGRRLQELTVEARPSGHEKVLAWLSSQGAVKVAVEDCRHLSRALEVDLLLAGHQVVRVHTRLMAGMRRGARERGKSDPIDAEAVARVALREDDLPTAVLAGPERDLKLLADHRRSMVARRSALQSKLRWFLHEIDPAIEVPSRALRRYCVLNSLQEQLAGRDGVVVEIAADMIAEIVSLTRRINELEARLGRLVRTEYPHLLAVDGLGVLGAATIVGETAGAARFHSKDAFARFNGTAPIPVWSGNHERFRLNRGGNRTINTALHMAAVTQQRLGYEGADYVAKQLARGKTHTEAMRLLRRRISDRVFAALRADEKAKESPIDLRHRPGPEPVLEVAA

SEQ ID NO: 42002 - protein, 342 aa, unidentified
MNIITVGIDLAKNIFAVHGVSETGQAVLMKPRVPRDQLLALIAQLPPCLIGMEACTGAHHWARLFSDYGHTVKLIAPKFVTPYRMAGKRGKNDANDAAAICEAITRPHMRFVPIKDQQQQSILTLHRIRQGFIAERTASYNRLRGLIAEFGIVLPQKVECLRRGIGDTLDQLPSLIQGCVTDLLTHADALSTQIDAYDKRIQLAAKQDARSKQLMQLPGIGPTTASALVASIGNGHDFKNGRQLAAWLGLVPGQYSSGGKTRLGKITKAGDSYLRSLLVLGARSVMNSRQDKQDGFSCWARNLHERRGYWKAVIAIAAKNARLIWAVLHYGEAFTAPSMKVT

SEQ ID NO: 42003 - protein, 386 aa, unidentified
MVSLIYEKCNTIFEAFSFPNSYVGGNSLLDKLASFNISVNDVEIGMEATVHYWLFIYPFLVEKGFVIHVINPIRTDGWRKGTEIRKRKTDIIDSILIADLIRYGDFLETSLANENTMSLRNLSRFRNYLINSIGDLKRKTICVLDQVFPEYQSIFSNIFGQTSKEILLHFNTPNDFENISSEQLRQVLSEITMKKFAMDKINEISSAAKKSFGIKFCLDSFSLQLRLLIEQINFIEKQVTDVEEQISALLDKINSPITTIPGIGNVTAATILGEIGDISRFKNPSKLVAYAGIDASISQSGEYNSTNNKMSKRGSPYLRKALFSVSAALVASNCDPVFKAFYQKKRSEGKHHLTAIGAVARKLCYTIYAILKNNCAYEVKLPKNDC

SEQ ID NO: 42004 - protein, 347 aa, unidentified
MLHAGLDLSRRKLDVCLLSESGEQLDQLAVPPDADALRTFAGRIDEAYREPVCAVIESMTGARLVHDTLEQEGWDVEIADAQKVKGLAPLACKTDKIDSRVLAVLSHRDLVLAIWLPDPRVREERELARFRLHLVKHKSALKNRVHSTLINFGKPCPVTDLFGVEGRALLARLQVPQPWRGNITASVELIDDLEGQIAEINRKLRERHADHPYIPLLMSAPGIGWVLAFTIAAEIGQIERFPSPQKLAGYTRLCPRVNQSEDKDRRGPLTKHGPTYLRWALLEATMHALKHPAYAQRYQRNKRRLGKQRGAKVAQVDIARRLAHAIWHMLSRNQQFAPRGAAVRLAA

SEQ ID NO: 42005 - protein, 427 aa, unidentified
MAYRIAGVDVHKKRLAVVVSDVEVEGEYEFERRKVGTSPDQLRALAVWLAEREVEEVVMESTAQYWRPVWEALERHWQPLRQQRAAAAPTSGRLHLAQAQSNRGARGRKKDFPDAERLVKRLVAQELTLSFVPDVEQRLWRTVMRRKSQVTRNRVRLQNRLESLLEEAHIKLSSFVSDLLGPSALRMLQALAEGETNPQALAALGSCRLHATPEQLCDALGACTALHPVYRRLIKLTLEELRVIDEHLAQLDHEMAQLLSAHQPAVQRLAAVPGLGVDSAQQIIAEVGPTAATFPSPKHLASWVGTCPGEEESDEVNYSHRSPNGNRQMRRVLNQAANAAVKTKGSIFELVYRRLVPRLGHAQAIGAIAHRLCRLIWRILHQGLTYEERGPAVTLLRAQRRTAKMIRDLRRLGYRVERSPAPSGSPA

SEQ ID NO: 42006 - protein, 347 aa, unidentified
MDQQCHYVGLDVSLETTSICVVDDAGAIIWRGKCGSDPDTITATVRQHAPGAVRVGLETGQLSNWLTLSLRRRGVPVVCMDARHAKAALSLQINKTDANDAFGLAQVVRTGWYREVAVKSMDAHTLRMLLVARSRLVSQRQATANTIRGLLKTFGLVVVKGSKGLFPGRVREQIAGNPALTAIIEPLLAVWYAIRDQVTMLDRQMLARTRNDQVARRLMTIPGVGVVIALAYTAVIDDPARFRRSVSVGAYLGLTPRRNQSGEVDTTGHISKCGDSLLRGYLYEAAAVLLYRDGRASILKSWGLGLAKRIGMRRAKVAVARKLAVIMHRTWSDQSEYRWTAIPSITA

SEQ ID NO: 42007 - protein, 338 aa, unidentified
MKVTTAGIDLAKNVFQLHGVDESGREALHKRLSRGKLLGYLANLEPCLIGIEACGGAHYWAREISKLGHTVRIMSPQYVKPYIKSNKNDRNDAQGICEAVGRPHMRFVAPKSVEQQTIQALHRVREQLIKGRTALVNQTRGLLAEYGIVVPKGVHKLRAALPEILEDGENGLTALAREVFADSYDQLLDSYRRIEAYDRRIERVLRASPLCQRIAQIEGIGPLGATALVAAVGDAKVFKNGRQLAARLGLVPKQHSSGGRNRLLGISKRGDRYLRTLLIHGARSVVSRCDTKQDARSRWLFAVKQRRGANRACVALANKNARIVWALLARDETYRAAA

SEQ ID NO: 42008 - protein, 385 aa, unidentified
MPQPNDLSRSLVALDQNSTIIAVVELSQSSWLVGGMLPGIERQPCKKLEPSPERLLAVLHRWRDEAVKADRIITRIALAFEAGRDGFWLARWLKARDIEAHVIHASSIAVSREHRRAKTDRLDTELMKRAFVGWLRGERDHCKTASVPSLWEEDAKRPSRERESLVGEQSRLINRMKATLIRLGIRGFNPKLRHAEQRLETLRTPEGEPIPPNTLAELKRDMQRRRFICDQIQSIEQDRLERLERTPHTEPHAMVRLLARITGIGIETADLLVHELLLRNMRDRRAVARYGGLTGSPDRSGGTNREKGMARSGNARVRRGMIQLAWRFLLFQKNSALAQWYRRRTEHAPKARKTMIVALARKLLIALWRLVREGVVPEGVAMRPA

SEQ ID NO: 42009 - protein, 419 aa, unidentified
MSFKILKNNCCGLDVHKTWIFACIGITDSNKRTVYKQARFSSFTKGLQELCHWLAKYDCTDVCMESTGKYWIPVFNILEKNNIWVTLSHPKYTKPQKGNKTDRKDAKWICDLYMCGMVKPSFIPPADIRELRDLVRYRFKLTCMITGEKNRAHNCLTVSNLKLDDVFSDIFGRSSRSITEQILQHPGETFDVAPFVHGRCKTPIEEIQAAVDGAVSKEQAVKLRQCLNHIDELEMHKSEIEREIFRLSDKYEDILTLIRTVPGFDKNPMTAIQVLSEIGGDMSVFPTAKNLVSWAGCCPHNDQSNHKIKSTRISRAGSYFKPVLVQVANALIKSKKHPEFSTRYRRIKARRGHKKAIIAICRMILTAIWHILSDLKPYTPEGFLDSRPVNKEKVLTTSQALNLLKQRGYFIKDDPLSVS

SEQ ID NO: 42010 - protein, 351 aa, unidentified
MTRNKRSIIGGVDTHTATHHAAVIDVNGRLIADAEFPTTPAGYASMLTWMRSKGKLGLVGVEGTGAYGAGLARYLHDQGIDVLEVPRPDRRIRRQRGKSDPIDAEAAARTVLAGKASGAPKLADGPIEAIRMLRVTRNGAVQARTATLNTLRSLVITAPEPLRTQLRSLTSAQLVTACAHLRPDLTKLADPVQAAKHALRSMALRAQHLNTETRTLRMQLNDLTQAAAPATSAVFGLGPDTVSALLITIGDNADRLRSEAAFAHLCGVAPIPASSGKTHRHRLHRGGDRAANSALHIATVVRLRYDPRSRAYADRRTTEGLSMPEIIRCQKRYLAREIFDALRADYAQLST

SEQ ID NO: 42011 - protein, 405 aa, unidentified
MELVPIHKRVIGLDIHQAQITACAIIEESGGETRIEQRQFGAFKRDRRELAVWAAALAPDEVVMESTGIYWKSPYAALEAVGIRATVVNARHVKQVPGRKTDVGDAQWLATLARAGLLRGSFVPPAKWRELRLIARQRQKRVGLLSSEKNRLHKVLPDAGIRLGVGVSDIHGQSARAMIKAVLNGQPPHEVLKLASRRLKASREELHDALQGELTASHVFVLDERLRPIEELEARIIRVDARLLGELASERNTRALLQTVPGVDLIGADMRLVDIGSDMSVFGTPERLASWVGICPGNNSAGKRQSERVRKGNRYIRRLLCEFAHAASRTKSTFQARFRSLIVRRGHKRTIVALAHKMLRTLFFMLKRGEYYRDSVINYEQLSVQRNASRWIKALTRFGFIPAAA

SEQ ID NO: 42012 - protein, 337 aa, unidentified
MDITTVGLDLAKNVFHLVGVNAGGQERMKKRLSRSQVLKVFGNLPRCLIGMEACGSAHYFARELSRLGHEVKLIPAQYVKAYLRGQKNDYNDARAIAEAVRAPQMRFVGVKSVEQQDIQSLVRVREGTLAARTALVNRLRGLLGEYGIVVPKSVSALRRALPEVVEDGGNGLSEGFRRLLSQGQSQLRELDAHIESLTAELTAQAQRDERVKRLQTAPGYGPIVASVFAGVVGDGRQYRRGRDAAAAIGLVPRQHSSGGKNVLLGISKRGDRYLRSLLIHGARAVVIAAKNKEDRLSRWINRLRETRGVNKATVALANKLARIGWAILRNGTCYQPA

SEQ ID NO: 42013 - protein, 345 aa, unidentified
MTVYIGVDFHAQQQTISYLTTEDGEIQRRQLDHGQPEEVRRFYQQFAGQRVVVGFESSGRAAWFEELLEELGCEIWIGHATAIRLFARRRQKNDRRDADLILDLLVRGDFPRIHRYSAESRAVLQQLRYRQRLVKLRTMVTNSLVFMASSRGVVLRSQLKSKRGLARLQQLVLPEAQREQRDELCQFLLELKPKIDKVEKWLAAKAEADVRVQRLRTQYGIGPLTGLCLAHTLERPERFANPRKVTAYVGFDPVEDSSGQRRRIGSISKQGSRLLRFLLVEAGQMAVRRDAELARVYQRILVRRGHAKAKVAVGRRLLVRAFIMLRDEIDYAEFQRRGVAARSSR

SEQ ID NO: 42014 - protein, 386 aa, unidentified
MQKLKDLSRCLTPLEPDGTLIAVIEMSRSSWLVAGIVPGVERQPLKKLAVDESVLLKLLHRWREEAEKAGYMIKRIAVAFEAGRDGFWLARWLRARDIEVHVIHTSSVAVSREHRRAKTDRLDTELLKRAFLGWLRGERDHCKMVAIPTIMDEDGKRPNRERENLVGEQSRIINRIKATLVRLGIRGFNPKLKKAAERLQGLRTPEGEPIPPNTLSELHRDMERRRLVRDQIRQIESARRDRLEHAPGEGAHAMVRLLARVMGIGIETADMLVQEVLSRNLRDRRAIARYAGLTGSPDESGRKRREKGLARCGNPRVRRGMIQLAWRFLLFQKDSALAQWFQARTQNARGTRKTMIVALARKLLIALWRLVRDGVVPDGVILRPAQ

SEQ ID NO: 42015 - protein, 418 aa, unidentified
MDVLVDRCAGLDVHKDTVMAVVRRPTANGSGREQEVRQYRTFTAALRELRAWLVGEHVSQVAMEATGSYWKPVWHVLEAEDGYELLLCNPRHVKNLPGRKTDVSDAAWLAQMLECGLLRGSFVPTPVMARLRDLTRYAKKLIEERTREVQRVQRVLEDAGIKLDSVASDVMGRSARRMLEALIAGERDPAVLADFAQTRMRVKIPELRLALEGGFSEHHALLLRMLLDHIDHLTAAVDRLDAQVEAEVAPFSKAVELLSTIPGLGARTAWVILAEAGPDMTRFPTAAHLASWAGLCPGNHESAGKRPSGRARKGDTALRTAMVEAAWAATRTRSTYLGAQYQRFRRRFGSRGETKAIFAVAHTMLVIAWHVLALQQPYAELGVDYFTRRNDPEAHARRLAREIETLGFDVTIQPHTAA

SEQ ID NO: 42016 - protein, 372 aa, unidentified
MQYTTKYVGLDVSKDTIAVAIAEAGRERARYWGTIQNEPAAVRKLIRQLGKKEELEVCYEAGPTGYGLYRLLKDMGVSCVVVAPSLIPARPGERVKTDRRDALRLAELHRAGELTGVYVPTAEDEALRDLVRARDDAREDVHRAKQRLIKFLLRHGIRKPEHLKNRWTKRYRAWLGTLKFELAAQETTFREYLHAIYEAEERVRRIETSLLEVASEGAHAKVVEALQGLKGVAFLTAVCLVAEIGRFHRFRNPRQLMAYLGLVPREYSSGQTVRRGKMTKAGNGHARRLMVEAAWSYRHQPGVKGALAKRLEGMDADIQMISWKAQTRLYGKYRRLVARGKQKNVAIAAVAREFVGFVWAVACLAESGQQSA

SEQ ID NO: 42017 - protein, 313 aa, unidentified
MGNYKKHRIEKVVKISRLKNTQNITSLSIVKDTREYATFRHNLRKLASWLKKEEVEMAVMESTGIYWRTVYDVLEEEELKVIVVNAQHVKKVPGRKTDVSDSQWLAELSRCGLLRASFIPPRDMRQLRLLTRYRRKLIETLAGEKNRLQKVLEDGGVRLSSVVSDIDGVSAGRMINALIEGSEPLEKIAELALGRLRKKQSEIRLSLDGQLSDRHRLLLKTIKSHVEWLHTTIADIDDQVVAAMKPYMTEWNLLQTIPGVDEISAAMLLAEIGTDMSVFGSKDKICSWAGISPGNNESAGKKRVAGQAKETGT

SEQ ID NO: 42018 - protein, 496 aa, unidentified
MMMPQEIEDEEHERVLGRVAAVDVAKASGMVCIRVPHPSRPGKRRTRVWEAAATTGAVLGLAEQLAGEGVEMVTLEATSDYWRIWFYLLEAAGLSVQLVNARDVKNVPGRSRSDKLDSVWLAKLTERGMLRPSFVPPAEIRQLRDYTRLRTDLTRDRTRYFSRLEKLLEDSLIKVSSVASSLDTRSVRDMIEALIAGERDPGVLAGLARGKMKAKHAALVEALTGRFDDHHGELARMLLDQTGALTAQIERLTGRAGELIAGIPAARGVDAGGATGPGAGEGQDAAVRPAIARLDEIPGISRRTAQVILAGTGLDMSRFPAAGHLVSWAKLSPRTIQSGAKSTPGKTGKGSPYLKGALGEAAAAAARTGTFPGERYRRIVKRRGKLRALVAAARSILVIVWHPARRPRRPLPRPRPRPLRQPHRHRPQDPQPRPPARSARVHRHPGPRRLTRITPPTRLRWRSAGCCRALAGVIFRSEVSGSSPLSSTRSSRSGMI

SEQ ID NO: 42019 - protein, 424 aa, unidentified
MNKRIAQNIADTPPGTLFVGIDVGRKRHQVSIMTEKAAVVARFGIDNSREGFEFLLTRAMNCKQKIGCQAFLFGSEPAGHYWRPLAYYLEGRKYSYKLVNSFSVKRYREGMDLALNKNDRSDADTIADMLRSGRFLQTVLPYGVHAELRRSYRHYCHLRTELTQKRNLLTAAVDNLFPEFRRAFKDILGKTAVATLHACASPNLIRKLSLEDWQSLVYSHYRGRCFKGKKKVWLVYHLAHESVGIPVEEQSLLREITLLLQSLAGIQHQMQTLEADILLYLHQIKGHELLLSVAGIGSITAAGILAELGDMQRFGRIKGPVKLAGINPSEKQSGEFRGKSVMTKKGKTLLRTTLYSAALTLISHNRAFQEYYRGLRNRQLRPLSGMKAIGAVMNKLLRVVYAILKKGTPFNEHLVYPVKQEEVI

SEQ ID NO: 42020 - protein, 443 aa, unidentified
MSRKQRTHLRGKRGQAFADQIRGIPLDRILCVSLDISKYFHVVMIHNALGEIVTPTFEIDIFQSGFDRLCQAIDQAVAQTQAQVVWVGMEPTSHYFENLARHLRAQSRPVTLINSYAVKENRDQQMMRREKTDEIDVAAIGDLLRRGEGTPFQPASGVYLQLQQLDRVRLSKVKMRTMLKNQILGHRDRIFPGLVLIGDEATQRYTPLFATDFWACKTLQHLIRVCPNPHHLIAMTPKDLVNAFHAQGFALGRLTAAKILAYAGKVLLPNAELAAIRCELLQHDLALLEEVERHIADLEDRLRDLLAQTPYTIWAKLKGLSDIQVASLAAAIGDPAHYAYAGQVFRRTGLVSGRNDSGIRQRKGRGKRVVKTGDGYLRRAVLNGLRSLILHQPALRRYDRRLQQSKPKGVAFVATARRAMGILWAPLRDQRPATLLLQRGATM

SEQ ID NO: 42021 - protein, 326 aa, unidentified
MILVGIDVVKDKHDCCIINSDGKFPEEVFSILNNREGYETLYKRICSLAVDLAKVKVGLESTGHYSSNLLAFLLDKHLTAYVINPLRVNLFRKGQSLRRTKTDKIDSRNIAHLLMTDSSLKPYSLSSYHMEELKSLTRYRASMVGERTKLKTSIARLVTILFPELEQLVSSIHIHSIYAMLEKFPGAAYIAAAHLTRLTALLLKASRGRFGRETAIRIRDTARRSIGAVSPAKSMELQHTIAHLRVYDQEIGEIESEIEKIMDDVNSPITSVPGIGMQMGAVILAEIGSFRRFDSPDKILAYAGMSPSTYQSGKLTGSYSRMERGL

SEQ ID NO: 42022 - protein, 369 aa, unidentified
MTDLMLFVGLDVHKKTISVAVVEAAAGAVVRFYGTIANTPDSVRTLCRKLSKDGQQLHFCYEAGPCGYGVHRQLTRLGHRCDVVAPALIPRKVGDRVKTDRRDAMMLAQTLRAGQLTAVWVPDEAHEAMRDLVRLRTQAMRDLRKARQQLLSFLLRHGRNSPYGHWTKMHRRWLGELVFAHPAQHLALEEMLQRIERAEALCDRLKAAILELVPQWSLAPVVQAIQALRGVSLIVAAAIVAEVGCFSRFESPRALMAYLGLNPSEHSSGATIRRGAITKTGNTLARTCLVEAAWTYRFPPRVSQIIRDRLKELPEPIRAVAWKAQVRLSARYRKLTAAGKPGPKVVVAIARELVGFIWAIARMVEPKFA

SEQ ID NO: 42023 - protein, 346 aa, unidentified
MLYAGLDLSRQRLDVHVLDEEGRTVEVLAVHPDADALRTLAGKVLRHGQEVSAVIESMTGSRFVHDTLERFGWDVMIADAVKAKGVAPLAAKTDKIDAHVLAELARRELVPEIWLPDPTIRAERERARFRLHLVRHRRALKCRIHATLMTFGHTVPVTDLFGTSGRELLAGLTLPEPWARTLATSLAMVDELDERIDECGRELIRLGADHPYIPLLLTVPGVGPLLAYTIASEIGDIRRFASPKKLTGYTGLCPIVRQSGNHDFRGPLAKNGPKYLRWALVEAATHAARDPHYRDRYERNKRRLGRQRGAKVARIDIARQLAEAIWHVLTKNEPFAPASPAILLVA

SEQ ID NO: 42024 - protein, 430 aa, unidentified
MKSNTQNAKIEAITEKTLVLGIDVGSEMHYARAFDYRGIEYSKKPFKFSNTEAGFATFKEWIRDLKERHEKDKAVPGMEPTGHYWFNLGKFLQDNEMKPVLVNPHHVKKSKELDDNNPTKNDRKDPKVIAGLVREGRYMIPYLPDGVYADLRTASNIRFQLQAELTRIQNRISRWFNIYFPEYKTVYGKPDAKSGMLILKAAPLPEDILTLGIEGVNQIWRDAKLRAVGKARAKTLIEAAEHSVGSKEGAVSARMEIRMLLEDYESRNTRLQEVMVLIEELVRKIPMAEKLLEIKGVGIKTVSGFLAEVGDISRFNNPKELQKLAGLALVENSSGKHKGETTISRRGRKRLRYLLFEVAMSLVSKNQEFRELHNYYTTRRLNPLKKMQSLMAIAAKLIRVFYAMLTKGVDYDPKKMISDIKRPAVYLQAA

SEQ ID NO: 42025 - protein, 346 aa, unidentified
MVLIGCDFHPSWQQVCWVDTETGETAEHKLVHAPGEAEKFYRQFAAPALIGMEATGNCQWFVELLQTLGHEVWIGDAAKIRASDVRQQKHDRRDAALLLRLLVEGRFPRLWTPSSEQKDMRQLLIHRYKLVRLRAQAKNGLQHLAMNQGVQKKNRLWSKNGQKLLREIALRPWASRRREDLLRVLAMLDQQIESLDLAVKKAAEENENAKLLMTQPEVGPVTSLAFVLTMGDVSRFPRGKQVASYLGLIPREYSSGGQQRLGSISKQGNRFMRMLLVEAAQVAVRCDPQMRQEYLHRCHQKPKGVAKVAAARKLAIRLYWMLRTQKRYPEIVHVESSSRVPLVSAS

SEQ ID NO: 42026 - protein, 416 aa, unidentified
MEVMHSRCAGIDVSKKDAKVCVRIQGRGRRATSSTVTTWGSTSGEILAMREHLIAQQVSCVIIESTSDYWKPFYYLLEDVLKVELVNAAAARNVPGRKTDVADAAWLADLGAHGLISASLVPPPPVRVLRDLTRARTLITRERTKEIQRLEKLLEDAGIKLSAVASNIIGVSGRAMLEALIAGERDPAVLADLAKQRLRNKIPALTEALTGRFSDHHAFMVQLYLDRIDAHGADIARLDERIEEAVQPFRLARQLLMSITGWSTITADVFIAETGGDMSVFPTAAHLASWAGVAPGCNESAGVVKSAATRPGNRYLKASLGVAALSAARSKDTYYSIKFKRIAARHGKHGALVALVAVEHQMLIDAYNMLQNGAFYRDPGPDYYTRRNPERAKASALNQLRALGYQVTLEPLAKTA

SEQ ID NO: 42027 - protein, 347 aa, unidentified
MRKIAYLALDVHVRSCVLGDMDSNGNFRGTQRFETSEQNIIHALKAVKAKEKYLAIEEGTLAHWVARVACGYVTQVNICDPRENALIYKSSNKRDKVDAYCLCRLLRLGELKHVYHPEDDQRAIFKAAVQHYLDISNQQTRLKLKIKAMYRHWGVIDIFGDSVYQSDKSDAYLKQIAHRPVRNQLKRLYCLLDNSQAMLKAAFKDMKQLGRKYPEIKQFKKIPGIGDVGAHVYDAFIQTPHRFAKKNRVWKYCRLAVTDRSSDGKPLGFKRLDKSGIGALKALSYRAFMAAMKSDNEVRRFYYQSLQRTLSRKHARLNTQRKIVAVMYSIWKKKDAYRPELFLDPST

SEQ ID NO: 42028 - protein, 321 aa, unidentified
MQVNPVFVGVDVAKATLVSCIHGTARRVKLANEEAEIERWLETLPANVVVAMESTGRYHAVLARQVHRSGREAHVLNARDVYFYAKGIGTRSKTDRVDAQVIARYVAEHHGALHAWKPGSDAQVALQTLLQRRARLVTHRVAVRQLLRGVEGLDEPAQDLEEQFERLLEQIDRQVDTWVASEPDLARRCRLLRTITGIGLQSSALLTALLSRIPFANGDALVAYSGLDPRANDSGPKNGRRRLSKRGNADLRRQLYLAAFSASHSKALGPLYRSLKAKGFKTTEAMVILARKLLRVVWAVWKSGKPFDPTRFASPVTCAQT

SEQ ID NO: 42029 - protein, 743 aa, unidentified
MATWVAGVDLGKKGAHVAVLADESGQQIGPALSFFTSPDDLDRMRAEFKARAPEGTEFVFVMEPTPTWRPVARYLKACGHRVFLANQSQAKSLRNLLKRHAKTDRLDALALAKLPLVSPQAVHPAPVPDDPRWEVLLRGVKREYKLSLHIANLLKWIKEDAEECIPGVADLFPEPERPLDNLVYRDYCALERHRGMTRERLREEIQARLGRPLDPQETRRVDRLFSLAQQALRLHGKLAPATTAVAEATREDLEFLRLLKAEQKRVTEKNYELYRELDKKGCVRSLRGVGRTLAPVLLAVAPVVACMTSAKQMRKFSGYVPRVDNSGLKEGKGQSMTKEGPAWFKRALFLASDTGRKCDPQLARIYWRAMVEKGFPHVKAVCEVAAHTADRLFRVLKDNRLYELRDPEGNPVSAREARQIIATRYTVPEEVRARLRRQKKHGRGSSDERDGANQHLPAMPTPSGPQVSTEAAPRSTGTGQAQRVAAILAEHLGPEFLARLATRQPDSLAPGMQPRQDDLPLRRAETATQGRTTALEPSEVATGQQDSPCSEAEDAPQPRPAHVPQPPAPPRATAGEIPENGRRQGTQSPLKESATAPIESRPDQAPAVGADAATSATDLLRAISHQQASEQPLEQPVAAPEGVQHGTSAPDSSGDAPESPGPRGLHPFLPPPGKPVATAAQASPLDPVTACPQARSMHLAPGPFRNAAETAATPPPVGAALTGPDPTGNGCHPRDRPIPGYPQ

SEQ ID NO: 42030 - protein, 324 aa, unidentified
MSSDGEVVIRKRVSRAKVLEFFASLPSCLVGIEACPTAHHWSRQLHALGHTVRLMPPSYVKAYLKRSKNDANDAAAICEAVTRPSMRFVPMKSEQQQSGLMLHRSRQLLVRQRTMLSNAIRGHMAELGVISAKGRNGTAELLKIIANKTNDCIPAAAQFSLDVLARQYAATTAEIGVIEKRIHAWHRSCEESQRLEEIPGIGPIVATALVAEVGDWKAFSSGRNLAAWIGLVPKQHSTGGKDRLGGISKQGNRYLRWLLVAGAMAVIRYARQHGTKRLWLVRIMERRPIKIAAVALANKIARIAWAIMVHGERFKEPRLLPVAA

SEQ ID NO: 42031 - protein, 338 aa, unidentified
MKLYAGIDLHSSNNFIGVIDENDKRRYSKRHYNNIDTVLKVLKPFKKSLQGVVVESTYNWYWLVDGLQEQGYRVHLANPAAIKQYEGLKHTDDRWDSFFLAHLLRLNILPEGYIYPKEKRAVRDLFRRRLRFVRHRTSTILSLQSMFARHKGSTPPGNLIKTFSQWEMEGRFDCSNLTFAAQADVAEIENLNAIIKSIEKKIRPQVQLAEEFELLLTIPGIGDILGMTIMLEVGDINRFEKVGNYSSYSRCVKSQRISNKKKKGEGNRKNGNRYLAWAYVEAAHFSIRYCSGAQKFYQRKKAKTNGAVATKALANKLARASYYIMRDKVPFDEEKLFR

SEQ ID NO: 42032 - protein, 407 aa, unidentified
MEENRKRYVGLDVHKHYLIPLGVDTDLNVVLPARRVELSRLESWMKKTLTKQDEVVLEMTTNTWQLYDELIQYAGSVTVVHPPHVALITRSQVMNDKIAASILARLLAKGLLVGIWVPPQEIREARGLVAQRQKMVRLATQAKNRLHAVIQRHHLVPPAGNPFGVSNQEWWQTLSLGKLEKLNLQSDLETLEFAEKQGKQLTEIMEGMVAEQEEIGRLLHLAGFGVVIAFTVWAAIGDIRRFAEPRYLVGYAGLGTRVHDSGMTSRSGKITKAGRRDLRTVLIEAANVAANHHPHWKAELARLEPRLGRNKAIVAIARKLLIAVWFVLQGKTDKYAEPKAVAQKMLKFAYAVGKANRPKGQTAAQFARIRMDALGLGRELTSIAWGSKKPIPLPPSKLKGRSDVPNK

SEQ ID NO: 42033 - protein, 320 aa, unidentified
MSKKKSKAFIGIDVSKTLLEVAAHESDYQFRCANKAKAFGELIVELIALRPALIVLEATGGLEIPVVAALHAAGLPVVVVNPRQVRDFAKALGQLAKTDRLDARVLAHFAAAIKPPLRPIKSADELELDALVGRRGQLVEMLTAEKNRSGSAATDTVREEIKEHIDWLEERIAELDKQLKAQLKNSTLWQGKDDILQSVPGIGAVVSFSLIADLPELGTLNRQKISKLVGVAPLNNDSGQQRGTRHIYGGRTRVRSMLYMAALTATRFNPVIKEFYERLLANKKLFKVAITACMRKLLAIINVMVRDSTLWKIKDAKVLA

SEQ ID NO: 42034 - protein, 397 aa, unidentified
MIAVGIDVSKSKSTVAILDSYGTILATPFTMAHNQPEMNALVSRLKAFEEPITILLEYTGHYHYPVLKKLQDEGFPVCVINPYQMKKYGDVEIHKAKTDKKDAIRIATYALERSYRLVPYSFMEQKYEDLKFLSRQYQQRIAFVSKLKVQLINLLDQTMPGITKSLALKSRDPEKCALLLFIKRYKSFDEIQRIGKTRFLSTYATLMKKTPDRYAPKKGLEIYELACESITTRGEDPYIWSAQDQCIDLLSTAQNAADEIITQMQNIAETIPEYKVLRAMNGVGDRLGPVILAEIGDIRRFHSAKALNSFAGNDAPPYQSGQFESKNRHISKRGSSTLRKACFEVMQSLKLTKPQDDPVYLFMLKKEQEGKPYNVAKMAGVNKFLRIYYARAMELYK

SEQ ID NO: 42035 - protein, 341 aa, unidentified
MNRQYAAVDLHLARSLIVREDEAGTELAVERIDNSPMALAEALTDAGPNPEVAIEATYGWYWAVDVLEELGATVHLVNPSGLGQSWEGRRVKNDYKDCRELIDRMRLHKLPEAWIAPPELRELRELVRYRAKLVNLRTGLKAQVKAVLAKHCLRPPVKDLWVGHRGASFLDELALPDAYITRIESLRDLVGVVNREVAMLERTIHGRLRDDRGYRAIQHLEGVGPVLAAVFCAEIGDAGRFAGPQALCSWSGLTPKHRESDGKAHRGRTTKQGSRLVRWAAIEAISKMRGGPKLKIDYHRIADRRGKYVARVAVARKLLTLVYYGLRDGEIRCLRADQQAA

SEQ ID NO: 42036 - protein, 347 aa, unidentified
MKRIAVDLAKSVYQVAESIHVGRVDRRRRLDPEAFRRYVQEQPEPVEWVMEACGTAHYWGRVAQAQGHRVVLLHPRYVRPYRRRNKTDRNDCDAILEAARCADMHPVPVKSHEQQQVQQLHNLREAWKKTRVQHINLLRGILRELGVAAPSGTQAFLRQACELIERPEVCALRGALQMVLAEISLCEQSMRDSEEQLARWHADDDIVHKLDEVSGIGLLTASALKTAVGKPERFASGRHLSAWLGMTPNEYSSGERRRLGCISCKGNTYVRTLLIHGARAALLAAKRCQTRTPERLTQLQRWALQTAERIGHNKAAVALANKLVRICWAVWCHERRFSGDWQSARPA

SEQ ID NO: 42037 - protein, 321 aa, unidentified
MSIKKSRRSWIGIDVSKQLLEVAVHKSEYHFRCPNEPAKFPALMAELIALGPARIVLEATGGLEIPLLQALRTAGLPVALVNPRQVRDFAKALGCLAKTDRLDARVLAHFANAIKPPLRPLKTTEDTELDALMGRRNQLSDILVAEKNRRGSAATETARADIDAHIEWLEQRLKALDKQLKDQLKRSVAWQHKDKLLQSVKGIGFVTSVSLLADCPELGQLNRHQVAKLAGVAPLNRDSGKQRGTRHIFAGRAPLRAKLYMATLTAIRCNPVIKAFYQRLIARNKLKKVAIVACMRKLLTIINVMVRDNKFWNVKAQPVSA

SEQ ID NO: 42038 - protein, 425 aa, unidentified
MNYKQNEKINQVKESTLVVGIDIGSTTQYARAFDWRGIELGKVFTFSNSREGFEAFKAWMQHLQDKYRKSDVIVGIEPTGHYWFDLGAYLEDEGILLVMVNPYAVKQTKELDDNSQSKNDRKDPKVIAKLVTEGRYSAPYTPDGVYADLRIMVANRKRLIREMTQIKNRFARWFAIYFPEYTDVFGDYEAQSSMLLLKKVCTPEAIVELGAEKINQIWRDAKLRAVGMKRATTLCETAKRSIGLKKGSSAARYEMKLLLEDYEYKKAQLDAVMEEIEKLCRKIPESEQMLAIKGIGVITVAGFLAEVGDVRRFESPRQIQKLAGLSLRENSSGKHKGQTTISKRGRSNLRAVLFNAAIPLIAKNPEFKSLHEYYTTRANNPLKKKQSVIAISCKLIRVFYAILANGVTYDPQKMLSDIHRQPQAA

SEQ ID NO: 42039 - protein, 342 aa, unidentified
MKVTTIGIDLAKNVIQVHGVDERGKTVLKKQLKRNQVAAFFASLPPCLIGLEACASAHHWARKLEAFGHTVKLMAPQFVKPYVKTNKNDVADAEAICEAVSRPNMRFVPIKNGEQQAVLALHRARQGFVKARTAQANQIRGLLAEYGIVIPQGIGHIAKRLPEILEDGENELPGVFRQLLQRLGDHLKELDRQAGELEVQIQSWHRESEASKKLAQIPGIGPITASALVASIGDAKIFENARQLAAWLGLVPRQHSSGGKQVLLGISKRGDTYLRTLLIHGARAVIRVAENKVGHADSWLARLMGRRNQNVAAVALANKNARTVWALLAHGRDYEANYGVAA

SEQ ID NO: 42040 - protein, 344 aa, unidentified
MVDILKYSVGIDVSSEDLAVGFGLLSRDLLSKISKPKKFTNTPKGFKSMDNWITKQRKVKETKLGIVMEATGVYHENVAHFLYEKGYEIYVVLPYKAKRYLDSLGNRSKNDPIDSIGLTQMGIDQQNLEKWHPPSPVMMTLRGLTRQRQQIQELITSDNNRLHAVQSGFHDAKAVKKLLRSRIRFYKKQVKQIELDIIATLKEQPQLAAKVERIVQSIKGIGLLTMVTLIAETNGFQYFHSIQQITKYAGYDVIENQSGKFKGRERISKKGNSRIRRILHMPALNMVTFGTGTFPSLYQRIYEKSGIKMKGYVAIQRKLLCLLFTLWKKDEIFDPNFKSELSKT

SEQ ID NO: 42041 - protein, 335 aa, unidentified
MIKENYIYVGIDLHKETHTAVMIDCYNQKLGEITFPNRPADFPKLVAKVKKCNTDGKTIVFGLENAYGYGRALAVWLIDKGYLVRDVNTAISHRQAKHRGAMYRKSDSDDAEAIALATLNMLDKLPDAYPNDAYWSLGQLVHRRDNIMKQRTRLVNQLHEQLCIAYPSYKQFFNDISRPTALYFWEHYPSRKYLKGKSVEDLRAELVPVSHNKCSTRTCEKILDAIAGDKVKNNAYQDARDMVTLSIVSDLQHYDKQLAEVDKMLEQMYKMLGCTLTTIPGVNVITAVKILAEIGDIKRFANANKLAQFAGIAPLHLSSSGKGKDVATKQGNRRL

SEQ ID NO: 42042 - protein, 462 aa, unidentified
MNRKKEPGKPAKGSAQKKLNWKALEIVHPDAAGIDVGGSEHWVAISPDRDPEPVRRFGCFTTDLREMARWLIDKGVRSVAMQSTGVYWMPIFEVLEQHGLEVFLVNAQHTKNVPGRKSDVAECQWLLKLHAFGLLNNSFQPSDEIRVARTLWRHRGDLVAEAGSSVQRMQKVLTEMNVQLSNVLSDLSGVSGMKIIKAILEGERDPQVLAAMVMPGVKATPEDITKSLEGNWREELLFVLRQHLELYRFYQEKITDCDRQLRKHVESLGSKVDPQMQPLGPRPKGKKIARNAPEFDLRSELYRISGIDWSQINGIDVLTAQTVIAEVGADLSAFPSEKQFTSWLGLCPTNEQSGGKILNRRTRKVVNRATVAFRNAARTLLRSQSYLGAQYRRLRTRLGAPKAITAMARKLACLFYRLIKHGHQYLDRGTEYYEARYREQQIRSLTKRAQRLGLQLVIPKIA

SEQ ID NO: 42043 - protein, 384 aa, unidentified
MNKHSILFIGLDTHKEFNEVAYIEEHRGAQPVHLGRVSSSKVAVQKLVRQFESKYPGATLHFVYEAGPCGYWIYRLITSLGHCCYVVAPSLIPKKPGEKIKTDKRDALKLAKLLKSEDLTPIYVPEPEDEAVRDLSRAREIAMKDLKDAKYQLKALLLRNNINYKGTANWSQKHLRWLTEFVLPHPAQHIVLQEFLQTITERISRLQRLDNELTHHVHQWRYYPVVKAIQAMRGVRLLVATGVVAELGDLSRFDHPRKLMSYLGLVPSEHSSGGKRHIGAITKCGNGRARRLLVEGAHTYRYAANISTDMQKRQEGLPKDIIDIAWKAQLRLCKRYKKMIAKGKHYNLVVTAIAREMIAYIWAIAKEVVLTPVNAKLRLARVPA

SEQ ID NO: 42044 - protein, 348 aa, unidentified
MKIVGCDLHARQQSIAMLDTETGELTEKVIRHEGNGVREFYAALGNSVVVGIEATGSMQWFLELLEELGIESRVGDPAKIRAAETRKQKHDRRDARLILDLLERDRFPAIWMPTSGQRDLRSFLRDRHQWVQMRARLQHTLQAMALNHALRKGPALWSGRGQEALRKLPLPPYASQRRNELMSLYAQLQRRIQELDKQVEEQAQQRPQARRLLTHPGVGPVTALATDVFLGDPSRFTTANQVASYIGMIPSEHSSGKRQRLGKMSKQGNSLLRYLWTEAGMHATGKDPELKRFYRRKLIQKGMGKARVAAARKLGIRLWIMMRDEIDYGEFCRRGKLRQIGESPCGNA

SEQ ID NO: 42045 - protein, 412 aa, unidentified
MRVIRKRCLGLDLHKKQHTAHLRVHQGSDQEPIVFQEQFGTMPEDLERLRDWIVEHQVTDVVMESTSVYWMHLYEMLEGVTHPAVVNASHVKKVPGRKTDVTDAEWLAELHAHGLLRLSFVPPKEIRRLRALARYRSKLVALRTGARNRTIKLVEMAGVKLSSVATDSFGKTGRLILDGLCKEKADPAELAKQAKGKLRCKIPALEQALRHPLAPHQRELLALHLQAHDMIDAQVALVEQQLSVLATPYQDAIAKLDAIPGINSLAAITLLAETGVDMSVYRNDRHLTALAGLAPGNAISSDKRRRIGVRKGNRHLKRICVQIAWAASRKKDSFLRARFLRLQARIGRPKAIVALARQILVVVFHLLSDDRPYTDLGPNFYASRNKQQTAETYVKRLTKLGFDVTLTKKTDR

SEQ ID NO: 42046 - protein, 387 aa, unidentified
MSQLSDLSRSLVALEQDATLIAVIEMGQSSWLVAGIVPGIERQPLKKLAPDQDGLLQLLYRWRKEAIQAGRTIKRIAVAYEAGRDGFWLARWLRTHGIEAYVMHPSSVPVSREHRRAKTDRLDTELLKRAFLGWLRGEPKHCSMAAIPSIEDEDARRPSRERQSLVKECTRIVNRVKASLARLGIRGFRPALSRASKQLQTLRTPEGSAVPANTLGEMRRDIARLLFVKQQIKEVERTRVKRLEQTHGERRTAMVRLLARVVGIGVESADLLVQEVFSRELRDRKAVARYAGLTGSPDESGRKRRELGLAKAGNARVRRSMIELAWGHLLHQKDSPLAQWYRRRTADARGGTRKTMIVALARKFLITLWRLVTTGEAPTGLLLRPTP

SEQ ID NO: 42047 - protein, 343 aa, unidentified
MARTCQYSIGIDVGKESLVVQVMQPPGEGKFFKTESTSWPNHRTGYRKMFSWLKQQGITGWESRMVMEATGLYWKRAAQFFYEKGFEIWVINPRQMHSYMKGYGTQGKTDRSDARIIAHYGHHGKGHPWVPDSTGIGELRSLIRHREDVLKLLGQLRNRKESWAQDPQGASEVKSSLECLIKGLSKQRTQLDKAIHQRLVETSSWKEMVDILHTVPGLGDISIAWLLVETKGFQRFPNPHALASYAGVVPHPYQSGTSVKRKDHISNTCQRSLRSVLYMAGLCAIRVNPLLKEFYLRLRQRQKPFKVALIAVIHKLLRILFALVRNHQPFCPNLSPITQGGTP

SEQ ID NO: 42048 - protein, 381 aa, unidentified
MTEMIVGLDPHKASNTIAVLDRDETLHVRCRFDNTAEGMVAMLDAVAGFTSRVWAVEGANGIGRSVAQRLVAAGETVVDVPAKLATRVRVYSTGHGNKTDRADAVAIARAALHSKRLRMVRPDDENVALKLLSDRRHELIASRTQSVSRLHRLIRELVPGGTPRALTAERAEALVSGLNVSDAAGVMRIELALDHIGDIKRFDRRIDEVTLGIHAAVKDSGTTLTRIYGVGPVTAGLILGEVGDVSRFPTRNHFASYTGTALIAVSSGDNNRHRLSRSGNRQLNHAIHIAAIAQIRYDTPGRAYYRRKLDEGKSRREALRCLKRRISDAAYRQLQLDRELDQHQDQAWPRWPSSRGGHPSYRSPETLRRNGQPMKPRTLPV

SEQ ID NO: 42049 - protein, 331 aa, unidentified
MFPVGIDVSKNTLDLCMLYDGIKGRIKTRNIQNNRHSVENILRWLRLQHCGPEDVHVVMEATGVYHERLATELHDAGFRVSLANPHRSREFARGMGIMTKTDKVDAYMLACYAFLKKPHRWEPPAPEIRYLGALLRRRDVLLGDALREENWLEKYLPTDTPADIISSCRRMAQLLREEVSNIERQIKAHIKACPALRRDYTLLTSIKSVGPQLGMHMLVVLRSHNFASAEQAAAFLGVVPIEKRSGTSVRSRPRMSKIGPPQLRAKLYMSALCGKIYNKRMRNIYDEMCLRGKPKMVAIGALMRKLVHWCYGVLKTGTVFNDESLKQVLST

SEQ ID NO: 42050 - protein, 344 aa, unidentified
MYYYAGIDVSLECSSVCVVDGTGKILREAKVASEPEALIAWFRSQGLGLERIGLEAGPLSQWLYAALREAGFAVELLETRHVRDAFKAMPVKSDRNDARGIAQLMRLGWFRPVHCKSMEAQEMRAVLTARKLLQSKLRDVENSLRGVLRGFGLKVGKTTECTFAERIRELVAGHPGLELVAKALLEAHAVLRREFNGLDKCTQKLARAHPSAKLLMTTPAVGPIVALTYASAIDDPKRFSSSKATGAHFGLTPKKYQSGQTDYTGRISKIGDASVREALYQAAHVMLTKPVKNCSALKSWAMRIAKRAGMRKAKVALARKLAVILHLMLADAKPFNPEAKAAAT

SEQ ID NO: 42051 - protein, 341 aa, unidentified
MYSIGLDVSKATISIHVPLNSLDLEIENNLKALKSFYAKLKKLYKKDLEKLMFVYEPTGSYSAILTKFCSTKRIKAFIINPKQSSNFAKALGHRSKSDQIDAIMLSRAIAVARKDEIKVPIVNATAETIKELMSYYMFTLKQRVAINNHHEALKAKDGNAYALKDLLKRHKEMKEKEAEILNKIKNIINEDDDIAQAYSNIKTIPGIGEIAGIVLIHLFIRYPNANQKQITSLTGLDPVVKDSGTSVKSKPKISKSGSRLYRGVLFMATMVSIKYNNEMREFYNRLKENGKHSTVAQIAVMRKLIVIAHSLYKNNTTYNAEIYKKACGVKLEKDTNKELVA

SEQ ID NO: 42052 - protein, 482 aa, unidentified
MKKRNIYQNQSQELLSLFEQAENNSKVMCVPIDYAKKDHVVMFCNGYGDILRKPFSVKNSPQGVEYLTDQVIRSCRQRAISEKHVFFGGEQVGSFADNFVSTLRCQGWLVAGVNAHEAKTQRENLQASTDRLDLMGIAKTLLNRRANCSPAQSGIYLNMRTVVRHRRKLVDIKTEVRNRIHAVVDRLFPGFLDESKSGITPFSKSSLWLMKERFSAGQIRRRRRSTLIEALRRLGTKKPERTADKLQQHAIQVLKPPQDHVHMLQLSLAQHVKHFCCLQQSIGQLEKEIAVNLAQTQGAFLTSVRGIGIVLAAGVSAEIGNPFEQKPLNNLVSYCGIIPRVKQTGGPQGETKTGKVAKRCNRILKDYVVQSASHLGLHGPADLKSDYKRRDAAGQHADFGMARRYLRMAICLMRTSQIYLPSGLRKAQAQMDERADYYLMTWPYLRDKWQKLGALETAFKADHPLGQWRKIVQQFYGIKLTL

SEQ ID NO: 42053 - protein, 376 aa, unidentified
MKKGGEAFVGIDTAKARNAVTVAEGGRQGELRYLGEFDTAPDAVAKLVRKLSDRYRMLHFCYEAGPTGYGLYRQIMAMGHECTVVAPSMVPRKLGDRVKTNRRDARTLARLHRAGELAAVWVPDETHEAVRDLVRTRAATVEDYRRKRQHVSAFLLRQRRIFDGKTTWKGRHLRWLDSQNFAYPAQRLAYQEMLNGVRAAAGRLDRLDAMLLEIIPDWTMAPVVAAFQAVRGVGFTNAATLVAEAGDIRRFDNPRQLMAFLGLVPSEHSTGETRRQGGITKTGNTRARTALIEAAWTYRYPAGIGDVHQRRQAHLPQQIRDIAWKAQTRLCARYRRLMARGKQKTVVTTAVAREIAAFLWDIARHIEPAEMRAAAR

SEQ ID NO: 42054 - protein, 335 aa, unidentified
MQARHVPSAPSVPSVSAAVPEVVVGIDVSKATLDCYLDGPVGRWVQVPNDPAGVARLIAELRPLAVRLVVVEATGRLHRRLAAELLDAGIPVALVNPQRAREFARASGCLEKTDRVDARVLAEFGRGVRHRTLEKLPAKQAELDDLVSRRRALVQVRVAEQNRLHDELPKLARRQGERLLRLVDQQVEDLDRAIAGLIDGDDDWRRRGEIITSVPGVSDGTARQLIADLPELGRLSRQRIAKLAGVAPLAADSGTHKGERHIRGGRGPVRNALYMAAFNAMRYCERFKRMAEQMRTRGKAFKVIVTACMRKLLVTLNQMVKTNSMYDPKLNVPVP

SEQ ID NO: 42055 - protein, 396 aa, unidentified
MKKMYEKVVCGGMDVHYKFSRVTFRDAKGEVVCRERLEHPDRKALAEHLSQWPPGIPIAMEGSFGWQWIAELMLQQGLNPQLANSLKVDKMREARGWAKTNKKDADLVSLLPLEKTDWWRVWMAPSEVRDRREWMRYRADLVQTQTRTKNRIHAVFHRHGVFHEFSDLFGVQGRKFLDALCQDGGGRLSGGALRAFRGYVSTLTHIRIELIEVMKELHKHLLRTPLTCHLRKHVPGFGAVLPHVVVAEVGDMARFGYSHRRLAAYSLLAPRAWDSGKETDEPAVGRKLGHRGNRTLKWAFLEAARGAVRKGGHWRELWDRHTQGGKKDKNRGYLKVARQLCKLVVREWHKAVFGPEESSLVRQEQPARRAKHRRRGRGQSSTRSGTGALNHPMVEV

SEQ ID NO: 42056 - protein, 412 aa, unidentified
MWPAKPETPAEPPNGSSGEWAQTQRLLELGSQEWKLELMHVAVGQPTQEAYATPMNSVGLDVHKTRCVACIKTHEGRILEEFAFQNTPHGHEELITHLKAYPEVQVAIESTGNLWIPIYNRLEDEQIHTILTNPMKTRLIAEAKIKTDKLDARILADLLRANLLSASYVPPPEIREQRSIIRERARLTRLRTIIKNRTHTLLDKHSIKTPYTDISGKHSIEWLSKLELPPGDRILLDINLEQLNSLNKSIDKLTETIALSAITNPEVKLLMGFTGIDYYSAMLLINEIGPIARFASPKKLVSYAGLAPSTHQSGNHTTHGHITKEGNSHIRWILVEAAQHASRHDPRLSHFYLRVMKRRGHNRAVVAVARKMLVTIYHVLNHHREYRGLRPELYTNKIRRLQRITESSLQTE

SEQ ID NO: 42057 - protein, 339 aa, unidentified
MKVSTLGIDLAKNVFQLHGVGCNGQTVLKKKLTRDKFLPFLMQLEPCLIGMEACASSHHFARVLRQYGHEVKLIPPQYVKPYVKTNKTDAADAEAICEAVARPNMRFVQIKTAEQQAILVLHTERNILIRERTACANSMRAILAEFGIIMPRTLSQLYKKIPEILEEYDNELSPFVRCSVARQLEHLQGVEDQITLTEQELSRWAKTQPACQRVMKVPGVGLMTATYLVASVGNGQQFHSAKQFAAWLGLVPREFSSGGKQRLGRISKRGDRYFRYLLVHGARAVAAVIERHKDNMPWLYRLLNKKAYNVAVVAQANKTARILWSMLVHHTEYRTLSAV

SEQ ID NO: 42058 - protein, 350 aa, unidentified
MRHIGVDVGKKRCQACVMDEESEILDEFPFTNTSDGIQRLSKLAGGDCKAVIESTGNLWLRIYEALETHGVEVKPANPYKTKAIASARIKTDKLSARVLAHLLRADLVAECYVASREVRQVRALLRQRSSLVKMRTMVKNRVHSLLDRYGYNSPWSDAFGVGGLEWLRELVMDPVDRCILDTHLRHLECLRKEIGVLDSKVASHALESTDALLLMTLTGIDFHSAMLLACEIGDIRRFPSPKHLVSWIGLCPSLYQSGNSLYMGRMKKDSNKRARWVLVQAARTASRTDPLMRELYLRVASRKGDGKAVVRVANKMAVIIWHMLTERRPYEQVKKGLYRSKLKKMKRIAS

SEQ ID NO: 42059 - protein, 350 aa, unidentified
MREHSEAREVKVVGVDLAKNSFQVHAVDATGRKVVGKKFSRHKLKEYLINLPPCTVAMEACAGAHYWARLVQSYGHEVRLIAPQFVKPYVKSNKNDAADAEAICEAVQRPNMRFVSVKEIGQQDIQSIHRMRSLVVAQRTAQVNQIRGVLLEYGITIPVGRSNVLKRLPEILEDAENGLTDLFRGELFGLYAELKHLDERIAHYDEKIEQIAQADERTVRLQTIPGIGPKVATALLAAIGDINAFKNGRELAAWLGLVPRQHSTGGKPTLLGISKHGDVYLRQLVIHGARSILRCVDRKTDRTSQWASALKERRHNNIAVVAMANKMVRVAFALLKKGETYRAERNLVAA

SEQ ID NO: 42060 - protein, 333 aa, unidentified
MVEGTKGSHHKEGSTKMSRHTMICAGIDTGKCKLDVALDQGSDRLQVENTGEGHAELLTWLRKRRVKRVGIEASGGYEQTIVSTLRRNGFVVVVFQPAQVRAYAKYQLQRAKNDKIDAALIATCTAEAKKIHPPPDPRLAPFAELLTIIEQLTEDIACDKTRREMSRDEETRRFWSEDIARLKRLVRQRLEQLVAAIRQHRDLAHRLDLIASVDGVGLRTAVAILVRMPEIGRITRGQAAALVGVAPYDEDSGGHVGARHVEGGRERLRESLYTAALPAAFHWNPELIAIYRRLRAAGKPHKLALIACTRKLIIFVNTVVARGTPWVPRAAIS

SEQ ID NO: 42061 - protein, 343 aa, unidentified
MTHFVGLDVSQKMTAICVVDNAGHRLWRGQCPTVPEQITVLVRLHAGDDARIGIETGAMTPWLVHELRNLGLEVVCLDARHARAALKMQINKTDQNDAEGLAQIVRTGWYRSVHVKSFESHRARALLGARTQLTGMTTRLSNHIRGVLKTFGLLPGAMRGLPFDRKVEALLLDRSDVALVVRPMLVAWRQLREQIVAFDKAIRALVKSNSACRLLMSVPGIGVLSALAYVSTVEDPARFGRSRSVGAHLGLTPRQYQSGEVDRSGRISRCGDTLARTLLYEAAVVILSRVKRASRLKDWARAIAKRSGNGKARVALARKLSVILHSVWRSGEPFRWSEHARAA

SEQ ID NO: 42062 - protein, 420 aa, unidentified
MYYCGIDVAKREHEACVLNDRGQEVFHQRFKNRRLDADRFVRQLQEKLGAKPEEVTVVMEATGHYWLNLYGFLTQRGFQVRVLNPIQSDAARNLYLRKTKTDARDAFILADLLRMDRASDSRQPNDGLLRLQALERFRYELVTRIGSLKQRVLGILDRIFPEYETLFSEPFVRSSRELLMNYPTPEELAAADLSELAALLSKASRGRLGEEKALEVQHLARNSFGITLGLDSFALELKLLLAQIEFLEGQVETVEAAIDQALTEVCAQDKTEEKETQTTAEKSPRHVLETVPGVGPVVLATLLGEVPDISTFINPRRFVAFAGIDASVKESGEFQGTRMHISKRGSPYLRRALWYCAQAAKRCDERFNAYYQRKLQEGKHPKVATVALMRKLAVVIYYIWRSGKPYDPDYVWKPTPPLSN

SEQ ID NO: 42063 - protein, 346 aa, unidentified
MKFYTGQHKFYCGVDLHARTMFLCVLDERGYPLLERNIKTDPELFLKTVAPYREDLVVAVECMFTWYWLSDLCSREKIPFILGHALYMKAIHGGKAKNDRIDANKIAVLLRGGMFPVAYVYPPKMRSTRDLLRRRMFLNRKRSALITHIKCTFAQYNLPEPEQNVSRVSQRDGVAEQIPDPGASRNVRLDLDLFAFYDQTLTKLEQELTVIAKDHDPDAYFRIRTVPGIGKILTLVILYEIHDINRFPSVQDFASYCRLVKPAKESGGKRLGSGGAKIGNVHLKWAFSEAAVLFLRKNEAAKLYRARLVKRHGKAKSLTILAHKIARAVFFILKRRTVFQAETFFA

SEQ ID NO: 42064 - protein, 484 aa, unidentified
MGARKTKQKPAMVEPVEIPDAEHELVIERAAAIDVAKAAGKVCVRLPGKSGRRFSRVWDVPARTGAITELAEQLVKLGIDKLTVESTSDYWRIWYYLLEDAGLDVQLVNSRDVKNVPGRPKTDKLDAVWLAKLTEKGLLRPSFVPPAPIRVLRDYTRLREDLIRECTRYWQRLEKLLEDAAIKVSAVASKLDTLSTRDMVEALIAGERDPRRLADLARGRMKAKRSDLITALDGRFDDHHAELARLLLGQIDALTAQIGALSARIEQLIDAMDESDHHTGDRGGSGGAVPPATGEQTTALGPPTTTAIGVDSDTATVVEALRLTAVERLDEITGVGQRAAQTIIAEIGLDMTRFPTPEHLVSWAKLCPRTIQSGPVIRGGKTGKGNPYLKGALGEAAAAAARTDTFLGERYRRLVKRRGRLKALVAVARSILVIAWQLLSDPTARFHDLGPDYHTSRVVTERKIRNHIAHLTAMGFHVTLQPAA

SEQ ID NO: 42065 - protein, 344 aa, unidentified
MDHFAGLDVSVKETSVCIVDDTGKIVREVKVASEPEALLAVLKKPAYRFKRIGLEAGPLSQWLFSALAEAELPVVCVETRHMQAVLKAQINKTDRNDARGIAQMMRVGLYRPVHVKTLRSQKLRMLLTHRKLLQSKAIAIENDLRGTLRNFGLKVGMAGKTKFEARIKELVENLPDLAELVEPMLVVRRTLREQIVILHRRLLAIVRDDEVCRRLMTTPGVGPVVALTYRATVDVPARFRKSKSVGAVFGLTCSKYQSGEIDWSGRISRCGDEMMRVMLYEAAQVMLTRTNKWSWLKAWAMQIARRRGMKKAIVALARRLAVILHRIWVDGTEFRWTREQAVAA

SEQ ID NO: 42066 - protein, 348 aa, unidentified
MNLKRIGLDTSKAVFTLHGVGHDEKAILRRNMRRAEMEAFFAKLAPAHVALEACGGSHHWGRRLAAMGHTVQLIPPQYVKPFVRRGKNDRNDAEAISEAAARPDMPSVPVKSAEQQAEAIVLSARELLVRQRTQLVNAVRGHAAEFGIVAAKTISQLPGLLEAVAAAETVPATAKQMLAFLGAQVAQLDDRIAELERRMKQQHKANPVSQLLTEVPGIGPVSALSLALTIDPSRFTSGRHFAAWLGLVPKEHSTGGRQRLGGISRAGNERLRQLLVVGAMAVIRYAKPGSKTASAWLLALLERKPRKLAAVALANKMARIVWAMMATGEAYRGGKKAATPVAGAAAAA

SEQ ID NO: 42067 - protein, 398 aa, unidentified
MSNTQIRVAIDVGCDHHRVAVGLSNDKMLDEFDITHNADGFQNFFNRLEQLQTRYRLPVAVAMEGYNGYARPLDGQIRQHGYKLYSVNNLKLARYKEVFPAPAKTDAIDARKILELFQLADSLPLAKDVLQEVVDTPIENDKLKRLTRRRRQLVGERVRVVNRIQSDLQAVCPGLLTITHDVANRWFLNFLICRDELPKLAKINRVGLLEIPAVGRIYAAKIKAWQPNAQFAPDVEWVGEMIIQDAKRILSLGTDIKILDKKIAEIALNSNLAQTIGSIPGFGKTSMAELAGEIGNVERFDSEAGLAMYLGMAALDNSSGKKTGTKTPRQVNTRAKAAMMTAVARHIPCVPQSRSYYDKKRAEGKKHNQAIRSLGRHLVRVIWAMLKHGRTYEIRCDI

SEQ ID NO: 42068 - protein, 343 aa, unidentified
MKTVTTIGLDIAKSVFQVHGIDAAGKVVIRKQLKRSRVLPFFMKLPPCLVGIEACASSHHWARQLTALGHEVKLMPPAYVKPYVKRQKNDAADAEAICEAVQRPSMRFVPIKSPEQQAGLALHRTRHLLIRQLTATTNSIRAHLAELGIVAPVGRRGVDALIALVRSDEDGRIPSLMRACLMTLSLQAQALKEQIRILDRRLLDWHRSSELSKRLDAIPGVGPALATALVASVADPKAFRCGRDFAAWIGLVPKQNSSGGRERLGNITKAGDRYIRSLFCAGALAVIRFVKIHGAKHRPWLTSLMDRRPIKVAAMALANKLARMAWALMAKGESYKEPVALAR

SEQ ID NO: 42069 - protein, 392 aa, unidentified
MYIVGIDIGKNHHEASIVSPEGKQIGRSLRFATTHKGADSLMSFIFKNIGNSPCVFGMEATGHYWYPIYSFLKAKGYTICVINPIQSDSLRKMYIRQTKNDSIDSFLIAEVIRFGQFGTTSMADENILAMRQLCRYRDSVISSRTEIKLRIGTIMEQIFPEYEKQFSSLWVSTSMGILEKYLTPENIENAPIDELFEIIKDKSHNRLTKAKAISIKEAAADTFGIKIAQDAFSFQLKQLIDRMNFHDKQIEALDCQILEYYEKFDCYLHTIPGIGIIGAATILAEIGDISRFKNSSALVAFAGIDPTVRQSGEFNSTHNHMSKRGSPYLRHAIFLAATTCSFHNSPLNAYYKKKRDQGKHHLTATGAVARKLTTVIYAVLRDSKPYEPKKFC

SEQ ID NO: 42070 - protein, 387 aa, unidentified
MPKPNDLSRSPAALSEDSTLIAVIEMGLASWLIAGRIPGVNRNPLRKQDPDPEALLVRLHRWRDEAVQAGHSISRIVVAFEAGRDGFWLARWLQARGIEAYVIHPTSIPVKRDHRRAKTDRLDTALLMRAFLGWLRGEADHCSMAAIPTLEEEDRKRPNREHQNLSGERTRIINRVKGALIRLGIRSFNPNLRTAAERLKQLQTPEGAPIPPNTLAELDRDFARLRFVADQARAIEKTRLNQLKTAPNDGPNSMVLLLARVIGVGIETADMLVHEVLSRGLRDRRAVGRYAGITGSPDESGAKRREKGLAKAGNSRVRRGMLQLAWRWLMFQKDSALTQWYRARTENAPPRARKTMIVALARKLLITLWRYTTNGEVPAGVVLHPAV

SEQ ID NO: 42071 - protein, 408 aa, unidentified
MDLTPMHRRVIALDVHQAKITACAVVEYEDGRLEVVLRDFGAFKRDRRALAQWALEIAPQVVVMESTGVYWKSPFAALEAVGIIAWVVNARHVKAVPGRKTDMADAQWLATLARAGLLRPSFIPPLLMRELRLVARQRQKLVGMCSAEKNRLHKVLVDAGIRLSVLVADIHGTSARAMIKALINGQPMHEVLDRKGRVRASRDELFEALSPEQFGAVHRFVAEEIMQHIEQLEQRIARFDEYLLQGLKAYEPQLKLLQTIPGIDVQGAAMLLVEIGADMSVFGSAERLASWVGICPGNNESAGKRKSGRIRRGNAWVRRLLCEFAQAAARTRCALKAKFESLTIRKGHKKSVVALAHKMLRTIYAVLGNGVHYQDKTVDYEAQSVARNAPRWLKMLRKHGFIGTPAAA

SEQ ID NO: 42072 - protein, 358 aa, unidentified
MLMQRKELNFEGQNVFIGIDVHLKSWTVSIFTEKLFHKTFTQPPKVESLKKYLDVNFPNANYYSVYEAGFSGFSAHYYLNEMGINNIVVNPADVPTTQKEHQQKDDPTDSKKLARSLRSGELSSIHVPQIATLEARSLVRVRSTLVKDMTRFKQRIKSFLYFHGINYPPEFEKSDSHWSRKFMLWLKDVKLRNAAGMDALGVLIKEAEQQRNLLLETTRKVRELSKSEIYSRDMKLLRSIPGIGPITAITLLTELEDITRFENTDHLAGFVGLIPCRHSSGEKNKNGEMTFRGHEFIKRVIIESSWIAARRDPALNMAFHNYAKRMETNKAIIRIARKVMNRIYFVLTKKQEYVMGFV

SEQ ID NO: 42073 - protein, 346 aa, unidentified
MKKIFIGIDFSKEKFDATLIKAEGLKECAPSMHEVFDNKTSGFRRLVRWVKAQSEGLPIDTWIFCGENTGAYSIGLSNYLYASGYDMCLENAYKIKHSAGILRVKNDKADSKAIAEYAMRNYDKVRLHKPQSSSLTCLREVFLYRHSLVRQKVALTVRRDEKRLTQEKSDARAFMSFTSKHLITEINKAIYKCDQKIKETIAADDELREIFDIITSMPGIGIQNATCLMVYTDNFQKFDMDSRKIACYYGIAPFGRQSGTSVNSRPKVSPFANRMIKALLSQAALAAIKSDISVHNYYQRLIERGKHPLLIHNNIKNKMLHALVAMVRDRKKYNPDYVYQTNKSAA

SEQ ID NO: 42074 - protein, 311 aa, unidentified
MSEQITIGIDVSKDRLDVHVRPTSQACTVARDGAGLAGLCDRLTVLAPALVALEATGGYETVVAAALAGAGLPVVVVDPGQVRSFARALGKRARTDPIDAAVIAHFAEATAPEVRPLPDEATRLLADLVARRRRIIEMATAERQRLKRMTITRVRRSIERLIRALEKELADLDHDIDDAVRGSPARREAEDLLSSVPGVGPVVSRSLLAELPELGHLDRKKIAALAGVAPFTRQSGTWKGRSFIGGGRSAVPTVLFMAAMVASRHNPLLKAFYQRLLQAGKPKMLALLAVARRLLVILNAILRDKRPWQTT

SEQ ID NO: 42075 - protein, 313 aa, unidentified
MAESCFIGIDVSKDSLDLHALPGAESRRFPNDEEGITQTLAWTAARNPSLVVLEATGGYQARIAAELAARNITVSVVNPRQVRDFARATGQLAKTDALDAAIIARFARDVRPHPRPLPDEAEQAIKALVTRRMQLIVMRTAELNRLHQDTPKRVTTSLEKSVAFLDREIESLDGEIDDQIKQSPLWREKEDLLKSVPGVGPQTARTLLSQLPELGKLSRREIAAFVGVAPLNRDSGKLRGRRVIAGGRSQVRAALYMAALAASRFNPRIRAFYLRLRAAGKPAKVALTACMRKLLIILNTMLKTQTRFSHGTA

SEQ ID NO: 42076 - protein, 340 aa, unidentified
MRLIGCDLHASQQSIAMLDRDTGVVVEKTLMHEGGAVREFYAAVPPPVVVGIEATGSMGWFLRLMEELAIECRVGHPTAIRKAETHRQKHDRRDAALLLQLLVENRFPAIWMPSTEYRDLRSLLLHRHQWVRMRTRVQNALHAIVLAHGVRRGHTLWNRDGQALLASLPLAPYTADRRSELQGLYQHLQAHIDRLDKQVKHVADERPRATLLMTHPGVGPVTALATDVFVGDPTRFLDGKALASYVGMIPREYSSGTRQRLGALSKQGNPFLRFLWCEAAAHAVRRDPDLQRFYRRKAVQKGFAKARVAAARKLGIRLWIMMRDQIDYAEFCRRGLARQT

SEQ ID NO: 42077 - protein, 331 aa, unidentified
MQYHPTKLGIDISKRTFDVCLLNGAKPKHEKFSNDLEGFKKLENWLNKAGSTELHIGMEATGNYWKALARFLNANGYQVSVINPLKIKRYANYRLHSNKTDKADAMMIANFCLQEDENLLLWQDVDEETRHLRELIQYRDNILTMLGQINNRVESIVEDDAVLLWQLEDKVHWEQRLKFVNEEIKAAINKSEELKKKDALLQTIPGIGPVITSYFMALIPDVSAFKRSRQVVAYFGLDPSIQESGTSVKKRTRISKKGNASFRGKLYLPAIVAINHNPIIKNLAERMTASGHLKKENNVAAMRKLVVQMYGVLKSGKAFDPNYAQIRVKTS

SEQ ID NO: 42078 - protein, 338 aa, unidentified
MKLYGAIDLHSTNNVTVVINEHDQVVCQKRLPNDLSMIAQQLSSYRRSLEGIVVESTYNWYWLVDGLMEKGYRLHLANTAAIQQYNGLKYTDDHSDARWLAHLLRLGVLPEGYIYPKQERAVRDLLRKRGQLVHQRTANLLSIQSLISRTTGNSISAQYIKALNIQRVDGVFPNPDLVLALKANLAVMKSADAQIEILEKAVQDRVKLRPQFRFLKTVPGIGPILALTIMLETGEIERFASVGNYASYCRCVGSQKISNGKRKGTGNTKNGNKYLAWAFVEAANFAIRFNSRIKGFYQKKKSKSHAIVAIKAVAHKLCRACYYIIKDQVAFDVTKAFA

SEQ ID NO: 42079 - protein, 431 aa, unidentified
MSERKSLEIRVSVDVGSRSHQVAIGLSSGEVLEEFEIAHRVEGFEDLFSRIERHRKGNSYRVAVAMEGFNGWARPLDSLVRGRGYRLYNINNLKLARFKEIFPGAAKSDRIDARKGLELFQLRDHLPLAKEVLQEVVGTPHENEVLKRLSRRRRRLVDERVRVVNNLQADLQAVCPGLLEITKEAGNQWFLNFLISADTLPQLARLRRTTLLKIPSVGVKYARLIQDWQERAHFSEEVEWVSAMIQEDARRILELDETIKALEVKTAEVAETSTIAKLLRSIPGYGAICTSELAGEIGTIERFNKEGSLALYLGMATLDNSSGKYQGTKRPKHINTRAKAAMMTALDRHRKYVPQSQKYYEKKRAQGKSHNQAIRALGRHLCRIIYKMLKEKREYEVRPLKRDTQAKVTSRSSRIGQIGKKKSRRKDKITI

SEQ ID NO: 42080 - protein, 399 aa, unidentified
MINGHDQFAVFLGLDVGKGEHHAVAQSRPGKKLLDRALPNDEAKLRELYRRLRKHGPVLLVVDQPATIGALPVAVALDEGITVAYLPGLAMRRIADLHPGSAKTDARDAAVIADAARTMPHTLRALKLDDERIAELTVLSGFDDDLAQQITATSNRIRGLLTQIHPALERVLGPRMDHPAVLDLLETWPIPADLTKAGKSKVRSRLLKRAPRIGARLTEEIFAAMAAQTVVVTGTNAAAVVLPRLAAQLASLRAQRAEVAEKVEEVVAAHPLSKVLTTMPGVGVRTCARLLTEVVGKGFPTAGHLASYAGLAPVTRRSGSSIRGEHPPRGGNKVLKRALFLSAFAALSDPVSRAYYDRKIAQHKRHNEALIALARRRCDVLYAMLRDGKPYLQPPATAA

SEQ ID NO: 42081 - protein, 335 aa, unidentified
MTTMNYIGLDVHKKTISYCVKDVSGRIQQEGKVGSTRRELDCWMKSLPQPWTVAMEATIFSGWIYDHLLPHAAQIKVAHPLMLRAIAAAKKKNDQIDASKLADCLRCDFLPECHMMPAEIRDRRRTLRYRHLLVRQMVQMKNRVSGLLMETGVEYNKQRLHKVSYFRELLSTNTEVHPSIRPLLKLSRETIERCQKTEYALVSSLQRDPVLAGRIKRLRTVPGVGPITALTWALEIGDVSRFRTIKNAISYCGLCGDERSSADKAMRMPLSKQRNKHIQRALVEAAKLAPRQSHELAVIYDNERQKGNGNRATLAVARKMVAYLLAAEERRTPAA

SEQ ID NO: 42082 - protein, 479 aa, unidentified
MFHNKGYRWPDEIPVGISEDTPDDKQSATPLLLNSIKQVDTAIMAAVVSPTKMSLISADGRYLLDTFKEVFFIMISVGIDVSKEKSTVCAIKPYGEVLMTPKDFKHTKDDLDSLVKQLSRFKEEIHIIMEATGNYHLPVYQYLKSKDYLISIINPLEMKRYRCQGIRNPKTDKIDSMIIAQYGIDYWYRFKPNDDMDEKRQELRLLGIQYTQFMKTRVIRCQALCEILDRTMPGVYGLLDDFNRNNGQDKLCDFAEKYWHSDNITKYSEKAFIERYNSWLKKKGYRPNEKEARQLYSIAKNAIPTLDSKLPSTKLLVQEAVNVLREVDSSLYDILNQLKTLSKEMPEYNTVLSMKGIGETLAPRFIAEIGDPRRFHSAKALIAYAGIDAPPYQSGQFTGTKRHISKRGSSNLRKLGYELMDSVNKHKSLYSGDPVCEYFKKKRNEGKPYRVAMIAAFNKFLRIYHSRVSEVLNDYDKTK

SEQ ID NO: 42083 - protein, 354 aa, unidentified
MSSFIRFRKGLFSMKKNAFYIGLDISKADFAASIYQTPGQAMITKETIPNDPKGFTLFLSWLKEHHITKSNCRICMEATGVYSQAIAYYLLFAGFPVSIEPPLKVKRAFDPIGHKTDPVDSKQIAEYAYRFQDELTAWKPKEEILEKIRQLLSVREQFTKQKTALKNAIHAYSLQSVQVALIHKAHREILAQIEKQIARIDKELAKLINQDPDTFQKVSNLKSIPGYGMLLAAHLLVMTDNFTKIQQYKRLAAFIGIVPYQHQSGTSVCKRAKIRHFGPMPSRKLLRLAAQSVATHDMTFRRYYLRKVAQGKAKALVLNNISNKLLKVACTIIRNNTRYIKDYRSMHPMYVKSA

SEQ ID NO: 42084 - protein, 339 aa, unidentified
MGLYTAFDLHSNNSYVGIIDEDGKRVFRRKLQNDEGLMVKVLNPFKNDIVGVVVESTFNWYWAVDLLMEEGYKVHLANPSKIQKYSGLKYADDEDDAFWLAEMLRLGILPEGYIYPKADRPIRDLLRKRGHLVKLRTSLIVSLQNIISRSLGGKMKTSDIKVLAEDRVTPLLECNDDLALTGKVSKEAIDSLTRQIKTIEGTVEKKIGLSRPYQHLLSMPGVGRILALTIMLETGPIGRFQEVGNYASYCRKVPTTWTSNDKKKGKGNKKNGNKYLAWAYSEASELARRFDDNARTYFDRKRRRTNAPIAHSALAHKLSRAAYYIMRDGVPFMAEKTFG

SEQ ID NO: 42085 - protein, 428 aa, unidentified
MSLGHETVGLRRAREKRARANRFLEGKPLIVGLDLGKGKHAAVFGGLDLVPIRRFMVPHSLEGVGRLLEEAERDRVAGGFDRVIVFFEPTSHFWQNVANVLDARGIDYRTVASLGVERHREIEHLTYAKGDYRDAVLILQMGGRGQWLRRLLHADPLWLELRTLSYEHELLLELETAERLRVRSFVELVLPEFFDYFDDPLKLTARTLLKVLATGTPATFQALLESAAQVTGHRLRVSKIKALTARLATNARFGVERLLGPTLVRVGLAIDRYELLSHQRSGIRKRLVALYEKTPYRVSLETIPGVGPENHALLLGLVGDPKQYDRSTCLVKLAGAEPRENHSGMGEGSHSISRRGSSRLRHLLHRIVLGLRSHNKEFSAYLARLQKRDASPLKFHQAAVATGNKYLRLVFRLCVAGARYDATKLGSR

SEQ ID NO: 42086 - protein, 449 aa, unidentified
MSNGSGVSRGDRNRNARLGRLRALVPVTNAIVGIDLADNKQMVVVTDHDSRVLARKTFRCRAWDLGSALDWAGRQATSQGFAWATVSCEPTGHRWRVLGQLAMDRGMPFVCVQPMLTSWARRSEDLTFDKTDEKDAVLIARLTAQLRCYVPEPADETWGRLRHLGARREQLIVESTSQVQQIRALLECVWPASLDTARQPFRSVTWAAAMSVILDRDGGDLARTRRLGLARLEAASRRFIVARGGQKPCRRIVRQLFMALSDSAGVITHRRGALERVALLLQDWNHAQRRMADTEARMLTVLDELGLTELVTSITGLSAIGAASILAETGDPRRFATARALVKHSGLAPREKLSGTFTGRTKLTGQGRPGLRLAAWRAVWGAQRANPVFAARFKYLTGRQANKLTAPQAHAAIAAAILRHLHAVVTTGQKWDPVIATHGTRHQVLPAAA

SEQ ID NO: 42087 - protein, 488 aa, unidentified
MKATKTPSVFDSQNLELRKLYEDAASPRAILCVALDYAKSKHLALCCDGNGDILKAPFPVRNNAEGIDFLVEQIEASARRRNIPKKHIFIGGEDEAPYVSNFISALRARGYLVVRVNAFEAQHNRNGRLASTDAIDLSGIARTMVSRRARTTTPPDDAVYVELREAARFRRILVRDLTAASNRIHAVVDQLFPGFLDHSRSRLTPFTEASLDLMAERFSTMEIARRKPAALAKFLHLRRVHDPEETAAAIIALAREALPPDPTRIAGLQRTLTGLVELHRCLKRNALDLRAESARMLATTPYALLTSLPGIGFVLAAGIAGELGPPEQLRSIESLCAYAGIVPRSYQTGGPDKPAVQGHVSNRCNRILKDWTVQSAQKLHLYGTPEIKDRITRWNANGQHGIYAAAKRYLRLVRALTRNGVPYLEPAARTAAAAPQDITAGATAAWTILTRKWRTIPGGLDLIADSAHPIGFWRTTVTELHGIKLHVR

SEQ ID NO: 42088 - protein, 317 aa, unidentified
MNTPVCVGIDVSHAQLDVAVRPGKGFSVSNDAGGWATVVAHLQPLKLVRIVLEATGGLEVPLVGALAGAGLPVVVVNPRQVRDFARATGQLAKTDVLDAQILAHFAEVIRPPLRPLPDAQTQVLAALVARRRHLVEMLTAEKNRLRTAAPAIRRSLRQHLVWLQRERTQLDTELAETIHSSPMWRATDDLLRSVPGVGPVLTITVLANVPELGTLTNKQIAALVGVAPLNRDSGTLHGKRLVWGGRAHVRAALHMAAIVATRYNPVIKTFYQRLCQAGKAKKLALTACMRKLLTILNAMLKSGTPWRHGMDTVCAKG

SEQ ID NO: 42089 - protein, 459 aa, unidentified
MNRNRSKSRVDRTMPMVNPNAAAIDVGATMHMAAVGADRVLEPVRSFGTFTADLDQLVKWFVECGVETVVMESTSVYWIPIFELLDARGFAVFLVNARDAKHVPGRKTDVSDAQWLQRLHSFGLLRASFRPKGQIAELRAYVRQRERLLEYAASHIQHMQKALTEMNLQLHHVVADITGTTGLRIIRAILAGERNPEALACLRHYSCHASVETIAKALTGSYRAEHLFALDQAIALYDAYHEKASACDVRIEAVLKELVIHRGHDHGSAPPVSRRRNRTDQANALAFDVRAALFRLLGKDVTTIDGLGPYLSLKLIAECGDDLSSWPSAKHFTSWLGLAPSNKVSGGKMLSSRTRRSGGRAAALLRLAAVTVGRTDTALGAFYRRLSSRIGKAKAVTATARKIAVLFYNAVRHGMDYVDPGASSYETRYRTRVINNLHRRAKTFGFVLQPLEPGAGAVS

SEQ ID NO: 42090 - protein, 413 aa, unidentified
MDRLIERCAGLDVHKATVTACVRVPDGAGGRHQEIRTFSTTTAGLLTLRDWLQGYGVTLVGMESTGIYWRPVYYLLEDDFTCWLLNAQHLRNVPGRKTDVADSAWIAQLVEHGMVRPSFVPPREIRELRDLTRYRKAMIQERTREAQRLEKTLQDAGIKLSSVASDILGVSGRAMVTALVEGTHDPDTLADLAKGALRKKLPELKEALEANFRSHHAFIASEILTHIDYLDEAIERLSGEIERVISPFAQQVALLDTIPGVNRRTAETLIAEIGADMGRFPTHRHLASWAGMCPGNNESAGKHRSGKTRKGSKWLRHALVESAGAAARTKGSYFSAQYSRLKGRRGHKKAVIAVGHSILVVAYHVLERGQPYSELGEDYLLLRHSTEAYTNRLVRQLARLGHKVNLEPLPASA

SEQ ID NO: 42091 - protein, 447 aa, unidentified
MTLDVVSKTGKTPVLGRMLSKYVGHKMSSIENEITKTRNHSRQRGNMMRTVFGIDVSKASSEVAIVINGEKIHGYTMPNDTIGFTRLLDDLKTVQKPEIIFEARGVYSRRLQAFLEENGYAYTQLNPLEAKKQLDSLRVRKTDKIDAETLAISQFVLNRKPTYIQEEVYQELRDLSRFYQNLTEDIVRTKNRLHKVLQVTFPEMENILSTPTREQYWNLVMTFPYKDFVLELSKDEPLEGIRQSTSKRISNKRVAYLAQKLAALANQSYCAVKKNSPILEEIRYYAKELLRLSEQRQAVLEQMVELAQPLPEYEILLSIPGIAETTATSMIGELRDIRRFQSANQINAFIGIDLRHYESGNFLVKEHITKRGNPYARKILFKCIHNIAAASHTNHCHIEDFYEKRKRQSQTTSTKPHTIASIHRLIRTMYYLITHNKLYDYTSTQNR

SEQ ID NO: 42092 - protein, 316 aa, unidentified
MLYVGIDVAKNKHDVTALNVPGKTVLKPLTFSNNKAGFELLDLSLRQLNQDCLIALEDTGHYAFNLLNFLHEQGYKVYTYTPLLIKEFAKSLSLRKTKTDKKDAHGIALKLLSDPNREQFQHDNRQVELKILARHIHRLKRKQSDWKVQYTRCLDIIFPELDKIVGKHSEYTYQLLTRYPNPQKRIEAGFDKLIEIKRLTASKIQDILSVAPRSIGTTSPAREFEIIEIIKHYKRLIDKAEKCVNDLMAEFNSVITTVTGIGNRLGAVILAEIQNIHAFDNPAQLQAFAGLDSSIYQSGQIDLAGRMVKRGSPHLR

SEQ ID NO: 42093 - protein, 456 aa, unidentified
MKIPQSTIRLLTGRLVKILLYREVSTMKSNTQNAKIEAITENTLVLGIDIGSETHYARAFDYRGIEYSKKPFKFSNTEVGFATFKEWILDLKERHEKDKVVPGMEPTGHYWFNLGKFLQDNEMKPVLVNPHHVKKSKELDDNNPTKNDRKDPKVIAGLIREGRYMIPYLPDGVYADLRTASNIRFQLQAELTRIQNRISRWFNIYFPEYKTVYGKPDAKSGMLILKAAPLPEDILTLGINGVNQIWRDAKLRAVGKARAKTLIEAAEHSVGSKEGAVAARMEIRMLLEDYESRNTRLQEVMILIEELVRKIPMAEKLLEIKGVGIRTVSGFLAEVGDISRFNNPKELQKLAGLALVENSSGKHKGETTISRRGRKRLRYLLFEVAMSLVAKNPEFRELHNYYTTRRLNPLKKMQSLMAIAAKLIRVFYAMLTKGVDYDPKKMVSDIKRPAVYLQAA

SEQ ID NO: 42094 - protein, 334 aa, unidentified
MKQVTQVGVDVDSEELVCAMQRAGQRQPLARFANTAAGHKKFIRWATKGGRPARICLEATGIYSLEFALALHHAKNVEVMVVNPRAIKDFTRACMQRAKTDAVDAGGILDYLERMPFVAWQPPAAEVLQLQAINRRIVQLNTELAREKNRRHASEFAGACADAIAHDIEVNIHHLERRIERMHDSGLKLVRGVPALATKLAHLVSTKGIAEASAMRLLGELLVLPDELAAPQWVAHAGLDPRPYDSGTSVHRPRRISKVGNRHLRAALYMPALVAIQHEPNVKAFYDKLVAAGKKPMQAVVAVMRKLLHAIWGMLKHDQDFDGNKFFKIAKENA

SEQ ID NO: 42095 - protein, 346 aa, unidentified
MELYIGLDVSLASTAICAVSGQGKIVMEATAASEPEELVAALKAMPGGVVAVGLEAGPLSQWLYRYLTDAGFAAVLMETRQVKGALKAMPIKTDRRDAEGIARLLQMGWYRPVHCKSVSAQEMRALLSARKAIQQAAINLELSIRGVLRNFGLKMGRVAKGRFEARVQELTEGNPMLEAAANPILATRRTLRQELAGLEKALRDHVKEDPACRTLMTMPGVGPVVALTVKAAIDDPARFRSSKDIGPWVGLTPRREQSGERDIVGQISRAGDVGLRTALYQAATTMMHRGRKNWLTAWAMNVAKRRGKKRATVALARRIGVVLHRMWTDGTDFRFTRKDAAAAAAA

SEQ ID NO: 42096 - protein, 402 aa, unidentified
MNAVGIDVSKSKSVVAIMRPFGEIVSTPFEIKHTASDIHSLIELINSVEGESRIVMEHTGRYYEVLAHQLLEANLFVSAINPKLIKDFDNDSLRKVKSDKADAVKIARYTLDKWQNLKQYNVMDELRNQLKTMNRQFGFYIKHKTAMKNNLIGILDQTYPGVNTYFDSPARSDGSQKWVDFASTYWHVDCVRKMSLNAFIDHYQNWCKRKKYNFSQSKAEEIYGKAKELVPVLSKDAITKLIIKQAVDQLNSASTTVESLRTLMNETASKLPEYPVVMAMKGVGTSLGPQLIAEIGDVSRFTHKSAITAFAGVDPGVNESGSYEQKSVPTSKRGSSDLRKTLFQVMDVLIKTHPQDDPVYQFLDKKRAQGKPYYVYMTAGANKFLRIYYGRVKEYLASLPES

SEQ ID NO: 42097 - protein, 350 aa, unidentified
MNKITTLGVDLAKNLFQLHGVDRAGKVVLRREVRRAQLMKTIAQLEPCVIGIEACGGAHYWARRFAEHGHPVKMMSPQFVKPYRKSDKNDRNDAEAICEAVTRPSMRFVAVKSVEQQDMLTLHRVREGLMKERVALINRIRGSLSEYGIVIPKNACNLRHALPLILEDAGNGLTTMARQVFNELYEDLGVREERIAQLENSIRALGSQHEVVRRLETIPGVGPLSATAMFATVGDAKQYRNGRQLAASIGLVPRQSSSGGRQRLLGITKRGDKYLRKLLVHGARSIATRAERKPQTQDRWLNELRERRGKARSYVAQANKTARIAWAIMARGEVYKAPIATLETRVAVAA

SEQ ID NO: 42098 - protein, 337 aa, unidentified
MYQHYLGVDLHRRRSYVVLMDSQGNISDQRRLPNDAMPDYVAQLPERTFAVLEATGNWSFMYDILEAGTDEVVLAHPKRVRAIAAAKVKTDKIDATILPHLARADLLPLAYAPPVEIRELRDLVRHRSKLVRERTRHKNRIHTILSRYNLHSPCTDLFGKKGRAFLADIRHHLSNIHQIMLEDDLGMIDALNERIKSVNRVIRAWAKDDPRAQLLISMPGIGIYSAAVIVADIGDIKRFDGPKQLCSYAGLVPSTRSSDTHVRHGRITKEGSPWLRWIMVSAAQRAPCASPRLALFFERTLQQHGKKTARVALARKMLSIVYYMLLRRTPYQERQQG

SEQ ID NO: 42099 - protein, 343 aa, unidentified
MQTVATIGLDIAKSVFQVHGVDAAGQMVIRRQLKRRQVLVFFAKLPPCLIGIEACASSHYWARELQAVGHTVRLIPPAYVKPYVKRQKNDAADAEAICEAVTRPNMRFVPIKTIEQQGCLVLHRTRHLLVRQQTATINSIRAHLAEFGIVAPVGRRGVEHLLEVIADANDTQVPEVARACVAALGVQLQQLKAQILEFDRRILAWHRSSEASRRLNHIPGVGPLLATALVASIADPKAFRSGRDFSAWIGLVPKQNSSGGKDKLGNISKRGDRYLRSLFTAGALAVIRYAKIHGTKHRPWLVALLARRPTKVAAIALANKLARIAWALMTKGSRYRQPAALRV

SEQ ID NO: 42100 - protein, 412 aa, unidentified
MLFVGDDWAEDHHDVEIVDNQGRRLARKRLPEGLDGITGLHGLIGQLVPEEWAELEPGEAASRVKVGIETDRGQWVQALIAAGYEVFAINPMSVARYRERHSTSGAKSDAGDAHVLAEIVRLDRAHHRPVAGDSELGEAIKLVARAHQSLVWDRTRHVLRLRGVLREFFPAALEAFGDLDARDSLELLAVAPDPERAARLSKSRIAAVLRRANRRNVEEKADTIQSVLRAPALRQPAQIQAAFAAIVTSQVRLITTVNSEIAQLGEVVAHHFGRHRDAEIYASQPGLGVILGARVLAEFGDDRNRFADAKARKNYAGTSPITRASGRKRVVPARYARNERLGDAVQQWAFGSLKGSPGARAYYDTLRARNIGHQAALRQLANRLVGILHGCLKTGTVYDEATAWAHHRAAAA

SEQ ID NO: 42101 - protein, 326 aa, unidentified
MYAAIDLHQKTVQMVLKDEKGQIASETKISKDAKSILQFLEGSDARVVMESGYNHEHIYDLLKEEGYDVRVAHPLMVKAIAYAKVKNDKVDARTLADLLRLDMIPECYIPSIETRELRDLARRRHYFVSTRTMFKNKIHAELSRRWIEYSKADLSSQEGRKRLRSLEIRAVDDYLDSIEFLDAKIGELDGQIKEQALQDKYAELLVTVPGISYYGALLISSEIADINRFPDPEHLCSYAKLAPGVHQSGDTQYQKQDRRGNHMLNWIMIQCTHVHVLNCESSSITRHYNKIKESRGTNVAIVAAARKLMKAIYMMLREERTFRLDG

SEQ ID NO: 42102 - protein, 358 aa, unidentified
MQKTSTEGPTQTVGLDVGDRYTVFCVLDQGSGEVVEEGRVRTTREALRSRFGGQPRLRMALEVGPHSPWISRLLKDLGHEVIVANARRVALIHGNPRKQDRVDAESLARLARLDPKLLSAIVHSSETVQVDRAVLRSRDVLVRSRAQLINHVRGTAKAMGHQLPKCSAPCFAKRVVAEIPSSLAPALAPVLEQIATLTDSIRAYDRQIEVMAAKRYPESQLLVQVGGVGVLTALGFVLKLGSPARLRRNRMAGPYLGLVPRRDQSGARDPQLRITKTGDAYVRRLLVGSAHYILGPFGPDCDLRRYGERIAQRGGRNAKKRAVVAVARKLAVLLLHLWRNGEVYEPLFSERANKAQAA

SEQ ID NO: 42103 - protein, 413 aa, unidentified
MDVLHPRCCGLDVHKSSISACILVQVAGRVQKHQHRFGAMTRDLQELANWLRQFEVTQVAMESSGVYWKPVWNILEGQFTVVLVNAQHIKNVPGRKTDQKDAEWIAQLLQHGLLRPSYVPCEIIRDLRDLTRMRASLSQEASRISSRVQKVLEDANVKLASVATNTLGKSGRAMLEEIIAGQNDPEYLASLALGHLRAKTSQLRLALEGKIRPHHRFLLRRLLDQLRFVEHEILLLDERLEDIGRERQELSEAVARWDTIPGIDRVAGWTLLAEVGNNMAQFPTAEQLASWASLCPGNHESAGKRLGGTTRKGSPWLRRIACQCAWAAARTKNTYLSAQFRRLAARRGSKRAIMAVAHSLVIIGYYLQKNQRNYVDLGGDYFDRIDSDGLKRYFIRRLEKLGHKVTLQPIKAA

SEQ ID NO: 42104 - protein, 352 aa, unidentified
MIIIGVDFHPEFQQIASVDTDSGEFQEKRLAHPEEAEKFYRALTGQKVRVGMEASGHARWFERLLAELQFELWIGDAAEIRAKRVRKQKTDRQDAQLILQLLLEQRFPQIWVPSWENRDLRQLLWHRHRMVQARTRIMNQLQAIALNEGLRCKKRLWRERGREQLEAFRLAPWASRRRRDLLELLDRLNPIITELTHAIEQEVEQCPAAQRLMTHPGVGPLTALAFVLIIGKADRFQGGKQVASYLGLVPLEDSSGNRRRLGHITKQGSSMLRFLLVEAAQVTVRSLPQWRSKYFHLAMRRGRKIAKVAMARKLAVRLYWMWRQGWDYEQLTKFGSHAGQPGNRHGVQSNTE

SEQ ID NO: 42105 - protein, 394 aa, unidentified
MRFAGVDIASETHVVALVDEDGKVLVKPTAFAEDAAGYEKLFEQLGARAELLLAMEATGHYWKNLFAALAARGFSVALLNPVRTHRFAEEDLQRTKTDAIDALGIARFAAQKRPAPTRLPDPATEELRELVRLRERLLQDFGDRVRQLHRLVDLGFPEFTRYVRNLDSELASAILHDYPTAVAFRGVSAKRLAALRYDGRHQVGTELAGLLIEAAKRSVGHHHGEAYRVQVRYACEDLDILRRRLRQIDRDIEGTLGAHEVGTLLTTIEGIGPNTAARLIAELGDPAEFRTCGALAAYVGVVPALSQSGKRQNTRAATTPIGNARLRAALWMPTLTAVRKNPWLRAHYQRLLARGKLPKVALVACMHKLLFAVYSVAKHRRPFVPQLTTTPATP

SEQ ID NO: 42106 - protein, 394 aa, unidentified
MFVNAAAAVVAQFTIPHTPDGLERLDRTRRELGLNVDECLVGLETAHNLLIDFLWARGYTEVYVIPPVVTKSQRKRYRQSGAYTDVDDAYLIAELLRTDAHRLQPWHPDLPLTQEMRAKVSLLLHLTRSKVRLTNRLRAVLLRYYPAMVGVFSKLDYPVPLAFIRAYPTPKAAAGLTFSEFQAFAKQHHHTRPRKLVGSFARLQTPQPEAAPEVVHIYRQEAVILASLLLEIVRAEKTIEKELQTLFLQHPDNHIFASLPGAGNRVRPGLLVKFGDDRDRFPTAASVQALAGTCPVTEESGKRKVVKFRKACDREFRYIVIQWSRHSKDQSVWANAYYQQVLARTGSKSQAQRCLANRWLGILWKLWQTGQVYDEAYHLRRLAERRKPKVYFVE

SEQ ID NO: 42107 - protein, 329 aa, unidentified
MDSETGETGEQKLAHASGEGKQFYQQLAATALIGMEATGNSQWFIEMVEDLGHTIWIGDAAQIRASYARKQKTDKRDAGHILKLVVEGRFPRLWSPDREQRDLRQLVLHRHKRVQIRTRVKNELQHLSMNKGMQRKRALWTRAGMELLRELPLKPWASCRREDLLGLLAMLDEQIGKLDGAVQQAAEELPQAKLLMTQPGVGPNTALGFVLTIGDVSRFPRGKQVTSYLGLIPREESSGGRQKLGAISKQGNRWLRCLLVEATHNVVRLDPGFRQQYLHRCHQKPKGVAKVAVARKLAVRLYWMLRTQTAYPEILRIESSPAVPLVGAS

SEQ ID NO: 42108 - protein, 309 aa, unidentified
MRISPCIVGCDISRQWLDCFVHPDGLRRRFSNDVEGHDALAALLKEKDGFCVLEATGPYDRALCRRLHAAGRTFHLANPRKARQFARAAGFLAKSDRVDACMLARYGAAIDLPVQARPEPARAQLRDLMERRDQLVEMRKAERTRLAQPHPAWHEDSLRQVIDTLDRQIVAIESRIDALMAACDRLRAQQDILCSASGIGPVTARVLLAHMPELGQRNRRAISALAGLAPLACDSGRMHGKRAIWGGRKRVRDALYMAALAACRCRPFKPIAQAMRDRGKAAKLVIIAIARRLLVALNAAIRHAKAFHT

SEQ ID NO: 42109 - protein, 392 aa, unidentified
MVVSVGIDVSKDKHDCFIVSSEGEVLADAFMIPNNIDGFHCLLQRIQDCATPQDKIKVGLEATGHYSYNLLGFLLDNGLTTYVLNPLRTNLYRKSLSLRKTKTDRVDARTIASMLLSDAGLKPYTSTAYHNEELKSLTRYRFDKVKERAKLKSSISRLVCILFPELEKLVPTLHMVSVYALLEEFPGAKQIAGAHLTRLKALLETASKGRYKRDVALQIREAARNSIGSRMPAKSLELQHTIRLIRELDTEISEIENQIQSIMKELHSPITTIPGVGFRMAAMILAEVGDFTRFASPDKLLAYAGMSPSTYQSGQLKNCYPHMEKRGSRYLRYALYNATKYVCLWDPTFSAYLAKKLTEGKHYNVALSHASKKLVRLIFAMEKSRQPYRVAP

SEQ ID NO: 42110 - protein, 326 aa, unidentified
MQGKVLSEQATRMQSSAGIDVGKSWLDAHILPAGQRRRVANNPEGIRQLKRWLLGFDCTIVVLEATGKWHRPLYRSLHADGLPVAVSDPYRVRMFAKAHGVAAKTDRLDARVLAQFGAVMNPAIRPPAPEAFEELGELLAARRSAVDTQTALKNQAGITTSKFLVRQIKRRLSALAKDIDALECEIQRHIAAEEPLATRYAILISIPSFGFVVAATLLASLAELGICSAKQIGMLAGLAPIADDSGQRQGIRFIGRGRSAVRNVLYLAALAATRFNPDMKAFYRRLIANGKPPKLAIIAVARKLAVLANTLITEGRNWLPQHPKHA

SEQ ID NO: 42111 - protein, 402 aa, unidentified
MNAVGIDVSKGKSMVAIMRPFGEIVSSPFEIKHTTSDINSLVELINSVEGESRIVLEHTERYYEVLAHQLSKANLFVSAINPKLIKDFDNDSLRKVKSDKADAVKIARYTIDKWQNLKQYSVMDELRNQLKTMNRQFGFYMKHKTAMKNNLIGILDQTYPGVNTYFDSPARSDSSQKWGDFASTYWHVDCVCKMSKNAFINHYQNWCKRKKYNFSQSKAEEIYGKAKELVPVLPKDDITKLIIKQAVDQLNSVSTTVESLRTLMNETASKLPEYPVVMAMKGVGTSLGPQLMAEIGDVSRFTHKGAITAFAGVDPGVNESGSYEQKSVPTSKRGSSILRKTLFQVMDVLIKTHPQDNPVYQFIDKKRTPGKPYYVYMTAGANKFLRIYYGRVKEYLSSLPES

SEQ ID NO: 42112 - protein, 400 aa, unidentified
MDRVEQGWIGIDAGKGHHHAVLIDRDGHRLLSRQVINDQPDLVALIDTVQDRVVDPVWAIDLVGGSASLVIALLLQHGQRVVYLPGIAVNRATAGYRGEGKTDAKDAAIIADQARMRRDLRELHVLDEDIAQLQLLSSYRADLAADRTRSINRLRGLLAGIFPALERMLDFTNRGPLILISGFQTPTAIRQLGAGRLTGWLKRRGVRGAGRLAHAAVEAASRQTVHTPGQAAAASLIVRLAQTVLDLDRQLTDLDREVAGIFRTHPDAAIITSLTGIGDVLGAEFLAVVGGSLAGFASADHLAGYAGLAPAPHDSGYRTGNLHRPQRYNRQLQRVFYTSAMISIQRSPASKAYYDGKRAQGKRHIQAVLALARRRVNVLWAMLRDHRPYQEQPPKHVLAA

SEQ ID NO: 42113 - protein, 359 aa, unidentified
MQTQNTKLVTDFTGQNIYVGIDTHYKTWMVSIYSDEFELKTFGQEPDADRLENYLHKHYPNANLRLAYESGFCGFWIQRCFAKKGIHCDVVHAADVPGSNKELIRKTDKVDSRKIAKGLRNNELNCIFIPDEQLESDRLLLRSRTKMVRDTTSIKNRIKAFLKLKGITIPGDYKSNKWSKKFISWLQSIELNNISSKTAFSSYIDELNFLLEKQKQLNKAIEILAKSDSYSGDIHLLRTVPAIGLLSGMTLLTELGNISRFQKQDHLYSYCGLTPDCHSSGDIERIGKVSRRGNIFIKTVLIECAWVAVRKDPALLLYYKQQLPKMDRNKAIIKVARKLLNRIRYVLKNKAAYQIGIVE

SEQ ID NO: 42114 - protein, 292 aa, unidentified
MTSAEGQPPLREVRTCRTMTAELVRLAAWLQAAGCTPVAMESTGVYWRPVYNLLEPLFILLGVKAQHINAGPGRKTAVKDAEWIAELLRHGLLRGGFMPAKPQRQRRELSRHRATLVQDRARVINRVPAVCAEANIKLASVVTDIRGVSARALREALIAGPQDVAALADLARGRLRPKRARLEAALPGAFTPHHSVLLTEYFSQMDYLDAAIDRVSEVIAQSLAAEQEAIALLDTMPGVSQRTAEILPAESGTDMTRFPRAKHLASWAGLCPGNYDSGGKRLSGKPRKGSRW

SEQ ID NO: 42115 - protein, 368 aa, unidentified
MTSVITLSEIVDVVIGVDTHVATHAAAAVDARTGGVLAQITVPATREGYAELVAFAEEIAEEHAALRAWAIEGTGSHGRGLTVALGQLEEMVVELDRPERARRRGGAKSDPLDAVRAAREAISRARVGAPRGSGPDPAQAATRQALVVRLAIRRSAVQAAGDARRQLFSAVLTAPEPVRERLRGLQAKALVAKAEELRPGAAWASTDVETATTVACLRTWARRIQDLNAEAAEHEREIRALVRSWRPDLLEETGIGAIVAAVVLCAWSHRGRIHSEAAFAKLAGTSPIEANSGQILTRHRLNTYGDRRLNSALHTIVISRQRHHQPTRTYTARRTTEGKNPREIRRCLKRYIARDLYRILEARPLDAT

SEQ ID NO: 42116 - protein, 409 aa, unidentified
MQVLYPRCCGLDIHKKTVVACMLLTNPDGTIRRVVRTFGTMTAELLALGDWLCLHEVTHVAMESTGVLWRPVFNLLEEGRTLLLVNAQHIKAVPGRKTDVKDSEWLADLLRHGLLRPSFIPPAPIRVLRDLTRYRKTLVELRTQEINRVHKVLETANIKLGVVASNVVGVSGRRMLEAIQQGESDPQVLAELAKGRLRKKRSALRLALDGRVQAHHRLLLGELLDHLDYLDRAIHRVEVQIAALVAKEEKAVELLLTLPATGPVTAAAIIAEIGTDMSRFPSAAHLASWAGVCPGNKRSAGKQLSGASTKGNKQLKTILCEIAATIARTPGTYLHALYQRIARRRGKPRAMMAVAHSLLVSIYYMLRDQVAYQELGPDYFDQLQAQHLERHYVRRLEALGFQVTLTSAS

SEQ ID NO: 42117 - protein, 436 aa, unidentified
MKRDAVCNSEKWSDTGSGKLYRNHAGKEVPMRGPVITVDVSKGSCHYQPYIEKGQPLRKPRVLHDTIEGFSDLQEAIEKTKEKSGSNEVPIVFEATGIYHRCLQKYLDDHDIHYYVISPLLSAAYRKTNLHANKTDDLDCAHIAKAYYNEDYLLPYRKQEDRFVRMQRMNRYYETELSHLRKRKVAFRNALDIIYPRLDRCFKGKAGLYDQVPMEILKTYPHPSLLLKHREETVVKTISKKTGHNESFVREIVSRFYECTRHCYPGVNVNEIEVIKFSEMIEKLQDQTQLCDRILKELIEEARKIDYYPGVVSITGIGENLAARIIAELGDMSRFKNRRAISAYAGLNPKIQQSGETDGTHLRISKKGNRRLRCLLYLGAACNYRLKRHDELYEFNQKKRQQSITPLKTKAANIATAHKLLIIIFSLCRTGEKYRS

SEQ ID NO: 42118 - protein, 366 aa, unidentified
MFSLTSPAGAIHLGMDTSKNTIVVAILMPGGEVPVIDRMWNEEGSVRHLVGRFADRAVLRACYEAGPCGFELHRLLTSMGVACDVVAPSLIPRRAGERVKTGRRDAGRLARLHRAGELTAIRVPTQAEEAVRDLVRARAALLADRERARQRITAMLLRHGRVWRCGSYWTQAHEQWIAAQRFSEPALGAALAHYRAALDTRQAELDAIEAELAPWAGREPLAAAVTRLGCYRGIAELTGLVLAAEVAGWRRFPSARAFMCFTGLVPAEYSGGERTRRGSITTAGSEPARTALIEAAWAYRFRPAIGVTLRRRRHDADPQTRARSWRAQRRLHARDKAMTARSKPAGVAVTAMARELAGFLWAEMTS

SEQ ID NO: 42119 - protein, 343 aa, unidentified
MQTITTIGLDIAKSVFQVHGVDAGGQVVIRRQLKRRSVLAFFQKLPPCLVGIEACASSHHWSRELQALGHTVRLMPPAYVKPYVKRQKNDMADAEAICEAVTRANMRFVPTKTPEQQSCLMLHRTRHLFIRQQTAVINSIRAHLAEFGIVAPVGRRGVTELLHVVADPSDKRVPEIARACLAALGTQLLRLKEQILEFDRMILAWHRSNQTSKRLHYIPGVGPMLATALVASVADPKTFRSGRNFSAWIGLVPKQHSSGGKDRLGSISKQGDRYLRSLFVAGALAVIRYAKIHGTGHRPWLTALLMRKPTKVAAIALANKIARMAWAMMAKGERYKEPVALAR

SEQ ID NO: 42120 - protein, 320 aa, unidentified
MQTDTAYVGIDVAKERLDIAVHSSEQQRAFANNDGGIEESLRYLQGLAPALVILEATGGIEMPLAAALAVAGVPVVVVNPRQVRDFAKATGKLAKTDAIDARVLAHFAAVVRPVVRPLPDASSQELTAILTRRRQLVDMITAERNRLHAARSKSVKEHIKTHVTWLQAELSRIDQELNQSVRESSVWREKDDLLRSVPGVGPVLSTTLLAQLPELGAMNRKQIAALVGVAPLNRDSGSFRGRRTVWGGRAAVRAVLYMATLVAVRHNPVIKTFYQRLLTAGKAKKVALTACMRKLLTILNAMLKHRISWHHSAPILGPCS

SEQ ID NO: 42121 - protein, 376 aa, unidentified
MNEKLRFLGLDVHAETIAVAVAEPDGEVRSLGTIANREDSIRKFIRKLGSPEHLRACYEAGPTGFVLYWQLTQLGVKCDVIAPSLVPKKPGDRVKTDRRDALKLARSHRSGDLTAVWVPDEGSEALRDLVRAREAAKQDQLRARHRLTKFLLRTGQRPPLGVKAWTARYVEWVQKVRYTHPAQEATLLDCLNEVQHMEQRVTRLERSIVEVIQVAPASMQEVVRGLQALRGIAHISAVTIAVELGNITSRFEGARDLMGYSGAFPSEDSSGKRIRRGGITKSGNAHLRRIVVESAWSYRHLPRVGAKLRKRQEGLPAEITEIAWKAQNRLHKRYMTLMARGKDQRKTMTAIARELLGFIWAIGIKAEAACKQQMAA

SEQ ID NO: 42122 - protein, 318 aa, unidentified
MNSPSMTVGIDVSKQRLDFARFPQGDTFSVAYTDTGLAKMLNRLRGWSPQIILLEASGGYEYGVVAALVSGGLTPVLINPRQVRDFARSLGILAKTDKIDAKVLAEFAFRLQPEPRPLPAAQQQELNHLLSRRRQLLEMIQMECNRREVSPFSRVRQSIDHNLDSLRRQLADLEREIDDFFNQSPLWVQQDTLLRTVPGVGPQTVLSLQAWLPELGALNRHQIAALVGLAPFNRDSGVLRGRRMIRGGRHKVRQALYMATLSAVRYNPVIKALFNRLAGQSGKPGKVALVACMRKLLIILNAMVKNQTTWRPMTPITS

SEQ ID NO: 42123 - protein, 416 aa, unidentified
MSGKREIACGVDVHNSFIVATILSSDGMKLQDRFDTNLEDLLKLKNWLKENNCHKVAVESTGNYWIPIYNVLEGSVNFILANAYQIKHIPGRKTDMLDSEWIAEICLKNLISPSRIFFRDHRELRSLTRSRENLVKLRTKLKNWITHELEAACIKLSTVLSDIFGKSGRHIVDGLTNGIDFEKILETIPSKKVRANKEEIRGIIHANLSSSQIFLLRSHLDTVDSISNQIAEIDGKISDLISLRKDDLQIALSMPGMGIVSASTILAEIGDFRDFSSPNKLAAYCGLVPSVYQSASKLINGHITKHGSPHIRGMITEVAHAIVRSKRNSKLKKFFLRIKARRGTKIAVVALARKVLCILYHLLINQELYQDDLIDKPKRIRPLYVLSTKSLSLDEMIQTVIKAGYEVRRNEYMGSG

SEQ ID NO: 42124 - protein, 469 aa, unidentified
MAKAQKSKSKPKSKSRAKQNHRAKLKAQDCTLGLQVVHPKAAGIDVGNEEHWVAVSPDLDPEPVQSFGCFTQDLLEMANWLVRCGVETVAMQSTGVYWIPLYDILAERGIRVFVVNANDTKNLPGRKTDIQECQWLLKLHAYGLLRNSFRPEEEILVMRTYWRQRQQHIADAARCTQHIQKALTQMNVQLANAISDISGTTGQAILSAIVAGERDSGKLASLRDPRVKASEETVAKSLEGNWRPELLFVLRQELESYRTFQTKIVECDRQLQLHYATMQSKADPEQLAPVARDKRAHGHVPTGFDLREQMFRTTGVDLTAIDGLNILTVQTLIAEVGSDMSRFATEAHFVSFLDLSPRNKISGGKVVGREKRKTKNRAGLALRQAAGSLLNSDSYLGAQYRRLRTRLGAIKARKAMANKLARIAYRMLKYGEDFVDKGKEFYELKYRRLQINILTKKAAALGLQLTQSA

SEQ ID NO: 42125 - protein, 330 aa, unidentified
MLFHKSVLMNKYRETYGVDISKDVFDVYGSLSGHRQFNNDEPGFKKFFKGLPENSLVAMEATGYYHYRLAQFLYKNAVAVSVINPLSIKRFIQMKLAKVKTDKSDAKAICEYAQNNAVPIYNALTEVQSECLQLFRLLDTYLNQRTAVKNKVHGEEALGVPSKFVYRSLKRQRKQLDKEVKAIEEKILSLIKEDQEQQLTLLTSVPGIGQKTALFLIVITDGFSKFETASQLCSYVGITPTTRESGSSVRGRARISKVGNRKLRNLLFLCAFNACKHNKGCREIYERIVNKGKSKKLALIAVANKLLKQCFAIAKSGLPYDETYVSVLPK

SEQ ID NO: 42126 - protein, 375 aa, unidentified
MSQSILLYQSFIGVDLHKTTVTLVAVAPDGTMIARLTINTKCREKIKAWLLALPRPSHLAVEAVGFVEWFIECFRPCVDRIDIADATELSNRRGKRRKNDYRDALDVAQRLARGECPCGYIADDELMQLRKLGRHWRQLSSVMARAKQFMKSMLLAANLRGPKFDGASAQRWLLAHGHLLKPAQRRAFANFTCVVQLIELQRQPLRFAIIEACRSERFAPMTKILQSVPGIGEIWSCIIAAEIGPFNRFPNADALEFWAGMTADLKESAGRTQSGPITKAGSRTLRWALCNAALTLCHSDAGQEAIRQRLIRKTGGIKGKANTAMGRRLLRLLYAMVRDGKPYQAGPSRHRNAAANKARAAKRAQKAPKNRKEAA

SEQ ID NO: 42127 - protein, 352 aa, unidentified
MQYFIGCDMHTRFQMVAWIDAETGEIRVRRLEHEGKEVEKFYAQFARGTVVGVEATFPALWFERLLGQVGHELWVGDAARIRASEIRYQKTDARDAELLLDLLRSGRFPRIWVPSAEERDLRQLLVHRMKQVRTRTQVKNQLHALAISQGMCRRSKLWSQKGRKEFASLALLPWAARRRKELLEQFDRLDATVRELDRAGEEAGRTYSDVALLRSHPGVGGVVSLAFVLTVGPAERFPNSRSLVSYCGLNPREHSSGGRQRLGAISKQGNSMMRWLLVEAGQTAARLDPRLRRTYQRLKNRRHSAVAKVAIARRLAVRLYWMLRTRHNYAQLVRMSGSPGSAVVLPQAGSSV

SEQ ID NO: 42128 - protein, 331 aa, unidentified
MTQGRVELAASNARRAEMTARWVGIDVAKAELEVAVWPPSGEHLSVPYDEAGCDTLLAAVRAWQPAGIVVEATGGLEVRVGSVLAAAGLPVIVLNPRQVRDFARGLGHLAKTDRLDAQLLAEVGAKVQPVRRPLPDEATRELQALVARRRQLMEMLTAEKNRLGSAVRQIQPQIRKHIRWLEAQLQQSDRDLDGALRHSPVWQEHLELLQSVPGVGPVVSRTLLAYVPELGTLTRKTAAALVGVAPFNRDSGTWRGTRHIAGGRAPVRAQLYMATLAGLRCNPLLRAFYARLVAAGKPRRVAMVACMRKLITLLNAILKHRQKWVAPPAPC

SEQ ID NO: 42129 - protein, 415 aa, unidentified
MKKIYDNCCGIDVHKKLMVCCFIHGRQQEVREFGATTRELLTLAEWLLLGGCQMVAMESTGSYWKPLYNILESSGLAAMVVNAQHMKAVPGRKTDVKDSEWIADLLQHGLLTASFIPDKAQRELRELVGYRKSLVQDKNRELNRLQKMLEGANIKLSGTVRDINGKSARAILEVLVSGDAIDSKKYDEMVAEKKIAGQLKASKEQILDDINGIMSPLQRQMMRVLLSHIDELDDHIKELDDQIDNHMKPDEKQAVEAIKEVTGLGVDSARIIISVIGTDMDRFPTDAHLASWAGMCPGDNESAKKRKSGKTRKGNKLLRTTLITCAHSAVNNKNSYFYAQFRRISAHRGSKRAYVAVAHSMLIAVYHILKYGVQYHDLGAGYYDQFNKERKINSYLKKLKTLGWEPPVAMEGQTA

SEQ ID NO: 42130 - protein, 343 aa, unidentified
MEHYVGLDVSLKLTSICVVNQTGSILQEGVVDSDPEAIASFVRLKAPGTVRIGIETGPTTTWLWSELKRLGLPVICIDARHAKAVLKMQINKSDRNDAIGIARIMQTGWFKEVHVKDIDSHSVRALLASRALLVKIKRDLENHVRGLLKNLGLVIGRAKFNVFAVRAEELIEGRPELIATIRPLLEARNAVEQQVSELDRKVMKLARHDAQVRRFMTVPGVGPITALAFKATIDDPARFTRSRSVGAYVGLTSRRHASGEVDWTGRISKCGDAMLRSYLFEAAGVLLTRVPKWSAVKAWGVRLAKRNGLRKAKVAVARKLAVILHRMWIDGTEFNWSKKEIAA

SEQ ID NO: 42131 - protein, 447 aa, unidentified
MAQRNRAFSTAALNLTHPNAAGIDIGSASHFVAVPPDRDEQPVREFASFTAELERLANWLSECGVDTVAMESTGVYWIALFELLDARGFRVVLVNARHVKNVSGRKSDVLDCQWLQQLMSYGLLRGAFRPADGVCALRALSRQRAMLLRSQSRHVQHMQKALAQMNIQLANVISDVVGETGQKILRAIVAGERDGRALAQMKNVRIRASAEEIAKSLQGSWRAEHLFALKQALDAFDFCATQLAQCDTEIEAQLRRLHAHDGEPAKGKKRGRARNAPKLDLRTLLFQMCGVDLTRIDGIDVTTALVVVSEIGADMSRFPSDKHFASWLGLCPGTKITGGKLMSGKTKRCANRAAQALRLAAAALRSSQSALGAYFRRLCSRMDKPKAVTAAAHKLARLIYAMLTKGEEYTDQGQDYYEQRYRQRVLLNLSRRAQQLGMKLVAIEQPA

SEQ ID NO: 42132 - protein, 343 aa, unidentified
MEYFAGIDVSLEQSSVCVVDGAGKIVREAKVASEPEALVGFFRGLETGVTRIGLEAGPLSQWLYAGLAAAGFEVVLLETRHVKAALSAMVIKTDRKDARGIAQLLRMGWFRPVHAKSPAAQEVRALLVARKLLQTKLLDVEFSIRGILRGFGLKMGEVSKGRFATRVRELVAGHAMLERITEPMLRARETLRTEYAKLHGEMLAIVKPDPVCRRLMTVPGVGALVAITFKSAVDDPGRFTRSRVLGAHFGLTPRKYQSGETDVTGAISRVGDAMVRMALYEAAHIMLSRVTRFSSLKRWALNVARRRGLKRAKVALARKLATVLHRMWVDGTSFRWGKQAASV

SEQ ID NO: 42133 - protein, 431 aa, unidentified
MNYNQNKKIAQITPYTLIIGVDIAKFKHVARAQDFRGMEFGTPCYFENTKEGFEHFLHWISETKKARSMEKVIVGMEPTGHYWFNLAHILKENEIKFVAVNPLHVKKSKELDDNSPTKNDVKDAKVIAQLVKDGRYAEPTIPQGVYAELRVAKKIRDLLTEDLQTVQGQVHNWIDRYFPEFLKVFKKWEGKDALQFLRLYALPHEIANFTEDELLIHLRKSVKRSVGANKNRELKQAASQSIGLRQGSEMAKMELKTLLAKYDLIQKEFEELDGKIDSLLDEIPGVAQMLAIKGVGRDTVAGFFAEVGDLREYTHPRQIIKLAGLSLKEYTSGKHKGKTTISKRGRKKLRALLFRVCMILVAKNSAFKALHAYFTQRPDNPLKKMQSLIALCNKLIRIFFSISKKQFEFSEEKMLKDIPHLAGSKKAELAA

SEQ ID NO: 42134 - protein, 348 aa, unidentified
MKILALDLSKFKSVGCVYEADSGEHRYRRVNTRPAELHDLLVELEPDRVVIEVSSVSGWVSDLVRALGIELQVVNTNGEAWRWRNVKQKHDQADALKLARLSAMNQLDLVHVPAPEIRQWRAVIKYRQHLVGRRTDIKNHVRELLVREGVVLPRGRKCWSQEGCDGLEEMARNWEEVGISELWRGELQSEMQQLQSIQERIREVEAKLEELAKADDRVGLLRTIPGVGPRLAEAMVTLIDDPHRFRRARDVGAYLGLVPRQYQSGEMNRLCRITKRGSKLLRSLLVEVSWVSLRHNPWLRSLYERMNRGSKTRKKIAIVAVARHLAIYCWAMLRDGTTWRPPLCPSMK

SEQ ID NO: 42135 - protein, 362 aa, unidentified
MPNAKLINEIDFTGQKFYIGIDVHKKSWTVTIRSSNLHIEQFTQPPSSELLVKHLNTKYPGAEYYSAYEAGFCGTGIHEKLTKAGVNNIVINPADLPSTDKEKKNKTDIHDSRSICRNLERGNLRGIYILPVEQQEYRALFRQREVKVRDVTRSVNRLKSFLSFFGVDYASLCAGKNELITGRVIGKLLKLSLSTEAGTIVLKDYIEDILYHRKHLLEITKKLKLQTQAKYTEEYKLLLSIPGIGPITAMAFLSEIGDFKRFKDPDEYCSFLGLIPWSNSSGETEMTIGIQPRCNKRLRSLLVEASWTAIRKEPALLMYYKKHAVKNNNHAIVKVARKLAMIVKGVMNRRQIYQSTYQAIAA

SEQ ID NO: 42136 - protein, 312 aa, unidentified
MIEQCFVGIDVSQDRLDVLLLPQATGFSVANNEAGWNALIARLRDVPVAAIGLEPSGGYERGVIRALLTASLSVRRINPNRLRQFARARGALAKNDRLDARLIAAYVATMPTHVVRHDPAAARIAEIVTVRRQLCDEHVAIENQAAQLEDAMLRRLAKRRLARIETDIRLLDKRLTQMIAAEADLARRYARLTSMPGVGPVLAFTLIALLPELGRMSRKRIAALVGLAPYDFDSGKLRGHRSIYGGRMPVRNVLYMAALSACRYNPALKTFHNRLAAAGKKPKVILVAVMRKMITTLNAMLRDGAGWQPQAA

SEQ ID NO: 42137 - protein, 371 aa, unidentified
MDESSKTLYVGLDVHKDSIAVAYAPEDRGAEVASLGSIGTRQCDIDALIRKLQSKGATLVFVYEAGPCGYWLYRYLTRKGLSCHVVAPSLIPRKPGDRVKTDQRDAVMLARLMRSGDLTSIYVPGIEDEAIRDLSRGREDAMRDLKATKYRLKAFLLRQDIRYEGRANWNAAHLRWLAEVVCPTRAQQIVFQEYVRGVTEQHERLQRLEGELHAEVKGWRLYPVVEAIQALRGVELTGAVILMAELGDITRFDTPRQLMSYLGLTPSEYSSGERRRQGGITKAGNTHARRALVEGAWAYRYPAKVSRHLQLRLETLPAEVQAIGWKAQVRLCKRYRQLSARGKHVNQVVVAIAREMAAFAWAIARTVPLAL

SEQ ID NO: 42138 - protein, 379 aa, unidentified
MRNDSTVYVGLDLHKDSITVAYAIDAGEVELLGKTGTTGADIDRLCTRLQSKAPHVRVVYEAGPCGYGLYRQLVQKGFDCMVCAPSLIPRKPGERVKTDRRDAIKLARSLRADDLSAVYVPGIEDEAFRDLARAWAAAREDLRRARHRLKSFLLAHGVRYTGSANWGEAHRRWLGRCSFPSAWQHLAFDEHRRTIEDRLAQCARLETALREAVISWRFYPVVLALQAMRGVQFVTAVGMVSEVGDLSRFEHPRQLMTWLGVTPSEHSSGGKRRQGSITKTGNSYARRLLVEAAWSYRHPARVSPEIQARLEGLPKAIIDRAWDAQVRLCRRFRRLAARGKPINITVVAIARELAAFIWDISRLAMSLAIPRSKLPAACV

SEQ ID NO: 42139 - protein, 340 aa, unidentified
MDKVTIIGVDLAKCVFQVHGCTTDGKAVFRKKLTRGQFEAFMAAQPRCVVAMEASSTAHHWGRTLKALGFEVRLLPPIHVKPFVKRQKNDANDAEAITEAARRPGLHWVAIKSKEEQALAMLLRTRDQLISQRTATINALRSHLAEFGLVVPQGTKHLPELAQKMKSADLPALVHDLADLHRKHIAALEKRIAGLNTSIEGHNRKSDTARLLTTMPGIGPIGAITIEAFACDLKQFGQGREFAAWLGLVPRQHSSGGKARLGRCSKMGQRDIRRLLIIGAMSVIAGSRRKGRCDNLWLADKLARKPRMVAAIALANKMARQIWAMVTKNEVYAPSLPEAA

SEQ ID NO: 42140 - protein, 440 aa, unidentified
MTQNSSIKIINPDAAGIDIGASSHFVAVPECRDTQNVKEFECYTPDIRKMIHWLKDCHIKTVVMESTGTYWVPVFEMLEQAGFEVNLVDAHHVKNIRGRKSDVIDCQWLQQLHAHGLLSPAFRPAEEIVELRGYIRQRSMLIEAAAIHINRMQKALVQMNLHLKNAISDITGVTGMAIVKSIIQGETDPNKLAQMRDPRCKQPIEVIKKSLQGNYRKEHVFALKQGLEAYEFYQSQIKECEEAIKKKVETLSPLKTSEDQKPSRRKLRKYEYSFQVGKHLKQLVGTDLTTVPGIDASTALKLISEIGTDINRWPTAKHFCAWLGLCPGTRISGGKYLSSHTSHSSNKAATSLRMAVSGLYRSNTTLGAHLRRMKARMGPVQAITATAHKMARSIYYMMQRQADYVESGGDYYDKLNEQKTIKYMMKRAKSLGYRLEKNVA

SEQ ID NO: 42141 - protein, 394 aa, unidentified
MAFKIFRKNCCGLDVHKTWIYACMGITDTNGRTEYKQARFSSFTKGLQELADWLAKYDCNDVCMESTGKFWIPVFNILEKTCWVTLAYPKYTKPQKGNKTDHKDAKWICDLYMCDMVNPSFIPPPDIRQLRDLMRYRSKLTNIMTSEKNRALNCLTVSNLKLDDVFSDVFGKSSRSVIRYILEHPGETFQVAPFIDRRCKHPVEEIQAVIDGTISHQQAVKLRECLQHLDELEVHKTNVEKEILCLVQQYPYQLELLQTVLGFSGNIMTAIALISEIGADMSVFPSAKHLVSWAGCCPRNDQSSKKVKSTRISRAGVYLKPLLVQVAIQPFTANADKLSAAGALEIRCQICDGRFLSMWAALFIFLGCPLPPCQKDLHVHNGRIVILASVAWIF

SEQ ID NO: 42142 - protein, 350 aa, unidentified
MDSLSQIVDVVIGVDTHIASHSAAAVHARTGGVLAEVTVDATAEGYEALVQFADEHSGLRAWAVEGTGGHGAGLARHLADGGEFVVELDRPERARRRNGAKSDPLDAIRAAREALSRTKLGTPRATGARQALSVLLAARSSAVEAARIGQQQVFSLVIAAPGQLRARFRGKGTLAMVRNASRLRLLAGWDVETRTTAAVLRALARRVLELSAEAKRYEKEILTMVRAWHPELLECRGVGPIVAATVLCAWSHPGRIRSDAAFAMLGGAAPIPANSGQVTTHYRLNRHGDRQLNRAFHTIVLSRLRWDEETRAYVKRRTAQGKTPREIKRCLKRYVARELFKLLEHGPSAA

SEQ ID NO: 42143 - protein, 328 aa, unidentified
MFLGIDVSKKTLDAALLNSSEGAREATRKSRHKIFANTPRGHQQMLEWLAQNEVAQVHACLEATGTYGQGIACALYEAGHKVSLVNPMLIRAFGQSQLVRTKTDKADAQLIARFCAMHQPAAWTPPTPEMAQLQALVRRLEALDEMRVMEENRLESGVACEAVGASLREHIVYLQAQIETTRRQIKDHIDNNPTLKGQRDLLLSIPGIGEITASLLLSEVNVAQFESARQVAAFAGLVPRIRQSGTSVRGRCRLSKAGSSRLRKGLYFPALTALRFNPLIRALGLRLTAKDKSKMLILGAAMRKLLHIAFGVLKSGRPFDPDFLAQNI

SEQ ID NO: 42144 - protein, 317 aa, unidentified
MTQTICGVDVSSISLEAFVGPAGPGRSFANSPAGIDALAVFCQQHSVELVALEATGGYERQALTLLWAQGLPVALLNPRAVRDFAKAMGMLEKTDRIDAQIIARFAAVKGSHASPPLSADQQHLRALVTRLRQLTQLHVEQRNQRLLVTDATVRASINQLLKTVESQIRKLAAKIASRVANDPLWKELDQAFRTIKGVADRTVATVMADLPEIGLLSNKAVSKLGGLAPLARDSGKTHGRRPVRGGRRQLRAVLFIVAGVVSRHNPDFAAFQQRLSAAGKPKRVIRVALAHKLLVRLNAKARDVRIQLATANACQTT

SEQ ID NO: 42145 - protein, 337 aa, unidentified
MEVRIGEYPVCIGIDIHKKYSYVAVVDELGEIKEEAKIENTKESLEQFASKYKGAKAVIEATGNYRFIYDILENYMEVKLAHPYKTRAIAEARIKNDRLDAKMLAHLLRANLIPESYVPPKEVRELRDLTRLRKALIEDRTRIKNRVHAILTRNGINNYPDPFTKKGREFLENLDLSETDRKLLEINLSIIDKINREIDEIDRIIQEKAKIDGDAILLTTIPGISYYSALLIKAEIGDVNRFPNKFKLISYAGLCPSIKQSGNKEIKGHITKQGSRMLRWILIQCANIAIRHDEYLRNFYLRIKKRRGHNIAIVATARKMLVCIYFMLKRREVYNPK

SEQ ID NO: 42146 - protein, 372 aa, unidentified
MNYNTVYVGMDVHKESFTLCAYTIDAEKGSHFQRTEADYKNVLKYLEFLRTVYGNDANFICGYEAGCLGYTLYHQLTEHDVNCVILAPTTMLEQRSKRRIKTDRRDAEIIGKCLAQHNYSPVHIPTATDEETKEFLRMRDDHKLALKKVKQQILAFCLRHNYRYDGNSHWTAAHIKWLKSLNPEALYKEILDEYLLTYTTLSDKVERLDKRIEELASKDEYRESVKKLCCFIGIKTHTALSVLVEVGDFQRFASAQNFASYLGLVPGEDSSGDGQTRLGITKAGNRHVRMLLTEASQCYARGQIGFKSKELKSRQAGNSPQVIAYADKANERLRRRYYKMVLGKSKKHNVAKTAIARELACFMWVMMTEHIA

SEQ ID NO: 42147 - protein, 337 aa, unidentified
MEYFAGLDVSMAQTQVCVMNRDGVVMHEAKVPSTPADIATALAQAPACRRIVFETGRMAPMLFHGLSQLGLPIVCIESRQAYQALKSLATHKTDRNDARGLAHLARTGFFKPVHVKSLPAHAVRSLIIARKKLVGQRVTLENQIRGLAVVFGVRLPRALTAAFIGQALRASEGIAGLSAAVRGLAAARTAVLGAVVAIDADIRRMVRASDACRRLMGIPGVGQLTALAFTAAIDDPERFRRSRDIGAYLGLVPRRYQSGEVDYTGSISKCGDRRVRTLLYEAANVMLTRYKGPLKLKDWAFAIAKRSTMRKARIALARRLAIIMHAMLRHGTEFKPA

SEQ ID NO: 42148 - protein, 310 aa, unidentified
MDRIIVGIDVSKDRLDVVVRPSGETFVVGRNAVGLEKLVARLRELSPHIVALEATGGFETVVAAALGSAGLPVAVVNPAQVRAFAKALGQRAKTDPIDAGVVAHFAEATNLEPRPLPDEQTRLLADLVGRRRQIVAMIGAERQREQRLTAPRISKSIARLIKALEKELASLDADIDDAVKGSPAWRAKEELLTSVPSVGPVIARTLVAELPELGQLGHKQITALVGLAPFTRQSGKWRGKSFIGGGRTAVRAALFMGAMVAKKHNPVLKAFFDRLVAAGKPKMVALIAVARKLLTILNAIVRDNQPWQTA

SEQ ID NO: 42149 - protein, 331 aa, unidentified
MKKWDFTLGVDVSKLTLDIHCKELNIHIQIANGSQGFKVFQSWCKEFKIGLRSSFVVLEYTGGYEYKFLQFCESKRILYTRIAGLAIKRSLGIVRGKNDKVDARRIAQYGSEKSQDLKPAGPVNPTIMALRQYLSFRKRLVRESAGYKATLTERKVMYPAKADDMLTRMMAKKIKENDQLVKKLEAQLEIMIEADPAILMNYKIIRSIKGIGNINALMTIAYTENFTCFKSARSYAVYAGVVPFDHSSGTSISGRRKVSNLANKELKQELNQAARVAIKWNQDLKLYAERKLQEKPYKVVLNNVKFKLILIMFSLVNRGELYVDNYQKVAC

SEQ ID NO: 42150 - protein, 407 aa, unidentified
MEVLYPRCVGLDVHARSVTACVRIASGPDINYQHRTVPTTTRGLLDLADWLAAMQCTHVAMEATGVYWKPVWHILEGQFTLVLANAMHVRHVPGRKSDMTDAAWIADLLAHGLIRGSFVPPAQIQELRDLTRTRKQLVGEIARHTLRIQKTLEDANLKLTHVVSDTLGTSGRAILKAVIAGETDPERLADLTKGRLKASRAQLVEALHGRVTAHHRFMLDLHLSQIETLDTAIAKLERHMGDAMAPFHSAVSLLTTMPGLSDTAARVLIAEIGDDMSRFPSPGHLISWAGLCPRLDISAGKRHSTRIRHATPWLKTTLIQAAWAATRKRDSYLHAQFVRLKSRRGPKKAIVAVAASMLTAVYFMLRDGVEYHDLGGRFFTDRDKQETTKRLLRRLRDLGVEVEVKAA

SEQ ID NO: 42151 - protein, 362 aa, unidentified
MFRPHTLYIRIRIVRKVHEPVFAMRDQDVSDVIKTKNRTAMQYIGIDVSKATFVVAYSSDKGGEIRTFNNTTAGIKQFIGTLPKDGSIHCVMEATGNYSALLLYMLNVAGITVSMENPLKVKNFARAMLSTVKTDKIDARLIALYGEKMNPQPFKVQGEAILRLRQKRTVIRQLTKQITAMSNLRGSLACLPVPDKGATHTVDETIKFLEKKRDRLQSELTDLVEVEFSRQLALLTTIKGIGITLATALILTTGGFTYFQNAKQVSRYLGICPTYEQSGTSVNIRGHINRNGDAYTRGLLYIAAWPASRFNAQCKETYTRLRQNGKSGKLAMIAVANKLVRQAFAVVAHDKEYVDGFVSNRP

SEQ ID NO: 42152 - protein, 335 aa, unidentified
MEFAFFIGIDVSKNELDFSVQQGKDFLFHQEIVNDPEAIRALLKEIGRLEGFSFAKAVFCMEHTGIYSNHLLSCLYQRKANICLESATQIKRSLGNLRGKNDKVDSMRIAAYAYKNRDELRLWAPRREEVQQLAHLSSTRSRLIKAKKMLKTPLKEYGCFVKKKTVKQNTNVCYKALKGIEDSLANVERSIMIIINTDPELKRLFTIVTSVVGIGKVTALQLIVTTNEFKDINSAKSYACYAGLAPYLEESGMLKGRGRVSHMANKKVKTLFHMSALVAIQHNDELRLFYERKVNVEKKNKMSVINAVRNKLVQRIFSCVNQNRLYEKNYQKLLA

SEQ ID NO: 42153 - protein, 361 aa, unidentified
MESTKYIDRTKYIGMDVHKETVSIAVMNSTGKLVMESIIETKTATILQFIQGLRGDLQVTFEEGTWAAWLYDLLKPHVTKIVVCDPRRNALLKEGNKGDKVDARKLAELLRAGLLRPVYHGENGLRTLKELSRSYLTISKDLTRVMNRLKALYRGWGICCEGATVYAPHHRSEWLGKITEAGVRRRAEFFYQQLDALQALRQQVRRDLLAESRNHSARKLLRQIPSIGPIRAALLIALIQTPHRFRTKRQLWAYSGLAIETHDSAQYRYVAGQLQRSKKPQQLRGLNRNHNHDLKAIFKGAATKAGSGAGPFHDFYQALLTKGMRPSMARLTLARKIAAITLIVWKKGAHFDVEQLKPQAA

SEQ ID NO: 42154 - protein, 440 aa, unidentified
MQGKKKRSAKQILQDLREEVKSSQNMLLVGIDIGKTRHCACFMTSSGKVLRRKLFFGNTIDGFNKLLRQTKFYQKNKNLPKVLFGMEPSGYYWVHLYEFLDLRGKRAVTVSPLAVNRNRETIDVSKDKSDPKDAYNIADLIYQGKFYLPIYRDKEIRQLKRLMQIYHKLIQQKASLRCRLRGVVGYIFPELETYFKDITAKSMILILQNFPFPQKIQKMRKDEFTSFLVKRNPYLSWKRAEKIYDLAANSVGITGEEEATSLEIRLLLDELKRINENIALINTEVNSIVGKREDYELLLTIPGVGPVTAAQVIAEIGDIANFSSGRQLIKLAGLDLCGAQSGTSINTLRHISKRGRKTLRTVLYQVVINCIRCNSHLRTCYLRILANQQGKKKVKPKAIVAIACKLLRIIYRMLTEKKAFDPNYDKILRKRFSLKLAKVA

SEQ ID NO: 42155 - protein, 373 aa, unidentified
MTQTSAWYVGIDLHKDWAVLAAYRGMTLEVEHEQTLPNEWPKLKRYFERRLKDGPVRACYEAGGCGYGLVRRLRALGVDCEVIAPSHTPTQAADRRKTDQRDARKLAHFLRSGDLVAVRVPTPEEEEVRDLVRSRLVLVQEVHRSRQYVLKLVQRLGRRFEGRNWTAPHRQWLAALELPAEQRRVLDRYLSLLASKELLRDEIGQDVERASKAPLYTETVARLRCLRGIDTTSAMVLVSEVVDARRFASARDFMGWVGLTVSEQSSGGPGRQRLGGITKTGNARCRFVLGEAAWHYARAPRDSRELRSRREGRPAAEVEYALRAQRRLCRRFEALSARKQRAVTATAIARELAGFVWALMRGEPELLLPRLRS

SEQ ID NO: 42156 - protein, 460 aa, unidentified
MTLLGQLGTELPKRYYLGVDVGYKEHVAAVISLKTFVRGDDRWKRARCLHFPSTQAGLRKLQRYLDRFSTDRKAFFGLCEPTGGHYGATVFQYLLDQDYDMNLIENATVRHMRERIFPGLPKTDEMETRVMARIGYLHEAVGEEFTVRPLVLADPDDAHLLALCRDGWKLSTTITRARNQFTQLMAVTFPELKTFFTDSVSTIVPVRLVAAYPTPALLAEAPAQEVHDVLGKAGAYQHARRADELQALARDSSGLLPDPGRAWRIEWLTNFLLTNFLHKAALDKRLKRLVVQWPGYELIVNVPYSGPATLGMILAVTGDVHRFSTYRKYVAYSGYFAGLEKSQTIDRTRMSRRGNRNLKRALFQIAAPLVWFDKGDNPYKALFERKKAEGREWYRAMPFVCAALARHIYHCLKFNDPYDVQRAFQRSLPAPGSEQKWLDLGAALDERFEQMDASVCQIEA

SEQ ID NO: 42157 - protein, 312 aa, unidentified
MKTQTTSIIHYVAIDVSKVTLQVQDDKKAFTVENNSTGHRKLLVHLKGCPKPLVVYEASGGYERELAAFLGKSAIPQAMLNPARVRDFARSEGVRAKTDPIDTRMILAFAKSKALEAIDPPSQESLKLAALLGRREHLVEQMAREKNRLQNSEALIHPSIKRMMKILEKEIAVMDKAISQLIDSTPLLKSRSQTMQSVKGVGKVTAWTLLAYLTEMDHLDRNKLVALAGLAPFNRDSGKMSGRRSIQGGRAKVRKCLYMAAHTAASCNPVIAAYVQGLRDRGKPYKCAIVAAMRKLLIHLQCLIKKSQLSPC

SEQ ID NO: 42158 - protein, 346 aa, unidentified
MLVIGCDFHPSWQQVCWVDTMTGETEEKKLVHGSGEAERFYRQLSGPALIGMESTGNHQWFLEMVTAAGHELWVGDAAKIRASDVRQQKHDRRDAALLLKLLLDGRFPRIWVPSSEQKDLRQLLIHRHKLVRVRAQVKNELQHLALNQGVQRKQRLWSAAGQKVLNELALRRWGSRRREDLLKLLAMLDQQIAPLDLAVEQAAQENSQAKLLLSQPGVGPVTSLAFVLTMGDVSRFRRGKQVASYLGLIPREYSSGGHQRLGSISKQGNRFMRMLLVEAAQIAVRYDPGMRNEYLHRCHSKAKGVAKVAAARKLAIRLYWMLRTQKPYPQIVRIESSSRVALVGES

SEQ ID NO: 42159 - protein, 369 aa, unidentified
MEHFTTVVGLDVSKEWLAAATWPIGAERPTEIVKLPNDPKSVSKFVQRVTAKGPATFVYEAGPCGYELHRQITAMGQRCVVIAPALIPRRPGDRVKTDRRDAEKLARYYRNGDLTEIRVPTSEEEAARDLVRAREAALADRLCACHRLLKFLLRQGRVFRDGKSWSLAHKAWLRTQNFDYPSTRLTYEAYVRGLEEAEERLAVLEQQVFDLANGERYAAGVSYLRCLRGIDTLTAVTLLTEVIDFRRFQKAREVMGYTGMVPSEHTTSFDPRRGRITKTGNAHVRRVLVEAAWNYRRKRVLSQAIADRRKDCPPEVVKIAKKAEDRLHRKFWRLTERGVPNNKAAVAVARELAGFAWAIAQHIPVSVEA

SEQ ID NO: 42160 - protein, 375 aa, unidentified
MNNNNTLYVGLDVHKESITVAYAINSEPVKLMGKIGTSPTDIQNLCKHLRSKSSQVSIVYEAGPCGYGLYRRLVKSGFDCMVCAPSLIPKKPGERVKTDRRDAIRLVRSLRAGDLSAVYVPGVEDEAFRDLARAWASARDDLRHVRQRLKSFLLVHGIYYVGRADWGPAYRRWLSKYSFESPWRQLAFDEQRRTIEGRLAQCERLESALGEAVTEWRLYPVVEALQAMRGIQFITAVGLISEQGDLTRFEHPRQLMSWFGITPSEYSSGESRHQGSITKTGNSYARKLLVEAAWSYRHPARISPAIQKRQENLPRPVIDRAWDAQLRLCKRYRKLQAKEKNVNITIVAVARELSGFIWDIGQIAMSVAQQPQCHK

SEQ ID NO: 42161 - protein, 319 aa, unidentified
MGIDVSKDSLSVDAGALFKGDVPNTPAGIRSLVRKIRKRAGDGGVPHFCFESTGPYSESLFIECCGAGAAASVLNPVKVRRYAEAMSESAKTDPIDARVIRLFAEAKKPEPTHPPSASEIALRKLVLARDALTKCVVQLSGTLEGASGGDAGSVLKSAVVQLRKKIKKLDRLIAEALKGDARLAGLADALTGIAGVGVLSAAKIVALVPELGTLGRRRSAAIAGLAPFTRDSGRYKGKTFISGGRAEVRRALFMPATVAIKHNPVLKAAYQNLRKSGKAYKVAITAIMRRLFAHMDAVAAKWLRETAAAASSAALTALP

SEQ ID NO: 42162 - protein, 344 aa, unidentified
MTEVSILAIDLAKHSFQVCATTAEGVIVSNRKYSRGKLSDLLAGHPQCIVAMEACATSHYWGREAQSHGHDVRLIAPMYVKPFVKRSKNDANDAAAIAVAVRQPDMRFVAVKSPDQQAQAMLFRTHQTFTRQRSQLLITLRGHLAEHGIIVAKGNAALIDYEDVLEAQPDLVPDLVLETARLYFHQIAQLNTSISAFERQMKDTAKRDDTARRLQTMPGIGPINAAAFLAFAPPMESFQRGRDFAAWLGLVPRQHSTGGKTKLGRVSKMGQSDMRRLLITGATVCLRWAVAKGIDPQSWLGRLLARKPAKMVAVAMANKMARALWAMMTKGQDYSGSLVQYAKP

SEQ ID NO: 42163 - protein, 340 aa, unidentified
MTIVMGLDQHRAQITTEWIDTVTGEIGRARVAPAHRESVRRFLARFAGQELEVALEATTGWRFVVEELRRVGAGVHLGEPAQTSALRGNKKRPKSDRADARHLRELLMIDRLPESWIPPDHLLDLRSKVRLRHTLVDQRGEWQQRIRAVLYHHGLPHRRELDLLTREGRAWLADVEVPEAAREQITVALAMIEALATQIAPLDKYLGAYARRQTGCRALMAHYGIGPLTSVAILAELGDCRRFSSSRQAVRYAGMDITVHQSDQRRSPGHLSRQGPPALRWAIYEAAQTARRQGSPDRGYYDQAAERLGGNRACLAVARKLLLRSYHTLRELGEEALQPA

SEQ ID NO: 42164 - protein, 341 aa, unidentified
MQITTIGLDIAKNVFQVHGIDAAEKVVVRKQLRRGQVTKFFAALPPCLVGMEACATAHYWARELRKLGHQVRLMPAKDVKAYVKRSKNDAADAEAICEAVRRPTMRFVEVKSAAQQGRLMQHRTRDLLLRQRTQVINALRAHMAELGVVAAQGREGLKSLLTIIADEKDERLPVDARASLIVLAAQLQALQTMIGSIEKRIIVQHRASEESKRVATVPGIGTLGASAITATVTDASAFRSGRDFAAWIGLVPRQDSTGGKPKLGPISKQGDRYLRRILVVGAHSVLRRAKQNPEKHPWLMQLLARRPFKVVAIALANKMARVAWALLARGGIYQAPRLAAA

SEQ ID NO: 42165 - protein, 435 aa, unidentified
MSNILFENLFISVGIDVGADFSFMSIALPNQTFLGKPFKIIHSDLNSLSMAVSKIKEAEEMYSLESRIFLESTGIYHYPLFCYLRDKGFLVSIINPIITKNSTNINIRKVHNDKFDSQKVALLGLKPNLKVSLIPSDLVLDLRNLSREYYDLMDNRSTYVNKLQGELRMVFPQYLKIFSKITVNTALTLLEKYTSPDAFLNASKDEIIASIRSTARFGITYAEKKYNAIIKAANDAKAFGYSVNSNFKRILLYIRFIRQYDEEISTILSDMHELVDSNEDTAFVKQIHLIESFKGAGFLSAVSLMCEIGDFSAFQSPKQLFAYFGLDPAVNQSGNFEGTKISMSKRGSRIARRVIHTMALISISRNKDGSAKNPVLRDYYLKKCQSKPKMVALGAIMHKVCNIVFAILRDEKEFEIITPEEHQKNYLKARCDIAA

SEQ ID NO: 42166 - protein, 374 aa, unidentified
MGEITRALIARVGVDLAKRVIHVHAVDSSGRRVLSRSFKRDQFLAWCVQLPAGCLVAMEACTSAHHWGRKLRALGLDARLIAANLVSPYRMEGKTGKNDATDAAAICEAASRPNMRFVPIKSREQQGVMSLHCVREGLKEERTGCINRIRGVLAEFGLVFGQGPKALRADLADVIEDASNELTPMARMVLQRAFDHWRELDEHMRWCDRQVGQHVRSSPDARRAAKVPGIGELSASAMTASVGDFHQFKGGHQLSAWLGIVPSQNSSGGKASLGRITKRGDDYLRTLMIQGAKSVVMSAGKRDDPTSRWLVQLIARVGWQKACVAMANKNARILWAVMTREHAFDPKYVSHKPQAKMPAHERTAAPMTAAACPT

SEQ ID NO: 42167 - protein, 337 aa, unidentified
MHEDKIFIGADVSKLTIDFTLLLNDQVEHQCVENTVAALSSYLKAVKRRFKVKDASIYLGIENTGRYSWPALRAFSCGELKLHLLSPLHLSKSQGLVRGKSDLVDSQRIARFLKKNLDELSLYQKPREVIEELSLLLARRNKLQKLIKAESATIEEMGQVSKGRVRSFIIADSKKSVLALRKRLQMVELQIENLIAEDQDLKHKVKLLMSIPGVGKILSWYLLVKTNEFKNFDDPRKLACFAGVATFQHTSGTSVRGRTRVSSFADKTLKRILHLAALRVTQMKGELGEYYRRKVEEGKNKMAVINALRNKIIHRIMAVIREDRPYQIREKNTLLVS

SEQ ID NO: 42168 - protein, 327 aa, unidentified
MAHIGIDVSKNKLDCMWVRDLEAGKVKPKVFPNRRDQYPELLHWLERNTGESPEALHVYLEATSIYHEPLAYWLHEQGVRVHVLNPAQVRFHAQGMGVRNKTDRKDSMMLARYGIERAPAPWQPEPPEVRELKRLLGRLEALEQDIRREENRLEKAQFSEDALAQESIGNVLEALREEHRRLQRQIDDHFDAHDHLKRDRALLESIPGIGRVLSASMTATLRSRAFRSARQAAAFHGLVPVQQESGTSIQRRPRLAKAGSSRLRRKLYMAAVTAAHHNADVRAQYQRLLRRGKAKMAAIGAAMRKLLHIAFGVLKSQQPYQPRCSTG

SEQ ID NO: 42169 - protein, 339 aa, unidentified
MQPTPIGVDIAKSVFQIHYVDPETGEIVNRTLKRARFLEYFANRRPCLVGMEACGGAHHWARALAGLGHQVKLMPSRFVKAFNIGNKNDAADARAIWLAVQQPCKAVAVKSEAQQAVLSLHRMRQQLVKFRTAQVNNLRGLLTEYGEVMGAGRASLDRAIPEVLARLVDRLPAVMIDTLREQWTNLKELDKRIREIEHRLAQWMKQEPAVKAIAEIPGVGLLTATAAVATMGNASVFRSGREFAAWIGLVPRQTGSGGKLTLHGISKRGDTYLRTLLVHGARSVLRVRKEPDTWAERLQSRRPLNVAVVAQANKTARTIWAVLARGVAYERNHISVRPA

SEQ ID NO: 42170 - protein, 345 aa, unidentified
MQYTAFDAHKHYTWARVEGADGTLVREKKILHERGAFQQFLAGCEPGSPVAVETVGNWYWIVDEVEAAGCLPQLVHARKAKLMLGTVNKTDRLDARGLVRLQRTGTLPVVWIPPRELRDARELPRTRMVLVQQRTRLKNRIHASLNKYGILLDVSDLFGQRGRQELRARLSELPPHTGFVVSRLLEQVEGLDREIKGLEQRMEALFAVDDATRVLMTLPGVGFILGTVIGTEIGDVGRFGRHEQLAAYAGTVPRVHESGGRRHYGPVRSDVNRYLKWAFVEAANGVCRTRRTHSQRHTSRLYERIARRRGHQKAIGAVARHLAEATYWMLTKGEPYREPGMSRGA

SEQ ID NO: 42171 - protein, 309 aa, unidentified
MKEELVYLGVDIAKSYLDAAIGNEKRRFANERIGHRELIKWVKQLKVPVQVICESSGGYERALVQALVGAQLKVSLVQANRVRQFARAAGILAKTDRIDAKLLCHFAKAMQPGTISASELEQEHLRELESQRRHLTHLLVMEQNRAARASDGCVRRLNRSLLNQIKKQIEQLDLLIKEHIEASPELSAKAQKLTAINGVGARTAALLLAQMPELGQLNRREVAALVGVAPFNHDSGKMRGKRAIYGGRRPVRHGLYMAALVAARHNPTLRSFYLRLRAAGKPAKVALTATMRKLVIVLNSALKPELNYA

SEQ ID NO: 42172 - protein, 288 aa, unidentified
MIANTELAITAFLKKLMGEQSAFVICEASGGYERQVLLCCAALGLPVHRAHGSRTRNFAKYLGLSAKTDAIDARMLALFAQRSEDLRLWEPPSPETVELRALRRRRDDLAQMVRIEKNRIEHAHVEAIVLSLNRHVLILGEEVAELDARIASLIAATPTFRHRSDLMQSVKGIGAATAAACLAYVPELGSLTKGEAAAIVGLAPHAQDSGKTQGQRRITGGRREVRANLYMAALSALRWDPGMKAFAARLKAAGKPSKVVIAAVMRKLIVILNAVLRTDEPARGMRSS

SEQ ID NO: 42173 - protein, 465 aa, unidentified
MIMSSKRKRKRRKNKDKQVPTLDSLEQIDLNAAGLDIGAAEIWVCVPEGRDETSVRVFQTFTVDLYALADWLESCGVETVAMESTGIYWIPVYEILEARGFEVFLVNARHIKNVPGRKTDVLDCQWIQQLHTYGLLKASFRPEAEMCALRAYIRHRDNLIRYRSAHIQHMQKALHLMNVQLTNVISDITGQTGMHIIRNIVAGERDPVKLAQYRNPRCHSSQAEIAKALTGNYRDEHLFALQQALELYDFYNHQIKVCDAEIEQKYTAFKPVIDVEAQPLPLAKKKKRRSGNAPEFDLRSYLYQITGVDLTQIDGLDALGVQKIITETGVDMNCWSTVKHFASWLTLAPHNDISGGKILKSRTLKSKNRAAQAFRMAAQSVSRSDSALGAFYRRMRAKHGGPKAITATAHKIARIFYHLLKYKEEYHDPGQDYYEQKYRERVIRNLKRRAKDMGMNLVPQQQIVS

SEQ ID NO: 42174 - protein, 372 aa, unidentified
MKTKNKTNLTPSVVSTSAAPVPAGGFTLGLDLGDRSHYVCVLDATGQIIHEGPLLNERVALALLLAKYPAATVALEAGTHSPWISRYLTELGATVIVANPRKLHAITRHERKCDRRDAVMLARLARADVALLHPLQHGSAQAQHDLLGLKLRDSLVRTRVNLINTVRFTLKSLGHAVANPSSEAFHKSIVTAVPADCLPVVQPVLAVLALITDQIKTLERDLVARSKKDYPVTQRLQQIAGVGPLTALCFVLKIGEPTRFGRSRDVGAYLGLCPRRDQSGGTDKQLRISKCGDGLLRRLLVSAAHYILGPFGPACALRAYGQHLVGTSVREKKRAVVAVARKLAVLLLSLWKHGTDYEPRVPAAPVLVMIPA

SEQ ID NO: 42175 - protein, 350 aa, unidentified
MPQRNMPRSAAVYGIDIGKNIFHVVGLGSDGVPVQKVRFRRYTLLQFFERAAPAIVGMESCAGSQWIARKIQALGHKVRLIPAQFVKPYVKSNKTDIIDAEAIAEAATRPTMRFAALKSEEQADLQALHRVRDQMIGTRTRLINQMRALCLEYGIALRQGAGLFKLDLPQVLEDQSNDLSSAMRKLLADLFADLRQLEQRIGDVTREIEAIASREDVARRLMTIPGIGALGATALLAAIGSGRQFQKARDLAAWLGLVPREYSTGGKQKLLGISKRGNRYVRKLLVHGARSCFRHLDRTKDRLGNWLDSLQARMHPNKAVVALAAKMARIVWVVLTKPGALYERRDPAFI

SEQ ID NO: 42176 - protein, 318 aa, unidentified
MNTNTLQNINVGVDTGKSQLDIYIRPLDIYFTVPNTDKGITDAIKTIKKHKPQRVVIEATGRLEMPFILACDKAKLPYVIANPLRIKRFAEAIGQRAKNDRLDAELIAHYAERVQPELTKLKSENIRLMSDLVTRRNQLLTMQTMERNRLQILPKNISSTITPILTALKNQLEKVEAKIARLIERSPEYHAKSTILQSMPGVGKVLAASLISNVPELGFITNKQASSLIGVAPITRESGRFKGKRMIKGGRPQVRTVMYMAMMSAIQCNPVFKATYERLLAAGKPKKVAIVACMRKMVVTLNSMLRDGAIWDKDSVKN

SEQ ID NO: 42177 - protein, 331 aa, unidentified
MTVKVFVGVDVSKLTLDVFIREKQIHRQFKNERSGFVSLIQWLEKQTGQQTRAMFICFEHTGLYSLLLALFLEENSIPFSMVPALEIKRSLGITRGKNDIVDSKRIAEFAFRFNDKIPRTKLPARDITKIQSLLTLRDRLSRNLGAYTVSRNETRRVMREIDVPQLFSSYDSLILALKEEIKWVEKAIRELICGNDELRASLELITSIKGVGFVIATHLIVYTYNFTRFDSWRKFACYCGIAPFDYQSGTSVRGRTQVSSVANQQMKKMLHLAAVCAIRTDTELKEYYHRRLAEGKARMAVVNIVRNKVIARVFAIVKRGTPFVNIKRYAI

SEQ ID NO: 42178 - protein, 344 aa, unidentified
MVVLGTDTHKRSHTVVAVDEAGAEIGSMTVAATPQGHLRLVKWAAKWPQRRWAIEDCRTLSRRLESDLLRAGELAVRVPPKLMAGARRSARTRGKSDPIDALAVARAALREPDLPVARLDGPSREIRLQVDYRENLIKDRTAAQNRLRWRLHELEPGYDPPPGSLNRYKTLDHIDQLLGAHTSMVATLGRREVTRIRELTREANQLERDVTHRVTQLVPSLLEIPGCGALSAAKLVGEAADITRFKSRDAYAMWAGTAPIPVWSANNQRFRLNRGGNRQTNAALHRIAITQLRIHPDAQAFIKRRLETGSTKREALRLLKRKLANVVYRTLLTDTQQPALSQAA

SEQ ID NO: 42179 - protein, 339 aa, unidentified
MLIIGCDFHAGFQQVAIFDNRKGEIEQKRLRHREEAEVFYRGLEGEDVRVGMEACGQYPWFERLLAGCGHQLWLGDAARIRACEVREQKTDRRDAALLLQLLMENRFPRIWVPTLEERDVRQLLAHRHKQVGARTRVKNQLQALALGQGMQKKYKLWTRTGRAELERLELLPYAKLRRERLLAMLDALEAEIAALNRQVEEEVKRRPAAMKLMTHPGVGPVTALAMVLTLGPAERFRSARQVASYCGLIPSEHSSGGRQQLGRISKQGSSFLRFLLVEAGQSAARGDAELGRFYRRLAMRRHRALAKVAVARKLAMRLYRMLREDWTYAQLCKAVCRPA

SEQ ID NO: 42180 - protein, 358 aa, unidentified
MLPTPNAPVPGTTVVVGVDTHTDTHHAAVLDLNGRLEGDAAFPATPAGYQALVDWAGSYGIIDRIGVELTSSYGAGLTRALTGAGIHVLQVNTTDKATRARRGKDDRSDAIAAAQKVLAGMATAIPKDTTGVIESIRMLTLVRNSAVKSRTQALNQIKDLLVTAPTPLREQLRRFSLPTIAKHAAALQPDTGRYADPAHAAEHALKRLGHRVAALNDEITAADQELRALTTATAPTLLARPGLGVHTTAQFLITAAENIDRITSDAAFARLCGAAPVPVSSGQTHRMRLHRGGDRQANRALHMIIIGRMKTAPDPRAYITRRLTEGLSKRDTTRALKRYVARQVFNDLKTDLTKNRHP

SEQ ID NO: 42181 - protein, 402 aa, unidentified
MNCVGIDVSKGKSMIAVMRPFGEVVVSPFEVRHTASELSELARLLKNLDGETRVVMESTGNYHAPVAWLLHGAGLYVSVVNAMLVHDYGNNSLRRGKTDKKDAVKLANYGLDHWLTLPRYVPEEDTRLMLKTCYRQYQQYSKVQTMLKNNLISLLDTAFPDANRLFTSPPRADGSEKWVDFVATFWHCECVCGLSKKAFTAKYQKWCRKHGYNFSEDKALDIYVSACGRFGVMPKTKTAKLLVEQAISQLQATSAALAALKQEMQSLAASLPEYPVVMGMFGVGPTLGPQLIAEIGDVRRFHSKKALVAFAGIDAPPYQSGQIDVRSRSISKRGSASLRRTLFLVMGVLLQCAPMDEPVYQFMNKKRSEGKPYRVYMMASANKFLRIYYASVKAYLDSLEHD

SEQ ID NO: 42182 - protein, 319 aa, unidentified
MSKQKEERFVGIDVSKAMLEVAVRPSGEHWSVANEEAGVRELVKALEKTAPTLIVVEATGGMQALVVAELAAAGLPVAVVNPRQARDFAKATGRLAKTDSIDAEVLAAFGQAIRPEVRELKDEQTQLLTALMGRRRQIVDMLTAEKNRLASAPKSVRKEIRKHIEWLEARLKAMDGQISDTIKENPAWHEKDLILRSTPGVGPVLSVSLLAGVPELGQLSRQKLAALVGVAPLNRDSGAYRGTRKVWGGRAQVRAVLYMAAVSASRANPVIREFYQRLVAAGKKPKVALTACMRRLVCILNTMIKNGTRWRQEEATARA

SEQ ID NO: 42183 - protein, 405 aa, unidentified
MDELDKRSVIAGVDTHKDTHTLCLIDHMGRTIGTFEFAADAKGYDSLADKIGDPATCIGVGVEGAGSYGAGLTRRLLELGYCVHEVMVPGRAKRRPGRPKSDPADAEVAARQVLAGANLSKPKEQSGWTEDLRQLIIARDRLVQATSAMINAAKSLIVTAPEDLRRSLGDLSRKDLRRALASLDSDAGGVFLALGALGRAWDLQDREAEAIEGAMKGILEANAPALLAIYGCGTVTAAALAVAGGGNPERLGSEAEFASLCGVAPLLASSGKTERHRLNRGGDRRANRALYQIAVTRMSYDQRTKDYVAKRKRDGKSKKETIRCLKRYIAREVFRALRRPLEVKGPSWKDLRPARQALGITLVEVGKALNVGFQKVSYAETGRLMNAKFLEEYDAWLKSQLRIVG

SEQ ID NO: 42184 - protein, 400 aa, unidentified
MSMAELRVALDIGSKQHRVGIGTADGKIIEEFEISHDRKGFELFFSRIALHEKRLKLPVVVAMEGVGGWARPLDRMILQHDYELLNVNNVKLARFKEIFAAPAKSDKIDTRKMLELVRMREVLPLAKAVVHRVEAIPVENEQLKRFTRRRRQLVDEKVRVVNRLQSDLQAVSPGLLEITGDVDNLWFLNFLTCREDLTQLAGMKHASLLKIAGVGKAYAAKIETWQKHNTFADETAWVGEMVIADAQRVLDLIRQIQALEGRIETISASSEIATRVRTIPGFGLICSGTLAGEIGTFARFGSEASVALYTGMTRLDNSSGQYVGTKNTRQVNTHARATMMTATARHIDNSPESKAYYDKKRAEGKTHNQAVRALGRHLIRVIWSMITHQRDYVSKTPSPQ

SEQ ID NO: 42185 - protein, 429 aa, unidentified
MSYRIAGIDVHKKMLAVVVSDVEIESEYQFERRMFSSNPEQLRSLAAWLVEQKAEEIVMESTAQYWKPVWGTLERYWKPLCEKREGARRRSGTLHLAQALSNRGRRGRKRDFVDAERLVKRLVARELTLSFVPDAEQRLWRTVTRKKYQLRRDLVRIHNQLEALLEEAHIKLSSLVSDLLGVSARRMLKALADGETNPAALAALAHQRLRATPEQLCDALGACTELKPVYRRLLKMTLEHLQILEQQIGQLDQELATLLHPHQDAVERLAEVPGFAVDSAQQIIAEVGPAAATFPSEKCLSSWVGACPGEEESAGVNYSHRSPKGNRHMRRLLNQTANAAVKAKGSIFEIIYRRCVPRLGHNQAIGVIAHRQCRLIWLILHQGTRYEERGPAVTKRSRYQRTWRMIRQLRNLGYRIELPNPQASQAQAQ

SEQ ID NO: 42186 - protein, 453 aa, unidentified
MHECQECYIVVMINFALRNPLFAHKLRQKEEIVTNKRLIQRGRYVNPDILIVGIDIGKYKHAAVGTSLHSGFTKPFFIKNNRISYESFESEVKKWKRRFECKEVVIGFESTGHYWKTLAYYLKKRGKFLVEVSTSYTKKSKEMMDNSPLKCDPKDARVIADLVKQGKILTPVLPEGKILALRNVVHTRENLVKERTSIINRLQKIVDISFPERGEIIGKINGKTSLFLLEEAPFPENIIDKGLECLREEIRKKSMGHYKYEDARKLYQSAIDTIGLKEGRDGSTYELKILLSRLNKLGQEIEEIESNIKDRLRDIEEAKYILDIKGIKEVTAATIISETGGLGNYKNISSVLKVAGLNLFEISSGEHQGEKHITKRGRSLLRHKLYFAALQQTRKGMPFYSFYRRLVEENGVKKNKALIALARKLLRVSFALVRDKTEFISSCEEKTKIKKVA

SEQ ID NO: 42187 - protein, 443 aa, unidentified
MRFVGGDVQALFVERVRGLDPERCLLVPVDVGKATAMALVADLFGEIVVDPFGFDLTERGVSVLVGAVSSAESERGAVMVRFGVEAAGRYHRTLMACLRRQGLEVVELNPGAVKEARSGQGKRRLKNDVRDLAGMADLLARGGGRPPQRVDTQMAVQSAWAAHRRRKLKARTALQNQVIGQIDVVFPGLTGCFSDLLEAKAGRVIVHHVCEPSRIRRLGVEGLRSYVARRGCAMTRPKAAQVVAAARDALRLDDAEHVAASAVLAVDVVLLETIQTEVEHAEGILGAMLDQTPAGVLTTLPGIGVVRASNYGAALGDPHRFVNAAAAYRFSGLVPTDYESAGRRRPGQHISREGSVELREAIIELGRGLAGHEPDFAAYKKKKLAEGKKPSVAAVAVGRRAHRLCFAMMRDQTRYHPARWTLAVAAGRSVMTQTQKRVGVTAT

SEQ ID NO: 42188 - protein, 389 aa, unidentified
MKIFVGIDIAKLNHFAAAISSDGEILLEPFKFTNDADGFQLLVSKLESFDKNSIIIGLESTAHYGDNLVRYLVAEFYQVCVLNPIKTCQMRKNNVRKTKTDKVDTFVIAKTLMMQDDLRFITFFDLDMMDLKALGRFRQKTIKQRTRLKIQLTTYVDQVFPEIQYFFKSGLHQHAVYALLKEAPSPKEVASMHMTHLANLLKVNSHGHFTKELAKELRVLAQKSVGANDSAISIQITQTIQQIELLDSQLEKIEAEMTDIMKFNDSVIMTIPGIGYINGGMILGEIGDIHRFSNPNKLLAFAGLDPSVYQSGNFQAKTTRMSKRGSRVLRYALVNAAWNVVRNNATFKAYYDAKRAEGRSHYNALGHCAGKLVRVIWKLLTDEVEFNLE

SEQ ID NO: 42189 - protein, 347 aa, unidentified
MDHYAGVDVSLEASSVCFVDGAGKIVREAKIASEPAALIGWFASLGVDGLRIGLEAGPLSQWLYAAMKEAGLAVELLETRHVRTALQTMPVKTDRNDARGIAQLMRLGWFRPVHCKSMAAQETRALLTARKLVQSKLYDIEMSLRGILRGFGLKVGPTTPKRFARRIEELVAGHSTLEVIAKALLSAHAALLRELDMFEKLVRAMARRDKRARLMMSAPGVGAIVALTYVSAIDDPARFSSSKRVGPHFGLTPRKYQSGETDVTGRITKIGDAGVRTALYEAANVILTRPVKGAGLKSWAMKLARRAGMKKAKVALARKLAVILHRMWIDGTAFDARKAAFAGVAAA

SEQ ID NO: 42190 - protein, 358 aa, unidentified
MKVGVVEGPCFGGANMQAVTTIGLDIAKSVFQVHGIDAEGRVIIRRQLRRRYVLAFFEKLAPCLVGIEACAASHHWSRQLQALGHTVRLMPPAYVKPYVKRQKNDAADAEAICEAVTRVNMRFVPTKTPEQQSCLTLHRTRLLFIRQQTAVINAIRSHLAEFGIVAPVGRHGVEQLLNIAADLSDERLPDMARRCVGTLGAQLKVLKAQILAFDRQIMAWHRSNATSKRLDDIPGVGPALATALVASVGDPRVFRSGRDFSAWIGLVPRQRSSGGKDKLGSISKQGDRYLRSLFTTGALAVIRYAKIHGTQHRPWLTALLARRPTKVAAIALANKIARMAWAIMARGECYKEPVALAA

SEQ ID NO: 42191 - protein, 346 aa, unidentified
MEQYVGLDVSLKLTAICIVDRTGKIEREGVVASDPEAIAAFVKSHAPHVARIGLETGATSTWLWTELNKMELPVICIDARHAKAALKMQINKSDRNDAVGIARIMQCGWYKEVRVKDLDSHAIKALLVSRALLVKIKRDIENQIRGLLKNLGLVIGRAKMNVFAVRAAELAEARPELAAAVEPLLKAREAVGRQIADLDRKVMRLARNDAQVRRFMTAPGVGPITALCFLATVDDPTRFKRSRSVGAYVGLTTRRYASGEIDWTGRISKCGDAMLRSYLYEAANVLLTRVVKWSTLKASGVRLAKRSGLRKAKVAVARKLAVILHRMWIEGTEFKWSSKEVANQPA

SEQ ID NO: 42192 - protein, 406 aa, unidentified
MNAVGIDVSKGKSTVAILRPGGEVVASPFEVSHNPRELNGLVTLIKSLDGDTKIVMEYTGSYYLPVALFLRKVGLFVSVVNPILVKDYSNKSLTVRKGKTDKKDSIKLAAFALDRWNELPLFSAQSHTRTLLKAFNRQYNQYTKLKVMLKNNLISILDQAFPGANTLFTTPARKADGHEKWIDFVLRFPHCECVSKKSFSAFSKGYLSWCRKGGYNFSDSKAKEIYKFACNCTPSLADSVAAHALVSAAILQLNTLNETLASLQKEMDLLASSLPEYDTVMSLYGVGSVLGSQLIAEIGDVSRFSNKKALVGFAGIDAPPFQSGNFNPQSRSISKRGSAALRKTLFQIMAVILQNAPANEPVFLFMDKKRSEGKHFYVYMMAGANKFLRIYYARVMESLNSLREAA

SEQ ID NO: 42193 - protein, 329 aa, unidentified
MSAIVCGLDVHKDSTYATILNHEGKVVNQTRMSNERMLSYLTHYKVNRIAMESSTAIAPLYRQLASKGFDVLVSHPKKTRYIAEAKIKSDRVDSKAIAELARLDALPLAYVPDTETSRLREKVRRRAFLVRQRVKLKVKIKSILLYEGIKPPSGHGLFTLKGVEWLRSLNFESIDSYLRIMNTFNREIKLLSKQLEGLAEEDEDVKLLMTVPGIGYYSALLVKSEIGDINRFPFGERLCSYAGLVPSTRASGRAVRHGGVIKEGSRWLRWVMVQAAQTHVRSFDSNVTRMYHRVAEKKGTRVGLTAAAHKLLLVCYSVLKNKRPYYDQA

SEQ ID NO: 42194 - protein, 557 aa, unidentified
MIRYVGLDVHKRSIEVCILAPGGQVLARFSVGGTRAALEAFAKTHLLPTDQVALEATTHCWAVARVLKPFVARVVVSNPLQTQAIAQAKIKTDKVDAQVLAQLLRTDFLPLVWEPDEVTEQRRVLCSRRAGLVAERTRLKNRIHAVLAHGLIAVPEGDLFSASGRRWLERQELPARARTLIDSDLRLLAACEAELETLDWTLIQEAHAEPRVRLLMTLPGVDYVVALALIAVLGVIERFADGAHAAAYLGLVPSTHQSGEHCYHGPITQQGNRRARWLLIQAAQHVATHPGPLGVFFRRLLKKKNRNVAVVATARKLVVIAWQMLKENEPYRYAQPAATEAKLARLRVRATGKRRKTGPAPGSAAAANQGTGQRSRTVRSLPEVYQAEELPAVTEPARLPAGEQRALAQAEVGEYGAQIQRPQQRERRSRVPAGEAPRGNVTSQNEEEGGDGTTAAVRERCGAAASVPGTAGGGHGARGAASAGRAAHAAGAAAAGDRAGGGRGGRDGAGRPGDQRGDRARAADRVLRGVCQRERAAGEPPSPAPPPTPLTHGQNGG

SEQ ID NO: 42195 - protein, 344 aa, unidentified
MNKNWFIGIDVSKKTLDASIFVAGEVINRFPHTQVRNDKQGFKDLLRWAKGQGVKTKDTLFGLEFTGYYSDALEQFLTRKKVSYTMLPTTVVKHYQRGTHDKNDKIDSAKIADYLFRFNGTECIRLRVLPSKAMQQLKDLKSERKFLVQQRVACENRQKVAKSKSEEKHLQKLIDLYKAEIELVEQQIADVIVQDEEIYTTYRLLTSIPGIGFVNAVNTIANTQNFTAFETARQYAKYVGVAPSEHSSGTSVQWRRRPSPHADLQAKADLSMAALHAIELSAEMRQLYERKLGNKPKDKDMQKKALNAVKFKLVREMFSVAKQARNFELRGLDKAQAEVHSTEE

SEQ ID NO: 42196 - protein, 440 aa, unidentified
MAMRKREDLVFPNAAAIDVGASSHWAAAPPHSTDAPVREVGAMTDDLNGLADWLLACGVDVVALESTGVYWIPVYEVLEQRGLKVWLVDARQVKYVPGRKSDVQDCQWLQKLMSYGLLRAAFRPAGEVCVIRAVARQREVLLTSQASWVQRMQKALVQMNIQLTEVISDVMGQTGQAIIRDIVAGQREPKLLAKHRHRRIKASEQDIVRALTGNWREEHLFVLKQALAMYDDIAKHLAECDAKLHALLGERSAASVELGKAPRAGSKARAQFDVRQQLANWAGADLTRINGLGLDSVMTILSELGPDLSRFANVKHFCSWLGLCPATKISGGKVLSARTKRSANRVRQALKMAAMSLSHSDSALGAFYRRLSGRIDKPRANTATAHKLARMVYFMLTRGEAFVDEGQQRYEEHQRERSIAALKRRAAALGFRINPMEVVA

SEQ ID NO: 42197 - protein, 344 aa, unidentified
MPQPHHVGLDISVKETTISVVDELGHVAHRAVVASDPAVLVEHLVRLGFTYSRIGLEAGPLSAWIYAGLVDAGLPAICVETRHMHAVLSARINKTDRNDALGIAQMMRVGLFKVVHVKTPASQQRRLLLTARKLLQRKVNDIENDLRGQLRNFGLKVGAVRPSAFEQRVRELVADMSFVAAVVIPLLDARSALRAQLAKLHKMLLDMVRSDPVCRRLMTAPGVGAIAALTFRTCVDNPARFSRSKCIGAHYGLTPRLYQSGETARIGRVSKCGDAMMRVALYEAAFVALTRSQGRWNPLKAWGVAIAKRRGIQKAVVAVARKLAIILHRMWRDETDFRWTAAKV

SEQ ID NO: 42198 - protein, 475 aa, unidentified
MERQSLSCFLIKRNKMSKVSKIKKKTASACKDGGKMERFGLLYPRSAGIDVGSMLMVVSYTDRQDMIHLREFNSFTDSLLELSGLLHREGVEQVVMEATGEYWRTLYWMLESHGIQVLMANPSHYRNVSAQKTDINDAQWLHQLLAHGLIRSSHIADELYRQLRRFVHERKTCQDLKSDTLNRIQKTLTLMNIKFQHLISDIEGVAGMAIIRAIISGISDPGTLLKLINVKSLKSSPEDLLSSLKGDYQEHHICILSSLMKAYDFHKSQMRDYETHIEATLEKLLPASTPEQPATIKKKKTKARKNEYHFNLSDYLEAIFGVDLTAVDGLDEISLLTILAVTGTDMRKWPTAAHFASWLNLSPRPKISGGKQIGHEKRITHNPATQAFRLAGNSLWQNKGPLGQQYKKLAATKGKAKAIKAIARKLATIFYNMVLKKEAFDPKKIQQDVEKQEARRVTRLHRDAAKLGFTIQKAA

SEQ ID NO: 42199 - protein, 352 aa, unidentified
MREYIAFDSHKRYSLVEREDVATGKIVQQVRLTHAPGAVRRYLAQCAPGTAVALEATGNWYWIVEEIEQAGLQPRLVHPRKAKLMMGLINKTDKLDVHGLNRLQRNGTLPTVWIPPRPLRDLRELTRTRLVLVEQRTRLKNRLTATLAKYGVPPSEYSDAYGKSARAELEARIEPLPEQTRWVCKQLLAQIDFLVRQIRQLEQRLEDLVEVTPEMERLMTLPGIAEILAATIALEIGDIGRFPDAPHLASYAGTTPRVHASGGRVRYGRLRTDVNRYLKWAFVEAANSVAVNHRRCPERHVSQLYDRLRQRKGHHKAIGAVARHLAEAAFHVLRRQEAYRDPVLERGCTSEV

SEQ ID NO: 42200 - protein, 417 aa, unidentified
MTESYRLFVGIDWGTEQHEVCVTNAAGTLIAKRTVAHTGEAIAELVGSIVHLAEDETGAVAVALEAPRGPLVDTFLERGCHVFAINPKQLDRFRDRFSAAGAKDDERDAEVLSSALRTDRRAFRELMIGDPLTIQLREFSRQDTELGEDLRRLANRLRDHLLRTWPELLRLVPAANEPWFWALLKLAPTTIEASRVRVTQVRRVLRDHHIRRLTAEEVLAVLHRPSVHLAAGVREGVRVRIVDLVDQLPMIQAQRRAAERRLTATLDALTEGTNGEHRREQTDVAILQSLPGIGTRIAATLLAEAANALQLRDYHAIRQLGGVAPVTKRSGKSCIVMMRYACDHRLQTALYLWARGCVQRDAHCQAHYAKLRQAGHGHARALRGVVDRMLAVLMAMLTARTPYDATRRGCRVVEKTA

SEQ ID NO: 42201 - protein, 342 aa, unidentified
MTCYVGLDVSMKETAICVVDETGDRIWDGKSRTDPDAIAAVLERRAAGAVKIGIETGPMTVWLWHALNERELPVVCLHARHAAAALKLQMNKTDRNDAFGLARLVRSGWYRPVAVRSMETHRLRALLITRDQLVGMSTALINKIRGLAKTFGILVGPGKGGTFERQVRATLPDDPVVAALFESLLAMLGTLRERQHAIAKQLGRVARQSGACRLMMTMPGVGPLTAVSFMTTIEDPHRFRRAQDVGAYLGLTPRRYQSGEVDINGRISKCGDRLTRKLLFEAANVMLSRTSQALALKDGGAAVGRRSGFWKARVALARKLAVILHRMWIDGRGFEPKITTMA

SEQ ID NO: 42202 - protein, 366 aa, unidentified
MSTTLPAPKPRRRRPAGEVVLGVDTHRDAHVASVLSLTGAVLATDEFPATAAGYRALLKWARRSGAVRRAGVEGTGSCGASLTRYLLAQGVDVFDVNWMDRADRRRRGKSDPLDAQNAARAVLSGRACARAKSGDGPVQIARMYKLTKASAVKARTQTINPLKAVIVTADPALREELAGLGNAELFRTCARFTDASSHEGAGEESVLQATRITLGLLASRIGQLSEEIREVDARLARLVECHAPQLLDVVGVGPDTAVALLITVGDNPERLDSEASFAALCGVSPVERSSGRRQVRRLNRGGDRQANAALHRIVFTRLRVDPRTQDYYERRIKEGKTRREIVRCLKRYAAREVFHLVKQLQPGPRS

SEQ ID NO: 42203 - protein, 353 aa, unidentified
MGKMQDFVVKNKKVFVGLEDSKKTWKLCVRCDNMIIHQISMPAVYNNLKNYLKGRYPGCKIRVMYEAGFSGFWLHDLLEEDNIDCIVTPPNKVTQEKVNKVKTDKIDARRLAKNLENGDYTSCLVPDVELREDRQISRTLDQTQKNIKATKNRIRRFLDLYNLNDGFPAGAWKDSHYKQLCHLKLSHSLQVSLDCHLNHLMELEKSRTILLKELRALCKKARYKESVRIKQSSPGIGWLSAIRFTLEWGNMNRFSTGKKIASFTGMTSSEYSTGEKVHRGRITGQSSKQVRVWLIQCAWRAIKIDPALLGKFNSVWRNSGSKKKAIVAVARKLAVRLWAIEIAGKSYCTGVIK

SEQ ID NO: 42204 - protein, 412 aa, unidentified
MKYYTSTTQYNCGIDLHARQMYVCVMDRQGKKLVHTNIRDNDFGYFLKLVEPYKHDLTVCCECMFGWYWMADACQAAGLTFVLAHALYVKAIHGGKNKNDRIDSEKLTHLLRSNLIPPAYVYPAAKRPLRALLRQRIFYVWRRSELLARIYSHQLAHNRTPAKQTRRVRDSWEEQLLAAEDHPLRRLALRNDLAMIRHFDTQIFQLEEELQRQTKQVACREYTLLKTVPGIGESLGLTILYEIGDIDRFPTVKDFVSYCRLVKGTVASAGKIKGLRGAKLGNPYLRWAFGEAAVIAKRDPYLIGPLSQRLEAQMGGNKFKANTVVAIKLARAVYFMLKNKTVFDPERLVASLQKCFGPGRSQPGRLTGRAKKAMPPSAAAPVCCAPSTTHCVGQASSPADSIGSCGQVPVAD

SEQ ID NO: 42205 - protein, 344 aa, unidentified
MKKVLIGIDFSKEKFDVAIIVKSTSMQAHAEFDNKVSGYRKMVKWIKSVVEEKTCSSWLFCGETTGGYSRMMSDWLYAQGYDVWIENALTIKRTFPLKRIKNDAVDAFMIAEYALRFEDKAQLYEPLSPALSGLRELFLYRHHLVRHRCSFQVRRIEKRFTQEKSPIKNTISQSARHIITEINKEIAKCDEKIKEYIESDDQLYSIFAIVTSMPGVGTINAVSLMVYTNNFTKFAYNPRKIACYYGIAPFGRDSGTSVHTDPRVGFIANKMLKSILTQAALAAVRTCPQIAKYYQRLIERGKKPMVALNNVKNKMIAIITAMVRTGCMYQPDNICVATQSVNVK

SEQ ID NO: 42206 - protein, 356 aa, unidentified
MSKGNKKSAKSKGVRAASSDRVVVGLDVHKRQIHAAVRVNGQEVGTHVLPARPGAVEKFLAPYRAGLMHVVYEAGPTGYGLARHLRSAGVAVDVIAPSKTPQAPGDAAKSDRLDCRDLARLDEAHLLRPVAVPTEEEEADRQVIRLRDQAVQERRRARQRIKSFLLMHALPEPRGLEHWSQQAVAALGTLEIKNGRLRFCLDLLLEELANAEETIAKIEHEMKEMAQEPGHAAAVKALTDHVGVGRTTALQFKTEMYQPRRFSNERQVSAMLGLAPRVRQSGDRRHEGPLIKAGRGRLRSLLVEAAWVWIQHDAEARKVYQRLVHNTGSTQKAIVGMARRLGLDLWRSLVNSRAAA

SEQ ID NO: 42207 - protein, 339 aa, unidentified
MMYGAIDLHLRYSEIRVVEADGRVVRERRVVTSRATLTAAFAGLGVLRVLLETGTESEWVAQTLEAAGHAVVVADPNYAPMYGEVRRRVKTDRRDVAALAEANRRGWYRATHRRSRAQRTLQQILRSRRQLVAMRTGSISVVRALLRQEGYRLPSGSAAQVPARLARVPLPDELAATLAPLRQVIDTVTRELAAIDTRLRTTAAADPVVTRLQTVPGVGPVVALTFRATLDEVTRFQAAGQVSAFLGLVPREDSSAERRHRGHITKAGSGELRSLLIQAAWACWKSRGSGTLRAWAERLAGRRGRRIAVVALARRLSRILYAVWRDGTTFDGARVAAGA

SEQ ID NO: 42208 - protein, 426 aa, unidentified
MSEVELVKPEPQYAAFIAIDWADKKHVWCLQGMGSEKRDSGELEHTPEAVEAWVVQQCQRFGTGPIAVAVEQSRGALVFMLSKYEALHLFPVPPTMAAKMREALYPSGVKDDPRDADLLLDVLRKHREKLRRLMPDTEATRRVQNLVEERRKLVDERTEQSNRLTSHLKIYFPQILNWFEHLDTELVCALWLRWPTLEQLQRVPAAQLRTFFRKHHCRNQELNERRIQEIRQAIPAIRDRAVIEAKSTVVKVTVRMMRSLLEGIAALDEKIEEAAAAHPDFFIFDSLPGAGAVMAPRLLAAFGSQRERYGSAREVQTYSGIAPVIERSGKKKWVHFRRACPKFLRQSFHEWAGHSIAQSVWARSYYQQLRSRGKGHHAAVRALAFKWIRILFRCWKDRVAYDEVKYLVALGRRGSPLAAVDVAISG

SEQ ID NO: 42209 - protein, 343 aa, unidentified
MDQYIGLDVSLKDTAVSIRQNRKRIWRGKCPSDPKVLSQIIRKHAPHAKLVVFETGPLSTWFYHALNAERIPAICIEARHAQKVLNETLNKTDANDADGLAQLAEAGFYKVVRVKTFDNMVTRTLVAARSQLVSISKQLSNQIRGLLKTFGLIVPKGKGGAFDANVRALLDGNSGLAAVILPLLEAWRDIRKRASNLDHQLLVASRKSRATKLLMTIPGVGAVTAVSYVAAIEDPENFPTSRSVGAWLGLTTRRYQSGEIDYDGHISRRGDSRLRGLLYEAATVLLTRTTARTECSLKTWGLKLRERLGFKRAAVAVARKLAVIMHSMLKAGEAFNPLAGAAA

SEQ ID NO: 42210 - protein, 337 aa, unidentified
MSKVTIFVGIDYHQDVVQVCVMDRQGQVLANQSVSNSVEGLAAVVAPHGSEVHAAIEACGGAAAMADALVTRLGWVVDMAHPGYVARIKQSPDKTDFSDARLLADLVRVGYLPRVWLAPFVIRELRRVVRYRQQLVAQVRSNKLRIRGLLRENRAKLDGITPWTKKWILWLHTTEDVSPESHWVIEQLLRQIKQLQDDIVTVEERLSHLTADDPVVAGLLDQKGVGLITAVTLRAEIGRFDRFRSGKQLSRFCGLSPRNASSGNRQADAGLIKAGNPQLRTVLIELAHRLKRWDRRWAKLAFTMQMRDKKGSVIAAAVANRWVRWLFHQMQSINQTV

SEQ ID NO: 42211 - protein, 338 aa, unidentified
MNKISKKTNFVGVDISKDTLDLFLIDDQHSRTGHEKNVSNDISGFESIEKWISSKNMKISDCVFCLEHTGNYGLLLFAWLEQKDVVYCVEPAIQIKRSIELTRGKNDAVDAKRIAEYVYANKHKLNPFKLPAEVIIQAKQLLTYRDQLVRIRTSLKNSLKSHQQYENITQLKLSEEIKKQIQENNSRILNTENEILRIIGNNQEIKRNFDVIRSVKGVGLLIAAYMIVTTNNFTSFSNGRKYACYAGVAPFEHSSGSSIKGKTRVSHLANKKIKTLLSNGAYSAIKHDPELKNYYKRKIAEGKDNNLIINAIKCKMINRIFAVQKRQSKFIDIYQHNF

SEQ ID NO: 42212 - protein, 388 aa, unidentified
MNGVPDKSEPLTAIHTDLGAIFVSLELSRSSWLITSLSPGGGEKMSKHSVPGGDFAGLMERLVQLQKKAKLRTGQSFRIIVVQEAGLDGFWIHRALQNEGIESHVVDAASIATSRRRRRAKTDKIDGETLVRTLLAYKRGEPRVCAVLKVPTPDEEDRRHLCRERKALTAERVRHVNRIKGFLFSQGVSGYQPLRRDRRQRLEELQTGDGRALPQHLKALVNRELDRLELLLKQIKTVEAARDALLAVEQTAKPAPAAMLLDIRGIGPEFAAVLWSEGLFRHFENRRQIAAYAGLAPTPWQSGAVDREQGVSKAGNPRLRTTLIQLAWLWLRNQPRSALSVWFHERVSRNGGRLRKTTIVALARKLLVALWKYVTTGVVIEGVTMKVA

SEQ ID NO: 42213 - protein, 386 aa, unidentified
MLKCDDLSRSLVALDQDSTLIAVIEMSQKQWLVGALVPGLAREPEKKLAPEAPALLAQLERWQAEAAKAGRVITRICVAYEAGRDGFWLARWLRERGIECSVIHPTSIPVSREHRRAKSDRLDLGLLRRSFLGWLRGEKKHCSMAPIPTLAEEDARRLNRERQTLTAEASRLVNRMKACLARLGIRNFNVTARNAAARVDGVRTGEGAPLPPLTRAELGRDLARLSLVRAQRKEVDKARREQLRHGPAAYQRQVRTLRQVYGLGWATADLLSTETFSRPLRDHRAVARSVGLTGAPDESGSRRREKGLARAGNARVRHGMIQFAWRFLRHQPESALAQWFRQRTQDGRRDIRKTMIVALARKLLIALWRLATAGQLPQGVRLHPAM

SEQ ID NO: 42214 - protein, 428 aa, unidentified
MNCNTQNAKIASITEKTLIVGIDVGSETHFARAFDWRNYEYTKKPLEFSNTEAGFMMFKAWVEDIAEKQGKTAVIPGMEPTGHYWFALGKFLQDSGMKPVHVNPHHVKKSKELDDNNPNKNDRKDPKTIAALVNEGRFSYPYIPTGIYAEIRSLSNLRFQTQEELTRIKNRIARWFAIYFPEYKDVYGDLMAVSGRMILKEAPLPEDIRILGVNGVNQIWRNAKLRGAGMKRAKILVSAAEHSVGSKEAPEAARIELKNLLNDMDVYVSRMEELLQTIEEKLKTIPYVDKLMEIKGIGLITVSGFIAEVGDIGRFDNPKQLQKLAGYAIVANDSGKHNGESRISYRGRKRLRYVLYEAAISLVGKNAEFEEIHEYYRTRKENPLKKMQSVVAVACKIIRVFYTILTKGVDYDPMKLMSDIRRPQLQAA

SEQ ID NO: 42215 - protein, 359 aa, unidentified
MAGAEPVLVTGGVDTHKDTHTAAAVDGAGRVLGTAQFPATHAGYRALLAWLRRHADDHGQLALVGVEGTGAYGAGLTRHLQDEGVRVVEVDRPDRKTRRFQGKSDPIDAVAAALAALSGRQDGTPKDRTGATESIRLLRVPRRGAVRARAKVMVQIKAVIVTAPEQLRATLTPMADRDLIATLAASRPDRSGVTDPAVAVRVALRQLARQYQYLTEEINDLDALLAPLVAQTAPALLALNGVGTDVAGQLLVTAGANPDRITSEAAFAALCGVAPVPASSGRTSRHRLSRGGDRNANAALYMIVLCRLRWDPGTRTYADRRTREGKTKKEIVRCLKRHVAREVYRALPRHALHDRPVAA

SEQ ID NO: 42216 - protein, 316 aa, unidentified
MSKKKTFIGIDVSKEFLEVAVHQRETRFAVANKETEFPKLLTELISLRPKRIVLEATGGLEIPVVSILFAAGLPVVVVNPRQIRDFARSTGQLAKTDRLDATVLAHFAAAIQPELRHVKNEAELELDALVTRRRQLVEMLAAEKTRLSSTATAPMRAEVRVHIEWLEQRLEDIDEQLRKRITESAVWRVKDDLLQSVPGIGPVTALALVADVPELGQLNRHQVAKLVGVAPLNRDSGKLRGTRHIFGGRQAVRNTLYMAIQSAVRHNPVIKEFYERLLASHKPKKVALVACMRKLLTIVNTMIKTNTKWQLAEKSA

SEQ ID NO: 42217 - protein, 354 aa, unidentified
MKYFAGLDVSLKETAICVVDETGQIMKEARAASEPEALDALLSTLGLPLERLGLEACSLTAWLHGELKAAGWPAICIESRQAKAVMGGMPNKTDRNDARAIAQIMRTGWFRAVHVKTSTCRSWRSLLVARRTVLNEMRSIENVVRAILRETGVKLGTPARKDFIVRARDLAGGDEGLARMIEPLLEILATMQREFARLTKQVLDIVRDEPVCQCLMSAPGVGPLTALAFRATIDEPERFGKSRNVGAHLGLTPRRYQSGETDIQGRVSRCGDELARTALYEAAHSLLVRSKKWSSLRAWGMMIAKRRGMARARVAVARKLATILHRMWIDGVEFRFGKENGSNACSPKLIAVTA

SEQ ID NO: 42218 - protein, 360 aa, unidentified
MFTERTSVGLDVHARSVAAAAIDGVTGEVFRARLVPAPREVIGWIEALPGPAAAAYESGPTGFGLARALNAAGIRCQIAAASKLQRPAGDRVKTDARDALHLARLLRLDEIVPVRVPTQVEESARDLVRCREAARADLMRARHRLSKLLLRHGIVYSGGKAWTQVHDYWLLKQSFPLAGTQAAFEDAYQTVVLATARRDRLDAAITAMATDSQFTPVVARLSCLRGISTLTGFSLAVEIGDWDRFTGASIGAYLGLVPSEHSSGARRSQGPITKTGNTHARRLLVEAAWHHRKPYRPTAILRRRWAVAPPAAVARAQLGNHRLHERWSAYAERSKRPVVANVAVARELAGWCWSLAMLPQ

SEQ ID NO: 42219 - protein, 349 aa, unidentified
MKILALDLGKSKSAVCVLDTAEMKERYMTIATTPFALVNLLEREHPDRVVFEVGTLAGWVHDVVVGQGCAVQVANPNHEGWRWRNVKRKTDRLDALKLGRLSAAGQLPTVHMPAASVREHRALIQYRTQLVGRRTRIKNTIRSMIARQGRKMAVGGSAWTRKELAALQEWSRPWDQIERSEDLWRGQLHEELTALEQIEQQLLRLERKLDALGRGDQRIVRLQTIPCVGARTAEMLVAVLDDPHRFKSLKEVGSYVGLTPRQFQSGQMDRSGGISKQGHRQLRRMLVEVSWLALRYNPYLRSIYLRVCRGIASRRKIAIVAVARKLLVIAWAMLRDGTAWRPRAACTAA

SEQ ID NO: 42220 - protein, 391 aa, unidentified
MDARTVNSLPPAATHDGALRCAMAIELSKTSWIVAVNTPMSEKISRYTLKGCDRNGLLDLIKKIRARAGREFERPVEVVSCYEAGYDGFWLHRFLEAHGVRNYVIDPASVQVDRRARRAKTDSIDVAQLLRSLMAYLRGDPRVWSVVRVPTVAEEDDRRLHRERDRLLNERVQHVNRIKGLCAVHGIYDYEPLRSNRMLRLEQLPTGDGRELPARVKAEILRELQRLELVLQMTKTIEKERNAIASGKASAHANARRIRDLVKIKSIGPEIAAVLVGEVFYRQFDNRQQLGSYVGLTPSDFQSGSMSRDQGISKAGNPKARTTMIELAWMWLRFQPNSALSLWFRERVGSAKGRIRRIAIVAVARKLLISLWRYLETGQVPTGAVLYTSKR

SEQ ID NO: 42221 - protein, 307 aa, unidentified
MRAAGIDVGKANLDLAMDGESGVARFANNRAGIAKLVKRLVAMGAERIVVEATGGYEEPLLEACCDAGLWIARVNPRQTRDFARATGELAKTDAIDARLLALMARMFGDRLRRHVAPPVWQRELRDWLRRRGQVVVLIQAQKQQAALAPSAVRKLVARTTAALARELAAIEREIKALIEKHASPALRSSKGLGPVFQATMLALLPELGHLNRKEIAKLTGVAPMNRESGQGQGKRRIRGGRAPVRVALYMATLSAVRWDPLMKAHYQQLRARGKLGKVALVACMRKLLGIVNARRRDELRSEGLALA

SEQ ID NO: 42222 - protein, 420 aa, unidentified
MKAHNVDNFAVLIGIDWADKKHDVCEHPNPSDKYHYSIIKSKPEALHEWAMSLKQRYPNQQIAVACELKKGPLIYALAKYDHLTLFTINPSSVANYRKAFAPSGAKDDPSDAFVQVEILNLHMDKLTVIEPESAAIRSLAQLVVYRRSLVQDSVNLSNKITATLKNYYPQVLEWFKEKDTIIFCDFISKWPCLASVKRAKKQTLLDFFDRHNSHYAHVNNARILSIKDAMSLTDDPGVIEPNQQLVEVLIAQFKVLLKGIETLDKAIKKAYKAQDDKVIFDSLPGAGPQLAPRLLVAFGNNRDRYNDASELQKYAGIAPVIERSGKKMWTHWRYSCPTFLRQTFVEWAGFSIRYSFWAKAYYEQQKSKGKPHNSIIRALAFKWIRIVFRCWKTKTPYDESKYLDALKRRGSPLLKFAVNS

SEQ ID NO: 42223 - protein, 343 aa, unidentified
MKLTRVGVDLAKNVFQVHGVDRAERSVWSKRLKRNRWIEEIEQNVESGAEIGMEACGGAHHWARLLQSKGYRVRLIAPQFVKPYVKSNKTDANDAQAVCEAMSRPSMRYVAVKSIEQQDIQAVHRVRASLISERGAKANQLRGLAYEYGLVAPREIAALRQAVPAWLEDACNGLTVRLRTLLSGLYADLRALDERVRELDKEIRAIGRENEAVGRVQQLRGIGPLIASALVAMIGDARQFKNGRHVAVALGLTPRQHSSGSKERILGISKRGDSYVRTLLIHGARSALRTAPGKDDRLSRWALALAKRSHVNVAVTALANKMARVAWAMLKHGTAYEPNGLAA

SEQ ID NO: 42224 - protein, 337 aa, unidentified
MTTLTFGLDIAKNVFQVHGVDGHGKLRLQRKLRRGEVLRFFARVEPCLIGIEACHSSHYWGRELSKLGHQVRLIPTQYVKPYLLGGKNDANDAAAICAALGRADIHSVAVKSAEQQSVQSLHRMRERLNHERTAKSNQIRSMFAEEGFVFPISIGKLRSSVASLVGNPNATITPILRRLGAMYLEQIATLERWLAELNTQLQEIFTQREDCQLLASIPGIGPVVSTALVGTVADPRQFKNGRQFAAWIGLTPRQRSSGGKVRLGGITKHGDTYLRTMLVQGARAVMRFVGRRTDRQALWLQRLMQRRHKNVAVIALANKIARIAWAVLAKRVAYSPA

SEQ ID NO: 42225 - protein, 404 aa, unidentified
MEATPTFAGIDWSWQHHALCIVDDDGERVEEATVPHTRPGLAKITTLLRRRGVRRVGIERGDGPVVEHLMRDGFEVVVISSRQVKSLRVRYGSAGNKDDRFDAFVLADALRTDAGRWAVVQPDSEETIALRMLVRARHDLIDHRIAVHNQLLAVLQHNFPGAIGLFSQLDIPISLSFLRRFPTEAKAAWLSELRMAHWLKANGYCGRQTASDLVNHLREAATGRVRGPAAEASELLVTMLVDLLTELRHQQELLEVRIKEALLAHRDGPIFQSLPRAGVVRAATLLAEIGDCRARFPEPASLAAAAGVAPSTRQSGKHLNVAYRRGCNKNLRAALVDWAQDTPRANAWARDTYDRARARGCRHPHAARILAQGWTRILWRCWHDEVPYNPDLHGRLNKLLQEAA

SEQ ID NO: 42226 - protein, 421 aa, unidentified
MIHAVLERCAGIDVGKKTLAVCLMKGGADAEPELDIRGYGTTVSQLEALRQWLREEGCTHVVMESTGCYWEPVFNILEDSFTIVLANPMEVKCRRGHKTDWLDCRWLAHLLRHAMLHSSFIPPRPLRELRDLTRRRKQLVRNAVQEKNRVLKTLEKGNIKLGNVLSDVFGVSGQAMVHGLLLGHNDAQQLAKLARGRARNKRLELIAALDGHRLSESQRSLIRRSLRHLEFLAQEIESLDLEIRAAVEAAGLQRQMEWLQTIPGIQEYTAASILAEMGPDMQQFPSAGHVSSWAGLCPGSNVSAGIVTGRRTTKGNRWLRDTMTEAAWAGCKTKGSGLQAMYRRLVPRRGKNRAVIAVAHKLLVIVYYVLLRGVPYQKSREEEAEQRSKSRRIRYHLRTLAKLGITLDPSVAVAVTVTPTG

SEQ ID NO: 42227 - protein, 353 aa, unidentified
MKQKKFIGLDVHKETIAIVVLDEQGKVLVQSVVATDGETICDFLKGLSGEIQLTFEVGTQSNWLYRQTKPLVEKVVVCNPRHNNLLMIGNKADLIDAEKLAQLLRLGALHEVWQHSAEQSYLKELVRTHENLISDCIKVMNRVKAIYRSQAIKCAGTSVYQISKRDEWLAKLSEPGMRFRAELLFRELDTLTELRKQARQAMLRQARKHKDFKRLCKIPGLGFVNVSRLIAQVGTPNRFQTKRQFWKYCGLAVTTRSSADHLIVDGKLQKRIKQTQTRGLSRHYSHRLKNVFKMAAQKSARCEPYHQYYENLLNSGTRPALAQVSLARKIAAVALSIWKKQSEFDAKQLAAAG

SEQ ID NO: 42228 - protein, 340 aa, unidentified
MGKITTIGLDLAKNVFQVHGIDEADGVAMGKRLRRGQVLTFFAGLPACLVGMEACATGHYWARELRALGHEVRLMPPQYVKAFVKRNKNDAADAAAICEAVKRPSMRFVPVKTAEQQSALLMHRGRELLVRQRTMLANALRGHLAEFGIVAAQGLHKVAELVAMVRDDQDERVPDMARQVLRVIAGQLDELQTGIAAIEGQIMAWHKSNPTSRRLASIPGIGPIIATAIAATVPDPSVFKGGREFAAWLGLVPRQNSSGGKARLGGISKRGDSYLRRLLVNGAHAVLLRSKAAKADPWLIALRGRRPRLVVAVALANKTARIAWAIMSKQDTYRHAAAAA

SEQ ID NO: 42229 - protein, 367 aa, unidentified
MKKVSTAAVKATKNFSQAKLTIGLDLGDRSSWYCLLDEVGEVLQEQKLGTTPKTMRAVFGGMPRCRIALETGMHSPWVSRILAELGHEVIVAHARNVRLIGESRKKDDRLDAQTLARLARIDPQLLCPVKHRSAKAQADLTVIRARAGLVRARTALVNTARGLAKSYGERLRGCNVRNMNPEKAEGLSPELQAALEPLLAGIESLSERIRECNERVEELAQKSYPQVALLKQIKGVGTLIALTFLLTLEDPHRFRKSRDVGCYLGLQPGRRNSGQSQPQMHISKEGDPYLRTLLVQGAQHILGPFGVDCDLRRWGLKLAERGGKSGKKRAIIATARKLAVLLHRLLVSGEVYEPLHNSKRVALPAAA

SEQ ID NO: 42230 - protein, 393 aa, unidentified
MLYYLGIDVGKFSHSLCLLTEAGKKTIFQINNNREGFEKLRIKLSELNCDKNILVGMEATGHYFLNLYDWLLQCGFDSEQIALLNPLQVKSFRNTNLRGAKSDNVDSERIAVLLKFGEFKRCNVATDEMMNLRELTRLRADLVANIGDLKRKIISVMDRVFPEFMTVFSNRFGKTVMSLLDNYTPEEMAELSLEKLTDVIKNLSGRGRGISQKKIQALHEASRNSIGITFGRQAFKIELDILLTRLKVFKEQVEKLENEIQLIAEKFDSKIFTIPGIGATTGAAILSEIGNIQNFSLAVKLIAFAGLDPKLKESGKYQGRTPISKRGSKYLRNAIWYSAMVACRVDDKFKKFYQDRRNKGKSHRYSVTAAANKLTKVIYHVLKNKCEYDSKLV

SEQ ID NO: 42231 - protein, 369 aa, unidentified
MATTSDDLNAHVVLGVDTHGRTHHAAVIDRLGRHLGDAEFPVSSTGYRRLLAWAQQHGTVASAGVEGTGSYGTGLARYLRSAGVTVSEVNRPDRSTRRMAGKSDPLDAYAAARAVLNGSAASAPKSRAGATEAIRVLRVTRRGAVKARTQAINQLRALIVTAPEELRERLAGLSAAALTRACARLSSGTMGGELAGLPDPAPAAVRTALRRLARRYRQLSGEIAELDAEITPLIQAAAPKLLALQGAGPQAAGQLLATAGDNPDRLRSEASFAHLCGVAPIPASSGRTRRHRLSHSGDRAATNALYTIVLTRLRHDPRTRAYLARRTAEGLSKKEIIRCLIGGLSVSRPGHARRGSPAALGDGLVAEPL

SEQ ID NO: 42232 - protein, 338 aa, unidentified
MEYGAIDLHKQRSVIRIVDGDGTVVLDRTVPTSRAGFASVFRGRARLRVLIETGTESEWAAQTIEADGHAVVVVDPNYALMYGVRQRVVKTDRRDVAALAEANRLGIFRAAHRVSAAQRERRRQLRVREQLVRVRTQAINLLRAQLRQEGYRLGSGSAETVVARYGRLQLPPTLQTSLQPVIALLTHLRPALAALDTTTAAQALADPITRQLMTAPGVGPVTALTYRAVLDDVGRFADAGRVTAFLGLVPQEDSSGARRRKGGITKAGPARVRALLVQAAWTIWRQRHAGDPLQRWVHAVADRRGRGIAIVGLARRLARVLFAMWRDGLPYRVMPLTA

SEQ ID NO: 42233 - protein, 405 aa, unidentified
MKHYCGIDWASDHHDVSIVNESGREVNKFGIDDDLNGYQTLSNTLKSFHVEIPIAIEAKDNLLINFLIAEGYEVYSINPKSAERYKDRYNVAGNKTDEIDSFALADMLRTDMHKYRPLEYSSEKIRKLKILCGEYSKLMKDKNMLESQLYDVLSKYYPITLTLFSSYNCKTLYKLILKYSAYEELRMVSYEDLEKFLKENRYRKAHHIKNVYNKIQGNDYYALAIFDETFSHTARALVKMLLILEDEIKEIKDKMTEITTTHPLGTIFYSLPGSGEILAPKLLSIMGDNKKVYLSSSEIQAYSGVAPVTKRSGKSSRVKFRYACNKEYRNTLTTFAFCSLNWSPWARGYYDKARQNGKRHYESLRLLAYKWTRIIFKLWQTGEMYNEEYHTKNLERFSKIILKIA

SEQ ID NO: 42234 - protein, 335 aa, unidentified
MNEFKTFIGIDVSKKTFDAALLRSTDQLTTIHQSFNQNIQGYKAFVDWLKNNDVAIGQDVLICLEHTGLYISGIVNFLVSLNACIWVEMALKIKKRIGLQRGSDDKAAAIHIALYAYRYQDEARLWKPLDIAMQELKNLIAQRDRIILSISQLTVPLNELEQAGDKQQASELRKLQGKALKGLRDSLSAIEKHIDGCIEKDENIRQKISLASSVKGVGKQTAVALFVYTRGFTVFENGKQLACYCGVVPFNKISGTSVRYKPGVSPFANKKLKKLLHLCALAALRFDTEIKAYYERKIAEGKNKMSIINAIRNKLVLRIFAVIRDNRNYVDNYAY

SEQ ID NO: 42235 - protein, 419 aa, unidentified
MRAHRNCCGLDVHKKMIAACLLREDAEGNSVTEKRLFGSMTRELHALAQWLCAAQVTAVAMEATGVYWMPVWNVLEQYGLQLLLINPEHYKAVRGKKTDLKDGTRIAELLQDGRLEGSYVPPVAIRVLRDLTRYRIKLVQYQSSIANRIQKLLEQCNIKLASVASDALGVSAMAMLRALAQGETDPVRMAGMAKKQLRKKIPQLQLALEGCVLPHHRLLLREMIEDFDHVGTKITRIEETIEQQMQPFQNAVNRWLTVPGIKHRLAWTLVAEVGPTVEAFPSAADLVSWAAVCPGNNQTAGKRKSGTTRAGNPWLRRALCEAAWAASKSKGTYLQAQFRRLAALRGPKRALIAVASSILTAGYYMLQRATTYQELGPDYFDKRNSFRATNRLVKRLEALGHRVILEPRFTAHPLQATNT

SEQ ID NO: 42236 - protein, 351 aa, unidentified
MANQAHSAVVYGIDLGKTWFHVAGCDATGRSLHKVKLSRSRVFPFFANTSVALIGMEACPGSQWLARRLQALGHTVKIMPAQFVKPYVKSNKNDAVDAEAIAEAVTRPSMRFVQVKQTEQVDLQALHRARDLIVSTRTRLICQMRAFCLEYGIAMRNGAGAFKLDVLKVLNDDTNELTPAVRHLLRELWNQLQELEARIQKFTRQIESIASRSQFARRLLTIPGIGPLGATALLAAVGDGKQFKSGRDMAAWLGLTPAQYSTGGKSTLLGVSKRGNAYVRRLLIHGARSCVIHLDRTRDRLGSWITDLQRRMHINKVVVALANKLARIAWVVLTRPGALYQRVDPAFSGST

SEQ ID NO: 42237 - protein, 365 aa, unidentified
MNATAALPVVGIDISKSVFQLAVADGAWRVTEQHRLTRTQMERWFANRAVGLVVMEACGAAHHWARWLNALGIEVKLLPALYVRAYVKRNKTDSADACALLEAARCADIVPVKVKSIEQQALQGLHRTRSLWMGTRTSRINALRGFCREFGIDIAQGARLGVERIERVLADPHSAVPELIRGTMKLLVEEIRLLEARTAQLERELTLLARHSPACTTLLTIPGVGLLTATAMVAATSGSVQHFRDARHFASWFGLTPREHSSGTTRTLGRISKRGDRYLRMLLTHGARSVLHAAHRATLAGKTIDGLRRWALEVQARTNHNKAACALANKLARICYATLRDAQPYGEPVRRPNKKIERTSFALAA

SEQ ID NO: 42238 - protein, 487 aa, unidentified
MFLNTHRSTTNSCRGPFDGFLETFGRNGALWSNNEYSVVVHSLDLTIRPSQDQSQRVLNPKESTMNSEQPELAVFIGLDWADEEHAVCMRVAATNEIRTFTVKQQPEKLHDWITSLLKEFGGSKIGIAVESSRGGLVYALMQYNVLILYPINPKTLAKYRESTCVSGAKDDPSDAALLMDFIYRHRDRCRPWCPDTVETRTLQLLCEYRRKLVNDKTALTNRLEALLKGYFPQALEWTGALDTVQACDFLSKWPSLESVQKSKPAQLRTFYLDHGCRRAKLIEKRVKEMREAQFLTEDSAVIHTSILMVRATVDELRPLCAAIKRFDQELETAFQQHPDHELFESFPGAGPVMEPRLLAAMGSDRSRFETAEEIQKFSGIAPVTKKSGKMHYVHRRYACPKFLRQTFHEWARITIGFSDWARCYYEYQRGIGKRRHAAIRALAFKWIRIVFHCWKARVPYSEKIYLASLDRDKPGWAVQACLVKKVA

SEQ ID NO: 42239 - protein, 444 aa, unidentified
MKNKQVIALLNSSAYLSVGFDVAADFSWMSIALPNQTFVGKPFKVVHSDPQSRNLAIQKIKEAQEMYSLESRCFLESTGIYHIPLLCFLRDNGFDCHTINPIITKSSTNMNVRKLHNDRFDSKKIALVGLKADLKVSLLPEDDVVDLRNLVRDYYYFKDLQSAIVLKLTAELKMSFPEYCKVFSKVTTKCSLKLLETYPLASDILAAPRDEIIDLIHSTARFGEKYAVGKYNCLISAANDALVFGRSLSSNATRITTYVKMFKEYQTHLDEIMNSLHDCVDAMESSNRTIYDRIELLQSLRGIGFLSSVVLLAEMGSFDLFDSPKKLYAYFGMDPGVNDSGKFKGDRVHMSKRGSSLARRILHMIALNNLKVNKGSKNPVNPVIHEYYTLKCKSKKKNVAIGAVMHKICNIIFAMLRDNKPYEMITPEEHRKQFNRLNRTTKVA

SEQ ID NO: 42240 - protein, 349 aa, unidentified
MTEQRRSYAGECVYVGVEVHKETYTVTGVCHKQIVKTVTVQAEPAGLAASLPRWFPEATLYSVYEAGFSAFVLHRVLTKASIRNIVVNPASIAVAANDKVKTDRRDSKKLAIDLADGRLRGIYVPTEAEELARLLPRTRAQIVEHRATLARQIKAKLHQFGLIAPSSRRMISNRYLREIATWSLPPELSVSLTLLAEQWRFATRQLIEMRRLLREQAQAQQEIEKVYRSVPGIGAVAARPLATELGAMTRFANERALFSYTGLTPSEYSSGASVRRGPISRQGSSRVRHVLVEIAWRAMPRDAVLKEIFDRIAATRGKKRAIVAIARRLTGRLRACFRQGTTYAVGTYA

SEQ ID NO: 42241 - protein, 445 aa, unidentified
MKQKKTVKKKSMQLPKHLQNINQYAAGIDIGSRSHFVAVPEGTDEQPVREFCTFTGDLERLAEWLISCGVTTVAMESTGVYWIPVFEILESHGLEVKLVNARHVKNVPGRKSDVLDCQWLQQLHTYGLLRGAFRPVEQVCTLRAYVRQRAMLVRCAASYIQRMQKALSQMNLQLHNVVTDITGVTGMRIIKSIINGERNPRVLAAMRDVRCKNDESTIARSLQGNYRPEHLFSLCQALELYEFHQAKITDCDRKILEQLQSFDSQNAPNGKQPADVEEALLRMSGVDLTRIDGIDTKTVLKVLAEIGADMSRWKSEKHFASWLGLSPGSKISGGKVLSSATKPVANRAATALCMAAYTLFRSKSALGAYLRRLRSRLGAPKAITATAHKMARLIYSMLKNGTEYVDVGQEHYEKRYRSRVVQNLKRKAQELGFELVATKEKNALA

SEQ ID NO: 42242 - protein, 383 aa, unidentified
MKAVCGLDVHKDSIYLCILHPDGELFEQVFGVLTFQLHEMCKLLKKHHVSEVSMESTSIYWIPIWRVLSPHFTLRLVNPYFIKQLPGHKSDVKDAQWIAECTMKELVNGSFVPPEIIQQLRQYDRRIFDLNEEIVRKESKVDAVLQRCNIRLSNYVSNIECKSYRTVVHRLSEGVTDPQELIKEIHGRIINKHGRETILASMEGVVSQAEIDVFRQLREEIDIAESHKKECQDKMSEICQKYFPEELRRLQTIPGIKERAATSLIAEIGTDMSKFETANHLAAWSGLRPRNDESNKKVKSRKTTHGNSYLRRTIIQCAWAASRQKDCFFSWFSYHQTVVRRKNKMKVIVAVARKMLVAVWHVLHDNVEYFDFKHDCEESANNG

SEQ ID NO: 42243 - protein, 363 aa, unidentified
MRAIGGVDGLDSADEVVLGVDTHLDVNVAVALDQLGRRLGELKVPTTMRGHERLLRWAEDFGSVGCAGIEGTSSYGAGLARYLRASGISVMEVERPKRRHLRRNGKSDPIDAEAVARAVLAGEAVGEPKSGDGRVEMIRVLRSARRSAVKARSQAANQLQALRVTAPEDLRHRLRQLPTKELVATCARFRLGSDPDDVRTATRFALRSLARRHEILSEEIAELDAQLDALVAEVAPGLISRPAIGTHHAATLLVLAGDNPERLNNDASFASLCGVSPIEASSGKVVRHRLNRGGNRDANRALHMICVVRMGSDRRTQHYVARRTAEGKSKWEIMRCLKRYIAREVYRVLVPPTTASRSTGSGL

SEQ ID NO: 42244 - protein, 360 aa, unidentified
MTVIGVDAHKATHTMVGVDAVGVKLAELTVKATTEGHMKALAWARREFGTDLVWGIEDCRNLSLRLEHDLLDAGQSVVRVPPRLMARTRASARAWGKSDPIDALSVARAVLREPDLPVASHDPISREFKLLVDRHDDLVSHRTALSNRLLWRVHELDPSQAPQPRGLTKNRHQEALRSWLETQPGLVAEVARDELDEIIAVTEIIRSLERRIAARVRVDAPALLTLYGCAALTAAKLVGETAGVSRFRSEAAYARHAGVAPVPHSSGPNTVRIKGGRAGNRKINVALYRIAMTQIRHGAPGEAYYRARRESGDTHGEAIRRVERRVVRKVFRLLQIDQAHLAETVRGVGSLPQLDHAPIA

SEQ ID NO: 42245 - protein, 395 aa, unidentified
MEQDSKGQAEWDARRGDRKYVGLDVHKATIAVAVADEGRGEVRKYGTIRNSPEAVVKLVRKLGPAERLECCYEAGPCGYGLHRQLEGLGARCAVVAPSLIPTRPGERVKTDQRDAAKLARLLRAGELTTVWVPDAEHEARRDLSRAREAARDARHRARQQVRKLLLRLGIAEPSGTTAWSQGYWTWLRTVRLAQPLQQIVLEDAIEAVERGTERLEKLEGHLQAAATHGRHAGLIAALQSLRGVGVITAVTLVAELGDLERFPTPRPLMAYVGLVPSEHSSGASQRRGRITKAGNAHVRHVLVQAAWHYRHPPKLTRALQQRQDGQPQAVTDVATRAQERLHRRYRALAGRKGRQKAVIAVARELVGFVWALARAHADHQAAAAVPTPDPAGVAA

SEQ ID NO: 42246 - protein, 340 aa, unidentified
MEKKWFIGIDVSKDTLDVAMHGLDSQGKFNDKKFENNPRGYGFLQSWIKKKNISLDECVFCFEHTGVYSLVLAAYLNEMNLFVCVEPALQIKRSIGMVRGKNDKIDARRIAIYALDNKEKLQYYKVPGKSILKIKQLLTYRDQLVKSSSSFQISLKSHERFQLTTEPDFVTTDIQNQLNDLEARIEKVNQQIEEIIKQDEALKNNYELIRTIKGIGLVISAFMLVTTVNFSRFEDGRKYACYAGIAPFEHSSGISIRGKTSVSHLANKRIKTLLYNAANSAAQWDPELKNYYQRKRKEGKDHQLVMNAVCCKLVYRMFAVVKRQTPFVSSYKEKIEKCLA

SEQ ID NO: 42247 - protein, 339 aa, unidentified
MEVTTIGLDLAKNIFQVHGITKDEEVAFNKPLRRAQLLPFFSKLEPCLIGMEACSSAHHWGRELTALGHDVRLIPPIYVKPYVKRGKSDAIDAEAICEAVTRPTMRFVAIKAVEQQALLSLHRARSLLVRQRTQLINGLRGMVAEFGVYIARGLARVIGFAEDILMGEVLDLPEIANEVIHNLCEHLMALHTRIRWYENRLKLVAKEDARVRLLRTIPGVGAVTASAIIASIGDGHQFSNGREFAAWLGLTPANKSSGGKEKLGRITKMGDQYLRSLLVVGMTSLVRQTKSHPERASKWLISLLERKPARLATVAMANKTAQIGWAVLTRNEPYTPHTA

SEQ ID NO: 42248 - protein, 366 aa, unidentified
MLYLGIDQHARQITISLRDEGGDVVQARQVSTQPDKVHAFFQQLTRERLTAGASFVAVLEVCGLNDWLIGMLHEYRCHKVILIQPEERKLRKTDRRDAAALSELLWVNRDRLLQGKPVRGLRQVDIARTADQENRRLTMLRKDAGQARTRLVNRVRHILRRHNLQWEMPTKKFPTKSGIAWLKQLALPEIDRLEMNHLLADLEQVQGRRQELEQVIARRCGVSAEAVLLSSMPGVSYFTAVALACRVGRVERFPRAHSLANYWGLTPGCRNSGENNQRLGSITKAGSSMARWLLAEVTIHVLRRDARLREWFKRLKRRRGASIARVAVMRKLATIIWHMLSKRKTYAECRALAEAGAKEREKQGCT

SEQ ID NO: 42249 - protein, 355 aa, unidentified
MNQEKYIGMDVHQATISVAVMDGRGKLIMECILETKAATILEFIQGLHGSLSVTFEEGTSAAWLHDLLKPHVADLVVCDPRKNALLKEGSKSDRIDARKLADLLRLNQLNPVYHGEHGVRTLKELGRSYLTITQDLTRVMSRIKALYRSWGIPCSGTTVYAPLHRAEWLAKIVEPGVRRRAERLYQQLDLLQPVRQQARHDLLVESHRHEAVKLLRQIPAIGPIRAALLVALLQTPHRFRTKRQLWAYCGFALETRDSGEYRLVRGKVRRNRERLTVLGLNDNHNHDLKNLFKGAAISASTCPGPLYDFYAGLLQKGMRPTMARLTLARKIATITLTIWKKGVDFDAQQLNRQAA

SEQ ID NO: 42250 - protein, 438 aa, unidentified
MSNKVIFNLDELFISVGIDVGADFSWMSIALPNQQFVGKPYKILHNSIDSLTTAVSKIKEAEELYSLESRIFLESTGIYHYPLFCYLRDKGFNCSVINPIITKNSTNINIRKVHNDRFDSKKAALVGLKPDLKVSLMPSDLALNCRNLCREYYDLIDNRSAYVNKLQGELRMAFPQYLGIFSKVTINTSLTLLETYTSPSAFLEADKQEIIDIIKSTARFGLTYAQNKYNAIIQAATDANQFGYIIESNIKRIRLYISFIRKYDEEINDILESLHKLVDSNEDTKFVKQVHLIETFKGAGFLSAATIMGEIGDFSAFSKPKQLFAYFGLDPAVKQSGKFEGTKVQMSKRGSSIARRVIHTLSLQSISISRNGKAKNPVLREYYLQKCDSKPKLVAMGAVSHKVCNMIFAILRDNKPFEIITPQEHIKQYNAAKCDIAA

SEQ ID NO: 42251 - protein, 347 aa, unidentified
MHYIGMDCHISTLDFAVVNEAGRLVKAHSVATSVNGFMEFVKTVPPPRTIYMEEGSLAAWILETCVQYGEKLMITDAKKNHWIGSSGQKDDAVDALKLAQLARGGYIKEIHHPVGERRRFRELLIAYHDTVRGTTRIKNKIKAKFRQNGIQCTGTTVYSEISRDEWKGKLPQEATLLLILEGLLWRQLEQSEQTEKELLAAARVQTKHYPEIKYFESLPGIGFISAATISAILETPYRFANKRKVWMYAGLGIITRSSGGKLYSEKLTTDYNRLLKYTLKQAAEAAIQAKDNPFRQKYLDMTLLHGIAPHRAKLTIARDMLATMWAMWRKGEQYSPEIRAKAVCKQG

SEQ ID NO: 42252 - protein, 344 aa, unidentified
MDTHKDTHTAAAVDTAGRVLGSAQFPTDAAGYRALLRWLRGFGTLLLVGVEGTGVYGAGLARMLAAQGVAMVEVDRPDRKARRWQGKSDPVDAEAAARAALARVRTGVPKQRDGRVEALRALRVARRSAVGQRADVQRQIKALIVTAPESLRAQLRKLPDRELIEVCADLRPDRADADDPGTATKIALRSLARRHRRLSVEVADLDELLGPLVAQINPGLLALKGVGAEVAGQLLVTAGENADRLTNEAAFAMLCGVAPLPASSGKTTRHRLNRGGDRAANCALWRIVITRMGTDQRTKKYVARRTTEGLAKPEIIRCLKRYVAREVFLALQSASTEKRPANAA

SEQ ID NO: 42253 - protein, 350 aa, unidentified
MSNTVAIDLAKNVFELAVAEEGGAITERRRLTRTQFMRFFENKNFQRVVMEACGSAHHWGRWFAARGLEVTLLPPHYVRAYVRRNKTDRADVTAILEAAKATDIIPVRVKSVEQQALQSLHRVRSAWQSTRTARINTLRGLCREFGVNAPLGAQRAITELGRQVADPDSAVPDLLRRALGELVAEIRSIDAHLEAIETELAQIAQQSEVCERLRKIPGVGLIASTAIVGAVGDINSFPNARRFASWLGLTPREYSSGSIRRLGSITKRGDKYLRTLLVHGSRAVIFSANAAQRAGRPVDAFRQWASQLRIRCGHNKAVIAVANKLARIIWATWYRQRDFEFRAAGAVLAA

SEQ ID NO: 42254 - protein, 408 aa, unidentified
MDVIVERPAALDVHKAQVTACVRVPDGGGGREPHLAEFATTVRGLLALRDWLAAHRVSQVVMEATGVYWKPVWHILEDDFELMLVNARHVKQVPGRKTDMSDAAWLCQLAEAGLLKANFVPPKPIRDLRQLTRYRKTQIAERQREAQRLHKALEDTNIKLDCVASDLLGVSGRAMLDALGSGTTDPEILAELAKGRLRQKPPALREALEGRFDDLHALLIGAILAHLDFLDEQIDRLSDAIEERIAPFAGAVELLCTIPGVQRRTAEVIIAEIGPDMTVFPTARHLASWAGQCPGNDRSAGKQRSGRTRKGSRWLNAALKDAAMAAIRTKNTYLRALYDRHRSRIGHGKAIGAVKHSILVAVWHMLSTGQLYDDLGGDYFRRRDPTRTTKRLVAQLERLGHTVTLEAA

SEQ ID NO: 42255 - protein, 468 aa, unidentified
MAGRRKSRQASPEQLTGEPVELSDEPAEVIARAAAIDVAKDSGMVCTRVPHPDKPHRRIQRVWQVSARYAGIAALMDELAAMGIQRLVLESTSDYWRIWYYMAEAAGLEVWLVNAKDARHLPGRPKTDKLDCVWLCKLNERGMLRRSFVPPEAIRDLRALTRLRSRLAQDQARHQSRIEKILEDALLKISAVISDLMGTSGRRFLAALVAGERDPAKLAALGDRRLKASAAELEAALTGRFRDIHALETGMLCELIDDMNAKIARLDAEITARLARLPGIAPACAGCGEIGGGHAPACPRAGTPVLPVIERLDELTGIGIAAAQVIVAELGTDKTTFPTPGHAAAWAKLTSRTIQSGATSKNGRAGKGNPYLRAVLGRAAMAAAKTDTYLGERYRRIARRRGKQKAIVAVSRTICEIAWMIITDPAVRFSELGPDYYARLDAGRQTRNKIRELERLNPGMNVTLTPAA

SEQ ID NO: 42256 - protein, 370 aa, unidentified
MKSIIYVGMDVHKASFTLSCFSVTTQETFATVKISPDAKAIKKYLDGVSLSRSEECEFVCGYEAGCLGYTLYHQLTAMNIRCVIMAPTTIMRNGKRVKTDRIDAENLARCLAYGGYKSVYIPTAQDEAVRDYLRMRDDHKLMLKKIKQQINAFCLKHNKIYPGNKSKWTQAHVKWLNALEFDGYLQDAFNEYMITYRELTDKVERLESQIEQLAELEEYRDKVKKLICIKGIKTHTALSLIVETGDFSRFQSAERYASYIGLVPGEHSSSEDQNRLGITKAGNRHMRMLLIEAAQCYSRGVPAKKSKDLKSRQKGASPEVIAYADKASIRLRRKYIRMELVNKKKANVAKTAVARELACFIWGMMTDNIA

SEQ ID NO: 42257 - protein, 318 aa, unidentified
MKSPMFAGIDVAQRTLDIAVEGDSQVHQIDNSSGAIRRWLRSLPEGCAIGLEATGNLHQLLVRAAIAAGRTVYVLNARDLSHYARSLGRRAKTDRLDAQLILRYLQREHEQLHPYQLPSARQAELDELIGRRHRVVRSRGALQQSFATSSRKPRALARTLRALEALIAELDARIQELVAAEDTLRTAATHLRTVVGFGPLLSASMAHAVTRHPFKKADAFIAYIGYDPRVRDSGQWRGRRFLSKRGPAELRRLLFTAAMSASRTQLWQPFYQRYRARGLCTTAALVVLARKLARVAFSIVKHKVDFRPERLKVACAQP

SEQ ID NO: 42258 - protein, 406 aa, unidentified
MDILCKRCCGLDVHKKTITGCIMTPEGKAIATFGTMTKDLRALVAWIKEKGCTHVAMESTGVYWIPVYNLLETENLNVIIVNANHIKNVPGRKTDVSDAEWIADLLRHGLLKGSFIPPREQRELRELTRYRRSLVAEHTREVNRIQKVLEGCNLKLSSVVSRITGTTASLILKALIHGEIDPEVLARFAKGRLVRKKHELMEALDGFIGPHQQKLLAVQIDHLAYLEKQITALDEEIAKRLHPFEDDLIRLDTIPGVGRRNAEDILAEIGPNMDLFPSAQHLSSWAGMAPGNHQSAGKRKSGRTTKGNRYLRVTLCESAQAVGRMKPNFLSNQYHRIAARRGRNRAAIAVGHSILVICYHLLKQKTNYAELGASFHDQRKEESIVRHVLKRLESLGYSVLLEKVGA

SEQ ID NO: 42259 - protein, 295 aa, unidentified
MKIHTIGIDLGKTKFHVVGLSERGEVVVRKQFSRVQLLRFTANRKVHVIGMEACGGSHFLGRLLQRQGHEVRLMPAQYVKPYVKTNKSDYIDAEAIAEAVGRPTMRFVPIKSDDQLDLQSLHRVRERWVSRRTAVINQIRGLLLERGITVRKGRRYMEAALPGILEDADAKLSGTLRLLLAQLKCELDQTALRLEEAEALIEQTVQKNEACQRLVKIPGIGPVTATAVIAAIGNGAAFRKGRDFAAWMGVVPREYSTGGKQKLLGISKRGNRYLRKLFVQWRVLSYNKRPSRLPS

SEQ ID NO: 42260 - protein, 360 aa, unidentified
MSFNGTSVGLDVHALSVVAHAVDEETGRVERARLCPDHGEILEWLHRLRAPVRVAYEAGPTGFGLARTLAAAEIDCVVAAPSKLIRPGGDRVKTDARDAAHLTRLLRLGEITAVTVPEADVEAVRDLVRAREDARADLMRVRHRLSKLLLRHGRVYSGGQAWNGVHETWLRRQRFDDSHTTAAFDHHFDAVLSATAARDRLDEQIVMIAASPRWADPVDRLGCLRGISALTGLALSVEIGDWTRFSGSSIGAYVGLVPTEYSSGASRVQGSITKAGNAHVRRLLIEAAWHHRAAYRNPGPTMRARWAKVTPALKARGHAGNRRLHQQWCRFNERKKHHVVANVAIARELAGWCWSLATLD

SEQ ID NO: 42261 - protein, 348 aa, unidentified
MKNKSFVGIDISKNVIDVSIFREDTNIKMFPHEVFNNTRKGFGDMCSWLKKSRVVLSQALFGMEFTGCYSLDLEKFLTSKNYSFCMLSTRIVKHHPMGTIDKRDKNDSAKIADFLYRYDGTECAKPYKLPSKAMQQLKQLVNERKFLVEQRTNFMNRMQMFETKEDSAMYESYIKKLNHDIEQIDQEECELMSKEEDVFDTFQNLLTIPGIGFVNATNIIAITRNFTAFDTARQYARYVGVAPCSHTSGTSVKWRARPSAHCNGQVKADLSMAALRAVEYDVEMQMFYNRKLGGRKDSDTKRKALNAVKFKLIRRMFAIGKQKRKWEVLNTSDDRKNLHIEKSKASEL

SEQ ID NO: 42262 - protein, 428 aa, unidentified
MDDIERYDRFCKLRSEIRGSNKHLIVGIDVAKDKHHAFFGTAQGKTLWRRLIFTNDLVGYQRLVEQVETLMAQHELQEVVFGLEPTSNYHKPLAHWLTERDHLLVLVGGKAVKDNRELLDGRWDKNDNKDSANVADLISQGKCLFYENPDDDIIALRNLLSVRKQLTKETHRLRMRMRNGLLAKYFPEMDKHWGSCMEENLAILRWYLDPRKICQTDFMVFVRNVTTTDRGARQINRLRKIYDAAKDSVGLPVDEAGLYQAQMLVERYKAVKQEKEQVMSRIAAVCRNLPAYKLLLTIPGFGPYIAALVLATLANPLRFKSRKQVIRLAGLDLNASRSGKKSQESVPVISKKGDAELRYGLYQAGLIASCHNDYFRRIYNRMLEGRQGERGIKTKVRVKLAAKMLVIAWTMLKNNEPFNPNHLLTEPE

SEQ ID NO: 42263 - protein, 337 aa, unidentified
MQGKVSSKPNAAPVYVGVDVCKEWLDIHLHPLGRDLRLANGKAGLQALKRLLRGLQPASIVMEATGKFHRLAHRSLHESGFPVAIVDPYRARMFARACGHLAKTDRLDARFLAILAQMQQPTPTAPPDKLLETLGELVNARSAAAADLTAHKNRLKATDSDFLRKQLGKLVMALQRHIESLDKEIALRITDDPELCRRVEILTSVPGVGTVTAYSLIVGLSELGQCNAKQAAMLAGLAPIANDSGARQGQRSIRGGRKAPRNALYMAALSACRYNPDMKIFATRLKDRGKQAKVVLTAVMRKLVVLANTLLAENRCWTPKSALTFNTDAHPGARAIR

SEQ ID NO: 42264 - protein, 380 aa, unidentified
MGHDSEAFIGIDTSKLRNAVAIAEGGRGGEVRYLGEIDTSDAATRKLVAKLAGQYRRLTFCYEAGPTGYGLYRLIGSLGHDCMVVAPALIPKELGDRVKTNRRDAENLARLLRAGELTPVWVPDERHEAMRDLSRAREAAMDDLKRKRQQISSLLLRLGMHYPGKTTWGKAHRNWLRSQKIAHREQRIVFEESLGAESQAQERANRLEAAIRVAVPEWSLAEAVMALQALRGIDLIAAVTVLAEIGDVSRFASPRELMGYLGLVPSERSTGDSAKRGSITKAGNRRVRRILIEASWSYRHPPRIGREKQAKVDAAPKAVAEIAWKAQTRLSARYRALSKKGKRPTIAVTAVARELCGFIWAIDRAVTSARTRAGASQETR

SEQ ID NO: 42265 - protein, 327 aa, unidentified
MDRAAEQDRAAEQTVFVGIDVAKAKLDVHVGPDLDCFSVENTVGGVRQLIERLRRFPVKLVVIEATGRYERRVAADLLAENFEVAVVNPRQTHDFAKAMGTLAKTDAIDARSLCLFAQCIGPRPTPMPAQNQTLLEERVTRRRQVINMLTMERNRLQQQSVDRKVISSIKRVTRVLEQQREDLDRQIAELIDRDDDWRGKHALLKSVPGVGDATAATLIAELPELGKLNRQQIAALVGLAPFNRDSGTLRGKRAIRGGRASVRSPLYMAALAACRCNPLIQAFNQRLRAAGKPFKVAITACMRKLLTLLNSLIRDNRHWSPQCPRPA

SEQ ID NO: 42266 - protein, 322 aa, unidentified
MSVSNQRCADIDVSKSTLDIAISSITQQFTVPNEDGGINQILKELKRNETQLILMEATGGLESGVAGYLQSEGFDVVVINPRQARDFARAMGYLAKTDQIDARVLLQMAKVINQHPEREKYIRPLPDVHRQLLAAMVVRRRQLTIMLTAERNRLHPSHPQNHESIRFIISVLKSEMARVEAEMSAYISENFSELSALLSAVKGVGAATVALLLAEVPELGTLSRREISALIGVAPINRDSGTMRGRRTVFGGRASVRTALYMSALVGTRHNPVIKEFYTRLVAAGKPKKVALTACIRKLLTILNAMLKNNEAWDPLYHQHAS

SEQ ID NO: 42267 - protein, 345 aa, unidentified
MQIASIGIDLGKTTFHMVALGERNKILLRRKFSRTQLLAYTANLPASLIGLEACAGAHFVGTALREQGHQARLIPAQFVKPYRKSNKNDFVDAEAIAEAVTKHNMRFALLKTQEQLDWQAMHRVRDRLIHRRTALINEIRGFLLERGITFAAQPIHLRKNLPAVIEDAEQNLSPRLRWLLNRMWQEWKQLETDIETITEEIERISQEDARCRQLRQIPGVGPLVSTAIVAAIGNGAAFRRGRDFAAWVGVVPRQYSTGGKQKLYGISKRGNVYLRRMLIHGARAVLFRVKFDTGGFGQWMRRLAQRAPSNKVVVAIANKLARIAWAVLSSGQDYRHQPLQQGAAA

SEQ ID NO: 42268 - protein, 515 aa, unidentified
MVLDMDFVKSLVRMVMRELQTPPTSTSDATEVQQALQAALSQPELQRALLAEVIQAAQSDKKLRKALAEEAVQLDILQRLNPNAAGLDIGAAEIWVCVPQGRAPQPVRMFPTFTSDLNALADWLTACSITTVAMESTGVYWIPVYELLESRGFQVFWVNARHLKNVPGKKTDVLDCQWIQQLHTFGLLRASFRPAQDMCALRAYVRHRDNLMRYRSSHIQHMQKALAQMNVQLTLVLSDITGETGMQIIRAIVAGERDPHKLAQFRDVRCAKSEAEIAKALTGNYREEHVFELKQSLALYDFYTEQIKACDAELEAKYTAVKPIVDIVAQPLPETPKSKRRKPKNSPDYDLRTYLYQMTGVDLTAVDGLDSVLVQDILSEIGLDMSRWPTDKHFTSWLRLAPRNDISGGKVLRSRAGKTTNRATRALRLAAQSVSRTDTALGAFFRRMRAKHGAPKAIVATACKIARIIYHMLKDKREYVDHGADHYEQKYQEQALKKLKRQAAKLGMKLIPATA

SEQ ID NO: 42269 - protein, 320 aa, unidentified
MTAAPDRSLFVGIDVSKATLDVALGDQTSFQVPNSKDGLDQLLARLSSQEVALVVLEATGGLEALAAATLATAGLPVAVINPRQARDFAKATGRLAQTDAIDATVLVAFGRAVRPEPRALPDAATRELDALLDRRRQLVGMRTMEQNRLSGPVPLGVRRDLETHLEWLDQHIAAVDRELEGRIRSSPVWRAKDDLLRSIKGIGPVVSRTLLAAVPELGTLDRRRIAALVGLAPMADDSGQHRGARRIQGGRSAVRSVLYLAALAARRFNPVLRAFADRLAAAGKRPKVIVAAVARKLLVIANAVLRSGRPWDPNFAAADA

SEQ ID NO: 42270 - protein, 430 aa, unidentified
MNNPTHPFDLVIGLDRSDQKADLFLIDTRAGTSRAQIIGTAPEALHDWLLHLRQQHPEARVAICLEQPAASLILFLETYQWITLYAINPITLQKFREAFVTSRAKDDGKDARYLAELLLTHHDKLQAWQPDDSQTRLLQQLVSHRRAVIDERTGLTNRLQALLKQYFPQALELCGEDLWRPLATAFLLKWTTLQALQKAKPATIKQFYHLHGSRSQKLIAQRLELIAKAVPLTDEAAVLQSHALRVQLICRQLQDVQHTVREFEERLARVFAQHPDRAIFSSLPGAGPVLAPRLLASMGSERERYESAASLQSFSGIAPVTKQSGGKCHVHRRYRCPVFMKQSFHEYAKESILHSRWAAAHYKQQREKGSGHHAAVRSLAFKWQRIIWKCWQTRRPYNEATYEAALKKSASPLVALLEQIEVGKSPLRKS

SEQ ID NO: 42271 - protein, 370 aa, unidentified
MPVLRDGVDELDRLIAASGVSGPPVIGIEATGALHRAWATEVERRWPGSLRLFAPSETQAARGQLGSRRFKTDDRDCAALVWLLRQGAGRPSAPSAIEALLGAVRHRRQLVDARRVLQQRLHDQLNALCPGLSAPAGHGRVLELENPSGRAVLACAVAFAGRAPSVRSLLARSPGRLTEANAQFWAGRWKRLLAPPVDAELRAHRLGRDLERWLGLREDITALEGQLAELLAGTDGQILTTLDGVAVVRAAAFAAHSLPIERWASPEQLYSATGLAPASYQSASVTRRGRISRQGLAEHRDALMGIAWGLSQHSVAFAERDREYRARGFRPIQARVALARHACRLCFALLRTQHPFDERRYRRSRHSRGR

SEQ ID NO: 42272 - protein, 337 aa, unidentified
MSRFIGVDLHKTAFTVCFMEGEEKRFETYKIDEVERFRENLRVDDEVALETTTNTRHFVGRIKDRVQGIHVINPFQFKVISHSVKKTDANDAEKMAFFLSKGMLPEVRMKDEQYAELESLANTRGKLVQLKTALKNKIHNILNAQGIVTKKECLSSGKGLDRVLEYPVSAVAHIELEVIIEQIKGLNAGIAKIDKQLSDKGKDLDGHESITSIKGIGDKGGAVLLSVIGDITNFEDEKKLAAYFGIVPRVSNSNETNHQGRITKQGSKLGRTTLVQCTLIAIRYSNYLRAFYEKLKAKKGSGKAIIATAKKLLGIIYLTLKNKWVFEDFSNFVIKEA

SEQ ID NO: 42273 - protein, 320 aa, unidentified
MFTERTSVGLDVHARSIVAAALDGQTSELHQARLTPSFEHVRSWLATLPGPVAVAYEAGPTGFGLYRDLTAAGIRCEVVAPSKLQRPVGDRVKTDVRDSIHLARLLRLGETTSVCIPTVAQEAARDLVRAREDCRGDLMRARHRLSKLLLRHGLVYDGGTAWTGAHDRWLRTVAASALTGAATRVAFDADYEHVLTMKARRDRLDVAIVAMAGDSEFTPIVRRMSCLRGVSTLTAFALTVEIGDWDRFTGNSIGSFVGLVPSEYSSGMSSGAGGDHQDRQHPCPPIARRSSLAPSGALSRRCGDAGTLGTGSRSGSGAWR

SEQ ID NO: 42274 - protein, 460 aa, unidentified
MKRKHQQPQAIVRSEVLKQINENAAGIDIHLDEHWVSVREDKDEHPVRKFGTFTQDLHAIADWLESCGVTTVAMESTSVYWIPLYEVLESRSFEVCLVNAQATKNVTGRKSDLLDCQWLQQLHTYGLLRPSFRPPADIVTLRAYVRHRDNLIRYRSVHIQHMQKALALMNLKLTSVVSDITGDTGMQIIRAIVAGEREPKVLAQYRDYHCKKTEDEIARALEGNYQPEHIFMLRQSVEFYDYYNKQLAACDGEIEQQYAVFTPQVDLNIDPLPPSDSPSSRRKRANYPDYDLRTCLYQTCGVDLTSLKGIDVLLAQEIIAEVGIDMGRWSTDKHFVSWLGLAPNNKVSGGKVKSRKTKPTKGRANLAFRLAAQSVARSQSAFGAFYRRIKAKHGAPKAITATARKIAVAVYHMLKERQPYHDPGANYYEERYQERKLRNLQRQAQQLGLCLVPDSVPAVS

SEQ ID NO: 42275 - protein, 344 aa, unidentified
MSKFNLISIDLAKNVFQVGKFLHQKLQSNKAVSRKELLTILTTSPRCKVVMESCGGAHYWARKARSAGHEVVILDPRFVKAFRVGQKTDANDVIAIAAASFSPNVRPCKSLTQAQQSLQSIERMRALAEKQKRQLANQIRGLLLEFGIVIKQSECAFRQAIPEILEDSDNGLTAGLRQCLAQCYELFKAQSTLKETLNELLTGLVKQDEQCERLLALEGVGPITAVGLLISLSDTTHFTSGRNAAANVGVTPRQHSSGGKVRIGHIAKYRGEITLRSHLFLGARAVISQLKHREPKTKKEQWLKELVERRGVKCAAIALANKTVRTAYAMLKKGTSYEPSLLAN

SEQ ID NO: 42276 - protein, 358 aa, unidentified
MRLIQRTTSEAPQRLCITSDWMFTRRPISYCVKDAAGKVHQEGKIGSTRRDLDSWIKTLPQPRMMAMEATIFTGWIYDHLLPHAEKVKVAHPLMLRAIAAAKKKNDRIDAGKIADCLRCDFLPECHMASTEIRDRRRTLRYRGLLVKQMVQMKNRVSGLLMESGVSYNKQRLHKLGYFTDLLSTNEEISQSILPLLKLGREHIVRAQRLDSALIGSLEKDPLLSERLRRLRTIPGVGPITALTWALEIGDYTRFRSVKEAISYCGLCSAEKSSADKVMRMPISKQRNKHIQHVLVEAAKMAPRYSPELALVREREIQRGNKNRATFAVARKMVAYMLAVERRKQDFVPAEEMAGRAVA

SEQ ID NO: 42277 - protein, 278 aa, unidentified
MAYVATEDRAEVVLLGNIGTRQCDIDHLIRKMQSKSTHLIFVSEAGPCGYGLSRYLTTKGQVCWGVAPSLIPKKPGDRVKTNRRDASKLARLRRSGDLTPVYVPQVEDEAIRDLCRAREDVIRDLQTAQFRLQAFLLRHDIRSTGQATWSPAPLRWLSEVVCPTPAQQIVFHEYLRAMTDHTERLARLEHERIDPVQTWRLAPVVDALQALRGVQLTGAVTTGAALGDLTRCEHPRQLMHYLGLPPSASSTGERRRQGGSTKTGNGHARRALVDGAWA

SEQ ID NO: 42278 - protein, 438 aa, unidentified
MSNKVIFNLDELFISVGIDVGADFSWMSIALPNQQFVGKPYKILHNSIDSLTTAVSKIKEAEELYSLESRIFLESTGIYHYPLFCYLRDKGFNCSVINPIITKNSTNINIRKVHNDRFDSKKAALVGLKPDLKVSLMPSDLALNCRNLCREYYDLMDNRSAYVNKLQGELRMAFPQYLGIFSKVTINTSLTLLETYTSPSAFLKADKQEIIDIIKSTARFGLTYAQNKYNAIIQAATDANQFGYIIDSNIKRIRLYISFIRKYDEEINSILESLHELVDANEDSDFVKQIHLIETFKGAGFLSAVSIMGEIGDFSAFSKPKQLFAYFGLDPAVKQSGKLEGTKVQMSKRGSAIARRVIHTLTLQSISISRNREAKNPVLREYYLKKCDSKPKLVAMGAVSHKVCNMIFAILRDNKPFKIIAPQEHIKQYNSAKCVIAA

SEQ ID NO: 42279 - protein, 389 aa, unidentified
MKIYVGIDIAKLNHFAAAISSDGEIILEPFKFTNDADGFQLLVSKLESFDKNSIIIGLESTAHYGDNLVRYLVAEFYQVCVLNPIKTCQMRKNNIRKTKTDKVDTYVIAKTLMMQDDLRFVSFYDLDMMDLKALGRFRQKTIKQRTRLKIQLTTYVDQVFPEIQYFFKSGLHQNAVYTLLKEAPSPKEIASMHMTHLANLLKVNSHGHFTKEQAKELRVLAQKSVGANDSAISIQITQTIQQIELLDSQLEKIEAEMTDIMKFNDSVIMTIPGIGYINGGMILGEIGDIHRFSNPNKLLAFAGLDPSVYQSGNFQAKTTRMSKRGSRVLRYALVNAAWNVVRNNATFKAYYDAKRAEGRSHYNALGHCAGKLVRVIWKMLTDEVEFNLG

SEQ ID NO: 42280 - protein, 337 aa, unidentified
MKVTLIGIDLANSFFQVCGVNQAGKHVFNRQVRRAKLMEFLIQHPDASIAMEACSGSNYWGRELQQRGFRVMLIPPQHVKPFVKGNKNDRNDAFAITEAAKRPNMKCVEPRTLAQTDMIQIHRVLSRLIRQRTALINQIRGCLNEYGVVVARGKEKLLAAMPDLLEDADNGLTPSSRALYQELLEQWRQANEAIDRLEKNLKRQANSSEAARRLMTLNGVAVKISTAVIAHAGNGHGYKNGRHFSANLGLVPKEHSSGGVQRLGGITKRGNHYLRRLLVQGAWSVIRHAGKNDDRLSRWARQLIERRGKHKAVVAVANKMARIIWSMLYHQTEYRAN

SEQ ID NO: 42281 - protein, 456 aa, unidentified
MSKRKQPQKMKVQVNALEQINPHAAGADIGAEEIWVAVPPDRDEQSVRSYPTFTADLHSLADWLQRCGIETLAMEATGVYWIALYEILEERGLEVCLVNARHLKNVSGRKTDVLDCQWLQQLHTYGLLSASFRPPEQIVAIRSLVRHRETLVQSRSTHIQHMQKSLTIMNVRLTNVLSDITGVTGMKILRAIIAGERDPKVLAQFRDDRCAKSEAEIAKSLEGHYKPEQVFILQQAVELYDFYDRQLQRCDAELEALYGQFSPPEDPATPPPTPRTQKRRKNQAHFDLAPALYRMSGGVDLTPIDGVDELTIQKVLSETGTDMSKWPTEKHFASWLHLCPNNKITGGKVIQRGVQPTQNRASTALRVAAASLHHSDSALGAYYRRIRARSGAPAAVTATAHKLARIIYAMLKDRQSYHDVGAHYYDQQYRDRVLRNLNRQATKLGFRLEPVAPASA

SEQ ID NO: 42282 - protein, 280 aa, unidentified
MYYMGIDLHKRYFVSTIMDKEGKILKRSRVSTDRESIKHYFSLLKDKGLIKAVMEATFNWVYFYDEISPFVDKAILAHPLKTRAIAEARIKTDSIDSNTLAHLLRSGLIPKAYTRGFETRDLRNLLRFRIALVKVRTSLKNRVHAVLDRNYIEDPIFKGLSDKFGKKGMKIMRALKLKGNDTSILNGYLDLIEEITKKINDLEKRIKSFVKEDKITLLFKTIPGIGDIVAFLIRYEIDDIERFSSAKKLCSYAGIVPSTYSSGGKTYHGRITKQGNKWLR

SEQ ID NO: 42283 - protein, 375 aa, unidentified
MVKHGHKRCDQLPVLHPDAAGIDVGASELFVAVGADRDPQPVRRFPTFTRDLHALADWLQQCGVRSVAMESTSVYWIPIYQILEARGLEVCLVNAQHVKNVPGRKTDVSDCQWLQYLHSVGLLRASFRPPGAICAVRALWRHRGSLVQMAAEHIMHIQKALDQMNLQIHRVLTEITGLSGLRILDAILSGERDPLILARLCHKRVKSSESTVAKSLEGDYRPEHIFALRQSLAAYRYYQQLVLETDQEIQRQMVELEAADNALAKMPKRTKRLPYQRQGHEPRVFDLRSELYRIFGVDLTNVPGISAMTSQTFLCEVGTDVSRFRNASAFASWLGLCPERKISGGKVLFTKSRRVRSRVAIALRLAARSLHHAKD

SEQ ID NO: 42284 - protein, 299 aa, unidentified
MFPGLEEGDVSDGVLIAVDPHKAHNTLVVLDPASRAVLDEAEFANSGPGYQELVRFVRQWRSRRWAVEGCHGAGRSLAQQLVAGGEPVVDVPAKLAARVRVFSRGHGRKTDRDDAVSIGLAALEAAGVQAVTADDALVALRLLCDRRDELVAARTQAVCRLHRLLAELTPGGLRRELTTGKAAAVLAGVRPRDVAGKIRRQLAVQHLSGIRALDRKIAAVRAQITVMVEDSGTGLGRLFGIGPVIAGRILAEVGDIRRFPSKDHFATYNGTAPLDVSSGEQVRPGYHGQATGASTTPST

SEQ ID NO: 42285 - protein, 317 aa, unidentified
MSSQPLCVGIDVSKARLDTAFRPDGRTFADANDPDGIAALVTRLVELQPALIVLEATGGYEMPLAAALPVAGLPVAVINPRQARDFAKATGRLAKTDKIDAATLAHFAEAVRPAPRPVADPQVRHLDALLARRQQLIGMRVMESNRRGTATDPAVRDGLGRHIAWLEAELAEADQQLAAAVRASPAWREKDELLQSVPGLGPVSSQTLLAALPELGALPGGKLAALVGLAPYNDDSGTRQRGRHVRGGRAVVRRVLYLAALAAVRHNPVLKAFRERLARRGKRPKVILTAVARRLLVIANAIIRSGRPGQAELAAAR

SEQ ID NO: 42286 - protein, 358 aa, unidentified
MNYIGCDCHIASLDCAVVNERGHESKKQRMNTGVKELMGFVRSIPKPRTIIIEEGSLAGWLLEICTAYGEKLIITDPKRNRWIGRAGQKNDTIDANKLAHLARGGYIKEIHHPIGHRRRFRELVLSYHDTVKSQTRIKNKLKAKFRQNGIRCSGETVYSAKHRKEWRKKLPKDKVVQVIVEGLWQQLDQIHEVQEELLDHIRKQSRQYPEIKKFKKIPGIGTVHATTISAIVENPHRFAHKKKLWMYAGLGLAEKGSGEKVYSRSLTRDYNRLLKNALKQATEAAIIARDNQFRRQYLRLTIEKGIPSRRAKLTVARSILATIYGIWKSEEDYDPNTDKRRTESDKMQVRAYHLVRSG

SEQ ID NO: 42287 - protein, 330 aa, unidentified
MEKKDYVGIDVSKETLDLRLHSLKQQEVVDNKIAGFKKMYRWILKQVEPGTKLLFCFEHTGLYAVPLQLFLEEMGLEYVQVSGLQVKRSLGIQRGKNDRIDAQKLAEYAYLHRDTLRPYKLQSTYLIRLKYLLSLRSRLVRQRGGYAASANEYKKFLALGTADALLHSQKEMIKACDKQIVILENEIKQVIVSDQKIKDQYSLATSVKGIGMISAAYMIALTNCFTAFKTWRQFACYAGSAPFEHQSGKSIRGKTQISQYANKQMKAILTNAAKSAIQYCPELRQYYQRRIREGKGKKVVVNIIRNKLISRVFSVINRGTPYIELAKYAS

SEQ ID NO: 42288 - protein, 344 aa, unidentified
MDYFAGLDVSVKDTSICIVDDAGRIVREVKVASEPQALLAVLKIPAYRFKRIGLEAGPLSQWLYSALAEAELPVVCVETRHMQAVLKAQINKTDRNDARGMAQMMRVGLYRPVHVKTLRSQKLRMLLTHRQLLQSKAIAIENDLRGTLRNFGLKVGMVGKVKFEARIKELVENQPDLAELVQPLLIVLRALREQIVVLHRRLLAIVRDDEVCRRLMTIPGVGPVVALTYRASVDVPARFRKSKAVGAVFGLTCSKYQSGEINRSGRISRCGDEMMRVMLYEAAQSMLRSKKWSWLKAWAMQIARRRGIKKAIVALARRLAVIMHRIWADGTEFRWAREQALAAA

SEQ ID NO: 42289 - protein, 425 aa, unidentified
MKSTQNEKISQIKFETLVVGIDIGKETHYARAFDYRGIELARLLKFSNTDQGFQRLEQWMRDICKQQEKTEIIAGFEPTGHYWFTLGDHLKRQGYKLAIVNPFHVKRTKELDDNSPTKNDRKDPKTIAMLVKDGRYREVYIPDDIYQELREAVSERERLQEQLTSIYNRVVRWLDIRFPEFTTVFKDWRRNAALITLRSFPTPEKVVKIGVDAIVETWRKQMKRASLKRAEALVKAASRSVGRTSGKVASEASLQNLLAEYDLYCQQYDGLEQLMQELLMQVPNADKLLDIKGVGLITAATFVGEVGNISRFQDPRQIQKLAGLNLVENSSGKHKGKTTISRRGRKRLRHSLFFSMIAMLGKNQEFRLLHQRNLTRENNPLNKMQSIIALCGKLVRVFFAILTKGVDYSPEKMLRDMEQSIKVAA

SEQ ID NO: 42290 - protein, 370 aa, unidentified
MNKEKVVFVGLDASKATLAVSVAEDGRDGEVRDWGTISTAPTSVEKFLKNLAARFDRVEICYEAGPTGYGLYRQITAFGFTCYVVAPSLIPVRPGERIKTDRRDAERLARLLRAGELTPIWVPDETHEAMRDLVRARDSAAEDQRHKRQLISAFLLRHGRIYYRTKPWTMRYRRWLQRQSFDHPAQQSALQEMVLAERHAVERVGRLTACIEELVLSWKLGPVVEALQALRGVALISAVTFMAEIGDVRRFENPRKLMAYLGLVPSEYSTGQTTKRGGITKAGNSRVRRTLVEGAWTYRFPAKIGEKKLYVLQKLSPEIQDIAWKAQSRLTARYRRLSQRGKKKTVITTAIARELSAFMWDIARRTMPVS

SEQ ID NO: 42291 - protein, 426 aa, unidentified
MLPFDQHTHFVGFDWAKGHHDVVILDPKGTVLCQFRFDESAEGWHTFREKLKPFPSVAVAIETSSGPVVDRLFDAGCSVYPVQPLAAKSYRQRKAPSGVKDDVLDAWSLSDALRTDGRQWRILKPEDPLTLELRLLCRDERSLIEQRTALINQLQAALHDYYPAALEAFDDWTAPAAWAFIQVFQTPNDLEFAGKRKWQRFLDAHNLSRADRVEKRLEIFARATQHKTSTATTAAKSQLALTLVKLLQTLEAQLKIYHKRIQHLFDQHPDREWFGSLPIPQDGKTAPRILAELGTDRERFDSPDALQCHAGTAPVRIQTGNHKKGLVRMRRACNKHLRFAMHWFAHHSRSKSPWAAAYYDQKKAEGHGHASALRCLGKRWIKIIWKMWQTRSPYNPELHQQNQLAHGSWILKLVNTAQPQTAAVKS

SEQ ID NO: 42292 - protein, 355 aa, unidentified
MSEINYIGLDVHQETISVAVLNGSGKLVMESIIETKAATILQFIRSLRGQLHVTFEEGTWAAWLYDLLRPAVYRLVVCNPRRNALLKEGSKSDKVDARKLAELLRGGLLRPVYHGEHGLRTLRELARSYSILSKDMTRVMNRIKAIYRGWGIPCAGMQVYDPRYRAQWLHKIPEAGVRRRAEIFYQHLDGLHILRQKARRQLLEESRKHKPSKWLCQIPCIGPIRAALLMALMQTPYRFRSKRQLWTYSGLGIETHDSAQYRYVDGRLQRSKKPQQLRGLNQNHNHQMKEIFKSAATTAAHRGGPFEDFYARLLAKGMKPEMARLTLARKIAAITLTIWKEGARFDANQLTAQAA

SEQ ID NO: 42293 - protein, 401 aa, unidentified
MPFHGGLDWGVASHAACVVDGAGRIVARVEARHDAGGLAELLARLRAVAPPAELPVAIERPSGLIVDALVAAGHPVVPIHPNVVKACRPRYRAAGGKSDPGDAYMLADVLRTDGHRFRPLTPVSDEIKALRALVRARDDLVTQRVALANQLRSLLEGFWPGAAAIFAAIDSPIALAFVGRYPTPESAGRLGEKRLAGFMAQHGYCGRRSAAELLARLRAAPTGLAGEAEAEAKGEIARALAGLLERLVAEIAKLSSRTERAVADLPDGRIIMSFPRAGRLCAAQILAEIGDVRERFPTEDQLAAEAGVCPVTHASGKSRGVVFRWACNKNLRRAITCFADNSRHASAWAAAVYGKARARGCQHAHAVRVLARAWIRVLWRAWQSGSPYDPQRHAGATKIAT

SEQ ID NO: 42294 - protein, 412 aa, unidentified
MFKIFRNNCCGLDVHKTWIYACIGITDPNGRTEYKQARFSSFSNGLRELAAWLAKYSCTVVCMESTGKYWIPVFNILEKSCSVTLAHPKYTKPQKGNKTDRKDAKWICDLFMCDMIKPSFIPSPEIRQLRDLVRYRVKLTNMLTGEKNRAQNCLTVSNLKLDDVFSDVFGKSARSITNYILEHPGETFDVSPFVDPRCKTPVSEIQAAVDGAISPEQAVKLRQCLAHIDELEAHRKEIESEILQIAEPFSAVLDLLYTLPGLDKNPMTAIAILSEIGPDMSVFPSSKHLVSWAGCCPRNDQSNQKVKSRRISRAGSYLKPLLVQVANALIKSKKHPEFKERYHRIKSRRGHKKAVIAVGKMLLTAIWNMLSKLEPYNPEGFLEHRPVKQEKTLTVSQALELLRLRGYTIANQ

SEQ ID NO: 42295 - protein, 337 aa, unidentified
MMYGGIDLHSNNSVIAIIDDADRVVVQKRLPNDVTKVVGFLARWKDELAGVVVESTYNWYWLVDGLQDAGFQVHLANTAAIKQYEGLKHSGDETDAQHLAHLLRLGILPTGTILPREHRAVRDLARKRMQLVQSCTAHILAVENIMARQLGGRMTSNQIKRLTDDAVDSLSLAADVGLAIKANVAVIATLQAQIEILEKRLQERVKPRAQYGLLISVPGIGQTLATVILLETGPIDRFADVGNFASYARCVDSVHTSNRKKKGEGNVKNGNKYLAWAFVEAANFARRFCPEAKRFHERKKARTNNIVATKALAHKLARACYHILKEGKPFDVTRCFA

SEQ ID NO: 42296 - protein, 337 aa, unidentified
MKRYLGVDLHRTQMTVCTRLESGEESVREWAIKDLPEFAEQLRAEDEIAVEATGTTGRFYDAVVGRVARLVVVNPHKFKIISESVSKTDGKDCRELALFLSKDLLPEVRMKPKKQRELAHMTETRDLLVKQRSALKGKINNLLAMQGINLKREALSSKVALERGMGLEVSAMVKLELRVLVEQIRALSASIGELEELIAEEGEQLPGHGNLTSIKGIGSLSATVLLTTIGSVGDFADENKLAAYLGLVPRVQNSNATERNGAITKMGNKLARTALVQCGLVAKRYSPYLNRFYQRIKERRGGGKAKIALARKMVKIVYDTLKNNWVFDDFPSFTLAA

SEQ ID NO: 42297 - protein, 350 aa, unidentified
MRIIGCDFHTRYQQIAMLDEATGELVERRLDHENGEAHSFYRDLPKPVRVGIEATGPMHWFERLLGELGHELWIGDSAKIRASEVRQQKTDQRDAALILDLLLTNRFPKIWVPSVAERDLRQLLWHRHKLVRLRTMLGNQLHFLAMNQGLCRKKKLWTKKGRAELEGLALGPWSSRRRGELLRLLDQLDPSIAELDRAVLEQAKLREDACRLMTHPGIGPVNALAFVLTIGPVTRFRRSKQVVSYLGLNPSEHSSGGKQRLGAISKQGNTLVRWLLIEAAQHTVRFDPELRQDYQRLKFRRGGAVAKVAIARKLAVRMYWMLRSGADYAQLVRMQGSPGATLVNAGSSLG

SEQ ID NO: 42298 - protein, 347 aa, unidentified
MKHFAGLDVSLDETTVCVVDEAGGIVREARVPSEPEALVAFFRWLGLAMERIGLEACSLAAWLHEGLTAAGLPAVCLETRRAKAAMGAMPNKTDRNDARGIAQIVRTGWFRAVHVKSPACRSWRALLAARRLVLNKMRDLENGVRALLREAGLKLGRPARKELAARVRELVGADAVLSASVEPLLAIVATMAHELAQLTRRVLAIVRDEPVCRRLMGVPGVGPLTALAFRATIDRPERFRRSRDVGAHLGLTPKRYQSGETDVQGGISRCGDELARTALYEAAHSLLVRSRRWSSLRAWGMQVARRRGMARARVAVARKLACVLHRMWADDAEFRWGKQETASAVPG

SEQ ID NO: 42299 - protein, 474 aa, unidentified
MQATREDAGRARGHAGQRRSRKNKGMCGPDRPLLEANAAGVDVGAREMFVAVPPDRDRQPVRSFGTFTADLEELVNWLQQCGITTVAMESTGVYWIPLYEMLEQRGIQPCLVNARNMKNVPGRRTDWQDCQWLQYLHSVGLLRAAFRPNEQVCAARTILRYRGELVQMASQHVLHMHKALTQMNIQIHHVISDLTGVTGLATVDAIVAGERDPAKLAQLRDRRIQADEHTIRKSLRGNWKTEHLFTLQQSRKLYRECLEHIAQCDQQIESLLKNIEPPENPGDPSLPADEAPSQKTKRRAGDFHFDVRGEIRKLFGVDVMRIPGIGTQALSLLSEIGNDLSRFPTAGHFASWLGLCPDNDISGGKVLWRGVRRIQNRAGQMFRMAAYSLHRSKTRLGDFLRRMKYRLGPKAATTATAHKIAVIFYTLVKNQVEYDDSLWAAQDAAHQQRAENKLKQLAQRLGYEIIKSQPTTTP

SEQ ID NO: 42300 - protein, 320 aa, unidentified
MPQLNDLSRSLVALDQDSTIIAVVELSQSSWLVAGVLPGIERQPQKKLEPSAERLLGLLHRWRDEAVRAGKKITRIALAFEAGRDGFWLARWLNARGVEAHVIHPSSVAVSREHRRAKTDRLDTELLKRGFLGWLRGERGHCSMARVPTIAEEDAKRPNRERECLVGERTRIVNRMKATLARLGVRNFKPTLRKAAERLATVHTPEGTPLPRNVLAELQRDIARLGFVVSQIKEIEEARQERLEQEPETRPHAMVRHLARVVGVGIETADMLVHEVLSRPMRDRKAVARYAGLTGSPDESGAKRQEQGLARAGNARFAAA

SEQ ID NO: 42301 - protein, 357 aa, unidentified
MSSNLKKYIGLDVHKDATSIAVLNGVGKLVMESIVETKASTLLDFLHGLRGELHVTLEEGTWAAWLYDVLKPHVEEIVVCNPRRNALLKEGSKSDKVDARKLAELLRGGLLRAVYHGENGLRTLRELARSYLTISKDQTRVMSRLKALYRSWGIPCSGTQVYAPRYREQWLSKIAQPGVRRRAELFYQQMDGLSVVRHTVRGELLAESRKHQAVKILRQIPLIGPLRAALLLALMQTPHRFRSKRQLWTYSGLGVETHDSAQHRYVDGQLQRSKKPQQIRGLNQNHNHEMKRIFKSTALSASRCAGPLQDFYAGLLSRGMKPEMARLTLARKIAAITLTLWKKGGRFDAEHLKSQAA

SEQ ID NO: 42302 - protein, 347 aa, unidentified
MKKVSVIGMDMGDKNHKAVGLSEDGEIIDRTEVPCTPEDVRAYLERFPGALLAIETGTHCRWVSRLGTGMGHEVLVGNARKLRMIWNSNRKNDWNDAEMLARVARTDRKLFSPVRLRDDGDQELLRLVKARDLLVKCRTGIVNKIRGFCKADGHHLPKCSADSFMRLEHEIPKSVRTVSKPLFAMLKELAKKIGLYDTMIAKGVRKIHGEDAKLLEPIAGVGPVTAAAFLATVGDPATFGSARDAGSYFGLVPRQDQSGQTDKQMRITKEGNAVVRRLLVTAANYIMGPFGKDCDLRRHGMRIAERGGKNARKRAKVAVARKLAVLMLAILRTRSEYRPLADVGCVA

SEQ ID NO: 42303 - protein, 344 aa, unidentified
MDHSAGLDVSVKETSICIVDDTGRIVREVKVASEPEALLQVLGNPIYRFKRIGLEAGPLSQWLFSALAEAGLPVICVETRHMRAVLQAQLNKTDRNDARGMAQMMRAGLYRPVHVKTLRSQKLRMLLTHRKLLQSKAIAIDNDLRGTLRNFGLKVGVVGTVKFEARIKELVENLPDLAVLVEPLLMVRRVLREQFSILHRRLLAIVRDDEVCRRLMTIPGVGPVVALTYRATVDVPARFRNSKAVGAVFGLTPSRYQSGEINRPGAISKCGDEMMRVMLYEAAHIMLVRLAKWSWLKAWAMKIARHRGMKKAIVALARRLAVIMHRIWVDGTEFRWTREQAAAA

SEQ ID NO: 42304 - protein, 449 aa, unidentified
MAKHRKKHGKLDRNLPELKPNAGGIDIGAREIFVAVPADRDVESVRSFPTFTEDLHRLADWLQQCRIDTVAMESTGVYWIPLFQILESRGIEVCLVNAQHVRHVPGRKSDVLDCQWLQYLHSVGLLKASFRPEQDVCAVRSLLRHRESLVQMTCVHVQHMHKALDQMNLQIHHVISDITGVTGLAIVDAIVEGKTNPRQLAKLRDYRIKAPIETVIKSLVGDYRPEHIFTLKQSLVSYRHYQQLIDECDQEVQQRLQAFVTKDDGPNAAADGSISTTLAQSSFDLHHHLERIFGTDLTLIPGFESLRIQTIFSELGADLSKFPTEDSFCSWLNLCPKDGTSAGRRIRGPRIKTQNRVANAFRLAAQCLFSNKSFLGDYFRSQRARHGALKATKNAAHKLARIFYHLVTTRLPYDETVFAKLEIRNQKRRLNKLQSLARRMGYSLVQANA

SEQ ID NO: 42305 - protein, 347 aa, unidentified
MRPKLLMENDYILRQCVGIDVSKETLVVTMCMFSFAEEAHYSDVKTFKNNKTGFNQLVKWSRKEAYTDKPLRYVMEATGVYHEELANHLVKIGCTVIIMMPNKAREFAIWEGMISKNDTIDSRVLALVGCVKRSMRPWQPSKEIYHELRAMTRFAQDTKKLRLALKNHLEALEHSHQAEKSIVKHYEAMVSYLDKRLKMNLKNMKEKVASDEALNKKVENIITAPSLGFTSVITVIAETNGFALIQNRKQLTSYAGFDVKDNQSGNVEGTSRISKKGNSRIRAILYMPAVQAQLRSRHLKEAYDRIVQKHPDKKMIAVTAMERRLLLLIYALWKSDKPYDEDHDKKK

SEQ ID NO: 42306 - protein, 326 aa, unidentified
MEAHPVGIDVSAKELVVTSDRSRDARFDNDAAGHKKLIRFLTKGRRAARVVLEATGVYSLDLALALHRAPRIEVMVANPRAVANFAKAYLQRSKTDPLDAEVLLEFARRMPFTPWVPPAPEHLDLRALSRRIAALTKTSQQEKNRLHAASRCSERTPLVRRDIEVNIRHLQRRIEHLRHQALALIEEHAPLQEAFEHLVSIKGIADASAISILGELATLPADMTVRQWVAHAGLDPRHVQSGSSIHKPARISKAGNKYLRAALYMPALVAIQHEPNVAAFYDKLVARGKTKMQANIAVMRKLLHAIFGMLKNGANFDGEKFYAINP

SEQ ID NO: 42307 - protein, 383 aa, unidentified
MYNAVGIDVSKGKSTIAVLQPAGVIIRKPFDVSHTSQQLNELSSYLHSLEGDTKVVMECTGRYHEPMANALHKAGLFVSIVNPHLIKNFGINSLRKVKSDPADANKIARYTLDNWPELRQYSSMDDTRTQLKTLNSQFSFFMKQKVAAKANLIALLDNTYPGVNKLFDSPVRSDGSEKWVDYAYSFWHVDCVRKIGLKAFTERYKAFCKKHHYNFQPLKPEELFLASKELIAVFPKEKNYKLLIQQSIQQLNLASEHVEQLRKEMDALAATLPEYGTVMGIYGVGKTYGPQLMAEIGDVSRFTHREALTAFAGVDPGVDESGQRKSKSNRASKIGSARLRKTLFQIMTTLLQNAPQDDPVYRFLDKKRSEGKPYYVYMTAGAN

SEQ ID NO: 42308 - protein, 331 aa, unidentified
MVQNLSGAVAVIGIDIGKNAFHVVGLDGRGAIVLRQKWSRGQVEARLANMSPCLIGMEACVGAHHLSRKLKALGHDARLMPAKYVRPYSKGQKNDFRDAEAIAEAVQRPTMKFVATKTADQLDLQALHRVRERLVSQRTGIINQIRAFLLERGIAVRQGLRFLRAELPRILATSLDVLSPRMVCVIEGLAEDWRRLDQRIDHLSEEIAALARQDAGCERLMSVPGIGPIISSAMVAAIGTGDAFSKGRDFAAWLGLVPKQISTGDRTILGKISKRGNRYLRVLFVQAAWVVLIKPKSWQRHGLKPWIEAAKKRLHRNVLAIALANKLARIA

SEQ ID NO: 42309 - protein, 370 aa, unidentified
MRDGTRIWVGVDVHKETLSVAALRGDLERPVLEERLGPSERVLQGQLKRLRREGPLQVCYEAGGFGFVLQRKIQAWGHECVVVAPSLIPQKPGDHVKTDRRDALKLAQLHRAGLLTAVYVPTEADERTRSVVRGRRALQRDTFRVQQRILKLLQARGHFYREGHKHWTGPFLKWLTALPLAEEDRFLIDAYLGQRDVQQQLMKQVMTRVEKVAEHSRWAGPIARMQCLRGVETVTASSLAVEIVDIGRFGSARQLMGWAGLGVNESSSGERTSRGGITKSGNGEVRRLMVEAAWNNTHPPRTGDALRKRMVGQAPDVVAHALRAQQRLYATWKRLGVKSPKLAVTAMAREMLGFVYALWRAQPEDLRPRD

SEQ ID NO: 42310 - protein, 340 aa, unidentified
MDITTLGIDLAKSVFQLHGVDAQGVIVLQKKLRRGAVVKFLSKLEPCLIGIEACATSHYWAREIAALGHDVKMIPPAYVKPYVKRQKNDAADAEAICEAVTRTNMRFVPVKTEEQQAVLVLHRSRDLLMRQRTMILNAIRSHCAEFGIIAAQGARKVSELVTKLRNDDTLGVPEVGVSALLSLASQLDCLEQEVRKIEHQLLAWHRQNAASQRLETIPGIGLITATALAASVPDPAVFKSGRQFAAYLGLVPRQNSSGGKDRLGRISKMGNGYLRRLLVVGATSVTRRAPTIDTRTGTWVRSLLEHKPTRVVTVAIANKTARTAWALLSKGESYKAVPAI

SEQ ID NO: 42311 - protein, 320 aa, unidentified
MPEMNGNANTVAARCLGIDVAKAHVVIHDLHAGRTLSVKNTPEGIRTALADFVGHDLAVCETTGGYERALLEAATELHLPIHCADAGRVKAFIMSHGGRAKTDAIDAIWLARYAAERGERLRRWRPPCPEREALAELVRHRQDLLAQRVQAKNRASAPGGKAIKALLAEQITFLTTQITQLDRQIAVLLERPDLKTSQDALRAITGIGPVCAATLLALAPELGTLTPKTAASLMGLAPHPRESGSQSGHRRMTGGRAGVKPVVFMAALSAARRHPDLSAFYNRLLAKGKPKRVALAALARKLVVIANAKIRDLNIDPVLT

SEQ ID NO: 42312 - protein, 341 aa, unidentified
MAEYVGLDVSMKETAVSIRRDGKRIWRGKCGSDPKLLAEVIRRRAPDAARVVFETGPLSVWFYHALTAEGLPAICIDARHAKAALDMAPNKTDANDADGLAQLAEVGFFREVRVKGFDSMLARALVAVRNRLVQITTELSNQIRGLMKTFGLLVPAGKGSKFEEHVRGLLTGQAELARIILPVLEGWRAMRLRAAELGRQLVASARRSEACQILMSVPGIGAVTATSFATAIEDPENFRRSRSVGAWLGLTTRRYQSGEVDYDGHISRRGDTHLRGLLYEAATVILTRTSAESALRTWGLRLRDKIGFKRAAVAVARKLAVVMHAMLRSGQLFDRTAGGAA

SEQ ID NO: 42313 - protein, 287 aa, unidentified
MQIYGIDFAKDKFDVSFLAPTLKNVSNKPAHKVVRNNESGITKFIKTLPADAVLVAEHTGVYGDRLLKHCTESHINIAYVGGYVIHTYKSAPDRAKTDMLDCAVLREFGERFTDKLIYKTFPKKELYELKQLARHRTMLVEDRKRYVTADKGEDCRPCRSMQVKESMERIMKILTEEIARTEKQMLDIIRAHEELSRNYDIITSVKGVGLITAVELIVKTENFTTIKTASQYAAYAGTAPYEKSSGKMNKGAHVSKIGNRRSKTLLYICAESARMHNKEIKLLKFRI

SEQ ID NO: 42314 - protein, 364 aa, unidentified
METIQYVGMDDHKEFIEVAVFKQFSRDPEIVKTLKNSKPTIKRFFEQLARNGEIIAGYEAGCMGFQLQRLIESFGHLCILIAPSKTARKPGDKIKTDKRDAIVIAKALRNQDYQPIYIPTKQDEEVREYLRARTDRKLDLTRTKQRVLKFFLRNGYRYPGDRYWTQKHLSWMKTLTFRSELQKETFEHHFTVLIAQEQHVQRMDQRIQEIATSGRYEKQVAQLRCFKGIDYLTALSLIVEIGDFRRFKSAEAFMAFLGLTPSEYSSGNTRRQGAITKAGNTHIRKLLIESSWHYRYTCPPSNRLQQRRNGQSEQIIHYADKALSRLQRKFTKMVYRGKPKQVAVTSVARELAGFIWGLMTTNYA

SEQ ID NO: 42315 - protein, 318 aa, unidentified
MGVDEMKTEEFVGIDVSKGRLDICLHTSGELLSVPNDVDGIEELVRKLNSIAPSLVALEATGGYETVFATTAYAAGLPVAVINPRQVRDFAKATGMLAKTDALDAKVIARFAAMVKPDVRARRDEETDALAGMVARRRQLVSMRVQEKNRLAGANPRQKADIKEHVSWLDERIRLLEIDLTAALRESNAWRVQEDLLKTAPGIGSITSATLLALLPELGHLNRSEIAALAGVAPFNRDSGQYRGKRMIWGGRAEVRSVLYMATLSAIRFNEPIKALHARLIARGKAPKVAIVACMRKLLTILNAMLKSNTPWNPQLAT

SEQ ID NO: 42316 - protein, 344 aa, unidentified
MEHIGIDVHKRQSQLYIVTEKGEVIEKRIHTERRRFSEVLGGRAHAKILLEASTESEWVARCLEELGHEVVVADPNFAPMYGMRSRRVKTDKRDAQALADACMTGTYREAHRTSEVRRQLKAELAVREALVRERAKHITLVGALVRQQGLRIATGSADAFLTRLEKVGLTERMESVVAPLVAVMMKLNEQIQLVDAELEKLANEDEQVARLCTMPGVGPVTAAAFVAVIDDAKRFAGPHQVEAYLGLVPSEMSSGEKRRKGHITKAGNPRMRSLLVQVAFSMMRLRKATTAAQWEWAMRIEAKRGRKVAAVALARKVAGILYAMMRDGTNFKPCVRKEGMSSAA

SEQ ID NO: 42317 - protein, 428 aa, unidentified
MKYNTQNAKIKSITEKTLIVGIDVGSETHFARAFDWRNYEYSKKPLEFSNTEAGFMTLKAWMADFAEKYGKNVVIPGMEPTGHYWFNLGAYLQDNGMKPVHVNPHHVKKSKELDDNNPNKNDRKDPKTIAALVNEGRFSYPYIPTGIYAEIRSLSNLRLQTQEEITRIKNRIARWFSIYFPEIKDVYRNPDSVSGLMILKEAPLPQDIVKLGVDGINKIWRDAKLRAAGLKRAKTLVTAAEHSIGSQEAPDSARIELKNLLNDYEIYKNREEDLMSLTEEKLSEIPHIDKLLEIKGVGLKTVSGFVAEVGDITRFDNPKQLQKLAGYAIVECSSGKHKGESHISYRGRKRLRYVLYEAAISLIARNEEFKEVHRYYRTRKENPLKKMQSVIAVACKVLRIFYTILTKGVTYDGAKMMQDIKRPQMLAA

SEQ ID NO: 42318 - protein, 420 aa, unidentified
MKVVYQTCCGVDVHKSFLVATIIKTTSGVQPSYQKKRFSTFNNSILEFKKWLLDNSCRDICMESTGKYWIPVFNLLEDEINVTIANPKWVKAVKGNKDDTKDSKWIGDLFRLGLVPGSYIPCKEIRILREFTRYRYKLTSARSSEKNRFQNALTVCNVALDSVVSDIFGKSATSVIDYLLEQSDNSINHEEISSRLLRSLKKKSESVIESIEGYQMTDSQKYRMRLVYAHMDYITSTISDIDSMINSLVEPYDNAVKLLCTIPGVDRNSAITIISEIGTDMTQFSNSKRLCCWAGLTPGNNESAGKKKSVRITRAGVYLKPALVQVAHAAVKSDKSPYYKAKYERIMKRRGKKRAIIAIARMILTAAYQMLSTGEVWNPTDLYKIDMPEPLKEKQKEKAIKQAKKLLIAEGIIDESLLAS

SEQ ID NO: 42319 - protein, 348 aa, unidentified
MVAELEYVVGVDTHRDEHVLAVVEAPSGALLAGRAVAADARGYAQALRFARRHAPVARGWALEGAGHYGAGLARYLSKRGETVLEVGRSPRRQRRLRGKDDELDALRAARAALADEPLASPRLGERREALRLLLVARRSAVDVRKEALVQLRSVIVTAPDRLRDELRRLPLRRLLDRCSQLRPASGAASDEAACRLVLRSLARRAEAATLEAAELEREILGHVRVLAPRLLAEPGVGPIVAAQLLVAWSHRGRVRSEAAFARLAGVAPIPASSGQTSRQRLSRGGDRQLNRALHTVVLHRRQHDPATRDYIARRVAEGKSRREATRLLKRYVARSLYRLLQAQEPLMA

SEQ ID NO: 42320 - protein, 320 aa, unidentified
MAQQGRIVGIDVAKLKADACIRSLQLRLSQPSTAQGQQDMITWLRRNEVGLAVMEASGGYERVWAEALRAAAIAVRIVDPKRVRYFAKSAGRLAKNDPIDAEMIAWFAETFAAAAEPAHDADRDALNRLVTARRLLVRLATPIRQLGEHGQPRVVENAQRAILKTIKAQLAKLEAAIEAKIAANAQFVARRAIIASVPGFGDHFVAGALAWLPELGRISNKAAAGLVGVAPYDDDSGQHRGQRHIRGGRRDIRTLLYMAALGAATRHNPVVMAYYKRLRAQGKKTKVALVACMRKLVVILNTMLARGEMWNPPPRTTAVA

SEQ ID NO: 42321 - protein, 343 aa, unidentified
MDYFAGLDVSVKDTSVCIVDGTGKIVREVKVASEPEALLTVLRDSAYRFKRIGLEAGPLSQWLFSALAEADLPVICVETRHMRAVLKARINKTDRNDARGIAQMMRVGLYRPVHVKTLRSQKLRMLLTHRKLLQAKAIAVENDLRATLRNFGLKVGAVGAVKFEARIKELIDNFPDLVALVEPLLVVRRVLREQISILHRRVLAAVRNDEVCRRLMTVPGVGPVVALTYRATVDVPARFRKSKSVGAVFGLTPARDQSGESDRPGAISRCGDEMMRTTLYEAAQVMLLRSAKWSWLKAWAMKIARHRGMKKAIVALARRLAVIMHRIWIDGTEFRWTREAAAA

SEQ ID NO: 42322 - protein, 364 aa, unidentified
MATRQHSTSSSADPPVRDEVVLGMDTHGEVHVAAVVSPLGKILGTESFPATVAGYRRLLVWARKRGTVRRAGVEGTGTFGAGLSRYPLTQQIQVFEVNRPDRTACRLLGKSDPLDAQAAARAVLSGRTRAQAKSGDGPVHGARIYKLAKDSAVKARTQAINQLKAVLVIADPVLRERLSSLGTAELFRTCATLGPPDGGGDEDAVAQATHMTLRMLAGRIEQLTGQINELNQRLTRLVERHAPQLLVPMGIGPDSAVTLLITMGDNPERLNTEASFAALCGVSPVEYSSGRRSTRRLNCGDRRANAALHRTVFTRLRHDPRTQAYYERRTQEGKTRREVIRCLKRYAAREVFNLVRPISRAPAL

SEQ ID NO: 42323 - protein, 416 aa, unidentified
MKHPKMQYTYVGIDSHKNTHTAVFLDCFFEKLGEITFDNLPSKFPSFLNDALKFQAEETTFMFGLEDTSMYGRTLAVFLTDNEQKVKHVNALLVARERKNRNITEKTDSVDAECAARVLLSKLNELPDADPQDKYWILRTLVTRRRFIIKNNTCLKNHLHTLLTLHYPNYRDFFMTFDCKTSLTFFKTYPSPETLKNVTHEELTNFLKEPSAGKVGKVKAREILDSLENTAVQFQEIRDMAVQSSIRQIEFNLLELEQVDAILEEFLDGFDCTLTTMTGLDVVSAAQLLSCIGDIKKFSTPAKLARYSGVAPITYASGKKDLQFANQRGNRELHSVIYGLAVRVTSPVGSTKKVLNPFFYEYYHRKLSEGKTKRQALKCVERRLINIIWNMLTNNEEYINPPMFDLPKNVDNADDK

SEQ ID NO: 42324 - protein, 343 aa, unidentified
MKKRANFKGMNDRILYVGIDLHERESQLAVFDQGGALLDEKRLPTKELRNHLSSLPGEKRVAMESVGFVYPIYDELSSLKDCHITVANPNRLHLISRSSTKHDKADARVLGDLLRTNYLPVAHMRDEETREKLVVIGERVRYGAKGGELKGSIKWLLKRRGIEVEKPFSDEGRKRLRALRLQEVDNRLDELALAESFIKGLDGQILDIASRDEKAKLLDTLPGLAPYTALYLACVLDDIDRFPDAKHACAYLGLVPWLDETADTTHLGHITKKGDKWLRRNLVQCARVAVRKDAHLNGFYTRLSHKRGEKKALIAVARKLVSYAYWMIKRKQTYEELSPWVPT

SEQ ID NO: 42325 - protein, 346 aa, unidentified
MRIIGCDYHPSWQQVCWLETDTGETGEQKLEHASGEAERFYRQLPGPALIGMESTGNCQWFVELVKRLGHELWVGDAARIRASEVRQQKHDRRDAALLLKLLLEGRFPRIWVPSGEERDWRQLLMHRYKLVRIRAQVKNELQHLAMNQGITRKRRLWSKAGEKSLRELTLLPWASRRREDLFRVRAMLDEQIGDLDAAVIAAAEKNQKAKLLMTQPGVGPITSMAFVLTMGDVHRFQRGKQVASYLGLIPREYSSGGKQRLGSISKQGNRLMRMLLVEAAQNAVRCDPQMRNEYLHRCHRKAKGVAKVAAARKLAIRLYWMLRTNQGYPEVVRVESSSRVPLVSAS

SEQ ID NO: 42326 - protein, 420 aa, unidentified
MKPTYFLGIDAAKHKMRATLSNRSEHVLFEKDLSVETTGLRQLLAAIKRQVNDPEQLLVLIEATGLLHLNWSAALTKAGYAVAVINPLIARRLYTLQNSIRDNKSDPIDARGLCTIGALHGEKLLVHYRFSLRPEQFTLQRAQSVRKALRSALTNLKKTYQSLMDLSFPELGGLLQLDGVGIRQLLIQAPTPAAIAGKRLSTLENNWMVRPKAAALKALAADSMADPDLAAASGPALVALLQSVAAMEGRLHALDQQIAKLACTSVDPQTKALIETIPGFGPVNAAKTLAWLPTEILHSGSNRKVAARLQAFMGNDPRLRQSGQWKGHTKMSKRGVEMLRTAFFQSAFSAAHNDPELRAYYQCKRAQGKTHEVALSHLMRILTRRLVAVLRSGNHTSLTTTSKMLPRTLDTSHSLSSSIG

SEQ ID NO: 42327 - protein, 338 aa, unidentified
MIVVGLDVHKQALTAVAVDEAGRAVAERTSAVDAEALVEWARSLEAERLWALEDCRHVTRALEQALVAAGERLVRVPPRLTAPQRRRGRIRGKSDAIDALAIARAALQEPELDRPRAGEQRLRELKLLLDHRDDLVAERRRCQQRLRWHLHELDPSLAVPLGALDRGLWLERLGRWLGRREQTTQVRIARQLLVRCRASTREIVALERELETRAQTLAPRLLELPGCGPLSAAKLLCEIGPIERFASDARLARHAGVAPLEASSGKRLRHRLDRGGNRQLNCALHRIAVTQGRVYGPARAYLERKQGEGKNRREALRCLKRQLARTVYSTLKAESALT

SEQ ID NO: 42328 - protein, 452 aa, unidentified
MKENEITMEVVNPHAAGVDIGSRSHWAAIGQKAEEVKEFGVFNEDLYAMSEWFKNHDIKTVAMESTGTYWQSLFAVLLSEGFDVILCNGKFTKNIKGKKTDIKDCQWIQKLHCLGLLSSSFLPDKQTEQLRTYCRQRALLLDSSASAAKKMQKYLRLLNLRLDVVVNDICGQTGLAIIKSICEGETDAKKLASLRHYNCRKSEQEIAKALETNGREDYLFGLRQEYDMYHMFQKKIDECDEEIKRLLDKIIDGNDDKRQHYIDPKPYKKINKNTPSQIDLNLKSYQYFEGVDLMAIEGMSYSTVLSIMSEVGLEGIKRFKTAKHFASWLRLAPNNKISGGKVLSSKVPKGSNRLKIALRNAANAIGNLKDSTPLRDFFQRINFRKGRVSAISATARKLAVIIWNMIVENKPYYNPTEYLFLDQKRKLGLVKRIQKQITKFELSKKNFEFVTD

SEQ ID NO: 42329 - protein, 423 aa, unidentified
MSHLTDGQYTAYIGIDWADTKHDVCLQAQGCEQREFSCLPHQVDDIEQWVRSLRQRFGGPIAIALELSKGPIVYALQKHDFLVLFPINPSTLAKYREAFTPSRAKDDPTDAELALDLLLCHPHRFQPLQPQSVELRTLATLVEQRRDLVNDRVRITNRLRSTLKQYYPQVLEWFDRINTPLFCDFITRWPTLEQVKRARRSTLERFFHQHSMNFPQVLENRYQAIKAATPLTRDAAVVTPYRLHALVLAEQLRVTLQAIRRFDDEIAQLAPQHPDYELFSSLPGAGPSLAPRLLVAFGENRQRFSNAADLQKYSGVAPVTERSGRKHWVHWRWQCPTFLRQTFVEWAAQTVNKSFWAGAYYRQQKAKGCSHRVAVRALAFKWIRILYRCWQSRTPYDELVYLDALRRRGSPLLDQLGATAEYT

SEQ ID NO: 42330 - protein, 412 aa, unidentified
MQVIYPTCAGMDVHKRTVTVCLVWRDAAGQRQQEVRTFRTMTQDLLAMRDWLHAHGCHVVAIESTGVYWQPVFNLLEDTCEVLLVNPSHIKQVPGRKTDVTDCEWIAELLEHGLLKGSFIPPRAIRDLRDLTRQRRKLIQTRASQVNRLQKVLETANIKLASVASDVMGVSGQAILKALLAGEQDAAKLAELSKGRLRQKKADLAAALEGRFRPHHAQLLARILGHIEFLDESIAECDTQVERLCRPYMLDLERLDGITGFDRRAAEDLIGEIGVDMRPFASPKHLCGWAHVCPGNNESAGKRKSGRTGKGNKWVRAILMECAHAAGRSKGTYLGEQYRRFARRKGKKHAAMVVAHSQLEAVYFILRDKVPYHELGAQHFDQINKDQVIRYHMRRLESLGLKVQVEELPVAA

SEQ ID NO: 42331 - protein, 429 aa, unidentified
MNYNTQNAKIASITEKTLIIGIDVGSETHYARAFSWRNYEYSKKPFAFSNDEAGFAAFKEWMDDIAEKHGMEVIIPGMEPTGHYWLNLGAYLQEQGMKPVHVNPHHVKKSKELDDNNPSKNDRKDPKTIAGLVNEGRFSYPYIPTGIYAEIRNLSNLRIQTQEEITRIKNRMARWFSIYFPEIKDVYRNPDAVSGLMVIKQAPLPCDIRELGVDGVNKIWRDARLKGAGIKRATTLVTAAEHSIGNTEAPRSARKEIRNLLEDYEGYKKRMDELMEEIEKTFSEIPYIDKLMEINGIGIKTVSCFIAEVGDIGRFDNPKQVQKLAGYAIVADSSGKHNGESRISHRGRKRLRYALYEAAISVIGKNKEFKEIHSYYRTREKNPLKKMQSVIAVACKLIRIFYTILTKGVDYDGQKMLNDIVRPEIQPAA

SEQ ID NO: 42332 - protein, 356 aa, unidentified
MNKRSKLDFSGQPIYIGLDVHKKSWSVSIFTQHGEYKTFSQPPEAEILSQYLRHHFPGAQYRSVYEAGYCGFWIHDQLTENGIHNIVANPADIPTRDKERRNKRDRVDCRKLARGLRGKEIEGIYTPPRWRLEDRSLIRTRLSMGRKQARCKNQIKSMLLFYGVDIPEQREMGHWSRRFIQWIEGVRMERTSGDLALKLHLEELCHLRQILAKLNRSIVALARTEMYRSWISLLRTIPGISTLTAMILLTELYEITRFRSIDQLCRYVGLIPDTQGSGEKEHVGGITRRHHSSLRWLLIEASWIAVRKDPVMMEAFQEYCKRMRKTKAIIKIARKLLNRIRYVLKNQAEYVTSVIE

SEQ ID NO: 42333 - protein, 451 aa, unidentified
MLGLGMVTFTALMKRRTLYMKYKLKQKQNQRITRITEKTLVVGADIAKKIHVARAVDIRGIELGKECVFHNDQEGLTKLAAWMKELGRIHEKTDIVFGIEPTGHYWFPLAAFLKEQDIRVVVVNPHHVNKSKELEDNSQTKSDYKDAKVIADLIRSGKYSEPNLPTKEYAELRILMNFREKVMVSLNQVKARITNWFDRYFPEYPQVFKDWEGKASLMTMRQFPTPEEIVSIGARGVLTHWKTEIKRGVGIKRAEQLYAAATVSIGLTEGLTAARIELAALLQQYDLYCKQEESIMTEVLQILEKIPGTKQMLSIPGIGILTVAGFLAEVGDLNNYDHGQQIIRLAGLNLTENSSGKRKGKTGISKRGRSRLRGILFRCMLPMVAKNKEFKALHEYYTTRSQNPLKKKQSIIALCGKLVRVLYTLGTKQKEYNANEVLGPIRQAQLQQSAA

SEQ ID NO: 42334 - protein, 370 aa, unidentified
MKSNVLFAAVDVDDNSYHLCIFNPISEESVVFKTDPSPDHLIRLLQRKNLAKEHLKICYEACHLGFFIQRKLTKAGYNCEVIAPSLTPVSPGRSQKTDRIDCEKLAKYYAMNLLTPVRIPDTEDESTRDLLRSRRFAVQQQTMIRNHITSFCKRYDLNYQRDTGRKSRWTKSFHEWLDAQSNKLEHSAAKVNLRILIKQHQEITTNLEIFDSEIEHIAQSDRYREPVKALCCFKGICEFNALVFASELGDIKRFDHPRRLTSYAGFDIVEYSSGGKEKKLHISKKGNAHVRRAAVDACTFTMKSIAVGRKLRERREGAKKEYIEISDRCTTRLYKKGQRLLHAGKNKNKVRVACARELLGFIWEALKAAA

SEQ ID NO: 42335 - protein, 399 aa, unidentified
MTCPFVIARRRPGSKNWPDQDLDRQAHLACPITVLPNSEPDRNPTPLPEEEKRSEHVSESVDVVIGVDTHKHTHTAAVVRAATGAELDYRTESANRDGYAALLAMADEHSTLPVWAIEGTGGYGAGLARHLAERGEVVIELDRPKRPARRQGAKSDPLDAVRAAREALAREHLGQPRSRGQRAALSVLITVRAMAVEAAGDAQRQLQSLIVSAPDHLRERFTGMTTHAIVTTASKLRINDNWNLESRVTARALRAVARRCDHLTREAAEHEREILSIVRDWRPDLLDKRGIGPIVAANVLCAWSHEGRCRSEAAFASLSGTAPIPASSGLTTRHRLNRSGDRQLNRAIHVIVIARLRTDPATRAYAERRRSEGKTNREITRCLKRYVVRQLFKQLERPT

SEQ ID NO: 42336 - protein, 325 aa, unidentified
MERPAIGIDVSKETLDVSVVTGGKALGKQFANTEQGFAQLIAWLAHRKLGRVHACLEATGRYSLGVALALHAAGHIVSIVNPAQIRDFARTKLGRNKSDKADAGHIRAYGELFRPPAWQPPSPALRRLCELQTMRAGFLASRIEWQNRAASLGHDAAGRALAEATIAHFVTQIAAVEQAIAQTIDSDDDLRGKRGLLLSIDGVGRTLAALVLAELPAPEVLGSSAAAVAYAGLNPRQFQSGTSVNRPSRISKIGNAVLRAGLYMPALAAMRHNPAVAALAARLRAQGRLTRKQILIAAMRKLLVICFGVLKSGRPFDPALAMPPL

SEQ ID NO: 42337 - protein, 307 aa, unidentified
MAESVGVDVAKHTLEWCIGAEGKIQDARNEPRPIAQLVRQLVALDPVRIVVESTGGYERTLVTKLAEAGLPVVVVNPRRVRSFGQALGILAKTDAIDARLLAVFGEKVEPEVRPILQGRARLLADLVARRRQLVSMVVAEKSRRETAGAAVRRSIETMLRVLAQQIRELDRRIDAALGEDAESAELAALLQTVPSVGPGVARTLLVDLPELGHLGRREIASLVGVAPFARDSGRIRGMRRIRGGRASVRTVLYLAAMNAARFNPVLRALYQRLRQAGKPPKLAFVAVARKLLTILNAIARERIAWQA

SEQ ID NO: 42338 - protein, 314 aa, unidentified
MNTQGMVAGIDVSKDWLDVALGSESLRVANEAAGVSGLIERLQAMSVKLVVMEATGGYETQAASAIAGAGLKLAVVNPRQVRDFARATGQLAKNDRIDAHVIAAFGQAIEPQVVRLPDEQARELEALLVRRSQLVGMRVQESNRLALMQGAMRKQIKSHIAWLDRAIEEVNTDLTTRLRQSPVWREKDELLRSLKGIGPITSGTLMTGLPELGQLDRRSIAALVGVAPFNRDSGAFRGRRAIWGGRARVRHMLYMAATTAIRSNPAIKPFYERLIARGKPHKVAMVACMRKMLTILNAMMRSNTPWSPTFQGAN

SEQ ID NO: 42339 - protein, 411 aa, unidentified
MNSIGIDVSKGKSTVAVVRPFGEVVREPFDVAHTSKELSELVGYILSLEGESRVLLESTGVYSAPIATVLCEAGIYVCVVNAQLAHGYSNFTIRHASTDKIDSLKLARLCLDKWTMLERYTPQNELRKTLKIYNRQLSEYSKIKTMLKNNLISLLDQAFPGVNELFTSPARETDGHEKWIDFVGHFWHSVCVSELSQRTFAKHYEKWCRKNDYNFSEGKADEIYLFASEHFVTLPKNDFTKTLIQQAVMQLNSLCEIVSALKTQMNHVASQLPEYVTVVAMYGVGRVTASQLMAEIGDVRRYPKRTSLARFAGIEPPEKQSGTYNQRSRRISKQGSPHLRKSLFMVMTCILQKQNADEPIFQFLDRKRTEGKPYKVYMIAGANKFLRIYYARVMECLRVTQQPCVDNSVAA

SEQ ID NO: 42340 - protein, 422 aa, unidentified
MFAESTDDEQVIARVAALDIGKAELVCCVRIPAAGGTKRRQQEISTHSTMTRSLADLANHLVDLRIERVVMEATSDYWKPVFYLLEAHGLEPWLVNARDVKHLPGRPKTDVLDAVWLCKVAERQMLRPSFVPPRPIRKLRDLTRYRVDLIEVRTAEKNRVEKLLEDACIKLSVVASDIFGVSGRQMMAALIAGERDPAVLAEMARTAMRRNIPALREAFTGHFDDHHRFLLAQMLGRIDGLDADIARIEEEIETMIAPFAQAAERLDEIPGIGPVTAAIIVAEVGLDVSRFPTPGHLCSWAKVSPGIKSSAGKTKGNGSTGHGNRYLARVLGETAVVIGRSDTFLGERYRRIARRRGKKKAIVAVSRSILVIVWHLLADPDARYVDLGSDHYARHVNTESKKRSHIQQLEALGYRVTLEPAA

SEQ ID NO: 42341 - protein, 361 aa, unidentified
MDPSEQQPMTTAGLDLGDKYSYLCLIDSQSGEVIEEGRLRTSPEAFRRRFSSEQPPMRIAIEAGTHSPWASRVLEECGHEVLVANARKLRLIYVNKRKTDEVDAENLARLARVDPKLLYPLKHRGEESQAHLAIVRARQALVGARTQLVNHVRGAVKSFGARLPKCPARSFHNKAPEHIPEALLPALGPVLEQIGSLTERIKDYDRKLETISEDHYPETKLLRQVEGIGPLTALTFVLTVEDPHRFKKSRAVGAYLGLVPATDRSGDSDPQKRISKEGDEMLRKLLVGSAHYVLGPFGKDSDLRRHGEKVASCGAKNAKKRAVVAVARKLCVLLHRLWVTGEVYEPLYNTHRRQEQQEAAA

SEQ ID NO: 42342 - protein, 353 aa, unidentified
MEKAQSCSEIILGVDTHLDVHVGVVIDASGRVLGHLSVCTNTDGYKQLLCWAQTFGVLRRAGVEGTGSYGAALTHLLQAEGISVIEINRPDRSRRRGRGKSDATDAESAARSVLAGDAKSTPKTHNGLAEGLRTLNLVRRSAVKAKTQTINQIRGLLVSAPQGLRDAVYKADAAKCVAACAALTHDTVLGALNSLQTALRVLAKRWTALHDELRELDAELARLTKKAAPRLLSRFGVGPQTASTLLITAGDNPSRLRNEAALAALCGTSPLQASSGKVHRHRLNRGGDRQANNALWTIALVRMRGDARTRDYVAKRTREGLSKKEIHRCLKRYIVRELYPLILADLKDSASCA

SEQ ID NO: 42343 - protein, 369 aa, unidentified
MGEYSEAFVAFDVAKIKHAVAVAEGGRTGEVRFLGEIENREGPIERTVKKLAGRHGRLHFCFEAGPTGYGLYRQLRALGHDCMVVAPALIPKRPGERVKTNRRDAVTLARLHRAGELTGVWVPDAVHEAVRDLVRAREAAADDLRRKRQQLLSFLLRHSRIYSGSGHWTLAHRRWLANQAFEHAAQQIVFQDGIDAIEDAIARRRRLEEQLIAIMPSWSMAPVVEAYQAMRGASFLVAVTFAAEIGDVRRFDNPRQLMSFLGLVPAESSTGDTVRRKGLTLAGNRRARRALVEAAWTYRYPARVSETLRARLEGLPKAVRDIAWKAQIRLCARYRRLSATGKKLPVVVAAIAREMAAFLWAIGREVTPG

SEQ ID NO: 42344 - protein, 392 aa, unidentified
MVVSVGIDVAKDKHDCFILNSEGEVLADVFTIPNNMDGFNCLLQTIRDCTTPQDIIKVGLEATGHYSYNILGFLLDNGLATYVLNPLRTNLYRKSLSLRKTKTDRVDARTIAAMLLSDIGLKPYTDTAYHNEELKSLTRYRFNKVKERAKLKSSVSRLVCILFPELEKLVPTLHGASIYALLEEFPGAVQAAGAHLTRLKYLLSDASRGRYGRDMAVEIRDAARNSIGSRMPAKSLELQHTIRLIRELDAEIEEIETAIQTIMDEIHSPITTIPGIGYRMGAMILAEVGDFSRFESPDKLLAYAGLSPSTYQSGQLKNCYPHMEKRGSRYLRYAIYNAAKYVCLWDPTFAAYLAKKRAEGKHYNVAISHAAKKLVRLIFALEKSRQPYNLAA

SEQ ID NO: 42345 - protein, 424 aa, unidentified
MNLTQNAKLNQVTADTLIVGVDIGSSLHYARCFDWRGVELTKRVFKFSNDHLGFMTFVQWIKEMLSRTGLKTPLVGCEPTGCYWLTFQNFLNKQKIKLVIVNPFSVKRVKELDDNSPEKSDLKDPKTIAGLVKDGRYSTAYIPEGVYAEIREASVCRDQIMKQHVRLANQIQGWLQKYFPEYLECYENYDSTSGLMLLQHAPLPQDIIKLGAGGINEIWRNAKLRGAGIKRAKTLVEAASNSVGLQGGEAARLEIWILVGDYISKKQQLERLDKYLEEQVNKVPNVEKLLAIKGVGNSTVIGFIAEVGDIGRFTDPKQIQKLAGLEITKCASGKKKGQPCISKRGRRKLRRTMYESARSLINWNPAFQDVFLYYRNRERKPLGGMQAKIAVSCKAIRIFYTILTTGCDFDEERFRKDIIRPEVA

SEQ ID NO: 42346 - protein, 475 aa, unidentified
MNNKGKKKKKQVITANIFEQQELLAKVEEIKSNLKASTWRELETKGKFSKNEKLTFISDDMLILGCDIGSETHHVRAIDTRGRELSKTVFTFSNNSDGFHNAKEWAIELAAINDKTQIVLGLEPTGHYWFCLATWMVANGISVVQVNPYAVKQTKEIEDNSQLKDDTKDPKLIANLVKDGNYGMPYLPEKLYADLRRLSMFRDQLTEDRIRALNRVHREMKIYFPEYKDAFGKINGAFCLEVLKQAPFPEDLKALGVEGIRDIWHAAKLRGRGYSRAGKIFEYANESVGLKDGAGVSKEAVKWFVKKIIEIDEQLSEIENQMEEKCLKIPHTGKILEISGIGENTLSGILAEMGDISRFDNVKEIQKLSGLGLVACSSGKHKGKTKISYRGRKRLRYWLFQAAKSLVAHSEAFKELHSYYTTRPENPLKKMQSLIVIACKVLRVIYTILTKGVKYDPKKMLMDIRRPGKQEALAA

SEQ ID NO: 42347 - protein, 350 aa, unidentified
MKIVGCDFHPSYQQIAVLDTETGEVLEKKLMHGNGEAEKFYRELQGPALIGMEATGNARWFELLVQKLGHELWIGDAAKIRASYVRKQKTDKRDAAHILKLLVEKRFPRLWVPDGQQRDIRQLLTHRHKLVSVRTRLKTELQHLALNQGVQKKRQLWNEKGRALLASLPLQGWTQQRRKDLLQLLEVVEPQIVQLDKAVEQTAKTDAQAVLLMSQPGVGPITALAFSVTIGDVSRFERSKQVSSYLGLIPTEHSSGSKRRLGSISKQGNVFLRALLVEAAQSVVRHDPGFRKEYQHRCHHKEKGIAKVAAARKLAVRLYWMLKSNKSYSELVLNGGSPRHPVAAKAKPLT

SEQ ID NO: 42348 - protein, 427 aa, unidentified
MNHPTTDFAATIGLDWADQKHDLWLRPSDGTKAEHLRLEQTPEALHEWVAKLGARFGRRRVAISLETSRGPVISAFLAYDFIVLFPINPKALKDYRAAFSVSGAKDDRTDAMLLEEFVRLHRDKLRALEPDTQLTRKLGGLTENRRRLVDERTRLANQLHSLLKTYYPLAETLLDGQMTKPMAADFLLRWPDLSTLQKAETKMLRAFFYQHNSRGAKKMEARLDAVKKAQPLTTDEAILAPARLLATALAGMLKPLHKAVASLDQAIAQALDQHPEATLFRSLPGAGPALAPRLLVAFGTQRNRFASADEVAQFYGLAPVVKQSGNTKTTHMRSRCPKFGRQTFHENAGCAFKQAPWAREYYDGHKARHEGKHHQACRALAYKLIRIYYACWKHHCCYDPQRYLQALEKHGSPLHKKLQTPNPKISE

SEQ ID NO: 42349 - protein, 344 aa, unidentified
MDHFGGLDVSVKETSICIVDDTGRIVKEVKVASEPAALLKVLGNPIYRFKRIGLEAGPLSQWLFSALAESELPVICVETRHMQAVLKAQINKTDRNDARGIAQMIRAGLYRPVHVKTLRSQKLRMMLTHRKLLQSKAIAIENDLRGTLRNFGLKVGMVGKVRFEARIQELVENTPDLAALVEPLLIVRRVLREQIVILHRRLLAIVREDEVCRRLMTTPGVGPVVALTYRATVDVPARFRKSKSVGAVFGLTCSRYQSGEIDWSGKISRCGDEMMRTMLYEAAQSMMHSKKWSWLKAWAMQIARRRGMKKAIVALARRLAVIMHRIWVDGTEFRWTREQAAAAA

SEQ ID NO: 42350 - protein, 345 aa, unidentified
MVTIGCDVHLKTTTITVLDHRGTKIARKKLENDPEQLLRFVRQFHGEKRLAMETCYNWPVFYELFKNEVSDFRLLHARKLQSIIASQAKNDTNDADVIAYLVHSGRPLTESYVADIHTRGFRRLLRTRVGFSLDITKIKNQIHAVLNAHTFYSQRPKTFKDLFCKRGLAYLKTVDLPEQERFILERSIDKIAELERRRDEFDERIRSVNFHHKDLKWLQTVPGMRGDILKYIILAEIDNVHRFRHARGIVAYAGLIPRDKSSGEKQRYGGLRSECNQFLRWALLQAVLHAIRQDEGMKVYYKEVKKNNRNNSSAARIATARALLKAIYWVLKEQRPYREHVVHHA

SEQ ID NO: 42351 - protein, 412 aa, unidentified
MRRVIGMDIHRTFAEVVIWEQGRLRRAGRVDMTRTALEGFGKTLQASDEVVVEATGNTMAVVRVLSSFVTRVVIANPLQVRAIAHAHVKTDKIDAGVLASLHAAGFLPDVWTPPAETERLRRLVARRNQVVRHRTRIKNEVHSILHAHLVSRCPHADLFGRLGRAWLRRQVLPADEIEAIDRHFRELDRLAEDIELLDREIAQSGLEDPSIKRLLTIAGINVTVAAGLVAAIGDIRRFSSPQKLVSYFGLNPRVRQSGLGFAQHGRISKNGRSHARAMLVEAAWAAAKAPGPLHAFFVRIRAKRGHQIAAVAVARKLAVLCWQLLTKEADYLWARPALVAKKIRDMELASGKPKEKGNTPGPAHDYNIKTLRNLEMKVAENAERAYEHLVGAWQTRRPKHEVRGRPKTARHE

SEQ ID NO: 42352 - protein, 429 aa, unidentified
MIMGFTKPIEHFKLQRKKVITLNTLYVGIDVSSKSNVVYLMLPNGDKLSNFSVANSHEGSTQLVKRIFSALSSHSLDTVLIGLESTSVYGDNLVYFLREDATLAPFNRKIHVLNPKQVKKFHDAYNDLPKNDYVDSFVIADCLRFGRINKEVYLGDYRYKALQNLTRARFFAVQNLVKEKQRFMNVLFKKYSTMTQEKVFSDTFSTTALAVYDEFESAEALANMDLHELTEFIIEKGKNRFPDPDAVAKAIQKAARSSYRLPKTVNDSVNQVLSISITSMKALESQIKEFDKAIKAQMELLPNVLISIPGIGPVYSAGIMAEIGDINRFDNQAALAKYAGLAWKQHQSGGFEAEVTRLIPSGNRFLKYYLCEATLSLVRCDKEYSDFYHRKYKEVNRCQHKRALALTARKFVRLVFRLLKDNRLYCPAK

SEQ ID NO: 42353 - protein, 341 aa, unidentified
MDRLYYIGLDIHKKTISYCVKRADGLLVSQGSVNAERKALCMWLATLPGPWMGAMEATMFTGWVYDFLLPSAVALKVAHPEMLKAITAAKKKNDRDDAEKICDLLRVNLLPECYMAPTELRELRRMLRYRNLIVRTAVTMKNKVATLLMEVGATYDKRRLHRKKYFEDYLEHVADVPDSVLSLLRLSRSNVEIFAAAQQKLIKLLRNNALIRERIMRLMTIPGVGEVLALTWILEIGEPTRFSSARQAISYCGLCSAQSESAGKEQRGPISKKRNKHLQAILIEAAKLAPQWNEQLAALHEKELLRGNRNRATLAVARKLVEFLLAVDRRDSGFEKKQQAA

SEQ ID NO: 42354 - protein, 324 aa, unidentified
MSKIKEFFGIDISKDVFDVVDASDKHHQFKNDHSGFKEFSKMLSEKSHCVMEATGSYYQGLATWLYDSSILVSVVNPLSVKRFIQMRLKTSKTDKLDAQMIRMYGESEQPRLWSPPSKLVIEATELHKLIELLVRQRAGLKNRLHALESKGITRSLVVTSVRRQIRNLSNEITDLELKLESVIKEYEPDLLTRLCSIPGVGKRTAIYLIVLTQGFEKFESSRQLISYFGLNPIIRESGSSVRGKSRISKTGDNQVRKLLFMCAFTACEHNKACREIYQRLTAKGKSKKLALIAVANKLLKQSLAIAKSGLYYDENYRSVNVTLG

SEQ ID NO: 42355 - protein, 337 aa, unidentified
MSVQAIRGGLDIAKRVFAFAAVNDREKIVIRKQLKRSEVLDFFAQLAPMEIGIETCGGSHYWGRELQKLGHRVKLIHARYVTPYRRKSKNDMNDAEAICEAISRPEMNFVAVKSEEQQMLLMIHRLRSQSIARRTAIINQLHGHLHEFGYVVSKGRHKMKRELREILSSDDFPALLSELVHDLLCALHREEERVDTYDKQIERLAKVDSVASKLINMEGVGALTATAVIASVGDPSVFKNGRQFAAWLGLVPKQYSSGGKQVLRGITKRGDVYLRTLLIHGARAVLLMANKERGKHCEWINRLRVSKPDNVVAVAFAAKQARMLWAVMMGKQPQPVL

SEQ ID NO: 42356 - protein, 387 aa, unidentified
MSTTSVSIILYVGLDVHKEWIVSAVLPADAERPTQVDKVPNEPKALRKYFARLADRGAIRACYEASGAGYVLQRAMREWGYPCEIIAPSLIPQRAGHQRKHDRYDATQLARLYRAGELTSIRIPTEAEERVRDLVRCRGTFQREVLRARHYVLKFLTRRGVRYTIGKCHWTRAHHTWLDSLSRGDGLIAEDRVVFQEYLALLGYARQRRDALDQEIERLAIAPALAAAVGVLGCFRGIETQAAMTLATEIGDWQRFATAGQMMAFVGLVSREASSGTTEIRGGITKAGNRHCRHVLVQAAWAYRHAPRVGAALARRQRGQPAAVITHAWKAQHRLHKLYQHLAYRKRPQVAVVAVARELIGFLWAAMRNCPAVSTATTAPTFTQEAA

SEQ ID NO: 42357 - protein, 427 aa, unidentified
MAYRIAGIDVHKKVLAVVVADVECADQYAFERRRFGSNPEQLRLLSEWLIEQQVEEVVMESTAQCWQPVWGALERYWRPSCQKQEGAGAMSGKLHLAQAQSNRGRRGRKKDFPDAERLVKRLVAQELVLRFVPDPEPRLWRTVTRRKLQMTRLHVRMQNQLESLLEEAPIKLSSFVTDLLGISARRMLQALADGETDPAALAALADKRLRATPAQLCDALGACTELNPVYRRLIKMALQELQFLEQQMGQLDQEIANLLRPHEDAVKRLAEVPGLGVDSAQQIIAEVGPTVATFPSDKPLCSWVAVCPGDNESGGVNYSHRSPKGSRQMRRILNQAANAAARTKGSIFEIVYRRQVARTGHNQAIGVIAHRLCQLIWILLHRKVRYEERGPAVTERSKRKRTARMIRELRALGYRVEVLNLQTAASM

SEQ ID NO: 42358 - protein, 379 aa, unidentified
MRTVCGLDVHKDSIFMCIKDCQGKKAESQFGVSTREIKRLSQELKKYYVTEVCMESTSIYWMPIWRLLEKDFHLLLVNPQFLKQLPGRKSDVKDAEWIATALLKDLVRESFVPDGQIQRLRQYGRRIQEINKDIVRCEQRIDTIFQRCNIRISNYLSNINSKSYRKVINALIAGESNADVLVKLIHGRTVNKHGKQAIRDALEGDVQQGDIDMLEQYTQVHDLLKKQKQQNIDSMISLCEEHYAEAFHILQSIPGIKAQSAAVVISEIGANMELFSTAAALVSWAGLRPRNDESAGKIKSRKITHGNKYLRKALMECAWGAARTKDSVFYNRFTHLASKKKHHNAIVVAVARKLLTIIWTLLSKNEKFDDYYHLKKNSL

SEQ ID NO: 42359 - protein, 323 aa, unidentified
MMPQHAQTTQPARHFGIDVAKDHLDIHCLEEKRSWRIANTAEAIQAFIRAHRALLQEALVVIDSTGGHEQLCCRLMAAAGCRVHVAHSYRFRSYVRSCGQMAKTDRIDARMLAQYGRERGCSLRLYAPQDRVQRRLRLLVSRREQLVQMLTAEKNRLQAPDNAPLAPSIRRLMQALEREIETIKRQIRRLLQRNEALKRRRALLLSIPGIGEVIAATLLALMPELGRIGNRQAAALAGLAPFARDSGRQRGRRRLGPGRLGVRRVMFIAAMVAVQQEGPLRAFYERLLARGKKPILALAATARKMLVIINARLRDMMAEAEPA

SEQ ID NO: 42360 - protein, 337 aa, unidentified
MSSNNIYVGIDLHKRSFSFVMLNSVGSRLKEGRYEVELGAVRAFASGLDARHHVALEPLNNSYWFLDQLRPYVGHIHLANPYKVRLIAESRLKNDRIDAWVLADLLRVGYLPTVYIPSPEVMVWRRLVANHIRLVRDRTRWRNRILDLVAGEGLRITVKDAFGKRGRMELDQLPLSSQSRQFVDDMLVSHDLLTSQLERVDTEIERVNDGDPICTLLRTIDGIASFTALAVRATVGEMSRFRSPKAFGSYTGLVPGYRQSGDKTYNGSITKQGASLLRWVLLQGVNHFKRKNERLERLYQRLCFRGSVAKARVAVAHAMARIIYHVWTEARPYYRSQ

SEQ ID NO: 42361 - protein, 342 aa, unidentified
MKKYFIGIDVSQKTVDVSFVESDFQRKPEYLAQYTNDKKGYSLMVKDLRTVLRGVSSGQWLFCCETTGGYDRPLCYWLVDQGLRIWRESALQIRQSLGIRRGKNDKADSMAIADYARRHPDKASLFTKPSEKLASLKDLYLYRHSLVDKAKSTKNRIKALDARGTAVSLSAKFIVRDSLSEIKRLEQSIKQCEQAMKDVIQSDVELEKNYRHLKSVKGFGHVVAVALMVYSGNFTNIPTANKLATYCGIATFRCTSGTSIDFRQNVDYLSNRKLQGVLTMAARCAIRHDNGMRTYYQRKTAQGKPHGVAINNVKNKLLHIAYALVKNDCDYDPNYVNEWQSI

SEQ ID NO: 42362 - protein, 410 aa, unidentified
MSNSLLVGIDVSLKDNKVRILHPDGTSLSKFVVFNSEPGAKSLSKKVVGIAEKNNLDSIVIGLESTSVYGDPLVYFLKQDTAVNRFNTKIHVLNPTQVNKFKMMYPDLPKTDDIDAWVIAEHLRFGRINKEVYMDERYKALQKLTRARFHTVQNLAREKNWFLNNLFLKFSSLAQEKIFSDRYGATSISIIEEFFSVDEISYMPIEELADFINKKGKGRFENPEKIAAAVQKAARSSYRLPKTVTNSVNQVLAVSFQAMNAYKEQLKIFDKAIEEQIKLIPNTLTSIKGIGPVYSAGIIAEIGDIHRFKDHAALAKFAGIAWTKHQSGNYTAANTRLIKFGNRYLRYYLIEATNKVRMHDHEFKRFYDLKYSQTPKTPHKRALALTARKFVRLVYALLHSNRLYTPPKGE

SEQ ID NO: 42363 - protein, 460 aa, unidentified
MNEYFIGIDASKGYSDFVMLNAKKQTVIDNFQLDDTFEGHAQLYELLHSFNKDNPEATIYAAVESTGGYENNWFQSLVTFQASLPVKTAHLNPLGVSHNSKADLKRNITDRISAKNVAEYMIAHSEKVSYQHQDSLASLRKQWGFITMLTKQSTQLLNQLESLVYNANPEILTYCKDGCPQWVLKLLSSYPTALRLSRAKVKVLARIPYISLDRAKQLIATAKKSVASASDKITEQLIVATVKQIVHLKKTIKVQSEVLANECQIPEVALLKTFTGIGDYSAIGLMLQIQSVNRFLTSKKLASFFGIHPEYKKSGDGTYKYRMSKKGRKEGRRVLFIVAMSAIQSNPLIRDVYQQAVERGMEKMSVMGLCMHKILRIVYGMLKHNKAFDPQVDLKNRQKKPSRQRKVGQDKDRRYQNFDSNAPISRRQKMKRKERKQSQNVINVEYGISEASVPSTQLAN

SEQ ID NO: 42364 - protein, 402 aa, unidentified
MHYLGIDWATDKHDLCLMADDGRVLSQFEITHDMAGFSKLYELLKTLPDIRINIERSDGLLVDWLVQQGADLYITPPHVLAHRRPTRVKDDKGDAFLLAYLLRLGDPDCRPYSRQSQIVTHLRQLARAYDRALAEQRRLSNQLIYNLRQYYPVALTLFSFVRSPLTLAFLEQFPSPQDAEKITYADLEAFLREQKYTHMHRLDLIYQRLHVPMPRASVQAGYVEHVKMLIPILRTLHYQKAALIREMKKVFLTHPEADWWLSFPGTKGPLTPARLLAWIGDDRNRFPTAASLQAVAGTVPITRRSGKSKSVEFRHNCSHPLRSAADDLARQSLRHSGWAKAYLQQQLGKGHSTPRAYRALANRWMKILWTLWQRGERYDEAVHVANRSRQGLPAIVPLAEAV

SEQ ID NO: 42365 - protein, 407 aa, unidentified
MEVFLGVDWAEDHHDLCLQDPSGAVVASRRIPDGLEGVQTLHALLAEHVEAPAEVIVGIETDHGLLVAALVAGGYQVYAVNPMSVSRYRDRHHASRAKSDKSDAKLLADLVRTDRHNHRRAIPDSELLEAIKVLARSHQNLIWTRQRLTNQLRSALREYFPGALVAFEDLRHHDTLAVLGKAPTPTQARRLTTAQIRAALKRGGRERNLDRRAAELHAVFAQPQLRASELVEDAFGVTTAAQTRIIGDLNEQIALLEAKLHERFDQHPDAELLLRLPGLGVILAARVLAEFGDAPNRYLDAKARRNYAGTAPITRASGTSDVVIARLVRNKRLFDACYQWAFCALSASPGARAYYDAHDPGPKTGKTARRKLANKLVGILHGNLTHHSAYDEAIAWQHWQVSQPGAA

SEQ ID NO: 42366 - protein, 352 aa, unidentified
MSDKISRHTLKPCDGKELLDLCERIRTRVARETKKRVEVVSCYEAGYDGFWLHRLLEAHDIRNYVIDPASLQVDRRARRAKTDHVDAERLLRSLIAYLRGEPKVWSVVCVPSVAEEDDRRLHRERSRLINERIQHVNRIKGLLAIHGIYDYQPLRRDRMQRLERLCTAADGRTLPPRIKAEILRELQRLELAIRMIKTIEAERDAIASAAKTETKHTSAKKIQHLAKIKSIGPEFATTLVGEVFYRSFDNRKQLASYVGLTPAHFQSGAMSRDQGISKAGNAKARTVMVELAWLWLRHQPESPLSVWFRERVGKLKGRIRRITIVAVARKLLIALWRYLETGLVPEGAALKV

SEQ ID NO: 42367 - protein, 345 aa, unidentified
MQPMYYIGLDVHKRTISYCVKDGSGTIHAEGTIPATRLDLNLWMKTLPQPWTAAMEATMFTGWIYDHLKPHAAALKVAHPLMLRAIAAAKKKNDRIDASKICDCLRCDFLPECYMAPTAIRERRRTLRYRNLLVRQMVQMKIKISALLMEAGVSYNKQRLHKAGYFRELLATNPDIDEGLCALLRLCRETVVRLQKMEGALVRSLESDSLLVDRVERLMTIPAVGPITALTWTLEVGDVQRFSSIKKAVSYCGLCGAEKSSANSMQRTPLSKQRNKYLQTTLIEAAKMAPRSSPELAMLYDKERQKGNANRATLAVARKLVAYLVAVDRRQKEFLTVERENRTAA

SEQ ID NO: 42368 - protein, 412 aa, unidentified
MEVVYPCCCGLDVHKKGITACVLWAGAKGKSRKEKRSFGTFTHDLLRLADWLAECGVTHVAMESTGVYWKPVWNILAEQFEVLLVNAQHIKAVPGRKTDQKDSEWIADLLQHGLLRSSFVPPRPIRELRDLTRYRVSLAQEINRIANRIQKVLEDANIKLASVATDALGASGRAILEAMLTGEQDSARLADMAHGKLRNKIPELKLALEGRMTQHHRFLLRQLFVHLRFTESKLCEIEQEIDRCMRPFQDAVIRLCTIPGVDRVTAWGLLAEIGLDMNQFPSSGHLSSWACLCPGNFESAGKRMSGKMRKGNVSLRRCLSQAAWAISMTKNNYLSALYRRIAARRGAKRAIMAVAHALLVIAYHMLKRKENYRELGADHFDRIDANRIRRSLVKRLERLGHKVTLEPLAQTA

SEQ ID NO: 42369 - protein, 333 aa, unidentified
MDRIKIGVDIAKNIFQAHGVEPGGRIVILRRLPRAKVLDFFASLPPALIGMEACGTSHYWARKLVAMGHEVRLLPPTAVKPLVKRGKKNDAADAAAICEALDRPGIHPVPIKSETQQGVLSLHAVRDQLVAERTGLICALRAHFAEHGVVVPLGKAKIKELEAHVADLPRHVAAAVAVLFRLIVNADVEIAGIEKLLLEHHRTDEASRNLATIPTVGPLAATLIAAKVGDPSRFKCGRDLAAWLGLVPRQNSSGGKERLGRISKAGDRAARRMLFLGAIATVHRAPPESWLGRLRARKPAKLCALALANKTARIIWAVLMRGECYRDSAPATA

SEQ ID NO: 42370 - protein, 377 aa, unidentified
MRKVRCLGLDVHAETIAVAVAEPNGEVRAFGIIPNTPEAVRKLVKKLGPADELRACYEAGPTGYVLYWQLTALGVRCDVVAPTLVPVKPGDRVKTDRRDAQKLARSYRAGDLTPVWVPDAAHEALRDLVRAREAAKTDQLRARHRLSKFLLRHGRRPPVGTKAWTQKYLAWVNQTVHFEQPAQEATLLDYVHEVDHVADRLTRLERAITDAVALAPPAMRAVIDALQALRGIALISAVTIVAEVGALTRFTRARQLMGYSGLGPREASSGGRTWRGGITKTGNAHLRRIVGEAAWAYRHRPAVGPLLRKRHAGLSAPVKALAWKAQHRLYARYRRLTGRGKRPQQVVTAVGRELLGFIWAIGVAVEAEHQTATPVAA

SEQ ID NO: 42371 - protein, 349 aa, unidentified
MEIDTIGIDLGKTVFHVVGLSRAGEVVVRRKFSRPQLLRFTANLGVRLIGMEACGGSHFLGGRLRGQGHEVRLMPAQYVKPYVKTNKNDYVDAEAIAEAVGRANMRFVPIKSDEQLDMQSLHRVRDRWVARRTSVINQIRGLLLERGIIFRKGRRHAEASLPAVLEDADNRLSGALRMLLSQLQSELRQLQSQIDEADTLIAKAAREQEACHRLMAIPGVGPLTATAVVASIGNGAEFRKGRSFAAWLGLVPKQESTGGKQKLLSISKRGNHYLRRLFVSGARAVLQCRDSQSSGLSAWLTQLASRMHSNVATVALANKMARIAWAVLAKSEAYRPPQLATSTEALACN

SEQ ID NO: 42372 - protein, 345 aa, unidentified
MEITTIGLDIAKRVFQVHGVDASGKAILRRKLQRAQILKFFQDLTPCVVGIEACGTAHHWAREITAVGHEVRLMPASYVKPYVKRGKTDAADAEAICEAVTRPTMRFVPIKTAEQQAVLMLHRTRELLVRQRTMLVNALRGHMAELGIIAPQGIARVADLVAVLMGEETTRVPPLARLALRELVTELEGVGNRVDAIEAAILAWHKDNEISRRLATIPGVGPITASAIVATVTYPAQFRSARQFAAWIGLVPKQNSSGGKQRQGVISKQGDRNLRRLLVLGATAVIRHARTQTSPGTAWLRGLLERRPVRLASVAQANKTARIVWALLTTGESYRAQAPGQTAAA

SEQ ID NO: 42373 - protein, 319 aa, unidentified
MEAPQVTFKQVVSRGCGLDVHKKVVVATIDGEGIKKQTREFSTVTSSLKELRDWLLEHKVTHVAMESTGVFWKPVYNILEPAGLTVWIVNAAHVKYVPGHKTDKKDSAWLCKLLLAGLLKPSYIPAKEQRELRDLTRYRTTLIQSNASNKNRIIRILEDANIKLSSVLSSTSGAVGTKLINKLCDGMEVTMQDIEEVYHKKLEATKEELYEACQGFVTEHHVYMLQLIRKEIADTEQTIESLNKRIKEVLSPYENALELLKKVPGISAKSVEDLVAEIGLDMSVFPTEKHLASWAGMAPGNNESAGKKKADEQPKETSK

SEQ ID NO: 42374 - protein, 337 aa, unidentified
MQTIAVVGLDLAKTVFQVHGVAVDGTVVVRRQLRRGQVLGFFQSIGPCLVGIEACASAHHWARELMAIGHEVRLMPPAYVKAYVKRGKTDAADAEAIAEAVTRPTMRFVAVKSKALQAVLMLHKTRDLLVRQRTMLINALRGHLGEFGIVAPQGAAGVQAALKALREEDQDLPDLSRAALGGLAEQLEHLGAEIGRLERRILEWHRQDETSRRLTTIPGIGPITASAMAASAPDPTLFRSGRQFAAWLGLTPRANSSGGKERQGGISKMGDSYLRRLLVVGATAVLRMARQRGREGWVGNLLERKKPKVAAVALANKTARIAWTLMARQEDYRPMTA

SEQ ID NO: 42375 - protein, 343 aa, unidentified
MEYYAGIDVSLKESSVCVVDSAGKVVREVKVASEPEALVRYFDELGLPVGRIGLEAGPLSQWLHAGLIAAGREVVLLETRHVKAALSAMTVKTDRKDARGIAQLLRMGWYRPVHAKSAPCKDIRALLVGRKLLQGKLLDVELSIRGILRGYGLKVGEVSRGRFEARIRELTAGHAILEAVIGAMLAARMALWNEFTRLHREMLKIARADMVCRRLMTTPGVGALVALTYRSAVDDPSRFGKSAATGAYFGLTPKKYQSGETDRDGGVSKVGDGMVRTALFEAAHIMLTRATRFSSLKRWALGVAQRRGMKRAKVALARKLGVVLHRTWVDKTDFRWTNAVAAA

SEQ ID NO: 42376 - protein, 332 aa, unidentified
MSVYVGIDVHRKRSQVAVINQDGEVLANRNVPNGVEPILRVIGGLPSGTPAAFEAAFGWGWLVELLEDYGFEPHLVHPLQCKAIASARLKNDKVDAAILAQLLRADLLPEAWIAPPQVRQLRALLRHRIQLVRLRTLLRNRIHAVLADHGHDRPAGYWSGPGRDWLASLDLPAVSAEVIADALALIDALESVIDRLDAEIRGHARSDPRVTVLTALPGVGPFTALVLLAEIGDLTRFGSARKLAAWAGLTPTVRGSDRTVRHGHISEQGSVWVRWILCEAAQTAKRSPEFAARYQAIARRRGKKIATTAIARKLLTRACHLLTDASSDGAPR

SEQ ID NO: 42377 - protein, 338 aa, unidentified
MAHLFQPPPILRFQGIDVSKATFDVAWWGDEPFPRMTNRSYPRTPEGVARWLAEVPSAVFPSAGVVMESTGGYCKELAGWILAARPELRVSIANPFMVKAFSRSLGSRNKTDRVDARVLARFGQERQPGAWVPLSPRQEALRDLTRTRTKLKATRVAYRNRLKGHVITSPIARRVQEELIACLEREIKAIEKGIKEACQQDPRLQHDLALLMSIDGIGLITASTVLSAVGDLRAFHRRGDLCAFLGVSPRQFQSGTSVHGKTHMCRIGSKHVRTALYMAAVATCRMKGPLGDYYRRLVAAGKPKKSALGALMRKLLVVMRAVLIQESPYQTQGRPISA

SEQ ID NO: 42378 - protein, 371 aa, unidentified
MKHNSIFIGMDVHKNSIDIAIAESGRTGQVRHYGKINGTLAALNKAVGKLVGKGDRAHFVYEAGPCGYQIYRHLTARGFDCAVVAPSMIPKQSGNRIKNDRRDSLMLARLHRAGELTAVYVPLPEDEAIRDLSRAREDAKSDEKRSKQRLLAFLLRSGHRYSGRSPWSQAHMRWLADIKMAHPSQQIVLQEYIDTINQCTLRLQRLTEQIRQLLPQWRLFPVVQALQSLRGVSLIVAVTTVAEIGDFKRFQNPEELMGFLGLVPSDKSSGEKIKHGSITKAGNSHVRRMLVEAAWAYRFRARVSRALLKRQEDLPQPICEIAWKAQLRLCARYRHFWAKGKVKPVIVTAIARELCGFIWAIAIKTDIPVVV

SEQ ID NO: 42379 - protein, 342 aa, unidentified
MEDHTTIAVDLSKSVFEIAVSQLPGRVSERKRLSRGQVMKFFANRPPATVLLEACGSAYHWARQIEPLGHRVLLLPPHQTRRYVLRDKTDGADANALLEAHRNEQIFPVPVKTLHQQALAALHRIRSGWMGARVARLNAIRGILRELGLFIPVGAKHVLPWLGTFLADSRQPIPGEFHSTLLALVAEVRTLDSNIRDAEKQLAATAADSPDATRYLTVPGIGLITATALVAFVGPLQRFRSGRRFASSLGLVPRESSSGLCRHLGSITKRGDPYLRTLLIHGARSVLLAASRVKRPDRLQAWALSVLHRRGYNRAAVALANKLARILWAVSVHQTDYHSSAA

SEQ ID NO: 42380 - protein, 396 aa, unidentified
MALIWAGTDIGKTHHHCVVLDGDGRRLLSRRVVNDESDLLALLADVLALSEDVVWAVDVADGMAALWTNILLNHGQQVFYIPGLTVNRASAGYRGMGKTDAKDATVIADQARMRRDLTVLQPEDELIAELRILTGRRADLAADRTRRINRLRGQLNGIFPALERSLELVNHGPIILLSGYQTPAALRRMGRRRLETWLRNRKVRGAGALAEAAMTAAEGQHTAVPGERTAAQVVQALAKEVIALNEQITEIDKLIASRFRDHELAEVIASLPGIGPLLGAEFLAATAGDLRIFRGPDHLASLAGVAPVPRDSGKVSGNLHRPRRYHRGLQRVFYTSALMSIRYCDESRRFYERKRAEGKRHIQAVLALARRRVNVLWALIRDRRCYQSQLSVTAAA

SEQ ID NO: 42381 - protein, 331 aa, unidentified
MMNASEMIFVGIDVSKDTLELALDDKSKTQCFNNNEQGIKQLLARINGVKNGDESVSVGAIVLEATGGFERQAAVALCEAGWPVMVINPRQARDFAKAMGYLAKTDAIDARVLSHFARTLHQSDRRERLLMKLPDAQQVALQALLTRRSQLITMRVAEDNRLAISHKSQRKSIETVRKVINKQLAGIDSNIDGLLQAHFADKLSLLKDFKGIGIGTQASLMAALPELGLLTHEQISKLVGVAPLNCDSGRHKGKRFTWGGRVDVRSMLYMAALSAVRYNSVIKPFYERLLAKGKPKKVVLVACMHKLLVILNAILKSGKKWNPLHLKTITA

SEQ ID NO: 42382 - protein, 411 aa, unidentified
MEVVFSRCSGLDVHKTSVMANVRIGHDDGRVEVVKETFGTTTNELWRLSDWLSKHGVTHVAMESTGVYWKPVYNVLHEQFDVWIVNARHLAQVPGRKTDDSDAAWIAKLMSFGLLERSFIPPEEQRDLRDLTRYRTRLLQEKSSAANRLHKVLEDANIKLTSVATDIQGVSVRLMLDALIADEQSPEAMAQLAQRRMRSKIPQLVEALTGRVRSHHRFMLQEILLHLDSLNQRIEALSQQVTKLTLPHAKLIERLDEVTGIGVRTAEIILAEIGPSVQNWSSAAKLACWACICPGNHESAGKRKSGKRRKGQRWLVTALVEAAWAASRSKDTYLASQFHRLRARRGAKRAAVAVAHSILTIVYHLLKDPTASFQDLGGDYFLKHNKEQEQRRALKTLRSLGYDVVLTPVTA

SEQ ID NO: 42383 - protein, 393 aa, unidentified
MSRIWVGVDAGKAFHWAVVLGAEGEVLLSRRVENDEADLSALLDEVLCFGLDEVLWATDQPGGGAALLLALLWERAQRVLYVPGVAVDRARDAHRGESKTDARDARLIAELARMRRDLAALEPGDELLAELKLLVAHRRDLVLDQARAIVRLRDALLGLFPGLERVLDLRTRGPLVLVSRYQTPDAVRRAGRKRIEAYLKRRGVRNASKLAQKALQAAQAQRAATPAEQVAAEIVRELAERALDLKERTAELDAELERRVLAHPLAEILLSLPGMGPVLGAEFLTAVGDPRDAFASAGHLAAYAGLVPAARDSGKRVGNNRRMRGGNKLLKKVLYQSAFSCLRHHETSRAFYDRKRREGKRHRQAVVALARRRIDVLWAMMRDEKRFDPSLAA

SEQ ID NO: 42384 - protein, 426 aa, unidentified
MTRGKTTRRCFGLDVHRDFAQVAIWQDGVVRQAGRFATTPEQVRAFADSLAPTDEVALEVTGNTWAIATLLASRAGRVVVSNPAKTRAIAEAKVKTDKVDSAILAGLLAADYLPSVWMPDAETAALRRQVQRRAHIVRQRTRLKNQVQAILHRNLVPRCPAADLFGIKGRVWLAEQQLPADEQAAAAALLRQLDFHAEELRLIDRDLGRVALGREDVRRLMSIPGVDATVALSIVAAVGDFTRFRTPEKLVCYFGLNPRVRQSGGQPASHGRITKAGPGHARGMLVEAAWAASKAPGPLRAFYQRVRARRGMQVAAVATARKLAVLCWHLMIKGEDYAFALPSLVAHKRRKLELRAGLPSHRGQKGKSATYSLKAVRAAERDLATQGEAAYRTMVATWQPTRRPVSKTSTRKKVAVGVDAGNGTRL

SEQ ID NO: 42385 - protein, 389 aa, unidentified
MSKLTKTETFFNNLNLTRDDDLFVGLDVHKKSYHVAMFLNDAPAIDFNMAAKPQKLIEKLKPVVPAIKNVVYEAGPTGYSLVRSLRKNKIPAEVIATSKTPRPAAEDSKTDRFDSKKLSEFAAKNLLRSIAVPTPRQEADRQLYRMRHRQARNFAKVKKQVKAFLLMHGIEEPKGLVHFSNSAVDVLREIHLIDTLRLSLDELLCDYDYYNSRIRKLDKSIAKNIDKGQLAIRMAILKTHPGVGPVVACQFATELFHYKDFNSNRQLYRYLGLSPMIRQSGQSCRTGSVNKAANSRLRSNLIQAAWRWVAVDIEARKCYYRICNNCGGIKQKAITAMARKLAGHLWAMLMKNEPYDPQKAKSKRNKELAFGHTNKIYHPPAEARFRLGK

SEQ ID NO: 42386 - protein, 413 aa, unidentified
MGQKTAEVELHYERCCGLDVHKDLIVACFRDGTKNTIREFGATSKELQKLAEWLDSVDCEMTVMESTGSYWKPVYNVLELLGIEAMVSNAREVKNLPGRKTDIKDAEWMARLLAQGLLRPSFTPDRDQRELREVTRYRKSLIEERAREINRLEKMLEGANIKLSSVVGDVLGKSSRKLLEAALNGEALTELTIERMINGKLRGNSALLVDAMEGVFSKTQRLLIKAVLEHIDDMTGRIADLDDIIRGEMEKYDEAINRLDGIPGIGISSAQAILAEIGLDMDRFPTAGHLAVWAGVCPGNNVSAGKSKSGKTRKGNQTLRTTLVQCAQSATLTKNSFFRAQYERLVVRRGKNRAKMAVAHSIVIAIWHMLKYGTEYNELGGDYYNKFNPEKKINMYLKKLAELGWVPPIPVVA

SEQ ID NO: 42387 - protein, 391 aa, unidentified
MIYVGIDVAKDKHDCFITNSDGEVLFKAFTITNNLDGFNDLYQKIETVMKDITKVKVGLEATGHYSYNLLGYLIDKGLPTYVINPLHTNLYRKSLSLRQTKTDKVDARTIASMLMSDVNLKSYSDISYHNEELKSLTRYRFDKVKERAKLKSSVSRLICILFPELEKLVPTLHMASVYALLSEFPGAKQVANAHLTRLTNLLSEASKGRYSKDTAITFRDAARTSIGSNMPAKSLELKHTIKLIKELDSEIDEIENEIKIIMDEINSPILSIPGINYRMGAMIIAEIGDFSRFDSPDKILAYAGFSPSTYQSGHLYGAYAHMEKRGSRYLRYALYNAAKYVCHWDPTFTAYLAKKRAEGKHYNVAISHAVKKLIRVIYHLEKTNQQYIKAS

SEQ ID NO: 42388 - protein, 424 aa, unidentified
MNLTQNDRLKQVTFDTLIVGVDVGSKTHFCRAFDWRGFELSHSVFKFSNTGMGFLTFLRWTEELMNKTEMKKVIVGCEPTGCYWLTFQKFLQDHDIQLVTVNPFTVNRSMELDDNSPEKSDLKDPKTIAHLVKDGRYSTSYLPSGVYAEIREASVCRDQIMKQHIRLSNQIQGWLQKFFPEYLECYADWDSTSGLMLLKEAPLPEDILKIGAGGINQIWRDAKVRAAGIKRAQILIEAAQNSVGLEAGEAARLEIWILVNDYILKAEQLKRLDEYLEEKVREVPNVEKLLAIKGVGMSTVIGFIAEVGDIGRFTDPKQIQKLAGLEIVKKSSGKKKGQPRISKRGRRKLRRTMYESARALMNWNPAFQDVFLYYRNRTRNPLGGMQAKIAVACKAIRVFYVVLQTGCDFDEEKFRKDIIRPEAS

SEQ ID NO: 42389 - protein, 414 aa, unidentified
MRIIYSNVAGLDVHKKTVVAAIIVQPAAGSWHQEKRTFGTMTTDLLALSDWLMSHGVTHVAMESTGEYWKPIFNILEDGFKVILVNAQHLSRVPGRKTDQSDAEWIAELMQCGLLKASFIPPVGQRELRELTRFRSTFVRERATLVNRVQKVLESANIKLGSVASDVVGVSGRLILAAIIEGQASPEDTAGLAKGRLREMREALTQALTGQVKPHHRFVLTELLCQIDNLDDTIARFDEEIVAYCRPFEQAVTLLDTIPGVSREVAEIIVSEIGVDMDRFPTADHLAAWAGVAPGNNESGGKRRSGRTRKGNKPLGAALNQAAHAAARTKNTYLAAQYSRLAGRRGKKKAIMAVSHSILVIAYHLIKRNEPYHDLGADYFDKRRPEATAKRLLKRLEQLGYEVSVQSAPLAVAA

SEQ ID NO: 42390 - protein, 337 aa, unidentified
MNTTEGCVWFHAIDDDGEVIVRRALRRRQMLPFFAKLEPCLVGMEACGTSHYWARELSGLGHRVKLMPPAYVKPYVKRGKTDAGDAEAIVEAVTRPTMRFVAIKSPEQQSILALHRTRDLLTRQRTQLVNMIRAQLAEFGIVLPKGIQHALKLVDRLLVGEVPDIPTLACKVVIALAEQIRDLEFRLGELEKELTASSRGNEMVKRLRTIPGIGPITASALAATVTDPHQFKSGRQFAAWLGLTPRANSSGGKERKGRISKMGDQYLRRLLVIGMTSQLQAARRKPDAHPWITSLLRSKPSKLVAVAMANKAARIAWVIMTREEIYRAAMPATEDAV

SEQ ID NO: 42391 - protein, 308 aa, unidentified
MPQNVIGVDIAKDWIDTHCLDSGRPGRLEMTPRALKAFARRCAGALVVFEASGGYERPLAEALGAAGVAYARINPRQAREFARATGRLAKTDRVDAEVLARMGRALELAPTPPPDPTRERLAALMARRDDLTGEAAREACRLRQARDAFVRADIASLIGILKRRIARLEAEIAALIKAHAPLAETEARLRSAPGIGPITAASLIARLPELGHVSRGAIANLAGLAPHACDSGQMRGQRRIWGGRKDVRTSLYQAAFIASRYDPALKALRKKLQDAGKPFKVAIIAVARILLTQLNAILREQRNYRPGA

SEQ ID NO: 42392 - protein, 346 aa, unidentified
MTIVEAGRTVIGGVDTHLDVHVAAALDPIGGLLGVESFVAAPQGYKAMLEWMGAFGTVSKVGVEGTGAYGAGLGRFLRRSGIEVIEVDRPNRQVRRSKGKSDFVDAVEAARAVLSGRAAGAPKSRDGEVEAIRALLVAKRSANHARSRALAQMRQLSYTGPDQLRSRFKGLSITDLVAQAAALRPRASGDPVLYATKVSLAALGRRVLALADEMTDLDELLTDLVTHCAPQMLDLYGVGVDTAATLLVTAGDNPERLRSEAAWAHLCGVAPIEASSGKVTRHRLDRGGDRDANQALWRIVMTRLAWDPRTRAYLERRTKEGLSKREVIRVLKRYVAREVFKYLPRG

SEQ ID NO: 42393 - protein, 330 aa, unidentified
MQKAQFTIGVDVSRNTLDIYCIEVGRHITIDNNSIGFKSFQSFCHSYGIDISQAIIVLEYTGGYEYKWLQYCQAKSIAYVRLPGLAIKRSLGITRGKNDKVDAMRIAQYADEKYKLLFPQKPVNKCILQLKELLNFRKKLVRENAGYKATIKERQHMYEVKGKDFIIATLIKKQKINEKLIEKTEAMIADVIAADNSLYTNYMLLKSIKGIGNVNAWMTIAYTENFTSFINARSYAVYVGVIPFDYSSGTSLRGRKKVSHVANKELKQELNQAAKAAIQWDPEIKAYAERKLKNKHYGIVLNNVKFKLILRMFAIVKRGENYVDNYTKAA

SEQ ID NO: 42394 - protein, 362 aa, unidentified
MSKTEETRRLCVGVDLHKTQFTVSALTEDGEVILQEEYRTTPDGYSEFIEEMHQYEEDYGCSIELAVETTGNARFFKNQMEKECFDVTVVNTNRFKVITCSTKKTDANDALTLAMYLQKEMLPEAHLCSQTSEEIRRMLKTRRILVQSSVKIKNQIHGMLLGYGIETNAAQFQSKRKRQELMNDLANHYYSDFTASSLEVMLNILDVLAEQIKDVEEQIESMVEDNEDVELLKTIPGVGKIGAATIASYTEDLERFDGDFKRFAAYIGIVPSVHNSNETVHLGHITKHGPQELRTAFVQVALGMIRLSKQTSNWRLIEDYRRKKTDKGSGRAIIAMTRKIARIVFVMLENREPFNPELMLSK

SEQ ID NO: 42395 - protein, 369 aa, unidentified
MEHPTEVFIGIDVAKARNAIAIADGGRDGEVRFFGEVDASLDAMRRILQRITAKYGVVHFCYEAGPTGYGLYRLIVEVGHSCMVVAPSLIPKRAGDRVKTDRRDAMMLARLLRAGELTAVWVPDAGHEAMRDLVRARAAAVETQRIHRQQVNAFMLKHGRIFPRKTTWGARHFRWLQEQHFDHPAHQIALQELVDAVRVAKERVGRIEAAIEEFLPGWSLAPVVRALQALRGVELIVAVTFVTEIGDMRRFDDPRQLMGYLGLVPGERSSGGTVRRGGITKAGNGWVRHMLVESAWTYRHPPRVGKAKLYRLEQTTPKVREIAWKAQTRLTARYRSLIAKGKKTPIVCTAIARELAGFMWAVAREVQPA

SEQ ID NO: 42396 - protein, 447 aa, unidentified
MQKKNVKMEVINLSAAGIDIGSRSHFVAVGQGSEDVKEFGVYNEDLIKLTQWLLDSDVKTVAMESTGTYWQNLYAILQAAGLEVILCNGKFTKNIKGKKSDVQDCQWIQKLHTLGLLSGSFLPDEATEQLRTYCRHRANLLEQAADTTRKMQKYLRLLNLRLDVVVKDVTGLTGLKIIDAICKGEINPQKLAALRNGNCKKSEEEIAKALQNNGRSDYLFTLKHEYLMYINLQSKIVECDDQIEKMLNQQINNDDDKKQHFIDKKVHKRINKNTPKNIDINLLCYQYFDGVDLLAIEGVSYSTVLTLMSEVGNGIHKFETAKQFASWLRLSPNNKISGGKVLSSKIPRGSNRLKIALRNAANAIGNLKDTALSNFFNRISHRKGRVSAISATARKLGVIIWNMIVKKMPYIPQTEYQFLDQKRKKITAMKKLIAKFELTTNDLNLQL

SEQ ID NO: 42397 - protein, 481 aa, unidentified
MKSRPPERGKITDHARRGHWNEMNRKQRREMMRKMQSEDLSLEVVHPDAAGIDIGNESHYVAVPPSRDRQAVRRFGCTTAELKAMADWLQQCRIHTIAMQSTGVYWIAVYDILEAAGLEVYLVNARDTKNLPGRKSDVQESQWLMKLHTYGLLRNSFRPPQEIRTMRTYWRQRNDLVRAAGAHIQRMQKVLTQMNIQLANVLSDVSGMTGQAIIKAILAGQHDPHKLAELRDPRVQASHAEIAKHLEGNWQEDLLFVLKQEQEGYEFCLQQMVECDRQLEQYLQQREDRSQGACLPKETRKGRLKKNKKGKPAFDLRAELFRMTGTDLTQIDGIDVMTATTVMSEAGWDMSKWETENHFVSWLRLCPDNRISGEKIIGRGRLRTNNRANIALKMAATTLRLSNTYLGAQFRRLRTKLGAPIAIKAMAAKLARLVYRMLRYGMKYADRGAAFYEVEHQRLQIKHLKWKAAKLGYQIVQAPSA

SEQ ID NO: 42398 - protein, 381 aa, unidentified
METLHSHCAGLDVHQKEIVVCVYIGTSDTELTKEIRTFPTFTKHLFEMLQRLEEIHITHLAMESTGIYWKPVFNILKDYFDITLANGQRIKNVPGRKTDVADAEWIAKLLRYGLIEKSFVPPADIRELRDLTRLLKKMIGNMTAEKNHIQKTLECSNIKLGSIISDVFGVSGRKLLIRLVEQGYVNSHEVEENIHGSMMPKASQITESLFGTLNPHQIFLIRQSWNHILFLEESIEQLEEKIDELLSPYPEQVELLLTIPGVKKHAAASIIAEIGVEMRQFPSAQHLASWAGLSPGNHESAGKKKSTRTPKGNPHIQSMLCEVAWAISRTRHTWLSGKYWSLAARRGKKKALIAIAHKVIKIIYHILDQRSGFIEYSKVLS

SEQ ID NO: 42399 - protein, 327 aa, unidentified
MSLCIVNQDGEVVLHRNMRAAPEPFLQAIVPYREDIVVCVECIFTWYWLADLCMQEGIPFVLGHALYMKAMHGGKAKNDKIDSHKIAVLLRGGMLPQAYVYPAERRATRDLRRRRMHLTRKRAELLAHIQNTNSQYNLPAISKKLAYKANRAGVAERFPEPAVQQSIEVDLALINTYDHLLTDLELSLVKTTKAHDAQIFYRLRSIPGVGKILALVLLYEIHDIHRFPRVQEFVSYCRLVKCAKESAGKRYGTSGKKIGHADLKWAFSEAAVLFLRNNPAGQKYLARLMKKHGKGKALTVLAHKLARAVYYMWKRDTAFDLDKFLKE

SEQ ID NO: 42400 - protein, 329 aa, unidentified
MKKDWYVGIDVSKKWLDVAIFVENSELKGYSHTQVGNNKSGYKELLEWLKEHDVDASTCMYGMEHTGFYSDGLQHFLDKKGYKYTMLEPAVIKHYPIQPREKNDRLDAAKIADYLFRFKEIIKFSRVPDKTMEELRNLHRERKFYVEDRVVYLNRKQVVGKEEAKRLDKIISLLDKQVESIEEKIRDIIRNDESLMESYLYLTSITGIAFVNAVNAIVITQNFTVFKTARDYASYIGVAPHTKKSGTTVRWKPKPYKHCDLTAKADISQAAKIAIVHDVELKRFFERKCNGKEDADTIRKAMNAVKFKLVLRMFAVVKQKHEYRQFTTK

SEQ ID NO: 42401 - protein, 434 aa, unidentified
MTLRIVAGIDFSTAWADVCLLASDGQRLVAHRRFPNSVPGFQAFKQLLLTTLATHSATALDISGEATGTYWLPFFLALAADPQLNAHHLRLFVLNPRWVAWHKRCYPDDNKTDARDAYYIADRLRTRPPDTPWQAHLPVRPLRTYTRYRFHLVQALAREKSFFCAHLFLKASAYRRLMPFSDVFGVTSRAILQQSAPLQVFTDRPTAELATELATISRHHLPDALASAAQLQQVAAESFPLPAALDLPQHRLLSGTLSYIAFLDSQIRQVEDWIAAELDNHPPIRQLMTIPGIGQACAAGIGAEICPVQRFLDGTKFDARRGRQRPRNLRDAEDAVAKIAGLWWPRAESGNFAAADRHLAKSGNAYLRYYLIQAADQLRRHAPEYRRFYGRKYREATKHHHKRALVLTARKSVGLIVGLLHRNEAYRSKGVQPT

SEQ ID NO: 42402 - protein, 487 aa, unidentified
MAKRNRSTFERLQRGEKLSRRERRQIERQLQAEEPGWEIVHRNVAGIDVGNESHFVAVDARQADQPVREFGSWTAGLHQMADWLKTCQVQRVVLQTTGVYWIPVQDVLEKAGFEVAVVDARGTKNLPGRKSDVQECQWIRKLDIYGLLRGCFQLPDSIRSVRTIWRLRQRWVEETGRSIQQMQKALTLMNVQLANAIADLSGQTGMAILRAILGGERNPWTLAKLRDPRIQASEEEIAHSLQGNWREDVLFELEQVLAAYDFQLQQIEKCEQQLEKYMKAQPTRPAVGPVLSQAAPGVEEAPKKNEKKARNTKPPRKNRIGFDLETELARVMGADLTVIDGIKLMTVQTIYSELGPDLSAFPSENHFASWLMLAPKRDVSGGKVIRHVWVKGRNRVANALRMAAETLKNSQSYLGARYRSLRGRLGAPKAIKAMARYLACLVYRMLTKGQDWVDRGAAYYEQRRQQREFIHLQHKAKALGLQLVPAE

SEQ ID NO: 42403 - protein, 381 aa, unidentified
MGNGKRREDPPSERHRCARVEMFSNHSKDRGSNMQVTTYGVDLAKRVFQVHWVEAQTGEVKRKMLLRQEVSEFFAQREIGVVAMEACGSAHHWGRLLTRLGHQVRLVSAQFVRPFVKTNKTDAADAQAIWEAAQRPEMRFVALKSEEQQAVLSLHRIRQQLVKVRTMQALQIRSLLYGFGIVLPKSWRALLLQAGPALADPTRNEVPQLLRGELLGQLESLRALTSRIQQLEQAIASYRGRLEDCKRIEAIPGIGRLSSTALVATIGDARTFRSGREMAAFLGLVPRQSGTGGRVRLLGISKRGDPYLRTLLIHGARSVITQGSRPGRTLEPWLQTLLLRRPKNVAIVALANKMARTAWALLAHGRSFDRGWSQALPAPAM

SEQ ID NO: 42404 - protein, 390 aa, unidentified
MLYIGIDIASKKHDCCILGDNSEVLTPVFTFENNAVGYGILLKSIRNHCHDFKDVRVGVESTGHYSNNLIAFLQDKGFSLTVFNPLQVNLYRKAQTLRKTKTDKADARFLAQILMSSEQPAYTPQTPEISELKTLVRHRSRMVSMRTKLKISVSRLVAILFPELPDAVSTIHQASSYALLLELPTAKAIADCHLTRLSNLLYESSKHRLGKDKAALIKNLAAKSIGTNSPAIGFELQQTIRLLNNLRIEINALDKQIKAIMIEIDSPILTIPGISYTLGSIILAEIGNIENFQNPNKLLAFAGLEPSTHQSGKYSATSTPMVKRGSSYLRWALLQAALLITQHDSTFKAYASKKEQEGKHHYVVLSHVGRKLVRVIFHLLKHNVPFETVA

SEQ ID NO: 42405 - protein, 355 aa, unidentified
MLYLGIDQHARQITISLRDEDGDVLMARQVSTRPEKIQEFFQRLTRDRLKSNESFMAVLEVCGFNDWLIRMLRNYRCHKVILIQPDERKNRKTDRRDAAALSELLWVNRSRLAEGKPVRGVRQVDAANTTEQENRRLTTLRKDAGRARTRIINRIRHILRRHNLQWEMPTKTFPTLTAIAWLKKLVLPEIDRLEMDYLLSDLKRVQQRIEDLEERIAERCGNSETVALLASMPGVGAFTALSLACRIGRIERFPRSHSLANYWGLTPGCRNSGENNQRLGSITKAGSSMARWLLAQVSYNVLRKDRRLREWRKRIKRRRGAKIAKVAVMRKLATIIWHMLRERKTYAACRELVTA

SEQ ID NO: 42406 - protein, 337 aa, unidentified
MNHIESTIEYSLGIDISKKDFHAAILRHEDRKIIAEKSFLNTAKGMKEHITWISKHCGKEMFIQACLEATGTYGDSVAIHLHKHLSKVSLVNPRAIKNFGAMQLRRDKSDKADARLIAQYCHNQQPSAWQPPSEAQAKTKALARRLSQLKCDLTRENNRLEATSDKATRIDIKDHLKSLTKRIAKLENHLEELIKNNPENKQTLDLLTSINGIGKKSGTQIISELPDLTNFPTGRELSAYAGVTPRHFQSGTSGKTRTPMSKAGNSQLRKHLFFPAMSAMRYNPICKEFAARLKAQGKPQIVIIGAIMNKLLHIIYGVLKHQKPFDPEYLKKHEKSA

SEQ ID NO: 42407 - protein, 381 aa, unidentified
MADIADIRTIYHWIAIDVARYWNIVLIETASGQRHRFKMSNTAQDFERLITFIQDLGGRARAGLEPTGDYHRALAYRLAQAGVEVVSISSVAQSRYREAMFNSWDKNDPKDAGVILEMLKQGRTQQYVDPMLAGHHDMQELSKTYYQISRARTRVQHSIVNHHIPLYFPEMHKYWSSTRSDWWVRFMIEFPTPAHVRQLSQEAFVAASWSIVGRKVNKQSKLEEIWSMAEHSAALPHMPESLAVETFRMTLRHFQQLTTLRAEIEQRAETVLCGNPDYACLKSLPGIGPIIALTILAEGGDLRRFGHHRQFLKYCGFDLAKTQSGMRRGRAQLSKRGNARLRLAFWMAGQVAIRLRETLSKINMNGISARTPVMPICAARL

SEQ ID NO: 42408 - protein, 270 aa, unidentified
MDNFYFIGVDVSKKKLDFCVLFEGKVLREEQVSNHQQAVARLIGELKNDLEMDNEQFLICAEHTGQYTFPLVCACKSVECKLWLENPSQIKYSSGMQRGKNDKVDAKRIAIYASRFGDKVKYYDRPSEEIERLKQLERERALYVTDLAKYKGQMYDQKDFMPAALYRKKTKRMKGLIQELQAAIDAITAEMEKIIGSTEVLARQMELLMSIDGVGKVVALNVIIETEAFSRFDNPRKFCCHAGVAPFSYTSGSSQHSKNKVSHRANKPYR

SEQ ID NO: 42409 - protein, 373 aa, unidentified
MTALAPSDRVHLATKRPGLGEGANVRFIIGCDFHPSFQQVAIFDNLTQEVRQLRLAHPQQAEEFYRSLQAPARVGTEAGGHNQWFQKLLVELGHELWVGDAARIRASYVRKQKTDRHDARHLLELLRQERFPRIWVPSAAERDLRQLLVHRHSRVRMRTQVKNQLQALALNQGLQKKRRLWTELGRAELEGLVLLPFAGARRTALLDSLDRLNQEIAVLDRQVERAALAHAGATRLMTHPGVGPVTALAVVLSVGPVARFRRAKHLASYVGLVPSEHSSGGKQRLGHISKQGSSFLRFVLVEAAQSAVRLDPAMKRQYVRLALRRQRAIAKVAAARRLLRRLYWMLRWECDYPALLARMQASPSHAVTRSAQS

SEQ ID NO: 42410 - protein, 317 aa, unidentified
MAVLGIDISKSDFHACLIDENRIGRRSFPNSQTGFSQLSKWLTNRKVVTVFACMEATGFYWEALALYLFEAGHEVSVVNPSRTKAYANSEILRAKTDSIDAAMIARFAQAQRPPLWQPPAPESRVLQALVRHLEHLKTIHGQQVVRLETPGLPLQVTASIEAVIADLRREITEIERAIRDHIDRHPGLKVRHDLLTSIKGIGDTTASLILAELPALDRLRSTKAVAAYAGLSPRALQSGTSIRGRGSICRTGNSRLRKAFFYPALTAIRYNPQLKAFADRLTLAGKPRMVVVTAVMRKLLVLAYAVLKSGRQFDPSF

SEQ ID NO: 42411 - protein, 348 aa, unidentified
MNATIVAVDLAKNIFELAVAGEDCRIAQRQRLTRAKFLGFFVQLAPCQVVMEACGSAHYWARRIAGLGHTVRLLPAHYVKAYVRRNKTDQADAAALIEAARCVEIREVPVKTVEAQQIQSLHRLRSQWMSTRQRYVNTLRGILREFGFAIPLGVNVAKDRIGAVLADSASEVPQALRATLAEMLQEIRLLEEKMLVVERQLNALTRADACVRQLREIPGIGTLTSTALRAVVGDIQRFPSGRHFASWLGLTPNERSSAEKRRLGKISKQGDTYLRTLLVHGARSALLAAHRAERAGHSLDRLRRWALHCERQRGHNKATVALANRLARIVWATWKHERAFDGNWSAAA

SEQ ID NO: 42412 - protein, 421 aa, unidentified
MKKSQRVVGFDCAEDEHIAVLLDSEGEFSRRSSVINRRHDVEELLAELILVIGPEAQLVVVVESKRSHGRVVADVAADLGCGVRQVNTVALNHFRDLEGQPRKDDEWDAYLAARMAYTKMRGAREVIETTEDERALSRLTRTHSRLVEDRTQHVSRLRAVLLELASEMLHRSWKGPKPNSKAMLYLLERWPGFEGLERARLRSIESILRRCRYGSRAVETAKLIKKVAQGITIIGEERSALTLELDLLVRQIRFCNESLADVDAKIARRVERDPVGQKLLEMQGNGPVTTGVLLSELLPVARISTEAQCATYSGVTPLARKSGKSLHNDKLIQGSNKRVLAALYASGVAAVKNSAIDRAYYEKKLRGYAGHPKPHVAAFIALARQRHKLIYKLMTTDARYDKEVLIASHLDRIEQERAAAA

SEQ ID NO: 42413 - protein, 343 aa, unidentified
MNEVITIGVDLAKNVFQVHGIDGLGAVIIGRQLRRSQMLPFFKKQPPCLVGMEACATAHHWARQLVALGHAVKLMPPKYVKPYVKRNKNDMADAEAICEAVTRPTMRFVEIKTRDQQSVLMLHRTRQLFVRQRTTLINALRAHLAEFGIVAGVGRSGLERLLKVIEDGEDDRVPAAARDCLLALRDQLEMVKGQVLDADRHILAWHRSSEVSQRLDDIPGVGPLIATALVASVPDPHVFKSGRDLAAWIGLVPKQNSTGGKDRLGHISKAGNRYLRMLLVVGALSVIRRAKQVGYTRRPWLTKLLQRRSTKIAAIALANKIARTAWAMMAHGTFYQEPQSEVV

SEQ ID NO: 42414 - protein, 393 aa, unidentified
MKLRKASGTPSLVNLFTATSAVMVWTAPYGIECARMRLLQSQTREPSVNQIIRIGMDTSKHIFQLHGVDSAERPVLRRKLRRSEVLAFFAKLPPTVIGMEACGAAHYWARELRKLGHEVKLMAPQHVKAYVKRNKNDGRDAEGLCEAMSRPTMQFVPVKTEEQQAALMLAGVRQQLIARRTQLSNAIRGYAAEFGLTTAKGLDKIEPLLTRIALDETVPALARELLAIHGQDYARLQIELKAIEVKLMAWHRANACSRRLAQIPGVGPIGATALVMKTPDPRAFRSGRHFAAWLGLTPKDHSTAGKTRLGKITRAGDEMLRSLLVAGATAVIQQVRRGRGRPSAWLLALLKRKPPKLAAVALANKVARIAWKLMTTGESYDGARMPGAQAFAA

SEQ ID NO: 42415 - protein, 425 aa, unidentified
MNYKQNEKINQVKESTLVVGIDIGSTTQYARAFDWRGIELGKVFPFSNSREGFESFKAWMQHLQDKYKKLDAIVGIEPTGHYWFDLGAYLEDEGILLVMVNPYAVKQTKELDDNSQSKNDRKDPKVIAKLVTEGRYSAPYTPDGVYADLRIMVANRKRLIREMTQIKNRFARWFAIYFPEYTDVFGDYEAQSSMLLLKKVCTPEAIVELGAEKINQIWRDAKLRAVGMKRATTLCETAKRSIGLKKGSSAARYEMKLLLEDYEYKKAQLDAVIEEIEKLCRKIPESEQMLAIKGIGVITVAGFLAEVGDVRRFESPRQIQKLAGLSLRENSSGKHKGQTTISKRGRSKLRAVLFNAAIPLIAKNPEFKSLHEYYTTRANNPLKKKQSVIAISCKLIRVFYAILANGVTYDAQKMLSDIHRQPQAA

SEQ ID NO: 42416 - protein, 406 aa, unidentified
MEVLHECCCGLDVHKKSITACIITSKGKEIRTFTTMTRNLIELVDWIKSNRCSHVAMESTGDYWKPIYNLLEPENLHPIVVNAQHIKAVPGRKTDVKDAEWIARLLRHGLVQGSFIPNREQRELKEVVRYRRSIIEERTREVNRLQKVLEGGNIKLSSVASNVLGVSGRNMLEAMINGERDTSILADFALKKLKAKKEQLKLALEGRLGPHQLLMMEKQLAHIDYLNELISELDEEIEKRMTPFTEELKLLDSIPGVGKRTTEQIIAEVGTDMSRFPTPGHLCSWAGMTPGHDESAGKKKSTKTRKGNKKLRSALTEAAKAASRQKNTYLSAQYHRIAARRGKNKAAIAVGHTILSLVHILLTRKQGYVDLGYNYFDERKKDILIRNSIKRLESFGLVVSVQEQTS

SEQ ID NO: 42417 - protein, 372 aa, unidentified
MEIVNPHAGGIDCGAQEHYVAVPPQSVESGEPFVRCFSAFTEGLDALVEWLKACGVTTVAIESTGVYWIALCQKLEAAGIEVFLVNARHVRHVPGRKTDVKDCQWLQRLHSFGLLSASFRPEDAICRLRSLQRHRLNLISTAGAEIQHMQKALQQMNLHLHHVVSDITGVSGLRILDAILAGQRDAGQLAKLRDHRVYKSTLAQMEAALVGDYRPEHLFVLGQSLQAYRFYQARIQECDAEIESHLQQLAQRFESSSALGAELSQPEVLNDAQSQNPQPAKRKVKRKPQANEPKIDLADYLRRICGVDLTQVIGLNVLSVLLIVSEIGVDMSKWRSAKAFCAWLGLCPRNKISGRKVLDTRTCKVINRVATT

SEQ ID NO: 42418 - protein, 387 aa, unidentified
MLSTNLQKQNDFTGQDFYIGLDVHKQSWYVTIRSLGIEVGHFTQGPGAAALHEYLARNFPGGHYHSAYEAGFCGTGAHEQLCKAGIDNIIVHAADVPCTDKQKKNKTDLHDSRAIADHLERGNLHGIYVLSQEQQELRSLFRLRECKVKDTTRANNRLKSFLMYYGIIIPETVSKRGDLTGRALAWLDLELRSSAGTIALQQYVAELNYQRKQLFELTRMLREQVMDHDKQTYANLITIPGMGSITVMGLMTELGDFRRFDDPDEYASHLGLCPWEDSSGDCIKTKGMQPRCNSHLRPLLIEASWHSIRRSRNLFAYYSKHAGGKNGKKAIVKVARKLAMIARGVATSGQPYHEDYQKKVQVERFSLGITKQHINKQPNYGRMPMPG

SEQ ID NO: 42419 - protein, 338 aa, unidentified
MKYKRIAIDTSKHVFTLHGVDEQERPVLRRELRRSQMEAFFGKQEATEVVLEACGGSHHWARVLGQLGHRVRLIPPQYVKPFVKRAKNDRNDAEAISEAASRPSMRSVAVKTVTQQADGIILKHREMLVGQRTQAINALRGHAAEFGVVAAKGTANVASLLIELAADVMIPATARAMFEQMAAHIETLDSRVAAVDAELAALHKANPLSQALAEIPGVGPLGAITMALTVEPANFASARHFAAWLGLTPKEHSTGGKQRLGKISKAGNERLRQLLVVGAMAVIRFAKPGSKSASAWLLKLLERKPRKLCAVALANKMARIIWAMMARGEAYRRKPVAA

SEQ ID NO: 42420 - protein, 345 aa, unidentified
MKITTVGLDIAKRVFQLHGVDAAGKAVLRRNLQRSEVLAFFKALPPCLVGIEACGTAHYWARQIRELGHEVRLMPPSYVAPYVKRGKTDAADAAAICEAVTRPTMRFVPIKTAEQQAVLMLHRTRDLLVRQRTMLVNALRGHMAELGIIAPQGIARVADLMAVLFGEDTTNVPALAREALRGLAAELEALDRRMKEIEVAIVRWHKDNEASRRLATIPGVGPITASAIVATITDPFQFHSARHLAAWIGLVPRQHSSGGKQRQGGISKQGDRYLRRLLVLGATAVIRHSRSKSTAEAGWLKSLLERRPARLVSVAQANKTARIVWALLVRGEAYRMPAAVPGGAA

SEQ ID NO: 42421 - protein, 351 aa, unidentified
MLMIGVDYHPSVQQIAFTDTETGECGERRLNHSDGEAEKFYRELKRRGVSVRVGMEATGYARWFERLLAELGFELWIGDPAEIKTKRVRKQKTDRQDAQLLLRLLLENRFPRIWRPSPENRDLRQLLWHRHRLVQMRTRIMNQLQAVAMNEGKRWKKKLFSAQGRAQLEELPLAPWASRRRHDLLELLDRLNPTIETLTAAIEQEAKRRPEVLRLMTLPGVGPITALAFVLIIGTPERFQCGKQIGSYVGLIPCEDSSAGRQRLGHISKQGNTLLRFLLVEAAQAAVRWDPDWRRRYLHLAMRRDRRISKVAMARRLGVRLYWMWRNGWEYSQLVKFGSHAGQPVHVHGVR

SEQ ID NO: 42422 - protein, 408 aa, unidentified
MANEATDVIVGIDTHTDTHHVAVITGYGKPLADREFLAVGSGYRKIVDFITSHGTVTAVGIEGTGSYGAELARTLRGEGLTVLEVNRPNRAERRLHGKSDPLDAYQAAQSVLAERGISVPKAKDGPVECLRILRTARSSAAKARTVAVNQIKGLLVSAPEGLRAKYRGLGTPALITALQRARPSGHVADPEYVTLLTLKALAVRYQSLAAEIAAADASLQEILDTYAPMLCDLTGVGTEVASQLLVTVGDNPERIGSEPQFAALVGAAPIPASSGKTTRHRLSRGGDRNANRALHHVVLVRMSSCSRTRDYVNKRTAEGKSKREIMRCLKRYVAREIYRQITDPQPAPTNADLRQQRNKLGFTINAAASHLNQWPSVISRLERGLIRNDALAATYRQWLAEQTPQNAN

SEQ ID NO: 42423 - protein, 431 aa, unidentified
MVNEVTRYAEFCQFRREIRGSNEHVIVGIDVAKERHRVFFGTARGRSLLRRLNIDNNRTGFERLIERTDQIQRQHGLTKAVYVVEPTGNYHKPLAHWLQSHDQMVVLVSNKAIAENRETLDGRWDKNDTKDSANVADLVSQGKCQFLQRPDADIRALRTLLSLREQLKKDEHAARMQVRNGLVAKYFPEFDRLWGSCLQENITLVHDCLSPRKIVEMGFDTFVRTVISRDRGSSQLRRLKRIYAAAEESIGCPMDEAVEYEARVITEHLSQLRQYIKETDKRIEKRCRPFDAYPLLRSIPGFGPFVASHVLGHIGDPFRFKGCKQIIRLAGYDLNAKRSGKRSDYAVPVISKRGNASLRYALYQAALVATCHNSGFRALYTRYLEGREKERGIRTKARVKLATKMLVIAWTMMKNGEVYDPSLLEVAIGLG

SEQ ID NO: 42424 - protein, 380 aa, unidentified
MDVHSKNYTLCAMEPTIGAEDRIFGEVQVAPDYKEVICFIESLKMKLGPDNKYSIECGYEAGCLGYTLYHQLTGAGVKCVILAPTTMLTQQGKRIKTDKRDARLIAQCLCYGGYHPVYIPTGEDDAVKEYLRMRDDHKLALKKLKQQINAFVLRHGHQYSGTKWTIRHVTWLKKLELAPMYRETLDEYLASCEEQEAKIERYDKRIEEIASEARYQENAKKLGCFLGIRTHTALSLIVETGDFKRFAKGNTYAAFLGLAPGERSSSENVNRLGISKAGNTHLRCLLIEAAKGICKGAIGHKSKELRSRQSGQPAEVIAYADKANTRLRSRYYKMIRHGKKKNVAVAAVARELACFIWGMMTGNISIRPTAGTSGPAASQG

SEQ ID NO: 42425 - protein, 356 aa, unidentified
MTISTKYIGLDVHKESISIAVRNSVGKVLMDCVIETKASTILQFIDGLRGDLHVTFEEGTSAAWLYDLLKPHVTKLVVCDPRKNKSMREGNQNDKIDARRLAELLRLNHLNPVYHGEHGLRTLKELVRSYLTVTKDLARVMTRVKAIYRSWAIPCSGKQVYARCHRAEWLGKITEPGVHRRAEFYYQQLDALRVLRQEARRDLLAESKKHKAWKRLCQIPAIGPIRAAVLLGILQTPHRFRTKRQLWNYGGLAIEMHSSADHRSVDGELQRSRKNVLVRGLNRNCNHDLKNLFKGAAAVASSKPGRFEKFYAALVAKGIRPEMARLTLARKIATIVLIVWKKGVSFDANHLKPQTV

SEQ ID NO: 42426 - protein, 391 aa, unidentified
MKSSHRIDTPAAGAKDGRLYVAFELSKSKWLIGILLSGESKLSRHLVPGGDTAAVLQLISKKRVQGEKKLGRPVRVVSCYEAGFDGFWLDRWLGEQGIENRVLDPSSIEMPRRARQAKTDRLDLERLMRVLIRHDGGEPRVCSVVHPPSPEQEDARRLSRERERLIGERTAHGNRIKGLLHGQGVRDVEPRRKDFHERLARARTGDGRALPDRLVAEILREHVRLKLIAEQIAEVEGQMKAEREAAAPDSRAARVNQLIELKSVGEVGGEGLVNEAFWRDFHNRRQVGAYFGLAGTPFDSGQSTREQGISKSGNGRARTLAIQLSWLWLRHQPDSALSRWYKERVGDQKGRVKRIAIVALARKLMVALWRYLTQGLVPENAIVRAAAPAGR

SEQ ID NO: 42427 - protein, 394 aa, unidentified
MCQQYKTEASMIKHNILFIGLDTHKTFTEVAYIEDQRGAKSTHLGKILSNKAAFKKLARQLQSKYPDATLHFVYEAGPCGYWIYRLLTSLHHCCYVIAPSLIPKKPGERIKTDKRDALKLAKLLKSEELTPIYVPEPEDEAVRDLSRSRETAMKDLKDAKYQLKALLLRNNINSKIKDNWSLQHLRWLAELVLPHPCQQIVLQEAVSTITERLKRLKRLDNELTHQVKAWRYYPVVKAVQAMRGVRLLVATGVIAELGDLTRFDHPRKLMSYLGLVPSEHSSGGKRHLGAITKCGNSRARRLLVEGAHSYKHNANISKEMQLRQEGLSKEIIDIAWQAQLRLCRRYNRLMHKGKHRNVVVTAIAREMIAYIWAISREVVLPVIDVKLRLARMPA

SEQ ID NO: 42428 - protein, 382 aa, unidentified
MSVHHHQGQEQSAIRTDLGAVFVSLELSRRTWLLTSLSPGVGEKMSKHAVQAGDVAGLLQRFAEFKRRAEARTGREFPIIVIQEAGLDGFWIHRVLESEGIESHVVDAASILTSRRRRQAKTDRIDGETLLRTLMAYKRGEPRVCSMARPPSPDEEDRRRLCRERKTLVSERVQHINRIKGLLFAQGVFGYEPLRKGCRERLDELRTGDSRPLPMHLKAQIVRELDRLEVVLAQLKTAEAERDVLLPAATPAAMLAQLKGIGPEFAAVLWSEGLFRHFDNRRQVAAYAGLAPTPWKSGLIDHEQGVSKAGNPRLRTAMVELAWLWRQNQPASQLSLWFRERDQRLGGRMRKTTIVALARKLLVALWRYTSAGVVIEGAVMKI

SEQ ID NO: 42429 - protein, 399 aa, unidentified
MSKKNTLVALDPSISYAVIGLDLAKADVAVAAVPCSDDEIGLIDRMDYESLYEQAAKLEPTLFAMEPCCGYSTIALRLESLGHQVKVISGNAVKHWVATHRSSQKTDLNDATALAKLALNDSDLRPIRVKNLYECRIASIQASRRQLSTQATATLVCFKSLCQSWGVVIPKGSKSIKKLTDTVDANVELLGIDVANTFKRLLENYKRLNAEINAMDKALQKLVQQDERGRLMQSVLGIGTQTAARLLVVTGEIVRFENSRSYVAYFGLAPRNIISGHCGTPDSRRRNQAVYNRGQGKVSRRGDKIARSLIIQGAGSIYMLNCKNQLQECQLKRWLDQQMASRKAYGKIIVSLAAKLLRIIWALLTRKEEFDIHKAGVSRSVLAAMEKPVQCEVTAESAV

SEQ ID NO: 42430 - protein, 570 aa, unidentified
MVVVGTDAHKYSHTFVATDEVGRQLGEKTVKATTAGHATAIMWAREQFGLELIWGIEDCRNMSARLERDLLAAGQQVVRVPTKLMAQTRKSARSRGKSDPIDALAVARAVLRETDLPLATHDETSRELKLLTDRRDVLVAQRTSAINRLRWLVHELDPERAPAARSLDAAKHQQALRTWLDTQPGLVAELARAELTDIIRLTGEINTLAQRISARVHQVAPALLEIPGCAELTAAKIVGEAAGVTRFKSEAAFACHAAVAPIPVWSGNTAGQMRLSRSGNRQLNAALHRIALTQIRMTDSRGQAYYQRLQDAGKTKRAALRCLKRRLARTVFQALRTVHQPSSEHTQPAAACHRSYCSSHLGEPPRLTDMTQKTRIQPLPPKRAGLLIRALYRIAKRRFGEVPEPFTVTAHHRRLLIANVVHEALLQRASRKLPPSVRELAVFWTARSIGCSWCVAFGAMLQRLDGLDVDRLTDIDNYATSSKFSDDERAAIAYAEAMTADPHSVTDEQVADLRARFGEAGVIELTYQIGVENMRARMNSALGITEQGFNSGDACRVPWAAPDVPSAESR

SEQ ID NO: 42431 - protein, 341 aa, unidentified
MQPTTISLDLAKHIFQVHGINAAGKVIIRKKLRRSELKAFFEKLPPCLVGMEACGTAHYWGRELGALGHDVRLMPAAYVKPYVKRGKNDEVDAEAICEAVTRPTMRFVPVKSAEQQSILMLHRTRDLFVRQRTMLVNSLRGQLAEFGLIAPQGIWRIPELHALAQNTDNSVLPEPARACAEFIMMQIEDLQAKIKAIERTLMARHRANEMSLRLATIPGIGVITATAMVATVVDASAFKSGRHFAAWIGLVPQQDGTGGKVHLGSISKKGEPYLRRLLVLGATAVVRYARNKPEFAGSVNALLARRPARVVTVAVANKLARIVWAIMRRGGSFRQRPLGIA

SEQ ID NO: 42432 - protein, 459 aa, unidentified
MRVTIGIDIACRAAHQASCADESGALIWSGVRFRTEAADLERLWARVPDAAEEVVVVMEPTRNAWVPLAAWFRRRGAGVVMVPSERSADLRAYYAKHTKTDRLDSRVLARLPLLHPEGLHRERGLGPGDALRRAVKLRSSLVHRRIAALHRLDALLEILGPAWIEALHSAMDKTALRFLAAYGDPHDVLRLGRSRLTRFCYRHSRGAWGEAKAAELIAAARATLAIWGADGLDYPSLAEDIALEARLALHLTDEIHEMSERIAVLYRELDPDGIVLSAPGVGPILAAQILGRLGDAGRFASLAGVRSYAGLVPREDSSGIALRSGGPTKAGDACLREALYLAANAARKSDPTLAARYHRLMVTGGKHHNSALCSVAAVLLTHIAACLRSGRPYELRDVDGRTITASEGREICTERYTVPPEVRTARRSLRRPQTMKGRDERVVTGVARRSKTAPVPVTA

SEQ ID NO: 42433 - protein, 338 aa, unidentified
MNYVGIDHHRQYSHMTMMDEEGQVLRSGRVPNLQSEIKKFLEGGEAMEAVIETGRSSYTMVDVLEELGVAVNIAHSNEVKAIARAKIKTDKRDSEVLVHLLRMNMIPEVYRRSQENRQAQRVLRQRSFYVSAMTALKNRVYAFLAQQREKIREVVARETNIFSEKGQKVLLGLDLVPREKNLLEALLKTYRHLETRIGESKAFVEKLYEESREAQLIRTIPGFGKYLSVLVAVEIADLTRFADPAHLHAYAGVIPSTHSSGDRTHHGKIIRAGNRWLRWAAVEAVWPAIRADFDLRCFYERLAHGKGANKAKVATARRLLTIIYKVLKEGRNYIAYPR

SEQ ID NO: 42434 - protein, 316 aa, unidentified
MQTPLVFVGIDVSKARLDVGLRPSDERMSVPYDAHGITTLLAQLTQVQPTRIVMEATGGLERLLLRALVDAALPVIVVNPRQVRDFAKATGQLAKTDTLDAQVLARFAEVIQPVLRVIPDAQTQELAALLARRRQVLAMQGAEQNRLDRAPDRVRKRIAAHLRWLRDELARLDEELDDLIQQSPVWRAREELLQSVPGIGPVMSRTVLAELPELGRLNRKQIAALVGVAPFNRDSGRLRGHRTIWGGRAPVRRALYMAALVATRWNPVIRLFYQRLRAAGKAPKVALVAAMRKLLTILNAMVHAGTPWQPVVAQDS

SEQ ID NO: 42435 - protein, 416 aa, unidentified
MNAVGIDVSSRKSTVAVLRPLGEVVCLPFDVTLDIAGLASLVEKLKALDGETRVVMEHTGRYYEAVEKALHEAGFFVCAVNPLLIKEYGANSLRRVKTDKADAVKIARYALDNWADLRDFTPMDAIRYDLKTLNRQFQLASKQRTASANNLIALLEQSFPGIRKCFDSPVRSDGTQKWVDFAYSFWHVDCVRKQPFPAFCERYRKWCKRHAYLFKLSNAEEVYALAKRAVVLTPKSKVVKVLVQEAANQLSSISRSVEVYRAEMDRLAAMLPEYPVVMAMYGVGKSYGPQLMAEIGDVRRFERKQALVAFAGIDPMPNQSGDKNVRSNKSSKRGSPYLRKTLFNVIRTYLQCAPQDEPVFQFLNRKRAEGKPFYVYMLAAANKFLRRYYAKLRDYFASLDTLQPVAPIPTILKAAL

SEQ ID NO: 42436 - protein, 387 aa, unidentified
MPEDAPRPAQAAIRTDLGAIFVSLELSRRAWLVTSLSPGGGEKMSKHSVQAGDIAGLLRRFAQLKEKARARTGRDFPVITIQEAGLDGFWIHRVLQSEGIESHVVDAASILTSRRRRRAKTDKIDGETLVRTLLAYKRGEPRVCSMVKAPTPEEEDRRRICRERRALVAERVQHINRIKGLLFAQGAFDYEPLKRNRRTQLEDLKTGDDRPLPVNLKAQISRELDRLEVVLQQLQVVEAERDALLEPASEASPAPAAMLSQLKGIGPEFATILYTEGLFRGFDNRRQVAAYAGLAPTPWQSGSVDHEQGVSKAGNPRLRTTMIQLAWLWLRHQPDSALSRWFQDRVQRNGGRMRKTTIVALARKLLVALWKYATSGVVIEGAVLKAA

SEQ ID NO: 42437 - protein, 317 aa, unidentified
MNFVGIDVSKTQLDIAERPGNKRWSAVNAEAEIGKVVEMVGALSPQVIVVEATGGMEVALVAALSQARLPVVVVNPRQVRDFAKAVGRLAKTDRIDAEILAHFGEAVKPKVRALKDEDVQTLTALVTRRRQVIEMLTAEKNRLGISPKVVHKDIQKHIDWLQARLENMDRHLDSAIRKNTAWREKDDLLRSVPGVGHVLSVSLITGLPELGTLSRRQIAALVGVAPLNRDSGLFRGKRTVWGGRAHLRAVLYMAALSGSRVNPALSRFYRRLVEAGKKPKVALTACMRKLLGILNAIIKNRIPWQADHATCPSPKNP

SEQ ID NO: 42438 - protein, 377 aa, unidentified
MTSLDASVIGGIDAHTDTHDAAALDARGRLLGTRTFPTTSDGNRALLAWLEAFGPVALIGAESTGSYAAGLVRYLRSRDVTVVEVDQPHAHTRRRRGKSDPIDAEMAARQALSGHATAIPKLTDGIVESIRQLRLARDSAVKARTAALNQITELIVTVPDELRAQLSTRKTTRGKTTLCSRLRPDLTRLHEPAQAAKLALRSLARRIAELDREITALDKRLGPLVASAAPRTTRLIAISTGHAGQLLLTAGQNIDRLRSDGSFAALCGASPIPVSSGRRDRHRLNHGGDRDANRTLHMIAVCRLRYCQRTRAYAQRRIAEGKTKQEIIRCLKRYIARETYHALCADLADLVQPPPQPTIAVTINCGAGPTGRTRRRT

SEQ ID NO: 42439 - protein, 396 aa, unidentified
MTDYDVYCGLDVGKSDHHAVALDQTGKRLHDGPLPNDERRLRALFDNLARYGRVLAVVDQPATIGALPVTVARACGVQVGYLPGLAMRRIADLHPGTAKTDARDAYIIADAARALPHTLRRVDVGDDALAELEVLIGYDDDLAQESTRLINRIRGLLTHIHPALERAIGPKLDNKAALELLSRHGGPTGLRKAGRRRLTATAVKHAPRAGARLVEAIMAALDEQTVTVPGTIAAETVLPRLADTLADVLRQRDILAAQVEEILDAHPLAAVLTSMPGIGVRTAARILLEVGDGSFFATPGHLAAYAGIAPVTRRSGSSIRGEHPARGGNKQLKRAFFLSAFAALKDPASRAYYDRKRAEGKKHNAALICLARRRCDVIFAMLRDGRPYQPRPLQAS

SEQ ID NO: 42440 - protein, 392 aa, unidentified
MEVQDETGRRLAKARLPEGISGIARLHGLVGRFLPEDSDPAEVKIGIETDRGPWVAALVASGYQVYAINPLQSARARQGNGVSGAKSDAGDAHVLADLVRTHSHQLRMVAGDSKEAGAVKVLTRMHQSLIWDRTRLVLRLRSSLREFFPAALEAYEDLDSPDVLELLTKAPEPSSAARLTRAQIAAALKRAHRRDREAKATSIMAALRTEHLTQPPLIAAAYGATVRALAALIATCNEQITALEGPVEACFGRHPDAEIYLSQPGLGPILGARVLAEFGDDPTRYDGARARKNYAGTSPITRASGKKKVVLARYVRNKRLTNALHQQAFSALSGSPGARAYYDALRDRDISYNAALRQLGNRLVGILHGCLKTRTRYDEATAWNQHTQRVAA

SEQ ID NO: 42441 - protein, 488 aa, unidentified
MKATKTPSVFDSQNLELRKLYEDAASPLAILCVALDYAKSKHLALCCDGNGDILKAPFPVRNNAEGIDFLVEQIEASARRRNIPKKHIFIGGEDEAPYVSNFISALRARGYLVVRVNAFEAQHNRNGRLASTDAIDLSGIARTMVSRRARTTTPPDDAVYVELREAARFRRILVRDLTAASNRIHAVVDQLFPGFLDHSRSRLTPFTEASLDLMAERFSTMEIARRKPAALAKFLHLRRVHDPEETAAAIIALAREALPPDPTRIAGLQRTLTGLVELHRCLKRNALDLRAESARMLATTPYALLTSLPGIGFVLAAGIAGELGPPEQLRSIESLCAYAGIVPRSYQTGGPDKPAVQGHVSNRCNRILKDWTVQSAQKLHLYGTPEIKDRITRWNANGQHGIYAAAKRYLRLVRALTRNGVPYLEPAARTAAADPQDITAGATAAWTILTRKWRTIPGGLDLIADSAHPIGFWRTTVTELHGIKLHVR

SEQ ID NO: 42442 - protein, 364 aa, unidentified
MQKMSTMQTSGKTIFKGQLTIGLDLGDRSSAYCVLDEAGEIILEQKLPTTPEAMKQTLGKMRRSRIAMETGTHSPWVSRLLKALGHEVIVAHAQNVRLITKSRRKDDRLDARTLARLARIDPELLSPVQHRSAQAQLHLTEIRARAGLVSARTALVHAARGLVKSYGERLRKCGTQQFRRETMSGLSAGLREALEPLLREVESLNERIQEYDRRIEKMAREAYPETALLKQGKGVGDLIAVTYMLTIEDSHRFRKSRDVGCFLGLQPGRRNSGESEPQMHISKEGDEYLRTLLVQGAHYILGPFGEDSDLRRWGQKLAERGGKNAKKRAIVAVARKLSVLLHRLWVSGEVYEPLHHSQVMSAVA

SEQ ID NO: 42443 - protein, 320 aa, unidentified
MNQVSTDIGVDVSKDELVVATYGQGPVVCLANRPAAIQRWLKELPPGCRIGMEATSTYHVQLAERAYAAGHCVYVFNPRQIARYLGSLRQRGKTDLLDARGIARFVHNETDQAHPFVPPTAEQRGIASLVRRRHLLVKQRAALLQSSHGEPWLQKALQPLLAEYRKLLSTLDVELERLLAQTPRLAEQRRLLQSIMGIGPLVSIALSQHLSQTDYRRSDALVAAFGLDPRPRESGCYQGSRKLSKQGHPEYRRLLYLAAQGACRAGLWQSERAAWLARGLSKTAVNCIIARKLLRIAFAVWRSGIPFDRNRIGQQACGRT

SEQ ID NO: 42444 - protein, 344 aa, unidentified
MYFIGVDHHKQVSVMTVLDEDGRELRNERVVNLRQHVLRFLDGYRPFTAVLEAGRASYVMADLLRELGGEVKLANPLQVKAIAHARIKTDKRDSRTLAHLLRADLIPEVYQRGEWNRRAQRVMRLRAYWVSRQTELRNKIRALLAQQREEIRLEVEKRDGVLFSQKGLEFLGGLRLPERDQLVLDDLLRGHREIRAHVKVTDGLVKALYGELEEAPRIDTVPGFAKTLSVLVAVEIADIGRFSRPADLHSYAGVIPSTYASGSRTVHGHITKQGSVWLRWAVVEAVTPAIKKDLALRALYLRLARRKGANVAKIAVARRLLTIIYRLLSDRRTYIPGLMKQSAA

SEQ ID NO: 42445 - protein, 402 aa, unidentified
MAGKTAGIDWASEAHEVCITDEGRVAERFSAGHDERGIAALAARLLKAGVARVAIERPDGILVERLLAAGIEVLAIHPNQVKAARPRFAVAHGKSDRFDAFVLAELARTDSHRFRPLVPDRDETKALKALTRAREDLVSARVELANQLRAQLETFWPGALVFGAVDSAISLAFLKRYPSPEDARGLGERRMAVFLQRNAYSGRTPAAELVARMNAAPKGTAGPAEGEARRVVVLSLVAALGPIVEEIAGLTRQIRERLAAHPDAEIFRPLFRDPKTVICPATLIAEIGDARGRYPTEAALAADAGMSPVALESGKLRVATFRRACEKRLRLAVATLADSTRHWHPWAREVYRRARARGQDHPHAIRTLGRAWIRVLWRCWRDRVPYDPARHGNFRQFQAAGG

SEQ ID NO: 42446 - protein, 347 aa, unidentified
MRFYTQQHQHYCGIDLHARSMYVCIIDQTGKILVHRKLPCDGDELLKTLKPYRTDLIVAVECLFCWYWVADLCDEQGIAFVLGHALYMKAIHGGKTKNDRIDSHKIAALLRGGTFPKAYVYPRKMRATRDLLRRRLLFARKRAELFTHIQNTNTQYNLPVLEERVRKTKDRGAVIEHFEDPVVQMSIASDVELLGAYDEVIRDMELYLIHEVRQDHNANFFLLRSIPGIGEILALTLLYEIHDIERFPRVQDFLSYARLVKGTHESAGKIKKSTGGKMGNVHLKWAFSEAAALFLRGNPAGQKYFARLEKKHGKGKALSVLAAKLGRAVYYMLLRSKPFDPKRFTAV

SEQ ID NO: 42447 - protein, 373 aa, unidentified
MPRYSTAFGMDVHLRSTTVCALDAETGEAVTRRFRGNPWGEVAEWMSGFPGPSLAAYESGYLGFAPQRELSALGVDCVVAAVSKVPRSAADLSSKNDRNDAARMAKAILSHDVTPVWVPSPEIEGLRDLAAAHDAATARLAAAKQQLLAFLARRGYVYGGTTPAGNPRKYWTYGFLRWLDGIRPADDGGIRALAALRNEVEAADETREAVLAEYRAAVAAGPLSAEVEALQSIKGCGFVLAAAFASEVGDFSRFRSGRQVTAYFGLAPKQRSSADSVRLGGISGAGNALVRRLAVEGSWRYAQAGHQPKLMPKGSGVPLEIRMHGRKGSERLLRRREEMLERGMPQAKANAATAAELVRWLWALGMMCREAGE

SEQ ID NO: 42448 - protein, 456 aa, unidentified
MEHYYLGIDVSKGYADFVMLDDKKQPIEENFQLDDTFDGHCRLYEILCTFCENHPKCTIYAAVESTGGYENNWFNALVKFQGTLNLRTARLNPLGVNANSKADLKRNVTDKISAQNVAEYMIAHHEKVSYQHHDQLASLRKQWGFINMLTKQSTQLFNQLEPLLYTANPEVLTYCKNGMPGWVLKLLMRYPTASDLSKAKVVSVARIPYISSARAQKLVTVAKRSVASSTDKITAQLIVETVKQILHLKKIIASQIDLMAKQCSVPEVDLLKSFIGIKDYSAIGLILEIQAAERFPSVKKLASFFGLHPVYKISGDGVGRFRMSKKGRKEPRKILFMVALTAIRSNPLIRGIYLEHTQKGMEKMAAIGLCMHKILRVIYGMLKHNMVFNPEIDWKNREKMYQSRTRLNKNKTRRYQDFDAKAPISRRQNSKRKEQKQSHSDNNTNNGIIASAPLSP

SEQ ID NO: 42449 - protein, 345 aa, unidentified
MNIRKVASRTTKGKGLSVEGFDHFVSLDWSMTVMAIGHMTRRSKEPTVIERPADLAYFKEYLSSLKGRTLLTFEETTTAQWLFVELLDYVTRILVCNPSHNRLLCHGPKTDKIDARKLCVLLRGGLLKEVFHSMDALYELRSLVSSYDDVVRAGVRFLNQRHAIERGHSDTRKNAAFILEHLDKSIQLYRETKELYEAKFIRFCRRHSSARRLLEVEGIGTVGVVKIMAIVVDAHRFSNRGHYLAYCGLVRNEKLSGGRSYGRRKPRYCHALKAVYKTAAMAALNGSDNPIRQYYQHLLDQGVAEHNARHASARYIARITYGMLKNGTRYEPYRWRNTLETRSVA

SEQ ID NO: 42450 - protein, 349 aa, unidentified
MLIIGCDYHPGFQQIAFVDTDTGELGEQRLLHREQAEQFYREQKQRNLPVCVGMESSGHSRWFERLLHELGFELWIGDAAEIRTKRVRKQKTDRQDAQLLLRLMLEHRFPRIWVPDAENRDLRQLLWHRHRLVQMRTRVMNQLHVVALNEGLRRKKALWRPAGRKELESIALAPWASRRRQDLLDLLDELTPKIQDLTSALEEEVEKRPVTRQLMTHPGVGSLTALAYELVIGTPERFHCGKQIASYLGLVSEEESSGERRRLGHISKQGNVLLRFLLVEAAQVTVRSQPEWRSTFFHLAMRRGRKIAKVAMARKLAVHLYWMWRQGLDYGQMHKFGSHAGEPGHPDGV

SEQ ID NO: 42451 - protein, 394 aa, unidentified
MFFIGIDVAKRSHQAAVTDISGNVIVKPFNFKNSSDGFTKFLSVVESNAIEKNDCIIGLESTGHYWYPLYFFLIENGFDVKVFNPIQTAAFREITIRKVKNDNLDSLLIADFTRFGRYSETYIPDENMLALKNLTRFRLSISDICGSLKKKVIAILDQVFPEYTGIFSDVFGKTSKQLLEQFSTPDEFMDISTTKLTNLLLKVSRGRNGREKAELIKTAAQSSIGISYALDAFSFELKQLLAQIEFMENQLSEVDAEMEKLLSQSEYGVITTISGIGPMLGSVIVSEIGDINRFENSSKLVAYAGLDASVKQSGEFNSSKNKISKRGSPYLRRALWMAAFMSLQCDPALYDYYSKLRARGKTHRCATTAVARKLCIIVWAIMKSKKPYSPVLKN

SEQ ID NO: 42452 - protein, 354 aa, unidentified
MEKYCIGIDIDKKTFKVCLLYRSSDLTKRVQGSKTFSNGKEGFKEFITWISKKIKVKGVPQSYVMEATGVYHEQLAYFLEGQGKNVHIALPLKSKRYLQSLGIRSKTDKIDAKGLGMMGCEQSLRSWHPSSPALLKLRSLTRQIESLQTHRTSFLNQLESANHAAIIDRMVIKSLKTMIKQVENQITKLEKQVKENIRMDEVLRRKYKLISTIKGVGLMSFAVVVSESNGFSLFKNQRQLVCYSGYDVVENQSGQRRGKTRISKKGNSHIRRILHMASLSSVNSDEIIFRNLYQRVVDRTGIKMKGYVAVQRKLLVLIYTLWKNDMEFDPNYEISGIQESEPLFSVAPAGASGV

SEQ ID NO: 42453 - protein, 343 aa, unidentified
MKDMMIGVDLAKTVFQVHGALRTGGEVQFRKKLTRKQFPVFMARQEPCLVIFEACGSAHYWAREMEALGHEVKLIAPQYARPFVKRQKNDAADAEAIVIAARQPEMRFVAPKTVEQQSRAAVFRGRERLVHQRTADVNALRALLYEHGHVFPVGTRHLNRMTALVEDEASDLPALIREECQDLLAQIAEKTARITERTMKLKTLAAQSDRARRLQTMPGVGPLTAVAVEAFGPDMAQFKTGRDFAAWLGLVPRQHSSGGKERLGRMTKAGQADIRRLLIIGAMSRLNWLGQRTITEGSWLSRMLARKPKMLVAIALANKMARQIWAMLTKNEDYKDPALAVAA

SEQ ID NO: 42454 - protein, 347 aa, unidentified
MMIIGCDFHPSWQQVSWLDTETGETGEQKLVHATGDAERFYRQMPVPSLIGMEATGNSQWFMELVEDLGHALWIGDAAQIRASYVRKQKTDKRDAGHIRKLLAEGRFPKLWTPDREQRDHRQLVMHRHKLVQIRSRVKNELQHLSLNKGMQKQNKLWSAAGQKALRELPLKPWAACRREDLLQLLAMLDQQIGKLDAAVQQAAEHNPHAKLLMTQPGVGPVTSLAFVLTLGDVSRFPRGKQVASYLGLIPREHSSGGRQMLGSISKQGNRLMRALLVEAAQTAVRYDPGFRKEYLHRCHQKPKGVAKVAAARKLAVRLYWMLRTQKPYPEIVRIESSPRRVALVGAS

SEQ ID NO: 42455 - protein, 377 aa, unidentified
MSIVMGIDQHRAQITAEWIDLVTGEVSRARVRPADRAGVRRFLARFDCTQLEVALEATTGWRFVVEELRAAGAEVHLAEPAETAALRGNKRRAKSDRADARHLRELLLSGRLPESWIATDHILDLRSQVRLRHTLIEQHTEWQQRIQAVLYHHGCPHRRGLMVADGRDWLAAQPLPEAAREQITVALAMLDALELQLAPLSRQLRVYAWAQTGCKALIDAYYGIGELCAVTILAELGDCRRFANSRDAVRYGGMDITVYQSDRHRAPGHLSRQGPPALRWALYEAAQVARRPSSPDRAYYEQAAERLGGNRACLALARKLLKRCYHTLRELGDDALAPPAEQTRAPAGSAAARRASSGSPRQVNAPASREANGALAA

SEQ ID NO: 42456 - protein, 385 aa, unidentified
MGDHSEAFVAFDTSKLRNAVAIADGGRGDEVRFLGEIDNTPAATAKLVRKLASKYERLTFCYEAGPTGYGLQRQVKSLGHECIVAAPSLIPKKAGDRVKTNRRDAVGLAKLLRSGDLTAVWVPDRQHEAMRDLTRARETAMLDLRAKRQQISAFLLRQGLHYPEDKRTWSKSHLNWLASQKFDIAEHRIVFEELMEAMRQAQGRLDRLEAAIRAAVPDWSLGKLVIALMAMRGLDMISASTIVAEVGDLSRFRTPRELMAYVGIVPSENSTGDKVKRGPITKTGNRRVRRMLVECAWSYQFPPRLSKDKQVKVDAVPQAVREIAWKAQSRLNQRYRALLRRGKLKNVAITAVAREFVGFIWAVAQAVGAAPAANNRTAPAPAPAR

SEQ ID NO: 42457 - protein, 408 aa, unidentified
MEVIHERCAGLDVHKETVVGCLRVRERGQVRREVRRWATTTAELLELGDWLRQAGCTHVAMEATGVYWKPVWHVLEGEFEMILANPAHIRNVPGRKSDVNDATWIADLLAHGLIRASLVPPSPIQELRDLTRTRKQLMREIVQHKQRIQKVLEDANVKLASVVSDVFGESGRRMLKAISAGQTDARQLAALGDGRLSASRETLAAALQGKVTAHHRFLLSQHFRMIEYLEQTVAEFEARIEAAVEPFRAAIENLVTIPGVSATAAHVIIAEIGVDMSRFAKVGHLRSWAGLCPELHESAGKVMSRRLRHGAPWLKTVLVQCAWAATRNKNNYLRAQFVRLRARRGSKKAIIAVAASILTTAYFLLRNQVPYRDPGALYFARIDQERTAQRLARRIKELGYEVQIRKAA

SEQ ID NO: 42458 - protein, 377 aa, unidentified
MSKIRFVGLDVHADTIAVAVAESGGEVRSLGVIPNRLESIRKLIGKLGPIGSLKVCYEAGPTGYVLYWQLTQLGVACEVIAPSLIPTKAGDRVKTDRRDGEKLARCYRAGELTPVWVPDAAHEALRDLVRAREAAKKDQLRARHRLGKFLLRHGRRPEGLKAWTKKYLEWIKTHVHFDQAALEVTLADYLEEVDHVAARIVKLEKAIDEAVQTAPPEIRAVIEALQALRGVAQTTAATIVSELGSVSRFQSPRQLMGYSGLVAREHSSGNRVRRGGITKTGNSHLRRVLVEAAWAYQHRPNVTGFLLRRQKNLALSDEVKKIAWKAQQRLHKRYRAFAARDKNKNQILTALGRELLGFIWAIAVHTEKQQKPLSKIV

SEQ ID NO: 42459 - protein, 385 aa, unidentified
MRSLTARCQSGVSCHSPAVRPVRTNPVTSTSGKESTHGYAGRVVELVIGVDTHKDTHTAAVVVAATGAMIQQVTVPAAPAGYRQLLKLAGQHQGQRVWAIEGTRFLQGHAEQVVELDRPKRAARRHGAKSDPLDATRAAREALGRDQLAQPRAAGHRAALQVRLTARRSAVQASTDAQRQLHALVVAAPDPLRGRLRSLTTHQLVIACGRLRLRAHWDIETTTFAASLRALGRRIQLFQAEIAEHTRAITALVRAWRPDLLGCCGVGPIVAAIVLCAWSHPGRCRTDAAFAMLGGAAPIPASSGQTVRVRLNRSGDRQLNQALHLIVLTRLRYDPATRVYAQRRRAEGKTNREIRRCLVRYVARQLYRILEANPGFDPTQERPTE

SEQ ID NO: 42460 - protein, 366 aa, unidentified
MRKLTCPVRKVNAQVIGFDLHKRLIVYCLLDRKGRELGTGRFAATAEAVEAFLAEHVGRKRTHFAFEASGCSQWIFDLLSARYPAERIHVGHARRISAIANSRQKTDEHDAFWLAYLTHEGRLPESFIPAGSLRELRIATRRRVDLVRQRTRAVVVLKAEAAQLGYDLRGAGLRSERAQEKAWELARATQGSRGQLLYECLEEIDRLDLAIAAWEQRVAELVAELPAVEQLRRRIPGLGAVLAATVYAESGPIDRFASAKTFAAFTGLAPSCRISAGRAAPSTISREGNPYLRWALTQAVMACTRARHGAARAVGEWVRARERRMGCKGKARCAAARKLAETIWRLFDDPEHFDAARPFGGLRAAA

SEQ ID NO: 42461 - protein, 338 aa, unidentified
MRVYAGIDLHSSNNYVGVINEKDKILYGKRHANRLEDVLRALDPFKASLKGVVVESTFNWYWLVDGLQENGYAVHLANPSAIQQYEGLKHTDDKWDSFWLAHMYRLGILPEGYIYPKKHRAVRDLLRRRLLFVQHRTSHILSLQSMISRNLGIKMSNNEIKKLKPEDIGGLFDCPNLGFMANNSLAAINFLKQIILDIEKKVKSQVKMRKEFLMLLTIPGIGNILGLTIMLEVGDIGRFPSVGDYSSYCRCVQSKRLSNGKKKGENNKKNGNKYLAWAYVEAAQFCRRYCVKAQSFYQSKEAKTKSVVAVKALSNKLSRASYYIMRDQVAFDEDKLFC

SEQ ID NO: 42462 - protein, 343 aa, unidentified
MEYYVGLDVSLKQTSICVVDQAGLVVREGVVDSDPEAISVYVTSRAPNAVRIGLETGPTSTWLWTELKRLGLPVICIDARHAKAVLKMQINKSDRNDAIGIARIMQTGWFKEVHVKDIDSHSVRALLASRALLVKIKRDLENHVRGLLKNLGLVIGRAKFNVFAVRAEELIEGRPELVAAIRPLLEARNAVEQQVSELDRKVMKLARHDAQVRRFMTAPGVGPITALAFKATIDDPARFARSRSVGAYVGLTSRRHASGEVDWTGRISKCGDAMLRSYLFEAAGVLLTRVPKWSAVKAWGVRLAKRNGLRKAKVAVARKLAVILHRMWIDGTEFNWSKKEIAA

SEQ ID NO: 42463 - protein, 394 aa, unidentified
MKLVGIDVGKNSHHFCVMDKETGEFNVTPTSFSNNKEGFDFLINSLKPYSKKSILLGMEDTGHYHVALLKFLLSNGYTVALINPKTTDLTRKMEGGITKNDKLDTITICDVLDTPERKKQYRITKVDRFDFYEQRQLTRHHHDLKEELNVYCNRLQKSIDLVFPEFNTLFSSKYGVVYMNLLKTFGNAEIIASTDIRTIRKCFEIKGRGNRISLTPEKLKECAKNSIGISSEVETIQIKHLVSQIMLIKEQIAEIDKKIEEFSITNNSPILSIPGISHFSGTSILAELGDIGNYSKPSQIIKFAGVAPYHYESSQYNAQHTGITKKGSKYLRKTLYQIILTVINNNPVFKKYYLLKISQGKGHRCAQGHCIRKLLRIIYHLLETGQSFDPALLR

SEQ ID NO: 42464 - protein, 441 aa, unidentified
MSDHLPIAEPELEWAAFAAIDWADQKHAWRLVPASSTVHERGTLENTPEAVDLWATHLYVRFGGRRIAVCLEQSRGPLVYMLSKYAHLVLFPVHPSTAALYRQVFSPSGAKDDPRDAASLLDLLLHHRSRLREWQPDTVETRQLQRLVELRRLMVNERTRQSNRLSACLKMYFPQILQWFDDVAALVVGALLERWPSLQELQRAHPGTLKKFFVQHNGRSQKRIEERIQSIYQAVPATGDQAVLLGEAAAAHGFVALLKTLRENIAVLDQQIEKLVASHPDYALFASLPGAGPVMVPRLIVAFGTRRERYDTAFQMQCYSGIAPVQEASGKSQWIHFRRSCPKFLRQTFHEFAFLSTRSSVWAKAYYDRQRQEERSHPAAVRALAYKWIRIIFRCWKEGKLYDERIYMQSLQKRRSPLGVPITALGWKSVAGFQKLSENPS

SEQ ID NO: 42465 - protein, 403 aa, unidentified
MAAVMIGVDPHKASHTAVAIDAAEVPLGELRVRASSAQAGRLLEWAAGWPERTWAVEGAGGLGHVLAQQLVAAGERVLDVQPKLGARVRLLSTGTSNKNDPNDARSVAVAALRSPACQPVQADDHAAVLRAWSRRHRQLSSLRTQAACRLHAVLCEITPGGLPKDITANRAAAILAAHHPAGPVDQAWHDLADEHLDDLRRIDAKHLDARQKITAAVKASGTTLTEVFGVGPVIAATVIGDVTDVTRFPDADKFASYNGTAPIEVSSGSRKIYRLSMRGNRRLNHVIHMAAVTQIAHTHSDGHAYYQRKVKEGKTPAEARRALKRKISNAIYARLLADARRASTTTQTGPGGQPGNDSASSATGSHPERQLFGSATPRPATTLRQPARPGRKKTLTAGSRRKA

SEQ ID NO: 42466 - protein, 411 aa, unidentified
MEVLYDRVAGLDVHRDSVAACVRLPGPRGGVVADKERFTTTTAGLGRLAGWLAERRVTLVAIEATGVYWKVVVYALERDFEVWLCNAHHVKNVPGRKTDMSDAEWLADVAAHGMVRPSFVPPLPIRALRELTRYRSAQVGVRAAEIQRLEKVLQDAGIKLTSVASRVLTQSGRAMVEALIAGERDPGRLAELAKGKLRPKIGALTEALTGHFGAHHAVAARRILDHLDFLDATVAALTDQIAARTSAYEAVFDLLLPVPGLNRYTIEVVIAETGADMDRFPSAAQLASWAGLCPGNHESAGKRRRVATPPGNQWLRRALIEAARAAARTKGSYFAAQYRQIARRRGPNKAAVAVAHSLLDLIWHLLRTGECYHDLGDDFFVRRRDPARETRRLVHQLEQLGYTVTLASSAA

SEQ ID NO: 42467 - protein, 327 aa, unidentified
MQGKVEPTNSAAAVYAGIDVSKDWLDVYVHPGGERWRVANSLVGLRRLRRHLVELALAPERLVLEATGKYHRSAHRTLSGWGYQVAVVNPLRARLFAQACGVLAKTDRIDARLLALMGQSLAPQPNPPAAPQLEQLQELVHAHAAARAEAVALGHRLTQTTMPFLKAELSRRRSSLERHLHRLQLEIERRIQADPGLRNRAAILTSIPGIGATTAAALLAGLAEMGQCSAKAVTLLAGLAPLADDSGKRQGQRHIRGGRGPVRNALYMAALTAARCNPDLKAVYQRLRHAGKAAKLALTAVMRKLLVLANTLITQNRKWSPISPKTA

SEQ ID NO: 42468 - protein, 385 aa, unidentified
MYLKYSLGIDLAKEKFDVCLSVIDSTQHVTIKGTRKFSNSPEGFKSFLSWTRARYKEDIPIVFIMEATGVYFEPLAFGLYNEGYNVVVVLANRSKKYIQSLGYKSKTDKIDAQALAQMGAEQNLPLWQPYSKEIYTLRSLTRQNEDLQKERTILLNRIEAISFAQVKSPLIIKQLKASLRLVEKQIRELKEEIARCIKADEVLSSKVAKIETIKGLGLMTIATIIAETNGFFLFKNQRQLVSYAGYDIVENQSGNSFGRTRISKKGNSHIRRALHMPSLCVVRYNPDTFGRFYERVYEASKIKMKGYVAIQRKLLLLIYTLWKKDEEYLPKTSGKEEQKVLFPKQEKRNCLTKDNSSLDEHLYKVSQDVLFPKSKDKEISKKLKI

SEQ ID NO: 42469 - protein, 314 aa, unidentified
MSAIFENYWGVDISKFWLDIALDNQVFRVNQSEIAIEEFLSQHSINVCNTLVTLESTGGYEQLAVECFSKKGFKVHIAHPTKVKSFARAKGSLAKTDIIDARLLKEYGRFVDPSEIRDLPSKTARELNSLGARLAQLKEMHHQESCRLGTAREQFTKRSIDTLLNAIKAEIKEIEKEMLKSINSAEELKSKYNLLQTMNGVGPTLALTLVSSVPELGVVNKKEIAALIGVAPITNQSGQRIGRASTRYGRNGVRKILYMGALAACRHNKKFKEIYMKLIAAGKPKKVAIVAVMRKMLVILNAMIMKKTAFTVDI

SEQ ID NO: 42470 - protein, 291 aa, unidentified
MTTSHYIGFDVHKKTISYCVKTAAGEIVEEGSTPAERGALRQWASTRPQPWRGAMEATLFSGWIYDTLKPYGQQLEMAHPAKMKAISAGKKKSDTLDARTIADLVRCNLLPACYVAPPRIRELRRLLRYRSLVVSEAVRMKNKMAGLLMETGAVYVKEKLHRKKYFARLLEELEEVPESVIDLLRLSRGALEMFESTQKRLVRELLADPELAERIERLMTIPAVGEITALTWALEVGDPQRFRSSSDAMSYCGLTAALKSSAGKQQRGPISKQRNHWLQATLIEAAKLAPR

SEQ ID NO: 42471 - protein, 460 aa, unidentified
MKRTYAMRRLVARELVERVGRLAAGPAVMGIDVAKREVVLVVRGPDGAWAGPYRAVNPDGVGAVVEAAVGIGGGRALRVAMESSGTYGDVLRQALSDAKVELHRVEAKRSHDYAEVFDGVPSQHDGKDAAVVAELCAIGKSVVWAYAPPDETEGRMRALVDWIDGQDRARRLWVGRVEALLARHWPEATGVLALKSGTLMRALVKYGGPGPLAADPGALKTLTRWGGSLLAPAKAEALLASAQTTLGVRQNGADRDRLARCARSAWEASLEVQRSKKQLKDLAKGNAVIQKQAAAVGVVTACVLWCRLGDPRDYPAAQAYRKAMGLNLTERSSGQFRGAAHISKRGDRLVRRWLHLGALRLVRQHPEVRQWYQAKRGRDGGRHLGALTGVVRRLAIALHVVGTGPEPFDAKRLFAGTAGVGVGVGATVGVCADAAGGPQSATAAMTGATSQAAACAAGGA

SEQ ID NO: 42472 - protein, 407 aa, unidentified
MSQAKSVPQRFIGLDIHKHYLIAVGLDGDLHQVYGPKRVPLSDLEAWRRKTLTPQDAVALEMTTNTWQIYDELQPHVHSVTVVHPPHVKAITQAQVMTDRLAALNLARLLAKGLLVGIWVPPQDVRDHRALAAQRTKMTRLATQAKNRLHAVLHRHHCAPPAAPLFDPAQRPWWLALPISPLERVRVQSDLDTLAFAQAQIAHLEEALAALAAQDERLPLLVQLPGVGWLTALTILAAIGDITRFPDAKHLVGYAGLGGRVHDSGLTTRTGGITKAGRRDLRAALVEAAQTAANTHPHWQAELARLEPRLGRNKAIVAIARKLLVAVWHVLTEGCADRHAEPARTARKLLQVTYQLGQANRPAGQSAAACVRQHLDRLGLGADLTAVRHGPHRTIALPPSGLAPESA

SEQ ID NO: 42473 - protein, 387 aa, unidentified
MKKNTTFIGLDVHADTISVAVAEPGREGQVHSMGIIANRPDSIRKLIKKLRGKSEIQVCYEAGPCGYVLYWQLVELRVHCDVIAPTLIPRKAGDKVKTDRRDATKLARLYRAGELTAVWVPDRAHEALRDLVRARQAAIKDLRAARHRLDKFLLRSGKRRPTPMSLWTQKHIKWVKSLSFEQPLQETVFRDYLHQVEHQSQRLQELEKAIDKGVEQSPESIRQVIAGLQMLRGIAKVTAVSLVAEIGNFSRFSNPSELMAYAGNVPSEYSTGGPGHKKQGAITKTGNSHLRRMVTESAWSYRYKPAVTSRMLKAQNGMDEQHIDQLVLIAWKAQCRLHDRYKHLMNRGKAKQVAITAVGRELLGFVWDIAVHIEKQCAEQKTLLRAA

SEQ ID NO: 42474 - protein, 404 aa, unidentified
MIFVGIDWAEAHHDVCVLDPEGEVLATRRIPEGLEGVARLHALLAEHAKDPAEVVVGIETDRGLLVGALVAAGYTVHAVNPLAASRYRERHTTSRAKSDRGDARVLADLVRTDRQHHRAVAADSELAGAIKVLARAHQNLIWTRQRQTNALRNALREYYPGALDAFDELHHPDALAVLAVAPDPARGRRLSQARIVRALRGGGRQRNLEQRAGEIRAALRTPQLEAPPLVAEAQAANTAALVAVITTLVEQIARLEADLADTLDRHPDAEILRSLPGLGAVLGARVLAEFGDAPDRYADARARRNYAGTAPVTRASGTSRVVVARLARNKRLFDAAYQWALCALTRSPGARAYYDAHDTGPHRAKVARRKLANRLVGILHGCLAHRTLYDEDLAWPAIVEELAA

SEQ ID NO: 42475 - protein, 360 aa, unidentified
MTTVSKKQKWFNAIHLTPADDLYVGIDAHKKSLHVAVFLNDAPAIDFVMPPDSEKLIDTLNRLRPALRMVVYEAGPTGYSLARAMQNVNLPVNVVAPSKTPRQSAPDSKTDSLDARKLAEYAAKGLLRHIAIPTRHQEAQRQLTRLREQLVAKQTRVKLQIKGFLLQHGIDQPQGLSCWSATAVEYLKKVRLSEQLRYCLDILLYELSFIIEQRKLTEQRIKVAFSEKPICTTVKLLTTHPGVGPVIAAQFAAEIFNPKRFSDKTQLAKYVGLAPSVRQSGQTSRYGPILKTGRPQLRCSLVQGAWLWIRKDPNAYNTFCRLIHNTGHKNKAITAMARKLAIHLWMMARENKPYSACSNN

SEQ ID NO: 42476 - protein, 528 aa, unidentified
MSKGTRRSCRRKGTVSIQNTDDSLQKRIREVGPEHVGLLLVDSGKRHFAVRLTNFYGDDLWEPEPVRSHRVALEEMMAEVENQMQVHGLAELVVGIERTGRWHHPIKQLVEKKWPVKMIHPFTTKQLRQPASSGTKTDPVDLIAMQRAMICGYGTEEQQLPEPWLSLRQLSRARADLVGKRASLKTQCGGRMEALIPGYTELFEDLWKTPTAAALIEAYGSAGKLVRAGADRVMTKLAKKGIRCQRSTVERVRSWAAQAAPADPAATVNHHILCDYLALIRQLTVLIERYEADLLEHLVQTPAVLLLSITGINVVSASDYGSEMGPDEHYIGPKNVTGRAGLFPSRFQSDETDCPNGPVVAGRNARLRQAIVDIAHNLLSHNPYFRAWKQLPDHKDMVNKEARVAVGSRFVRISFAMLRHKTVFNHPVAGRQDSVLCKLLAFGREKHIQADRLCELSTQTLRQLPDDCLGFEYRALLCDGWKGSEHSPRPSDRPLRRSTKKPEYVVKLIAEIEQRMLANQGDTLAPSP

SEQ ID NO: 42477 - protein, 386 aa, unidentified
MFYVGIDIGKETHEATIIDEQGSPQGRSIRFSNTMTDFQRLLAWLPKDSARMAMEATGHYWLPLYNHLKTNNFQITVLNPLQTEAHRRGKIRKTKTDKRDSLIIADLLRTKAINPSYIPDEWIHQLREITRFRFGLVDTMCDLKRQILCILDKVFPEFESLFSNVFIKSARTLIKEATTPEELAEMDLSELAKMLSSASHGRFGIQKARDIKNTAASSVGVSYLKDCAKVQLCCLLAHLEFLQSQIEEVDEHIKQLMTQKESFLTTIPGMNQVLAAAITAEIGDINRFDSPEKLAAFAGIDPTVYASGKFTGTRMVMSKRGSPYLRRALWVASSIARRIDPELIAFYQRKVAEGKHHNTALGAVCRRLLNRVYSILKEQRPYQPKT

SEQ ID NO: 42478 - protein, 345 aa, unidentified
MKIVGCDLHTRYQQVAMLDRETGELVERRLEHESGEARAFYAGLSGPVRVGIEATGHTRWFERILAELGHELWIGDAAQIRASVVRKQKTDARDAAHLLELLLSERFPRIWRPTMAERDLRQLVWHRQKLVWMRNAVGNQLHALAMGEGVCRKKKLFTKKGRVELEGLGLGVWASYRRQELLKMLDQLDASLHELDRAVAEQAEQNGAAVLLMTHPGVGPVTSLAFVLTLGPVERFERSKQVVSYLGLNPREHSSGGRQRLGAISKQGNPMMRSLLVEAGHTAARLDGELRQDYQRLKLRRGSGVAKVAIARKLAVRMYWMLRGQASYAQLVRMQGSPWATLVKE

SEQ ID NO: 42479 - protein, 444 aa, unidentified
MAVRKREDEVFPNAAGIDIGASSHWVAVPRHLAEGASEEPVREVGAMTDDLNELARWLVKLGVDTVAVESTGVYWIPVFEVLEQHGLKVWLVDARQLKYVPGRKSDVQDCQWLQRLMSLGLLRAAWRPSAEVCVLRAVARQRETLIAEQTSWVQRMQKALVQMNIQLTEVISDVMGQTGQAIIRDIVAGQREPGTLARHRHRRVKASEAEVVKALTGNWREEHLFVLRQALGMYDDIGRHLAECDARLDQLLDARAIKTVDIGKLPRQGSKSRVEHDVRQRLADWAGVDLTRINGLGVTVVMKLLTEIGPDLSRFASVKHFCSWLGLCPGTKISGGKVLSSGTKRSANRARQALKMAAMALCRSESALGAFYRRLCARMDKPKANTATAHKLARMVYFMLTRGEAFVDQGQQRYEEQQRERSVAALKRRAAALGFQINPMGAPA

SEQ ID NO: 42480 - protein, 387 aa, unidentified
MNAVVIGMDPHKRSATIEIMASDETVLGGGRYPTDAAGYRAMLAAARRWPERTWAIEGCQGIGGHIASRLLADGEHVVDVPPKLSARARVFATGQGRKTDATDAHSVALVATRMSGLRRVADDQQLAVLRILADRRRSLGEDHTRMISQLHRLLLELIPGGAKKDLSAAQARALLAKVRPRDAAGKARRRVAAELIGDLERIYQRTKAADKELRELLAATGSTLTRLHGIGPSGAARLLVEVSDISRFPDRAHFASWNGTAPIDASSGEQIRHRLSRAGNRQINRTLHIMAVVQLRNPTEGRAYFDRKVAAGKTPMEAMRALKRRLSDIVYHQMVADAAAAATGPGGHSGTTLQSSVTGLTPAAGSSDKPLPGPAIKHPRTRSSIAS

SEQ ID NO: 42481 - protein, 343 aa, unidentified
MEYYVGLDVSLKQTSICVVNQTGSIVQEGVVGSDPEAIASFVRSRAPGTVRIGIETGPTTTWLWTELNRLGLPVICIDARHAKAVLKMQINKSDRNDAAGIARIMQTGWFKEVRVKDLDSHAVKALLASRALLVKIKRDLENQVRGLLKNLGLVIGRAKFNVFAVRAEELIDGRPELVAAVRPLLEARKAIEHQVDDLNCKVRKLARNDAQVRRFMTVPGVGPITALCFKATIDDPTRFKRSRSVGAYIGLTTRRHASGEIDWSGRISKCGDAMLRMYLFEAAGVLLTRVPKWSGLKAWGAKLTKRNGLRKAKVAVARKLAVILHRMWIDGTEFNWSTKKAAA

SEQ ID NO: 42482 - protein, 336 aa, unidentified
MLIIGCDFHPGFQQVAMFDNRTGEVEEKRLQHREEAERFYRGLSGPVRVGMEACGHYPWFERLLAELGWELWFGDAAQVRASVVRRQKTDRRDAEHLLQLLREERFPRIWVPSLEERDVRQLLVHRHKQVQARTRTKNQLQAMALSHGVQKKWKLWSRAGRVQLEQLPLLPYAAQRRQQLLQALDGLDADLLELNCRVEEEVRKRPAARLLSTHPGVGPVTALAMVLTLGPAQRFASGKDVGSYFGLIPREDSSGGHQRLGKISKQGSSFLRFLLVEAGQTAARYDPLLKRFYLRLARRKNRGVAKVAVARKLATRLYLMLREDWNYAQLRKAVCR

SEQ ID NO: 42483 - protein, 363 aa, unidentified
MQYLNDTELSSHEGTRCQFNGSRCAIKLGIDVHQDFYVVVMQEGGGNPKPPQRFKKEAFLHWAAKLKSRAAEVHAVYEACGFGFSLQRQLSALGVHCYVVCPQKLDELAKRVKTDGRDAKALCLKLDRFVQGNTDALALVRVPSPTQEQARAIHRQREQLVKVRKQLEAQGRSLMVNHGMEPVKNWWKQRNFAALQVPSWLKELLANTQPILLAVQEKISALTLQLQAAATAQQPRGLGLLTSVVIDREIGDWHRFDNRRQVGSYTGLCPGEYSSGKTRLQTQVTKHGNPRLRAALVELAWRLIRFQPNYKPVIKWRRILAKGALATGAARKKAIVAVARQLAIDLWRIRTGRCSAQVLGLVI

SEQ ID NO: 42484 - protein, 402 aa, unidentified
MKYHVGVDVGKDHHHVCIRDLSMDTYYKTFPITNDRNGFMELVHSLEKLSAGKDDFLVGIEACSYGLNLSYFLMGVGFKLVEVNPFRAGQFRKAQGRKAKTDRIDARSIAAILSLGDHKPLSIPDPILDNLRDLTRFRAGLIDERATMMIHLREALSVLFPEFDKVFRTLDSAGSLALLTAFPGPEHLIAAGEEKVAETLSLASPHRMGKGMARRIIEAAQDTVGVIQKQPALGIKISVLAKRIASLQSTILDLDKQIAALFNSLPCKPQGFPLGRVTTLAAIVSEIGDVRRFPTLKKFLSHLGWCPQSFQTGNYRMEHPRMSHAGNRYVRRIIWMWSVLAIRMVPRYQEYFARRVSEGKAKMHILVAVGRKLLSALYAILKRGVPYDPNWEENSRLAVARH

SEQ ID NO: 42485 - protein, 345 aa, unidentified
MQVYAGLDVSLKTTHICLMDEGGKIVWRGVSASDPASIREALSPFLGQLVRCVLETGSTSPWLASGLLALGVPVVCIDARHAQPLLATMTNKTDRNDARALAGLARVRLFREVYVKPRQAQELRAALAARQQLVEAATAIKNTIRGLLKPFGLIPSKGTGQVFVRQVREKLIGEAALGAVIEPLLAAWLAVRKELARTTKALMDFARGNQTCRLLMTMPGIGVLVAVAYFATVCDPARFGKSRNVGAHFGLTSRRTQSGEVDIRGRISRHGDELVRQYLYEAAGVMLFRWRGCCALKDWAGRLVQSKGVKKARVALARKMAVVLHEMWEHGVAFAPKGRPAALAA

SEQ ID NO: 42486 - protein, 428 aa, unidentified
MICAAVERCAGIDVGKRWLSVCILIGPLNGEPRVERRRFGVNVGDLQQLRDWLQREAITHVVMESTGSYWKPVFNVLEDAVKVYLANSQEVKNRKGHKTDDKDGWWLAHLLRHAMIHPSFIPPRAIRQLRDLTRRRERLNGDGTSEKNRVQKILEDANVKLGNVLSDVFGVSGQLMLEALLRGQAKPEEIAQFAKGRTKQNMPAIIAALEGHQMSEHHRRMIRYSLAHMKFIEEQIEEIDRDIAAQIHAAGLDGPWQLLQSVPGVQQRSAAKILAETGADMAQFPTQRDLGSWAGVCPGNNRTAGKNRSSRPTKGNPWLRSALTECSWAAAAKKNCFLKEKFWRITTKHGGQKNSALIAVAHNLLQLVYIVLKTGQPFRDRQAPPLDQGQKERLIRHHVRRLGKLGVRVHSLRAATGSLQTAAVSVID

SEQ ID NO: 42487 - protein, 377 aa, unidentified
MSTVRFLGLDVHADTIAVAVAEPNGEVRSLGIIPNRAESIRKLVKKLEPAEHLRACYEAGPTGYVVYWQLTALGVRCEVIAPTLVPVKAGDRVKTDRRDALKLARSYRAGDLTPVWVPDAAHEALRDLVRAREAAKKDQLRARHRLSKFLLRHGRRPPTGTKAWTQKYLAWVKQAVHFEQPAQEATLLDYVHEVDHVADRLTRLDHAINDAVVQAPPSMRAVIDALQALRGIALISAVTIVAEVGVLARFARAPQLMGYSGLGPRENSSGGRTRRGGITKTGNAHLRRIVVEAAWAYRYRPAVSGPLRKRQAQVSEPVKAIAWKAQHRLHARYRTLLGRGKCPQQVVTAVGRELLGFIWAIGVAVDAEQRTAPALAA

SEQ ID NO: 42488 - protein, 350 aa, unidentified
MGASAMKITTIGLDLAKEVFQIHAVDERGKLAQKKKLKRKEMSTYFANLEPCLIGMEACGSSHYWARRLKSMGHTVKLMAPQFVKPYVKTNKNDAADAEAICEAVTRPSMRFVGAKNVYQQTILCLHRARRLLVTAKTAQANQIRGLLAEFGIVAPQGIKTLRDRIPDILEDAENELIPEMRELIKVMDERLKDMIEDVEALDLKIKLSNERNEMIAELMKIPGIGPLTASAMVATIGDFKEFKSGRELAAYLGVVPRQHSSGGKQNLLGISKRGDGYLRTLLIHGARAVIRFAESRQEKNDWLVGLIGRRNKNIAAVALANKNIRIIWAMMTRSERFDPAHISHAPIPA

SEQ ID NO: 42489 - protein, 475 aa, unidentified
MNVKGTKKKNQVVTANIFEQQELLKKAEVIRESLTASTWHELETNGKFDKNKKLSFVGDDMLILGCDVGSETHYMRAIDTRGRELSKSAFSFNNDSEGFLSAKEWAVKIAAENNKSQIVLGLEPTGHYWFCLATWMVSNGISVVQVNPYAVKQTKEVEDNSQLKDDRKDPKLIANLVKDGNFGMPYLPEEVYAELRRLSMFRDQLNEDRIRTLNRMHREMKIYFPEYKDALGKADGAFSLELLKQAPFPDDLISLGEDGIRQIWHDAKLRGRGYSRAGEILRYAKTSVGIKDGAAAGKTAVKWFVQRILELDAELAVIGNQINQKCQEIPYASNILEISGIGENILSGILAQMGDISRFDDVKEIQKLSGLGLVACSSGKHKGETKISHRGRKRLRYWLFQAAKSAVAHAEEFKELHMYYTTRAENPLKKMQSLIVIACKLLRIIYTILKKGTGYDPKKMLMDIRRMEKKKTVAA

SEQ ID NO: 42490 - protein, 322 aa, unidentified
METYFLGIDVAKAKLDCALIRPSGTPRSKTVKNSAAGFDELAKWLGKQGAQQVHVCMEATGIYWEAVGEYLSDLAQVTVSVINPAQIKAFGQSQLVRTKTDRVDALLIARFCAERQPEPWQAPSHSERTLRALVLRLDALQRMHVQESNRLETARDAVREGIEAHLAWLDEQIASLVRQIQRHIDDDPDLRDKRRLLESIPGVGERTIAVLLAYRTDPSRFGSAKQAAAFAGLDPRLHESSTSVRAKPRLSKIGHAALRKALYMPAMVTLYHTQWGKRFRDRLALAGKPPKLIIGAMMRKLVYVAFGVLKSRKPFDPSLHGV

SEQ ID NO: 42491 - protein, 346 aa, unidentified
MKHYAGLDVSVKESSVCIVDETGAVCHEIKVASHPEELVRALKNSAWQFVRIGLEAGPLSQWLYSGLVEAGLPAICIETRHAKAFLKAQVNKTDRNDARGIAQMMRVSLFRPVHVKTLTSQQRRVLLTARKLLLEKAIAIENDIRGLLRNFGLKVGVVGTIGFDSRICELVEGMPDLAEIMAPLLASRQKLREEFSRLHRKVLEIVRDDTVCNRLMTIPGVGPVTSLAFMSTIDVPARFRSSRAVGPALGLTPVLNQSGESRRVGRISLCGDGTMRTLLYEAAQVMLTRTKKWSWLKAWAMNVAKRRGLRKANVALARRLAVIMHRMWSDGTEFRWTREKSMPAAA

SEQ ID NO: 42492 - protein, 358 aa, unidentified
MKYYIGCDAHKKYSVFAGVSEAGEIIPAQRVEHDREKYSSFLKGLPPASQIAIESVGNWYWLIDEMEKAGHIPTLVNAGKAKLMMGNINKTDKLDAKGLAVLSINGTLPAVWIPPRELRDQRELARMRIFLVHIRTSLKNRIHATFAKYAITFEEVSDLFGVRGRNLIEKRLAELPPETRDSVKEQLKLLDQLQRQISMVEERIRQIVKITPEMQLLMSIPGIGPILTILIALEIGNVARFGDGAHLASYCGAVPRVKSSGGKTYYGKTRPDVNHYLKWGLTEAANVIVLTQHRMTGHHVVTLYRRIRQSKGHAKAIGALRRHLAEAAYAVLRSGQPYHEPGTPRKSSVTKEVCARLA

SEQ ID NO: 42493 - protein, 448 aa, unidentified
MDKNKKKKQLKKAIQGLPVLKPYAAGADIGDTRHDIAINDGHGGHIVRTFKTFTADVEEAINWLKEEGVTTVAMESTGVYYLTFYLMLEEAGIEPFLVNARHVKNVTGRKKDETDAIWIQRLHSCGLLQNCFQPDNDFRTLRTYVRQRKGLVTRSSDEVRRMQKALELMNIKLHIVISDILGKTGMQMVKAIIDGNYDATELSKLRDPRIKATTEEIIKSLQGIWKEEYLFTLEQAYNTYVFLQQQIKDCEKKIHDQLIKQIGKSNQGDITTDQPIKKKGKKNQFDTPISPSLKALTGVDLCGIPGIGEVSVLEFIAETGTDTRKWPGAKCFTAWLNLVPNTKITGGKIISSKMMKKKNRAGQTLRMATISLASNKTPLGDYYRRMKSKYGGKGAALATAHKLARIIYKMLETKEEFSHEILIESQKKYREIKIKQLEKQLERLKKVA

SEQ ID NO: 42494 - protein, 373 aa, unidentified
MSICLTHKSTVVGVDVHKYCHSAVAMDCFGQEKARLDFSNERLNDYVLWLRELGDKEDIIVALEDVNGYGFHIVERLSKEKVGMRYVPAILTERERKKSIHREKSDYEDAKRVGKVILTKFDETLPAKESIADENERELSANLDFLTAERRILVHEKTILKNQLHTMLHQIFGDRYGEGFPKVFHKEAIKSFRQKLIKAKFDNPIMVALAGSSIRRFDRLALVEKQLKEIDGSINNIGQKSEAVLALSDNIHGCGIITAASIIAEVTTISRFCDKSKFARYSGIAPINKSLGKHQRLYTSPFGNRKINRALHTIALCQIACKGDDRGKIYFQKKLAEGKTKLWALRCLKRQISNKVFQALTEQKRRERTIQNS

SEQ ID NO: 42495 - protein, 378 aa, unidentified
MKRVKFVGLDVHAETIAIAIAEQDGEVRSLGAIPNREDSVRKLVRKLGTMEELRFCYEAGPTGYVLYWQLTRMGAKCEVVAPTLVPVKAGDRVKTDRRDALKLARNYRAGELTAVWVPDAAHEALRDVVRAREAAQKDQLRARHRLSKFLLRHGRRPPMGVKVWTIKYLEWVKREVHFEQLAQEATLLDYLHEVEHAAARIARLDGAIEEAVKVAPPKMRAVIEALQALRGVAHVSAVTVVAELGELSRFARAKQLMGYGGIVASEDSSGERTRRGNITKTGNAHLRRVVVEAAWAYRHRPDVGATLRKRQEHVSEEVKEIAWKAQQRLHQRYRKLLAKGKNKGVVVTAIGRELLGFIWAIGIKVETAQKEPLQRAAA

SEQ ID NO: 42496 - protein, 345 aa, unidentified
MKIVGCDLHTRYQQVAMLDRETGELVERRLEHENGEARAFYADLSGPVRVGIEATGHTRWFERMLAELGHELWIGDAAQIRASVVRKQKTDARDAAHLLELLLSERFPRIWRPTMAERDLRQLVWHRQKLVWMRNAVGNQLHALAMGEGVCRKKKLFTKKGRAELASLGLGVWASYRRQELLTMLDQFDDSLHELDHAVAEQAEQNAAAVLLMTHPGVGPVTSLAFVLTLGPVERFERSKQVVSYLGLNPREHSSGGRQRLGAISKQGNPMMRSLLVEAGHTAARLDGELRQDYQRLKLRRGSGVAKVAIARKLAVRMYWMLRDQANYAQLVRMQGSPWATLVKE

SEQ ID NO: 42497 - protein, 420 aa, unidentified
MEVAHDDEQIIERVAALDIGKAEVVCCVRVPGQGPRARRMQEVRTYTTMTRSLLAMSDWLAGLGVTRVVMEATGDYWKPPFYLLENTFETWLVNAKDVKHLPGRPKTDRLDAVWLCKVAERQMLQPSFVPPPAFRQLRDLTRYRADLITTRTAEKQRVEKLLEDAQIKVSVVVSDVFGVSGRDMMRALIAGERDPKVLADLARGPMRGKTARLEEAFTGRFTDHHAFLLRTMIARVDGIDADIKLVQGRIDEQIAPFAKAVVRLDEIPGVGGAIAQVIIAEVGLDMSRFETPAHLASWAKFAPGVSESAGRKKGTSSTGHGNRYLARVLGEAAVGAGRTKTFLGERYRRIARRRGKKRAIVAVGRSILMIVWVLLNDEEQRFVDLGPGYYESRINRSRSTRNHVRELQAMGYNVILEPAA

SEQ ID NO: 42498 - protein, 390 aa, unidentified
MFVIGIDVSKYKHDCIVLNDAGDVVIKQFTVANDRSGFNQLLSVINELDPSQEKRIGFESTGHYQGNLETFLENAGLPFMELNALLVHRFRGAGTLRGTKTDKADALLIARYLLQTDFKPYPPKAYHIHELDRLTKRRFDLVKQRTLYLEKITDWLDRCFPELKPFFGENLKSATAMFVLSEYGSPSRVAGMNQASFERLRRISKGRFSSAKFAELKSLAKGTVGTCYEVDEWELRSLLSVYGALQSEIDSAESLIGSALSKIDSKIPTIRGLGPVSCASIVAEIGDMGRFSSASKLLAYAGLDPRVYQSGTMEAQGRMNKKGSVVLRRVLMNAAEYLLCCSSVFYDYYRKKRGEGKPHRVAVSHCARKLVRIIYKVETEKIDFDPNMVR

SEQ ID NO: 42499 - protein, 347 aa, unidentified
MKYKLIGIDLAKNVFQVCAINQAGKDVFNRSVTRAKLAATMAVFEPTTVALEACASGHYWGRKFEQMGHRVLLVPPQHVQPFVRGGKSDARDALAIVEAAQRPKLHPVPIKTLAQQDLQSLHRVRRQVIDQMTATGNQIRGIAREYGVEFKTGIHALVKQLPEVLEEAENDLTPMVRQLIAEQLEQLRHYRQRNDALHARIVELASQDPAYGRLLELPGVGPVVASAYLASIGNGHQFHKGREVSAWLGLVPRQSGTGGKIKLLGMTKNGDRYLRTMLIHGARAAITWSRNKQTPLAQWVNPMVVRRGMNKTVVALANKTARIGWLIVARGEHYDVNKAFGSINPAG

SEQ ID NO: 42500 - protein, 388 aa, unidentified
MNVGADKSEPPTAIHTDLGAIFVSLELSRSSWLITSLSPGGGAKMSKHSVPGGDFAGLMERFAQLQGKAKLRTGQSFRIIVVQEAGLDGFWIHRALQNEGIESHVVDAASIATSRRRRRAKTDKIDGETLVRVLLAYKRGEPRVCAMVKAPTPDEEDRRHLCRERKALIAERVRHVNRIKGFLFSQGISRYQPLRRDRRQRLEELQTSDGRAFPQHLKARINRELDRLELLLKQIKTVEAARDALLAVEQTAMPAPAAMLLDIRGIGPEFAAILWSEGLFRHFENRRQIAAYAGLAPTPWQSGAVDREQGVSKAGNPRLRTTLIQLAWLWLRNQPRSALSIWFHQRVSRNGGRLRKTTIVALARKLLVALWKYVTAGVVIEGVTMKVA

SEQ ID NO: 42501 - protein, 352 aa, unidentified
MNTLIRGGTSYSAGIDLHKGPLRLHVVDAAGATVCQQTITRNKRRQLRTALAPFGKDVTVGVESTYNWYWVVDELRQQGIPCVLGHARDVHAQRQGKHKSDAKDAANMSQMVRMGTFPAAYACQPRWRATRDLLRKRLRMVEERTQHLQHAGCVADQYLLGEEPMTAAGYARTVITDVDVALDIDLKAQEMLTTLIDQADKHILQCAIITDQPLYELLTRTRGIGPVLALTFMYETCDITRFTRAQQYASYCRTVNPEYSSAGKPPGTGDYKRGNPYLCRALNMLAVQSIKLYPEVKALYHACLKKKSRRTARRILAHKWALAIYSMWKHREPFNINKFLGTAYAARAQSSH

SEQ ID NO: 42502 - protein, 348 aa, unidentified
MIIIGVDFHPEFQQIASVDTDTGECQEKRLAHREDAETFYRALKGQKVRVGMEASGHAGWFERLVAELQFELWIGDAAEIRTKRVRKQKTDRQDAQLILRLLLEDRFPQIWVPSWENRDLRQLLWHRHRMVQARTRIMNQLQAVALNEGLRCKKRLWRERGRQQLESFLLAPWTSRRRRDLLELLDRLNPTIAELSQAVEQEVQKCPEAQRLRTHPGVGALTALAFVLIIGRAERFGSGKQVASYLGLVPLEESSGNRRRLGHITKQGSSMLRFLLVEAAQVTVRSVPEWRSQYFHLAMRRGRKIAKVAMARRLAVRLYWMMRQGWGYEQVKKFGSHAGQPGHRDGVQ

SEQ ID NO: 42503 - protein, 342 aa, unidentified
MKRYVGVDLHKNNFQVCYLSKGKNRQEVFRVSQSGIEEFRESLKKTDEVGVEATGNARYLVGEIEKAVKRVAIINPWQFKVISQSVKKTDEEDAKIIAKYMSKDLVPEVRMRSKEQQEISSLITTRDKLVKLRTSLKNKVHGILNANGYVTKKEMFSSKKAFNGIFDLEISEAYKFELRVIVEQIKSLTSSIDEITEELGKRGKGLKGYKNLKSITGIGDVSATIMLNTIGDVRDFDTEDKLSAYFGIVPRVSNSNETIRQGRITKMGNKIARTALVQSTLIAIRYNTYLRTFYDRLKAKKGSGKAIIATSRKFLGIIYRALKYDLVYEDFNRYRLAVTRIN

SEQ ID NO: 42504 - protein, 401 aa, unidentified
MKYGVGIDVSKGKSTVAILSAVGEVIEEPFEIKHDIEGLNFLEEKLKDIPNEDLKIVMEETGTYHLPVLGYLLDKGYFVVAENALKIKKYLDRGLRKAKTDKKDSYKLAEYTCNNWYKLNKVRENDEAYDNLRFLSRQYINNINVQVKQKNNFSNLCDLLFPGYYQLLDENNFILGLEIFKKYYHPEIVTNKKQSQFVEEIDKLAKKLGHKGAGITLANKIYLLAQKTISPRPNNEYAQLSAISCADALILTIKTTTTIITEMDKLARELPEYDVISEMPGCGKKLTSRIIAEIGDVRRFKNAGSIIAYAGLDAPPYQSGQFEATNRHISKRGNKYLRKTGYEVMKSIKSCCRSDNDLKFYIIKKENEGKLKKVAKIAGLNKFLRMYYGTVKKKYKQLEIW

SEQ ID NO: 42505 - protein, 367 aa, unidentified
MFTERTSVGLDVHARSVAAAAIDGETGQLFQTRLTPAHEEVVGWVRSLPGPVAVAYEAGPTGFGLSRALAAAGIRCEVAAPSRLQRPPAERVKTDARDAVHLARLLRMGEISPVSVPTVDQEAARDLVRSREDCRADLMRARHRLSKLLLRHGIVYSGGAAWTGKHDAWLRHDALPLLGTRATRLAFDSDYDAVLSVTARRDRLDAHIEEMAAASEFTPIVRRLGCLRGIGTLTGFALAVEIGDWHRFTGRSIGAFVGLTPAEHSSGSSRAQGPITKTGNAHVRRLLVEAAWHHRARYTVGTTLRERWQLAPAAARARGDLGNRRLHHRWVRFIDRRKRPTTANTAIARELAGWCWSLAVLDHPMTS

SEQ ID NO: 42506 - protein, 410 aa, unidentified
MEVLHPRCAGLDVHRDSVVACARLVRPGGVERHVETFGTTTSELERLARWLDGHAITHVAMEATGVYWKPVWAVLAERFEPVLANAAHVKNVPGRKTDVSDAMWLADLLAHGLIRSSFVPPLAIQALRDLTRTRKQLTREKASHVQRIDKLLQAANLKLGSVLSDIMGESGRAILDALAGGESDPERLAGLVRARLQASRADLVEALRGRLAAHQRLLLGLHLGQVDAIDAAIARIDAELGDRLEPFRDAVARLTSIPGVGALSAAVIIAEIGLDMGRFPTAAHLISWAGLCPRHDESAGKRRSTRLRPGDPWLKTLLVQVAWCATRAKDTYLRALFGRLRARRGPRKAIVAVAASILTAIYWMLRRGVAYQDLGADHFERRDRARLAARLTRKLRELGFDVTLAEPAPA

SEQ ID NO: 42507 - protein, 414 aa, unidentified
MYCGIDWAEKHHDVALVDADGKLVAKRRIADSVAGFAELTAMLADAGDGDEWPIPVAIETSRGLLVAALRASGRPVYPINPMAVARYRERHSVSRTKSDHVDAMTLANILRTDAHMHRPLPADTELARAIAVLARAHQDATWRRTRAGNELRSLLREYHPGFLAAFVGGSATNLATADARAVLAIAPTPAAAATLTKARIVAALRRGGRKRAAAKLAERLHQDLRRPQLRQDPMVEEAMGAQVLRLLATLNTECDSVDQLGDAVAAAFAAHPDYKIITSFTGLGDLTGARVLAEIGDDRSRFADARSLKAYAGSAPVTRASGRSLSVTHRRVKNNRLAAAGFVWAFVASAHSPGASRLYYHRREHGDRHAAALRNVFNRLIGCLFTASRPVRPTPRSRHSRGPARSPRASPLDS

SEQ ID NO: 42508 - protein, 404 aa, unidentified
MKGPIVSIDVSKGKSDYQAFKNLNVKYTGSRSIKHTKEGFDEIVNLVREMEKKLETEVCVVYEATGVYHRVLKKVLEDNNIKQFIINPLLSAKTRKNDSLRCPKTDKLDPKSIAKTYYSHSLHNSHKQETIYHELRKLSRYYEDILVHIRKDKVAFRAQLDIVFPGYDTLYDDLYGPVALAVIEKYPHPEMLQKKKINTVSKVIQSKTCHRQAMSDTMADKAIEYSKTIYSGCDKDDIEVLILQRFIKKLNEDMAEAERTIGEMIKLAQELPDFSIIKSIPGIGDNLAARIIAELGDMTRFKKKNELVAFAGLDPRISESGKNDGDHMHITKKGNKRLRCLLYLAVTCSIRLKRDDNSIKDFYIKKKQQSNPMCSKAAKTACASKLVRIIYSMCKTGELYQYNK

SEQ ID NO: 42509 - protein, 357 aa, unidentified
MTLKHTEADFRGQHIFVGLDIGKKSWKTSIMTEELEHKTFTQVPHVEVLVNYLHRTFPGATYHCVYEAGFCGFWIYEQLTRYNIDCIVVNPADVPTKHRERAFKSNRVDARKLARSLRNGDLDPLYIPSRAAQEDRTLVRTRQSLVNEQTRCKNQIKSMLSYYGVALPEGITDKHWSKRYLTFLEQITMERASGDHALKLHLAKLSSVRLLLADVTTTIRRLAEDERYQSSVQYLISVPGVSTLTAMILLTELIDINRFHSLDDLACYCGLVPVEHSTGEEDTITTITSRRNPFLRRVLIESAWVAARKDPALLASFTLLSKRMPKNQAIVRIARKLLNRIRFVLKQQQYYHTSIAA

SEQ ID NO: 42510 - protein, 323 aa, unidentified
MNKDMKYFGIDISHLVFDVTDSDGNYHQFKNNGMGFKKFLKLLDIDSHCVMEATGYYHYQLAYSLQENSIKISVENPLAVKRFIQMKLSKIKTDKSDSKLICEYAQQVELKLWQGNSKDQIECLQMTRLLSVYTKQSTMLKNKLHGEFVLGNPSQDVTRSLKRSLKQVKKEIDTLEEKLLFKVKKEHQDLLTRLETIPGIGRKTALMLVVLTDGFDRFNSGSELCSYSGLTPIIRQSGSSVKGRPRISKIGNQKLRNLLFMCSFNACKYNKACREIYERIVAKGKSKKLALIAVCNKLLKQAFAIAKSGLIYDDSYRSVLVKN

SEQ ID NO: 42511 - protein, 307 aa, unidentified
MSEKEMNIFVGIDVSKTTLDLRLEPAGEHLHVMYDDAGVAEICGRLQGLSPTLIVMEATGGLETRLATELAACGLPVAVVNPRQARDFAKATGQLAKTDRVDAAILAEFARAIRPAIRPLKNEDTRALDDLVTRRRQLIAMRVQETLRLGSAGSRPLQKSLKAHIAWLDKRISDIDADLTQRLRSSDAWRTKDDLLRSIPGVGAVTSLTLLAKCPELGTINRREIAKLAGVAPLANDSGKHRGKRFIWGGRADVRAVLYMATVSAIRCNPAIKAFAARLKHIWKACQGHHRCLYAQTAFHYEFHAEK

SEQ ID NO: 42512 - protein, 343 aa, unidentified
MQAITTIGFDIAKSVFQVHGVDAAGQVIVRRQLKRRQVIAFFQKLPPCLVGIEACASSHYWSRELHALGHRVRLMPPAYVKPYVKRQKNDMADAEAICEAVTRANMRFVPTKTPEQQSGLVLHRTRHLFIRQQTSVINAIRAHLAEFGVIAPVGRKGVEELLCVVADPNDKRVPEVVRACVAALGSQLLSLKTQILDFDLMIMAWHRSNQTSKRLNCIPGVGPLLATALVASVADPKTFRSGRNFSAWIGLVPKQHSSGGRDRLGSISKQGDRYLRSLFVAGALAVIRYAKIHGSKHRPWLTALLARRPTKLAAIALANKLERMAWAMMATGARYNYPASLRV

SEQ ID NO: 42513 - protein, 357 aa, unidentified
MQEVNPERARQQDVVVGVDTHKHVHVAAVVSMTGGTLATLTIVTEQGGYRQLLQWATTFGRVIAFGIEGTGSYGCALTSFLRRSDQQVVEVNRPDRRLRRLNGKSDTLDAENAARAVLSGFASAVPKTADRNAEMIRQLKVAHNTAVKGRAVAMVTLKALLVHAPDVLRRGTARMTQIKLARYLANLSLAALETPGDANRHALRALAQRWLNLDSEARELTKLIKELVERTAPQLLQAFGIGADTAAEILIVVGDNPQRIRSEGALAKLAGISPIPASSGQMTGRYRINHGGHRQLNAAIYRTVIVRMPFHEPTIAYVARRTAEGKCKRDIIRCLKRYVIREVYKLIRSPHIPTKVA

SEQ ID NO: 42514 - protein, 332 aa, unidentified
MSIIGCDLHSRYQVIARLEGETGEIITRQLEHEGGEAERFYRELEKPALIGIEATGYTQWFERLLAELGHELWVGDPAEIRARAVRRQKTDTRDAEHLLDLLINQRFPRIWVPTPEERDFRQLLKHRDKLVKMQTSVRNQLHFLAMSQGVCRKRKLWSQHGREELEALKLGPWASRRRQELLALLDGLGPRIEEMDQAVKGEALRRTPAVRLMEQQGVGPVTALAFVLTVGPVERFATSRKLVSYLGLNPREDSSGGHQRLGHISKQGNEMLRWLLVEAGHTAARLDPELRRIYQRLKFRRGGKVAKVAMARRLAVQLYWKLRNGAAASHVQ

SEQ ID NO: 42515 - protein, 386 aa, unidentified
MSQPSDFNRSHTGLEQDCTLIAVVEMSLKSWLVAGIVPGIERHPLKKLAVDEHALLKLLRRWQAEAIKAGRNVKRVAVAFEAGRDGFWLARWLRARDVEAYVIHASSVAVSREHRRAKTDRLDTEHLKRAFIGWLRGEPHHCHMAAIPTIEEEDAKRANRERENLVCERSRIINRMKACLIRFGVRAFKPTLRKAPERLVKLRTPEGVPLPPNTIAEMRRDMARLLFVRDQIKEIEQARLQRLAQAPKRGAHAMVRLLARVVGVGIETADMLVHEVLSRSMRDRRAVARYAGITGSPDESGRKRREKGLARAGNARVRRGMIQLAWRFLRFQKDSALAQWYRVRTTNARAGTRNTMIVALARKLLIALWRLVTVGEVPAGVAMRAA

SEQ ID NO: 42516 - protein, 331 aa, unidentified
MEQRKTIIGIDVSKKTLDVFIKTIEVHIQISNDSEGFKKLLALLKAHKLKSEDCFFVLEFTGGYEYRLVQFCQAKQFSYVRISGLAIKKSMGIVRGKSDRIDAKRIAEYGDEKQSKLKAETGSLAAIVRLKRLLNQREDFVTDRKAYDHRYTELQYMMDLPDADSILKRYKKIAADLQKLVEKTEDEIRKLIKGNDAFLFNFELLTSIKGIGAVNGWAMIAYTENFTSFDNARQFGAYIGVVPYPFTSGTAIKGKSRTSKMANQQIKALLEMAARSAVNHDKELNLYYERRIAMGKHHMGVMNEIKFKLVLIMFAVVKKQKPYVDKYKIAA

SEQ ID NO: 42517 - protein, 352 aa, unidentified
MSMLAEVVELVIGVDTHTDTHTAAVVVAATGALLETVTVSADPDGYQELIGLAGRHGGLRAFAVEGAGGYGAGLARHLATAGEVVVELDRPARPARRGGRRSDPLDAERAARDALARTHLAAPKTGPQRGALQALLAARRSAVEAATDAQRQLRALVITAPEPVRARFRGHRSTRAQLTVAAGLRPTTSSGDVEVVTALSVLRGLARRVRALEAEATDHEKAIRAVVAAWRPDLLELPGVGPINAAVVLTAWSHPGRCRDEAAFAMLAGAAPIPASSGRTVRYRLNRCGNRQLNRALHSIALSRQRYHQPTREYTDSRRAQGKTDREIRRCLKRYIARQLYRQLEPAGVDEP

SEQ ID NO: 42518 - protein, 309 aa, unidentified
MTTGVDVSKHTLAVSDPSGAVRSIPNSKQGVIRLLRSLEPSSTIGMEATGHYHRLLADTAFSNGFKVVVFNPKDVLHYARSISPRAKTDSVDAKVIANYAQVRTDYHIYQPMTPAVAKLKGLLGSRTLLVRDRIGLENRLSDCPECASYLQAALDGIKASIAKIDNELKTVAQTFHEYALLTGIPGIGPVTGAYLLMSLSSAVFSSSDSFVAFLGLDIRIRQSGTKSGRSHLSKRGDPEARRLLYLAARATCRNAGPFQELYLRYQNNGLSKIAAAVALARKLARTAWAIYNKNQPYCPARVLSQGADA

SEQ ID NO: 42519 - protein, 343 aa, unidentified
MKTVTTIGLDIAKSVFQVHGIDAAGKVVIRKQLKRGRVLPFFMKLPPCLVGIEACASSHHWARELTALGHEVKLMPPAYVKPYVKRQKNDAADAEAICEAVQRPSMRFVPIKSPEQQAGLALHRTRHLLIRQLTATTNSIRAHLAELGIVAPVGRRGVDALIALVRSDEDGRIPGLMHACLMTLSLQAQALKEQIRILDRRLLDWHRSSELSKRLDAIPGVGPALATALVASVADPKAFRCGRDFAAWIGLVPKQNSSGGRERLGNITKAGDRYIRSLFCAGALAVIRFVKIHGAKHRPWLTSLMDRRPIKVAAIALANKLARMAWALMAKGESYKEPTALAR

SEQ ID NO: 42520 - protein, 355 aa, unidentified
MKYLGMDVHAKSTTWCLLDASGEVVREGSVATTAATLAALVQELAREEPILAGQEVGTMSYLVHDTLSAIGTKILSFNAAQLRMIAASRKKTDRRDAFWIAKALASGMYPHPVYIPTGEIRELRALLTRRRMLQTERNRWQYRARAALRASGRTLRTGGHYLRRSLKGYLETVSELEAPLRDTLALCQRQETALALELRQVDTELRRKARAIDAIQRLETIPAVGDLVATTIYAWVGEIGRFPDAKSLAAYAGLVPSVYQSAASQRSGGITKQGSKALRSALVQSAHVLTSRCRTVEARPLQAIGQRVRTSRGRRKIATVALARHLLRIAFYILRDGTTYDAKRLRGSTAESAAA

SEQ ID NO: 42521 - protein, 456 aa, unidentified
MKNYYLGVDVSKGYSDFVIIDDKKLPVEENFQLDDTFDGHCRLYEKLDTFFSGHPVSAIYAGVESTGGYENNWFNSLVKFQGTLNIKTAHLNPLGVNANSKADLKRNVTDKISAQNVAEYMIAHPEKISYQKQDHLASLRKQWSFVKMLVKQKTQLLNQLESNLYSSNPEILIHCKNGVPDWVLSLLLRYPTASKLSKARKSSVTSIPYITTRKAEELIEGAKKSIASSSDDITEQIIQATVKQIKQLVKAIKTQTKIMAENCSVPEVDILKTFKGIGDLSAIGLILEIGSVERFATSKKLASFFGLHPVYKKSGDGSWGFRMSKKGRKVPRQILYMVTMVAIKTNPLIREIYLRHTQQGMEKMAAIGLCMHKILRIIYGMLKHKKAFDPEIDRKNRETTFQSKTRTQKDKNRRYQQFDSKAPISRRQSRKRKEREQSQSNNDAKYGINAPAPITV

SEQ ID NO: 42522 - protein, 342 aa, unidentified
MTTFVSFVGVDIASATFMACIGATPWKITIKPVKFENSEDGFISFLDWLKEHNLQAESAVVCMEATGVYSEGLAYFLYASGYTVAVEPPLNIQRKFPPNASKTDELDCQYIAEYAYRYQDKLSFWKPRAEILEQVKVLLTTRQHFSVQLTGHKNALHAINRKKVSSELAKRSHQTMIEQIAKAIKEIDQEIHRLIDSDPTFRHTLLLLMTVPGIGLQLAAHLLILMQETLDPRVLASFIGISPVKHESGSSVYSAPTSRHFGPPMLRKLLYLAACSVRTHKKQFQQYFFRKVAEGKHKKLVLNNIQNKILKIACAVVRSQQPYISSYVSVNPLVFQKSLTAS

SEQ ID NO: 42523 - protein, 355 aa, unidentified
MDGLEHQKEKRSMDHFAGLDVSVKETSVCVVDEMGRIVREVKVESEPEALLAVLKNPAYHFKRIGLEAGPLSQWLFSALAEAELPVVCVETRHMQAVLKAQINKTDRNDARGIAQMMRVGLYRPVHVKTLRSQKLRMLLTHRKLLQSKAIAVDNDLRGTLRNFGLKVGMVGTVKFEARIKELVENLPDLAGLVEPLLVVRRVLREQFVILHRRLLAIVRDDEVCRRLMTTPGVGPVVALTYRATVDVPARFRKSKSVGAVFGLTCSKYQSGEIDRSGRISRCGDEMMRVMLYEAAQSMMWSKKWSWLKAWAMQIARRRGMKKAIVALARRLAVILHRIWVDGTEFRWTREQAVAA

SEQ ID NO: 42524 - protein, 341 aa, unidentified
MTEIYAGLDISDKTTHVCAVDKDGKVAWRGVCATDPQALASALKAHCGGLVRVVLETGTLSSFLYHGLIERGIAVVCICARHAKGVLSVQVNKSDVHDAHGLAQMARTGWFKAVHMKDSQTHLDRARLKIREQMVQAHNAMVNQMRGLLKLFGLRLGGSTTPGMRNKRLEALLCQKPELRSVFAPLIASLTALEDQIKAISITLKMRAQSDAVCERLMSVPGVGPITALTFVCSIEDPARFAHGCDVGAYAGLVPRRFQSGERDSQGHISRAGDGNLRHTLYEAANNLLSRVKKPFALQTWGKALAVTKGAKRARVAVARKLATLLHKLWSSNERFDWDAA

SEQ ID NO: 42525 - protein, 313 aa, unidentified
MTESGIYVGIDISKSYLDVFIPKEDALRIEYTDAGMAELLEKLDQIEVAMVVMEATGKLEALCATTLANNKIPVAVVNPRQVRDFARSTGRLAKTDKIDAEMISRFGAAIEPTAKEVRTEDEERFDELLTRRRQVLGMMTTEKNRLGMLRDRKVRRRVVAHIRWLERELKDVDGEMSEAIKESPIWRGKDALLRSVPGVGEVTSKVLLGELPELGKLNRKEIASLVGVAPMNRDSGKMRGKRTTIGGRSTVRTALYMAALSATKHNPELRTFYLRLVDAGKPKKVALTATMRKLVILLNAIVARGTAWQPETP

SEQ ID NO: 42526 - protein, 347 aa, unidentified
MRFYTKQHKFYCGIDLHTKKMYLCILDEAGEIRVHRNIKTDRAVFLSVIAPYREDLVVAVECMFTWYWIADLCAKEGIPFILGHALYMKAIHGGKAKNDKIDSHKIAALLRGGMMPMAYVYPERMRTTRDLLRRRNHFMRKRAELYAHIQNTRSQYNLDDFFGRIAKPQNREGIVERFEHPCVQKSMAVDLEMISVYDPLIAQLEGYIIKTAKHHDPIAYALLQTIPGVGRILGLVILYEIEHINRFPTVQDFVSYCRLVKCTKESNGKKYGASGKKIGNAHLKWAFSEGAALFLKGNEPGKRYLDRLTNKYGKAKALSILAHRMGRAVYFMLKNKEAFNQKKFLGL

SEQ ID NO: 42527 - protein, 391 aa, unidentified
MSMYFVGIDISKYKHDCCIISAVDQQIVSKFTITNDKDGFEQLLISLNSLSNPEDIKIGFESTAHYALNLELFLENANHSFMEVNPVLIKEYKKSTTLRRTKTDSVDCESIARWLMTVEYKPHSKGFYHAYSLKSLTRLRDRLIRQRSFYLVKITNVLDHTFPEFKPFFNERLSKTAIYLLENYGSAEKMAHMNSTSYDKLRCISRGKFSIQQFLHLKELAANTVGVNNSIFDIELNSLLTLYNSLCKEIKNLEAEITRLIEEVHPHYMSIPGIGPISAAVIYAEYGDISNFSNPSQMLAFAGIEPGINDSGTESHGGRMVKHGSSQLRYVLLNACLPLIRFDLTFATYYAKKRAEGKKHRVAITHVAKKLIRVIYALERQDVDFNAQKIR

SEQ ID NO: 42528 - protein, 381 aa, unidentified
MTKIIRIGMDTSKSVFVLHGVDAAERPVLRKKLRRRQVLDFFAKLEPTKIGLEACGGAHYWARELRALGHEVVLLPPQYVKPYVKRNKNDAADAEAICEAMSRPTMRFVPVKSAEQQAALMLAGLRDQLIRRRTQVSNAIRGYAAEFGLTAAKGLSKIEPLLARIAADTALPELAKELFAIYGQDYARLKVQIAKTETKLMAWHKSNELSRRLAEIPSIGLIGASLLAMKVTDPHAFRSGRDFAAWLGLTPKDHSTAGKTRLGVITRAGDEALRSTLVAGATSVIQQVKKGRGHPSPWLVDLLKRKPAKLAAVALANKTARVAWKLMISGEHYNRARDFGRGEAPVVDREERRAALCGGSAQRSSLRSRATPPQTAEMARA

SEQ ID NO: 42529 - protein, 322 aa, unidentified
MRRKDQASFPASPAGLDRARTWIAHRAGQQAALVVIEGIGSYGAGLSDRVLTAGFPLAEPSVMGSADRRGVGKTDDLDAARIARSVLSVDIDRLRRPRADGSRVAMRVLVVAREQMTCERTRTINALTALVRTVELGVDARKSLTYSQLKEIAAWRARCEDATTATCRAEAVRLAKRIRALDAELVDNRKSLDALVKTNAPELTAAVGVGAVVAATVLIAWSHAGRVRSEAAFASLAGTCPVPASSGNTVRYRLNRGGDRRLNRALTTVVIVRMRVDPQTRTYVERRRGEGRTTKEIMRSLKRYVTRQLFRTLATAHPILVS

SEQ ID NO: 42530 - protein, 424 aa, unidentified
MKNCNKQNEKIELVDEKTLVIGVDIGSYDEYARAFTCRKQELSKKPLHFYNTAEGFKTFKDWAVNIMKANGLEKIIVGMEPTSIYWEALATYCKDNGMILVHVNPAAVHKSKELDDNDPSKNDREDPKVIAGLVADGRYQFPYMPEEEYAELRELSNLRIRTQESLTQCKNRLSRWYSRYFPEFKGAYKNVVSKTAMMILDLYPLPEDIVTLGVEGILQIWKSKKVRGAGERKARKLYEAARNSIGRKEAASIARIEFKSIKEDLDRYQERLDEIEKKADEILPKIKNVDKLFEIKGVGKATVLTFLSEIGEISRFDNPKEIQKLAGYAIVTNESCKHQGEKRISYRGRKRLRWVLYQTALSVIAKNAEFRQIHAYYTTRANNPLKGIQSVVAVACKMIRIFYKILTDGVSYDGTKMTQDIVHA

SEQ ID NO: 42531 - protein, 460 aa, unidentified
MSRQKLAGMQRSVPKKGDWKALEIVHPDAAGVDVGGSEHWVAISPNRDPEPVRRFGCFTADLREMGRWLVEKGVRSVAMQSTGVYWMPVFEVLEQQGLEVYLVNAQHTKNVPGRKSDIQECQWLLKLHAFGLQNNSFQPADEIRIARTLWRQRSNLVTEAASVVQRMQKVLTEMNVQLSNVLSDISGLSGMKIIGGILEGERDPWELAALVEPEVKATPEEIAKSLEGNWREELLFVLRQHVELYRIYQGKIDDCDLQTRKHLELLGSKVDLKTQPIGRRPKGKKNSKNAPGFDLRTELYRITGIDWSQINGIDVLTAQTVITEAGADLSAFPTEKQFASWLGLSPTNEQSGAKILNRRTRKVVNRATVAFRNAAVTLLRSQSYLGAQYRRLRTRLGAPKAITAMARKLACLFYRLIKYGQQYVDKGTEYYEARYREQQIRALAKRAQKLGLQLVTPNSA

SEQ ID NO: 42532 - protein, 404 aa, unidentified
MYNAVGIDVSKGKSTVAVLQPGGTVMRKPFDVSHTSQNLNELADYLSSLDGTTKIVMECTGRYHEPMVKALSEAGLFVSIVNPHLIKNFGNNSLRKVKSDPADARKIARYTLDNWTELRQYSGMDNTRTQLKTLNSQFSFFMKQKVAAKANLIALLDNTYPGVNKLFDSPTREDGSEKWVDYAYSFWHADCVRKIGLKAFTERYKSFCKKHHYIFQQDKPEKLFNASKELVAVFPKEKTYKLLIQQSIQQLNLASEHVERLRREMNELASTLPEYSTVMGIYGVGKTYGPQLIAEIGDVSRFTHREALTAFAGVDPGVDESGQHKSKSNRASKVGSARLRKTLFQIMTTLLQNAPEADPVYRFLDKKRSQGKPYYVYMTAGANKFLRIYYGKVKECLRNLEQTE

SEQ ID NO: 42533 - protein, 324 aa, unidentified
MSRTEMMGVGIDVAKATLELSIGAVGKTDTFGNDPEGHAALLQMLRNSGREVSLVVLEATGRLELEVACLLQAEGYAVAVVNPRAARDFARSIGALAKTDAIDARVLAQMAAALANDPRLLARHVRALPSEERRELDALVGRRRQLMTMLVAERLRLMSAHPKVRASLGAMCAALEAQIADLERRMAEHIAEHEAATAALLRTMPGIGPTSAACLIANLPELGRLNRQQISALVGVAPFANDSGTHRGRRSIRGGRFELRRVLYMAAMAAIRHANPVIAPFYARLRTAGKCHKVALVACIRKMLTILNTMLKTGTKFDPATHRG

SEQ ID NO: 42534 - protein, 407 aa, unidentified
MTNEKLKVIAGIDTHADTHHVALITGYGKHLADRKFLAVATGYREIAAFLTSLGPVTAVGIEGTGSYGAELSRVLASRRFAIKEVNRPNRAERRLHGKSDPLDAYQAAESVLADRGTSTPKSRNRFVEALRVLRTARTSAMKARTAVLSQISAVLRAAPETVRTRYRGMTSDARVKAMTATRPTGDSADPCTATVLTLKRMGSRHRFLSDEIAAIDVELSQIVAVHAPALLEINGVGAVVASQLLVTVGDNPDRLSSEAAFAALSGTAPIPASSGKTSRHRLSRGGDRQANASLYRIVLVRMSRDRRTKEYVAKRTADGKSKKEIIRCLKRYVAREIYRVLQNPRMAPPTNDLQPRRVALGLTMSAAAMDLGVWPTTILRIERGQMRDLHAIQRYRGWIEQETLIGT

SEQ ID NO: 42535 - protein, 346 aa, unidentified
MNQIIRIGMDTSKHFFQLHGVDAAEQPVLRRKLGRNQMLTFFAKLPPTVVGMEACGAAHYWGRELRKLGHEVRLMAPQHVKAYVKRNKNDGRDAEALCEAMSRPTMQFVTVKTEEQQAALMLAGVREQLIARRTQLSNAIRGYAAEFGLTAAKGLDKIEPLLLQIAQDEMVPESARELLAFQGRDYARLQIELKAIEARLMAWHRANADSRRLAQIPGVGPIGATALVMKAPDPRLFRSGRHFAAWIGLTPKDHSTAGKTRLGKITRAGDERLRSVLVAGATAVIQQARQGRGRASPWLLALLKRKPPKLAAVALANKIARIAWKLMVTGESYDGARMLGASALAA

SEQ ID NO: 42536 - protein, 341 aa, unidentified
MLIIGCDYHPSVQQIALLDTESGECQERRLAHRAEAEHFYHELRQPGVSVRVGIEATGQSRWFERLLAELGFEVWIGDPARIRAKQVRKQKNDRMDAAHLLKLMIKDDFPRIWVPSPENRDIRQLVWHRHRLVQMRTRVMNQLQAIAMNEGIRRKRGLWTQQGRAQLEALSLPGWTSRRRQELLQLLDRLDPNIEQLTEAVQQEAQGRPEVQRLQTHPGVGPITALAYVLVLGTPDRFRCGKQVGSYLGMIPCEDSSADHWRLGHISKQGNGLLRYLLGQSALRATRLDDDWRRQYAHLTLRRNHAVAKMAMARKLAVRLFWMWRKQWDYEQWKKFGSHAG

SEQ ID NO: 42537 - protein, 416 aa, unidentified
MRTLTSKLADIQADVLLVGVDLAEVNVGVAITYEARQVGRIRFEHNRAGYDRFISWQEQMKGRVGARQVLVGMEPTNHYWQLLAAELERRGIAYRLVNPYTVKKHREGDQLDRAKNDQRDGFTIADLLRTGKFTFTQRQEGSYAELRGYSNRYHQLRRQIARTKIQLRQAVAQTFPELGEAFKDLTGQTAAAMLHNQASAHQIGQLSETAFLQAVRADYQGSRFQWQKLGQAYALAQSSVGLVETEALQLAIGGHLQLLTLLEAQLTTVCAALLDTFLALPEAKALLSLGIGAVSAALLLAEIGDPAAFTNARQLVKLAGIQPSPNQSGKKTNSPTPISRKGRPRLRTILYFACLRLVQTDVAFAAYYQHLQQRPQNPLSRIQALVVLMHKLLHIAWSLIRHQSTYDPALWRSARS

SEQ ID NO: 42538 - protein, 346 aa, unidentified
MQSIKTWAGVDVSAKTLAAKRRRENEEKDEAKAFSNDAAGNRELLKWIGKGARVCMEATGVYHLQLALMLVAAGVEVMVINPRVAKDFGRALSNRSKTDRVDAGTLLEYVWRMKFVAWKAPRAAILELRELGRRLSELVHAGAEEKNRFVVIRGDAGLSEQFAILTKIPGIARRSAILLLTELAVLDPTMTVKQIVGHAGLDPREYESGSSVQKPPRISKLGNARLRAVLYMPALTAIRHDRGARLFFAQLVARGKKKMQAIVAVMRKLLHGIWIVLQRRTSFDSSILFAASLAKAESSDSAVATNQPEPSQDHPKGRSEAEELRQQLDPDSAQATRSPRKRSKAA

SEQ ID NO: 42539 - protein, 349 aa, unidentified
MIWIGVDAHKQVHQAIALGTEGPVSERTIANTPQAWAALLEWAQQWPERIWAIEGAWYLGRGLAQYLAAQGERVHEVNGRWTANRRRGMRTAGKSDRLDARSVATLLREEAGTLPRVYADEDELAAVQLWSRMQAELTKDLTRLINRLHDLLLQCDPQYKDRLPDLTTKAAIAALRTYTAPGKGALAAEREAMIRATAEQLALLDEQDRQLRKKLERVSKTRFSPLRQIEGIGPLIACAIVAEVGRPRAGFGESQLAALGGLCPLEASSAGAVRHRRNRRGNRRLNMLFHQIVLTQGRIYAPARTYLLRRQGEGRTAREARRALKRLIVRRVYRAWRECFDINIERVAA

SEQ ID NO: 42540 - protein, 391 aa, unidentified
MEVMVETCCGIDVHQKSIVCCILDGPLDTNKPKKQHRTFGTTTKKLREALTWIQSQNVTHVFFESTGQYWIPIFNIFYDSNLTLILANPQHIKNLPGKKTDMNDAEWIAQLGRCGLIHPSYIPCEEVQQLRLLTRRRKAYTERITQCKNEIHNILQRANIKLTSYLSDIYGITGITLLEMFIDGEVITEQTILPKIHGKVKATAAELVEAMDGKLSFEDRFLLGQSLEHYRHSVNQVEEITVVIKQYVLERFEREYNLLIELPGVSAIVACVILSEIGPNVEAFKSQGNLASWAGVCPGSYESAGIKKSSHTTQGNKYLKSILFQAGGTAGRSKDEAFHNLYARISGRSSKMKAIIACAHKMIRVIYKILSTGEHYDAKKALGLRQQARAN

SEQ ID NO: 42541 - protein, 348 aa, unidentified
MDVHKESISIAVMNSTGKFVMECVIETKASMLLQFIAGLRGDVRVTFEEGTWAAWLYDLLKPHVSEVVVCNPRKNALLKNGSKSDRIDARKLAELLRGNQLKPVYHGEQGLRTLKELARSYLTISKDVTRVMNRLKALYRSWGIACAGTHVYAPRHRSEWLGRISEAGVRRRAEHCYQQLDVLRLLRQQIRRDLLLESKKHQAWRLLGLIPGIGPIRAALLIALIQTPHRFRTKRHLWTYSGLGLETHDSAQYRVVEGQLQRSKKPVTLRGLNQDHNHDLKDIFKGAATRVSSSSHGPLHDFYEHLLAQGRKPTMARLTLARKIAAITLIVWKKEVHFDASYLTSQAA

SEQ ID NO: 42542 - protein, 356 aa, unidentified
MNEGSYVGLDVHARSVVAGVIDVGSGEVRSLRVPPGSEGTVAWLKTLPAPVRVVYEAGPTGYGLARACAEAGIGCVVAAPSKIRPAADRVKTDRRDAERLARLLRLGEITSVRVPGPEEEAARDLVRAREDARGDLMRARHRLSKLLLRHGAVYDATAWTRAHDAWLRKQRSPGGPLAIVFDECYGRMIDAKTRRDALDKAISELAASEPYVDVVERLVCLRGVSTLTAFALTVELGDWNRFRPESLGPFLGLTPSENSSGERRRQGAITKTGNTHARRLLIEAAWHQRSAPRLSITLERRRTGKSLAVRAQADSSARRPHGRWNALEARGKPRLIVVVAVARELAGHCWALATME

SEQ ID NO: 42543 - protein, 342 aa, unidentified
MGQVTTIGVNIAKSVFQVHGVDATGEVILRRRLTRARVVPFFAKLAPCLVGIEACATSYHWARELRKLGHEVRLMPPSYVKAYVKRQKNDTADAEAICEAVTRPTMRFVEVKSPEQQSIMVVHGTRTMLMRQRIQLSNAIRGHMAEFGVVAPVGREGLLTLTDTLHDEADDRVPAEARHCLQMLAAQLRLVNAQILENDRRIRLSARATDVGRRLMGIPGVGPVLASAFVATVPDPHAFRSGRNLAAWIGLVPRQNSSGGKERLGGITKQGNRYLRQLLFVGAMAVIRYAERHGTRRPWLVRLLARRTTKIAAAALANKTARMVWAIMTSGQSYREPELRTA

SEQ ID NO: 42544 - protein, 451 aa, unidentified
MTRKMHAEDLSLEVVHPHAAGIDIGNEAHYVAVPPDRDNKSVRRFGCTTAELQEMAVWLKQCGIRTVAMQSTGVYWIAVYDILEAAGLEVYLVNARETKNLPGRKSDVQESPWLMKLHTYGLLRNSFRPPQEIRTMRTYWRQRNDLIRSAARHVQRMQKALTQMNIQLANVLSEVSGVTGQAIIQAILAGERDPRKLAAFRDKRVKASEQEIARSLEGNWQEDLLFMLKQEQDGYEFCQKQMSECDERLQQYLRQREDRSKGAELPDENRKERLRKKKTNKPRFDLRTELFRMTGTDLTQIDAIDVRTAATVISEAGWDMSKWPTEHHFVSWLRLCPDNRISGDKVIGKGRLPINNRLSVALKIAASTLRQSNTYLGAQFRRLKTRLGPPIAIKAMAAKLARLLYRMLRYGMRFIDRGAQFYEAQHRWRQINSLKRKAANFGLKIIDAPAA

SEQ ID NO: 42545 - protein, 394 aa, unidentified
MKLVGIDVGKNSHHFCVMDKETGEFNVTPTSFSNNKEGFDFLINSLKPYSKKSILLGMEDTGHYHVALLKFLLSNGYTVALINPKTTDLTRKMEGGITKNDKLDTITICDVLDTPERKKQYRITKVDRFDLYEQRQLTRHHHDLKEELNVYCNRLQKSIDLVFPEFNTLFSSKYGVVYMNLLKTFGNAEIIASTDIRTIRKCFEIKGRGNRISLTPEKLKECAKNSIGISSEVETIQIKHLVSQIMLIKEQIAEIDKKIEEFSITNNSPILSIPGISHFSGTSILAELGDIGNYSKPSQIIKFAGVAPYHYESSQYNAQHTGITKKGSKYLRKTLYQIILPVIKYNPVFKKYYLLKISQGKGHRCAQGHCIRKLLRIIYHLLETGQSFDPALLR

SEQ ID NO: 42546 - protein, 340 aa, unidentified
MGDITTIGLDLAKNVFQVHAVDAAGNVVVRKRLRRGQVLVFFARIPSCLVGLEACATAHHWARELIALGHEARLMPPNYVKAYVKRNKHDVADAEAICEAVRRPSIRFVPLKTVEQQSALMMHRARDLLIRQRTMLVNALRGHLAEFGLIEAQGLHKVVRLITIVMDEMDRRVPDTARQVLKVIVHQIEDIQTGITELETQLLAWHKNSPVSQRLVTIPGIGPIIATAIAATVADPSTFRSGREFAAWLGLVPRQNSTGGKARLGGISKRGDSYLRRLLVNSAHTVLLCSKAAKTDPWLTSLLGRKPRLVAAVALANKTARIAWAIMSRQDTYRHVAAAA

SEQ ID NO: 42547 - protein, 370 aa, unidentified
MGKSALYVGLDVHKMSVDVAVAEPGPGAEVRFYGRIGGDLEALDKVTRKLQAKGAELRFAYEAGPCGYQVYRHLTAQGHSCLVAAPALIPRRPGDRLKNDRRDALALARLLRAGELTPVKVPDADDEAMRDLTRAREDAICVERRARQRTVAFLLRHGRVYPGKTTWGRGHWAWLLQQVMDHPAQQIVLQEYLDAVREASARVLRLTGQIRELIPQWRRAPFVAAYQALRGVSFIVAATVVAEVGDLDRFNNPKELMAYLGLVPSEHSSGASVRRGRITKTGNSHARRVLVEAAWAYRLRARVSRTLLKRQEGLPERVRQLAWKAQLRLCTRYRRLLARGKARQTIVIALARELAAFLWAIGRAVAPATA

SEQ ID NO: 42548 - protein, 418 aa, unidentified
MKVVYPICCGVDVHKTFLVATLITSQGITPKYSKKRFSTFNNSILQFKQWLIDNDCYDVCMESTGKYWVPVYNLLEDTIRITVANPKWVKAVKGHKDDKKDSKWIGDLFRLGLVPGSYIPNKPIRILREYTRYRSKLVSCRSSEKNRFQNAFTVCNVALDAVVSDMFGKSATSITDYLISSDIFNPEYCTSLLQKSLKKKADTVVESIEGYQMTQTQKERMIMIRSHLDYVTKSIAELDGKLDKMVEPYESAIKLLCTIPGVNRASAITIISEVGTDMSQFTNSKRLCCWAGLTPGNNESAGKKKSVRITRAGVYLKPALVQVAHAAVKSDKSPYYKIKYEHIYKRRGKKRAIIAIARMILTAIYNMFITGEVWNPSDLYKIDMPQEMVAKQKEKAVKQAAKLLISLGLIKATDISVA

SEQ ID NO: 42549 - protein, 356 aa, unidentified
METIVKIIKWSVGIDVGAKSVRCCLSSINSSQSVKVKASRKVNNTAAGLQELLLWIQKHYKEGEAPLSIAMEATGVYYERCALLLQKEGFRVSVVLPTKAKRYLQAIGLKSKNDKIDAEGLARMGAEQQLAEWSAASAQMYGLRLLTRQHEDLQKSITSFNNQLHAISHGMYRFEDIEKTYQQTLSALTQLLKQVEDAISESVKANEVLKQKVELLCSIKGVGELTAATIIAETNGFALFENQKQLESFSGYDVIENQSGDHVGRTKISKKGNSHIRRILHMAALNAVTYKVKPFVDLYERVYPKTNIKMKGYVAVQRKLLVMLYTLYKKNEKFDPGYKPKTIGEKELEPSFGLAL

SEQ ID NO: 42550 - protein, 347 aa, unidentified
MRFYTQQHQYYCGIDLHARAMYVCIKDQEGKILVHRNLPTKPERFLKVIAPYRDDIAVSVECMFAWYWLADLCAKENIPFVLGHALYMKAIHGGKAKNDRIDSQKIAALLRGGLIPMAYVYPPEMRSTRDLMRRRNHLMRKRAELLAHIQNTNTQYNLPPIIEKLSRHFNRTGIAERFEDHSVRKSVETDIDLINYYDRLLKELEYFIGKTAKKHDVNAYYWLRSVPGIGKILSLVILYEIHDINRFPRVQDFASYCRLVKPAKESAGKRYAGPGKKIGNAHLKWAFSEAACLFLRGNPEGKKYFAKLERKHGKGKALTVLAHKIARAVYYMLKRKVPFDMKQFIGS

SEQ ID NO: 42551 - protein, 424 aa, unidentified
MKNTAAWKLKQVPEGYLVVGVDPHKKRHAAVAITQDFTIQAKFKFDNTREGLETMLHRAKIEMVTSCCRGVIFAIETGGHYWRNVAYFLDEQGIPFRFINQFTLKRRREGKDLNRRKNDYRDSEVAAQLLCTGEFTESKVLQGVYAELRTAHNAYRRLVKERTRMTNLVKGLLDGLFPEFTQVFKDPCGLTALSVLSSCVIPSMIAGMTDGEFVATIEAHHKGHRLMRRKLMALHHLAKTSIGIKAGARSVASEISFLVEKFELIGRHIHIIERTLIELVDETEEGKYLLSITGLNYIAVAGLLAELGSFKAYQSAKQMIKMAGSNPTESESAGKKGTHTPMSKQGRPVLRYCAWTAVIPMLRFNSDFRAWAKQLRERPVHANPLGGREVVGAALNRLLRLAFAMVKNQTYYQVSKPELTLVAV

SEQ ID NO: 42552 - protein, 314 aa, unidentified
MNTEQEINVGIDTGKHQLDIYIRPVGEYFTVENNEKGIKEAIKRIKKHKPTRLIIEATGRLELPFACTAFKAGLPIVIANAYQVNQFAKSTGKRAKTDKLDASMIAYYGEALKPRLTEIKADNVQKISDLLARRAQLIEMRTMEKNRYSILSKEIKRSNTRIIKHLNQEIEWVENKLDTLIEETPDWNNTLQILLSVKGVGKVLAYTLLSDLPELGQLNRKEIAALIGVAPMNRESGAYKGKRRIRGGRARIRTVLFMAMMSTIRSNPRFKRDYQRLVAKGKPKKVAIVACMRKMITILNVMVKTETIWDENRA

SEQ ID NO: 42553 - protein, 416 aa, unidentified
MNAVGIDVSSRKSTVAVLRPLGEVVCLPFDVTHDIAGLASLAEKLKALDGETRVVMEHTGRYYEAVAKALHEAGLFVCAVNPLLIKEYGANSLRRVKTDKADAIKIARYALDNWADLRDFTPMDAIRYDLKTLNRQFQLASKQRTASANNLIALLEQSFPGIRKCFDSPVRSDGTQKWVDFAHSFWHVDCVRKQPFAAFCERYRKWCKRHAYLFKLSNAEEVYALAKRAVVLTPKSKVVKVLVQEAANQLISISRSVEVYRAEMDRLAAMLPEYPVVMAMYGVGKSYGPQLMAEIGDVRRFERKQALVAFAGIDPMPNQSGDKNVRSNKSSKRGSPYLRKTLFNVIRTYLQCAPQDEPVFQFLNRKRAEGKPFYVYMLAAANKFLRRYYAKLRDYFATLDTLQPVAPIPTILKATL

SEQ ID NO: 42554 - protein, 363 aa, unidentified
MKTILALDLGKFKTVSCLLTEDHASIPVFKTIMTNPKTFEQFLLDVKPSLLVLEACGLSGWVVDLARKLGVEVLVAHPGGEAWQWGKVKRKTDKDDALKLAQMARNNEIDSVHVPSPEHRQFQQLVRYRKKLQSQAIATQNAIRSNLMTQGEECAAGKIAWSKSYIENDLGKLRKSFEECTASEYWRGTLDVQLTHLVATLKLLRGIEKQLAFISKPDPRIEIVQSIPGVGVVGSQVIVAHIDDAKRFKSARKVSSYAGLAPKKWQSGKMDRQNRISRRGPRLLRSVLTEVAWCAIRFNPHFKALYDRVRGGSKSRKKQAIIAVARKILVTAWAMLRDGKNWSPPQAKLMVQADPKLASASTA

SEQ ID NO: 42555 - protein, 303 aa, unidentified
MKDSTFWVGLDWHADSVKVSVFSATGSEPVERFEIVPDDRGLARLRKRLRSHGGRLRCVYEAGPCGYDPQRYLAQGRVACEIAAPSLIPSRPGDRVKTDRRDADKLGRLYRAGELTLVPVPDPGQEALRDLLRAREDAQEDLLRRRHRLSKFLLRRGYRYRDGSAWTQRHWAWIRSIHFEDLHSQTVYEEYLAAVTEGLDRIARFDRFVEETSHLPEYATRAGRFQTLRGVATRTALTILAESGDLRRYAKASQFMSATGLVVSEHSSGGRRRQGGITKTGNAHLRRVLVEAAWHYRHRPSLS

SEQ ID NO: 42556 - protein, 344 aa, unidentified
MTYYAGLDVSLRTVNLCVIDDQGELVAEAKLASDVQDIVAYLDGLELDVKSVGLEAGTLAQYLTYGLQAASFEVICMEARQVKGALSAMRNKTDKHDARGIAQILRSGWYSQVHVKSMQSHHIRMLLSSRRAVLSKCVDLENEVRGLFKIFGIKLPPKLGHGAFDVTVRDIIEIDETLSHALLPMLDARLVLYRTFRVLDNRTRKMANADPVCQRLMTVPGVGFITALTFKAGVDDPSRFKRSRTVGAHFGLTPRRFQSGELDIDGHISKCGDADVRRTLYTAANALLTRSSRWSPLKAWGMKLAKTRGHRRAVIAVARKLAVILHRVWIDDTQFRWGTEGARS

SEQ ID NO: 42557 - protein, 377 aa, unidentified
MSKIRFVGLDVHADTIAVAIAEPGGEVRSLGIIPNRLESIRKLFGKLGPIQHLKVCYEAGPTGYVLYWQLTALGIACEVVAPTLVPTKAGDRVKTNRRDAEKLARCYRAGELTAVWVPDAAHEALRDLVRAREAAKKDQLRARHRLGKFLLRRGQRPTDAGKAWTKKYLEWIKTHVRFDQPALEATLAHYLHEVEHAAEQILKLERVIDEAVTQASPEIRSVIEALQALRGVAQMTAATIVCELGSLSRFESPRQLMGYSGLVSREHSSGNHIQRGAITKTGNAHLRRVLVEAAWAYQHRPNVTGFLLRRQKSLALSEEVKQMAWKAQHRLHKRYQAFALRGKNKNQIVTALGRELLGFVWAIAVHTEAQSKLLQQV

SEQ ID NO: 42558 - protein, 478 aa, unidentified
MAKRKMSTFERLHSGKMNRQQRKQLQQRLYAADPGLQVVHPDAAGIDVGNASHFVAVPPDRDEQPVQEFGSWTADLQRMVAWLRRCGIRTVVIQSTGVYWVALQEILEREGFEVYLVNAQGTKNLPGRKSDVQECQWLMKLHTYGLLRNSFHPPEQIQAVRTIWRQRDRLVKEAARDIQQVQKALTTMNVQLSNAISDVSGVTGQAIIRAILQGERNPRQLAALRDRRIAASEEEIALSLEGNWREDILFELQQVVEAYDFHQKQIAACDVQLQRSMSVLPDRSGPGASEGTTPAEKRKPRRHKSKSNQPVFDLAAELQRTMGIDMTTIDGIDVMTTQVILSELGPEFTSSFPSEDHFASWLELAPRRDITGGKVIRQKSRKSKNRVANALRMAAESLSRSDSYLGARYRHLRARLGGKKAVKATARYLACLVYRLLTKGQAYVDRGAAHFERKRTDREMVALKRKAAELGMQLIAAS

SEQ ID NO: 42559 - protein, 452 aa, unidentified
MSASKRRKSKVEFAMVNEHAAAIDVGSRSHAVSIGAHHSQSKEYGVFTDELQQLCEWLVASGVKTVAMESTGFYWKQLFVMLQSYGLEVYLVNASFAKNIRGRKPSDMADSRWIWQLHTAGLLPNSFQPDFFTDTLRSYVRHRRRRIQDASRCINRMQKCLVLMNLQLPIVLTDIMGKSGQAIIKAILSGERCSDTLAQLADPRVKADKQTISRALTGFWKEEQLFELEQNWDLYHYYQKQIAECDQKIDALLSDQVQKKGANKLTYTPVKKKRRQKNDGPVPVEQYAYQLTGGVDLLQVDGISYQFIQTFMAEVGTDLSAFPSQGHFASWLCLTPNKKVSAGKVISSKTKKSKHRLRVAFKNAAVAAGKQKDSSLGHYYRKMKAKKGKGTAVTATARKLAIIVYNMIQKGEAYDPKRLEPKQKSGHRKRKIKHIQRTIEQLNVKSEEIRFE

SEQ ID NO: 42560 - protein, 318 aa, unidentified
MQTIPVTVYAGVDVAKATLQLHLQGRQAEFSNQAAGLVQLCQQLKTIPHIHVVCEATGGYERLLVQAMHQAQIPVSVTNPAQVRAAAQAQGQRAKTDRIDAALLTDYGQRYQPKPTSPTTASQDQLVALTQWLMQLVQAQALAKTQAEHHEAAFVCGRHTKLMAHYQSQIVAVEKQIRALLAQDAQLQQRVDCLDEIKGVGARTAWLVLAHMPELGQINRQEVAALAGLAPWTRQSGTMKGMRCIGGGRPEVRLALYMAALSAARCNSVLKPFYQRLRAKEKPAKVALTAVMRRLLVYMNHQLKALQANTDGHQAPKF

SEQ ID NO: 42561 - protein, 367 aa, unidentified
MFTERRSVGLDVHARSVAAAAIDGVTGELVQSKLTPSYEHIRSWIADLPGPVAVTYEAGPTGFGLQRVLRAAGIRCEVAAPSKLQKPSGDRVKTDAKDAVHLARLLRLDEITPVAIPSVDQEAARDLVRAREDCRGDLMRARHRLSKLLLRHGIVYYGGNAWTGKHDTWLRHHAAPQLRTRATRLAFDSDYETVLMVKARRDRLDTAIGEMASESEFTELVRRLGCLRGVSTLTGFALAVEIGDWHRFTGNTIGSFVGLVPSEYSSGSSRVQGSITKTGNTHVRRLLVEAAWHHRARYTAGKTMRDRWELAPAAARVRPDEGNRRLHQRWVKFIERRKRHTIANVAIARELAGWCWSLAVLEEHPQH

SEQ ID NO: 42562 - protein, 384 aa, unidentified
MTKHNILFIGLDTHKTFTEVAYIEDQRGAKSIHLGKILSNKTAFKKLARQLQSKYPDATLHFVYEAGPCGYWIYRLLTSLNHCCYVIAPSLIPKKPGVRIKTDKRDALKLAKLLKSEDLTPIYVPEPEDEAVRDLSRARETGMKDLKDGKYQLKALLLRNNINSKVKDNWSLQHLRWLTELILPHPCQQIVLQEAVSTITERLKRLKRLDNELTHQVKKWRFYPVVKAIQALRGVRLLVATGVIAELGDLSRFDHPRKLMSYLGLVPSEHSSGGKRHLGAITKCGNSRARRLLVEGAHSYKHNANISKEMQLRQEGLSKEVNDMAWQAQLRLCRRYNRLMHKGKHRNVAVTAIAREMIAYIWAISREVVLPKVDVKLRISRMPA

SEQ ID NO: 42563 - protein, 408 aa, unidentified
MRVVGLDLHRVFAEAVMLEDGVVRRLGRIGMTRDHLAAFARTLTRDDHVVVEATGNASAVAELIRPHVGRVVIANPRQVRLIAEARVKTDVVDATVLARLYASGFLPEVWIPDEATLGLRRQVTRRTQIVRQRARLKTIVQSILHAHLVPPCPHADLFGPRGRAWLSGQPLPSDEGDAVARHLREYDRLTEDLKVVERELAREARADPNVTRLMTIPGIDMVVAVGLIAAIGPVARFDGPDRLVAYLGLNPSVHQSGEGRPRHGRITKQGRTHARTMLVEAAWQAVRGPGPLRAFFQRVSGRRGPHVAAVALARKLAVIIWHLLTRGEDYAWVRPALHAKKLRDLELRSGEPARRGQRGAAYAYNLTRTRQEERRRVEQAEVAYRRMTEGWSRRGRRAPTGAAKEERL

SEQ ID NO: 42564 - protein, 344 aa, unidentified
MDHFAGLDVSVKETSICIVDDTGRIVREVKVASEPEALLKVLGNPAYRFKRIGLEAGPLSQWLFSALAEAELPVVCVETRHMQAVLKAQINKTDRNDARGIAQMIRVGLYRPVHVKTLRSQKLRMLLTHRKLLQSKAIAIENDLRGTLRNFGLKVGMVGKVRFEARIQELVENIPDLAALVEPLLIVRRVLREQIVILHRRLLAIVRDDEVCRRLMTTPGVGPVVALTYRATVDVPARFRKSKAVGAVFGLTCARYQSGEIDWSGRISRCGDEMMRVMLYEAAQSMMRSKKWSWLKAWAMQIARRRGMKKAIVALARRLAVIMHRIWVDGTEFRWTREQAAAAA

SEQ ID NO: 42565 - protein, 391 aa, unidentified
MPQPNDLSRSLTALDQDSTLIAVVELSQSSWLVGAIIPGVERCPAKKLEASESLLLGLLHRWRDEAAKAGHNIERIAVAFEAGRDGFWLARWLQARGVEAHVIHATSIAVSREHRRAKTDRLDAALLQRAFLGWLRGERGHCTMVAVPSLEEEDAKRPSREREALVSERTRIGNRMGSALARLGIRGFKPGLRKAAERLEQLRTPEGMPLLPNTVAELRRDLIRLRLINDQIAEIEAARVERLRQQPDAARHPMILLLARVVGVGIETADMLVQEVLSRQLRDRRAVARYGGLTGSPEESGARRREKGLARAGNARVRRGMLQFAWRFLMFQKDSALAQWYRARTADARGATRKTMIVALARKLLVALWKLVTTGEVPQGVVLRPAIAAAV

SEQ ID NO: 42566 - protein, 408 aa, unidentified
MELLYPRCAGLDVHKDVVMACARIQGGEYAKHPTAEFPTTTRGLLALADWLEEHQCRHVAMEATGVYWKPVWHVLEGRFELLLVNPAHARNVPGRKSDVNDAHWLADLLAHGLIRASFVPPAPIQELRDLTRTRKQLVRQIARHTLRIQKTLEDANLKLTGVISDLLGTSGRAILKALIAGETDPERLLEHTTGRLKAPRPRLLDGLQGVVTDHHRFMLKLHLRQIDSLETGISQLERQMEKLLRPFRERVEQLTTIPGVSDTVAQVLIAEIGLDMTRFPTAGHLVSWAGLCPRMDESAGKRRSNRVRQGAPWLKTTLVMAGWAATGARDTYLRAQFQRLKTRRGPKKAVVAVAASILTAAYYILRDHVPYQELGADYFDRRDRSKVVRRLTRRIEALGYRVDLHHVA

SEQ ID NO: 42567 - protein, 360 aa, unidentified
MAKAKSLVGLDVHATTVVAAVLDADTGQLQTFSMSGESIEVAGFCAGLPRPARVAYEAGPTGYGLARELINRRVECVVAAPSKIPRASGDRVKTDRRDAEHLARLLLAGKLHAVRVPGDEEEALRDLVRARDAVRTDLMRCRHRLSKLLLRHGIRFDDGQAWTKSHRLWLAGVTLDWPAAQATLLDARGAIDALSHRRDQLEREIVALLPACPWAVQVGRLRCLRGVDTLTAVGLCAEIGDFERFARAEQLMSYIGLVPSEATTGQQRRLGSITKTGSGHARRLLVEAAWHYRKTPAISKALTDRQADQPAEAIAIAWSAQRRLHRTWTHLEARANRRTVIAVAAARELTGFCWAICQIE

SEQ ID NO: 42568 - protein, 342 aa, unidentified
MKEVNIIGLDLAQNVFQAHGAGTDGSVAFRRKLSRGQLLKFLSDQPPCVVAMEACASAHHWGRAVGDLGHEIRLIPPAYVKPFVKRQKNDMADAEAISEAASRPTMRFVAVKSEAQQAAAMVYRTRDLFIRQRTQTINALRAHLAEQGIVAPKGPAHIGRLAGIIDGDEGTLPVEVRELARLLLDQIADYAEKIADLDAKLRQRAASDDTARRLTTIPGVGPITAAAITTFAPPMETFSKGRDFAAWVGLTPRQHSSGGEERLGRTSKMGQKDIRRLLITGAIAVVRWAARKGAPEGSWLARMLARKPKMLVAVALANRMARTAWALMRKGEDYRDPVAMAA

SEQ ID NO: 42569 - protein, 430 aa, unidentified
MQEVDEQDLYVDRVAALDLGKAGLEACVRVPHEDRPGRRMQEIRAYATTTTALLEMADWLRCQSVSRVVMESTSDYWKGVFWLLEAEGFDCWLVNARQVKNVPGRAKTDKADAVWLAKVAERGMCRPSLVQPAPIRKLRDLTRYRRSLIEDRTREMQRAEKLLEDAQVKLSSVISDIFGVSGRQMLQALIDGQRDPKVLAGMARGSMRGKIPQLEEALRGFFTDHHAVLLRIMLAKIDRLSDQAALLDAEIEQAISPFSAQAAQLDEITGVGQVAAQELIAEIGVEMSRFPTAAHLVSWAKFCPQTHESAGRKKGKGRGKDNRWLAGTLGRIVFSFGKTDTFLGERYRRIARRRGKSKALVAAGNSVLTVIHQLLSDPQAHFHDLGANYYDSRINKDRRARSLASQLQALTGQKIVIRNGKAVLIEPEAA

SEQ ID NO: 42570 - protein, 433 aa, unidentified
MTTSLFAGREALRNVDVAIGAVDGRVEHDRRTHVIETGDIDVFLGLDVGKGEHHATAVTPAGKKAFDKRLPNTEPKLRELSAKLQAKHGTVLVVVDQPASIGALPLAVARDMGCPVAYLPGLTMRRIADLYPGEAKTDARDAFIIADAARAMPHTLRSVDLEDETIAELEMIVGFDDDLAGEATRVANRLHGLLTQIHPSLERALGPRLQHPAVLALLERFGSPAQIRKAGRRRLVTLLRPKAPRMAERLVEDIFTALDEQTVVVPGTEAAALIVPSLDASLAAVLDQRKLLAGRIEELLEAHPLSQVLNSMPGIGIRTGARILIEVGDGSSFPSAAHLAAYAGLAPATRNSGSSIRGEQPSRRGNKQLKRAFFLSAFAALGDPASRAYYDKKIAQGKHHTQALLCLARRRADVLFAMLRDGTFYEPQPARPA

SEQ ID NO: 42571 - protein, 320 aa, unidentified
MNKEQKYVGVDISKEYLDMAVVEPDNKWRFGNNAYGIGKAVERLKKLSPVFVVFEATGGLELSFWEALTEAGIEAAPINPRQIRDFAKAKGKLAKTDEIDAAVIAYFGQAMQPRSQPFPTTQEIKEMMSRRSQIVEMITAEKNRLNWARSSRIKEDIQLHIEWLERQKDEVDKNLKQVINIDPAMREKSKILQSTPGVGPTVSASLLTQVPELGTLNRHQIAALVGVAPLNRDSGHWRGKRSVWGGRSRVRSALYMATLVATQHNPVIRVFYQRLLDENKPTKVALTACMRKLLVILNAMPKNKTGWTTSIAQVSSIACP

SEQ ID NO: 42572 - protein, 417 aa, unidentified
MEYPPETLPAIPPGGVTCGIDWATDDHAVCVVDLAGKIVQRFAVEHTGAGLAGLVRRLRRAGVGEVAIERPDGQVVEALLEAGLTVVVISPNQLKNLRGRYGSAGNKDDRFDAFVLADTLRTDRARLRPLLPDTPATVTLRQACRARKDLVGHRVAVCNQLRAHLKLAFPAAVGLFAELDSPISLAFLTRFDCQDRADWLSPRRLAAWTASQGYSGRQDTAVLHTRLTTAPRGATGDDGTAKAHITRALLAVLISVAAQIKALEAQIAEQLALHADAHIFTSLPRSGTVRAARLLAEIGDCRARFPTPEALACLAGVAPSTRKSGKTTFVDFRWAADKQLRDAVCDFAGDSRRASPWAARLYNDAIARGKDHPHAVRILARAWLYIIWHCWQDRVAYDPARHKALQRILAEEKPVAG

SEQ ID NO: 42573 - protein, 310 aa, unidentified
MENIIVGIDVSKDRLDVAVRPSGEAFAVERNARGLEALVARLRELSPHVVALEATGGFETVVAAALAAAGLPVAIVNPAQVRAFAKALGKRAKTDPIDAAVTAHFAEATNVMPRPLADEATRLLADLVTRRRQIVEMIGAERQREQRLTGPRLRKSIARLLKALEKELASLDGDIDDAVRGSPAWREKEDLLESVPGVGPVIARTLIAELPELGQLGRKEIAALAGLAPFTQQSGQWRGKSFIGGGRTAVRCVLFMGALVAKQHNPVLKAFFDRLVAAGKPKMVALIAVARKLLTILNAILRDRRPWQIA

SEQ ID NO: 42574 - protein, 373 aa, unidentified
MNYTTVYVGMDVHKESFTLCCYTNEKEKTEYPQKVNGHYSKVLNYINAMRKHYGDDAVFVCGYEAGCLGFTLYHQLTEHNVDCVILAPTTMPQPQGKKKVKTDKRDAMLIARCLAHKDYSPVHIPTDIDEQVKEYVRMRDDHKLALKKVKQQIIAFCLRHDYRYTEGKSNWTEKHLQWLRSLESNGVYAEILEEYLLTYEYLTSKLEMLESRIKELAELDEYKESVQKLRCFIGIDTITALSLVVEVGDFHRFATAGHFMSYIGLTPGEDSSGQDQNRLGITKAGNRHLRKLLSESSQCFSRGKVGAKSVALKKRQQGNPPAVIEYADKANIRLKKRFYHLVLNKGKHRNVAIIAVSRELAGFIWGMMTEQFV

SEQ ID NO: 42575 - protein, 370 aa, unidentified
MSPSSTRFVGMDVHKDSIAVAYVAQDHGAEVIYLGTIGTRQCDIDQLSRKMPSKAKHLVFVYEAGPCGYWLYRYLSNKGYDCWVVAPSLIPKKAGDRVKTDRRDAVQLARLARSGDLTPVYVPKVEDEAIRDLTRAREDTLGDLKDAKCRLKAFLLRHDIRYTGRANWSPAHRRWLSEVVCHTPAQPIVFQAYVRAVTEHTARLQRLEQELQEHVKAWRLHPVVEALQALRGIPFTVAVTTVAELGDLTRFENPRELMKFLGLIPSEYSTGERRRQGAMTKAGNTHARRALVEGAWAYRYPAKVSRHLQLRLETQPKAIQDISWKAQVRLCKRYRKLIARGQHANQVVVAMARELVGFMWAIAKEVPVIP

SEQ ID NO: 42576 - protein, 314 aa, unidentified
MSAEIFVGMDVSQACVDVAVHPGTAFQIVHDERGIAEAVERLHALQPTLVVLEATGGLEVPLTGALAAAGLPVVVINPRQVRDFARATGQLAKTDRLDAQILARFAEAIRPPVRPVPDEQTQALAALVARRRQLIEMLTAEKNRLRLAAQPIQKRLRAHILWLEKALAATNTDLEATIRLSPVWREKEEVLRSVPGVGPVLITTLFANLPELGTLTRKEVAALAGVAPFPRDSGTLKGRRAIWGGRAHVRAVLYMAALVATRRNPVIRAFYQRLCQAGKAKKLALTACMRKLLTILNAMLKSGTPWRVAASQPA

SEQ ID NO: 42577 - protein, 401 aa, unidentified
MKNLLFAGIDVSKDSFDIAVINQNKKIIMQNKFEMNLNGFKELSKKVGKLTYDDIFFVMESTGVYHFNLYFYLIDNNLNAAVVNPLLIHNFAKSSSLRKTKTDKKDAETIAEFTLSNHQNIDFTNKVNNSIRSISRERDNLAKNVGRLKTEIKNVLHVLFPELSNHTNVFTKTMLSLLLKAPGRFPIMKLRTQQITRLFDKTRGNKVKITPRELKTLAKNSIGIKDESLEAVLILKIKRLLFILDQIDDINNHLQSFVKEHLQQDFNIITSVNGIGETTAEKFLIEIGDIDNFKSHKQLRAYIGTDPSIKLSGSSIHVKGKISKRGNSYLRKTIWQMAVGVIRCCDYFAEYFHKKICEGKKYKQAVIAVANKLIKTLYAMLKNKTCFKVKNNAKLINVIYS

SEQ ID NO: 42578 - protein, 454 aa, unidentified
MAQGSGLTRGDRNRNRRIGALRGVVRRDRAVLAVDLGEDKQAAVLVDHEGRVLARKTVTAKAYQLGGLLEWAAGQAARAGFAGLVVACEPTGHRWMALMGLADGAGHGFCCVQSLAVHREREKDDYTRDKTDHRDAYLIGRLVIRLDCYLPERAEEAWARLRHLGARRFALVADVICCTQQVSDLLACAWPAALGTAARPLESTTWLAGMGVVTDRCCGDPSRLRKMGYDTFLAAVRRELPRWGASRAYRKIVRGLWEALADAGGVAAQRRGALERVHLLMADWRSLLARLADVEARMCAVLDELGLTGLVTSIDGLSAVGAAVILAETGDLSRFASARSVVKHAGLNPAENTSATLAGTTRISRRGRPGLRTAAWRAAWAGLRHNRVLRARYAHLTGRDGGNRLSDGQARAACAAALLRWLYAVVTRRQAWDARIAAGTIPARAGAVTVPAAA

SEQ ID NO: 42579 - protein, 346 aa, unidentified
MLYAGLDLSRKRLDFHLLDADGATVDVGASPPDADGLQHLSERVALHGEPVRAAIESMNGARFVHDRLELHGWQVEIADAQKVKGLGPLACKTDRIDAWVLAELARRDLVPAIWLPDPQVRAERERARWRLHLVRHRSSLKQRVHAVLLTHGKPCPVSDLFGVRGRQLLAQLGLPEPWQGTIEASLRLIDELDHEIGECERELRRLGADHRYVPLLCTVPGISWVLAYTIAAELGDIERFASPRKLAGYSGLCPRVYQSGERDLRGPLSKQGPRYLRWALVEAATHACTHPVYRDRYQQTKTRIGKQRGAKVAQIDLARRLSEAIWHMLSRGERFAPKGATDPLAA

SEQ ID NO: 42580 - protein, 378 aa, unidentified
MSKQNYAFDAAQLPKEIAIRLKRPDEKHVAMDNHKEMTVIGVSDNRGRIIHETIVPTEEKPLLEFIDCLGGTINLTFEEGTHANWLFNLLEPRVSFVLVCDPRRNRELTRGGNKSDKLDVRMLLQLFQGNMLKAVYHQRETDRTLKELVRNYDTWVKDTARQMNRIKAIYRGRAIKSSARLYSQSQRQHWLGMLSEPGVRLRAEHLLEGLDYLREMRQKARSAMIAESRRHNDSKRLQTIRQFGPVRVARLIAHVGTPKRFRGKEQFWGYCGLAVVTQSSADFVMVNGQLRRNYKNVQTRGLNRNHNHYLKELFKSAAVAAISSGEFKEFYQKRIAQGMRPEMARLCVARKLAAIALVVYKKGESYDPARINKTAAKA

SEQ ID NO: 42581 - protein, 334 aa, unidentified
MSYQFVIGIDIAKHSFDIAILLADSPENIFHNAFSNDENGFKDLMIFVNETIPGFDITKALFCMEATGLYCNALLQFFQAQQANVWVENAVQIKRSLGVKRSKTDKVDSISIAKYAFKNADLVRLWKPSGVVLEKIKQLATLRERMVVTQKRLITPISELRDAGQAKMADLLFKSIKKSINAIEADLKKIEVKIMECLKEDASLHHVFSLITSVVGIGFVTAVNLIIHTQGFNIMCDSRKLACYCGVAPFPYQSGISIKGKTKVSHMANKKLKTNLHLAALSAIKCDPEIKTYYERKVLEGKPKMSVINAVRFKLLARVVAVVNNDKEYVKKTA

SEQ ID NO: 42582 - protein, 406 aa, unidentified
MNYLGIDISKSTARCVILDNDGEKSVKPFTLKNNKYEFNELLERFKKHDLGSENLLIGIEATGIWWENIYCFLTEQKFKIVVLNPHQTNKFREALRKKAKTDDIDAYVIAGLMRSNEYAQSFVPEETVQILKDFTKLRYRLIKDQKDYQRQALSLLALVFPEYEQTKLKKPFGIAAAAILKKFSTAKHLAEAKPKHIEKIVRSIKGNNFDIKEIIHLIQTAKDSIYSGRAANARALNLNIMIEQVQNMNKSIDELDKQIENILSSKDDNEPFNFPGGNLLSIPGVGQKTIASIISAVGTNAETFKDSKKIIGYVGFYPKIYQSGETLKANKIAKRGPAYLRSALYIAAVACIKHNAEFRALYQKKRSQGKASKQALIYVAKKLAHLSLSMLKSGELYRPERVFMPV

SEQ ID NO: 42583 - protein, 444 aa, unidentified
MFIRRNSILEQEVSMNTVNGIRLQQFCQFKNEIRGSTEYLVVGLDIAKEKHNAFFGTATGTTLYRGMFFDNTQEGFQKLLAQAEKLKAENGLSKVVFGREPTANYHRPLAEYLIKRGHLVVLVSPLSTVKNRQLLDGRWDKHDTKDAGNVADLVAQGKCLYYDYPEAAIRNIRNLLSFKKRLKKEEQALQVRIRNQLLAQYFPEMDRHFRTAVGLSVVQRCLDPSVIAGMEYDEFCRTVAPGKLNLKQQRVLQRIWQSAHQSIGCRVGETVSFEAQAMVTSIHHVREMIKAVNEKIEALCLPFPEYSCLLSIPGFGPEVSSTVLGAIGDPYRFSCGRQVLKMAGFDLSASRSGKNALNIVPVISKRGKVDLRFVLYQAALVASNTNHYFIMYYGRKYLRRQHEQGAGTKLRVKLAAKLLIIAWTLMKKKEMFDPNCLNLGDAKV

SEQ ID NO: 42584 - protein, 346 aa, unidentified
MLDHTHQNTKPTIYAAIELSKKSWVVAILRPNKDQPSIHRVKGGDVSELIAKLRGAAAHGERLLICYEAGYDGFWLARSLDRAGIDCRVLDPASLQVNRRARRVKTDRLDVLMLVRALVAVDRGDRHVCSIVRVPTIEEEDARRSHRERQRLIRERTAHINRIKGLFFGQGIRGIEPLRKRSRVNLSEIRTAEGVPLPARLRAEIEREFSRFDHVEEQLKAVEAERDTADAQNPAVNKKREMLIRLRGLGPASAAILSREVFGRSFANRKQLGSYLGLTPSAYDSGSSTRCQGISKSGNSHASHMMIEVAWLWLKYQPQSAGKMVCATCGRSIAPYPAHHANCTRA

SEQ ID NO: 42585 - protein, 407 aa, unidentified
MDVIYPRCAGLDVHKQTVVACARVAGNGPLLQEVRTFATTTSGLLALADWLDSVGVEHVAMEATGVYWKPVWHVLEGHFELVLANAAHVKNVPGRKTDVNDAMWLADLLAHGLIRASFVPPVAVQELRTLTRTRKQFVRERSAHVQRIEKVLEDANLKLSVVLADILGKSGRAVLQALIDGQTDPERLASCVSGRVKASRAEVLEALRGRASAHHRFMLKLHLSHIDALDKAVADIEKEVGVGLQPFRDAAKLLSTMPGLSDVSAHVIVAEIGIDMSRFPTPGHLLSWACLCPRNDESAGKRRSTRVRKGGKWLKTTLVQAAWAAVKVKGGYLQAQFHRLRARRGAKKAIMGVAASMLTAVWHMLRNQTEWHDLGAAHFDRADATKTANRLIRRLQQIGFSVQVTPA

SEQ ID NO: 42586 - protein, 465 aa, unidentified
MTPYYLGCDVSKGYADFVIIDKNKQPVVKNFQLDDTFDGHHRLFQVISQFLTDHPKSVLYAAMESTGGYENNWYNTLTKFQALLEIKTARLNPLAVLHHSKADLKRNKTDKSSAHSIAEYLVAHPDKVSYQQQDQMAGLRKQWGFIRMLTKQCTQIVNQLHSLLYTANPELLCFCRNEMPAWFLKLLLQYPTANELKKARAKTMAKIPYVSMQRAEQIISAAKRSVASSTDPITAQLITATTTQILNLKKTIAKQTDLMAAQCDLPEVQLLKTFVGIGDISAIGLILEIQSVARFKTAKKLASFCGLHPVYKQSGDGIGGFKMSKQGRVQPRHILYTVALSAISYNPVIKPLYEHHVQLGRNKMDTIGICMHKILRIVYGMLKNNCAFDPKIDMANKRRALPVKVVDPRRTERRFQEYEANAPISRRQNKKRMERGLSQSVNNTERGIKAPVPISEVIAEMLSKL

SEQ ID NO: 42587 - protein, 344 aa, unidentified
MDYKLISIDLAKTVFQVAAFNPDGTIAFNRKINRSALLNTLRQCEPTLVVMEACYSANYWGRAIEKLGHTVKLIPARMVKAMLVGNKNDANDAVAIGETAGRPKVSLLRPKTVEQQDIQSLLRIRERLVENRTANCNQLRGFLAEYGLIIAKTRRQLMLAIPLILEDADNELSTVARGFIQRRYEFQLYLNEQIDQIAQEILALAQAMPLYSLLLTIPGVGPIVASTLLASINEVNDFKNGRQLAAWLGLTPSQYSSGTTNRLGKITKRGNQTLRRLLIHGARTVVNWCDKKDDSLSLWLQRLKQRQHVCKVTVALANKMARMVFVVMSRGQAFDMDKACKVAA

SEQ ID NO: 42588 - protein, 307 aa, unidentified
MFVGIDVSKDRLDVHLRPSAEAFAVPRDSEAVEALAARLQNLAPELIVLEATGGFETVVAAGLAAAGLPLAVVNPRQIRDFARAVGRLAKTDPLDAAVIAHFAEAVRPQPRAVPDEAARALGELVARRRQIIEMMVAERNRRRQMSQHKAIRSVERVLATLQTQLSDIERDIDHAIRGTPAWRAKEDLLTSVPGIGTTIARTLIAELPELGQIDRRKLAALAGLAPFNRDSGKLRGRRAIAGGRAPVRAALFMAVLVSIRRKFPLAQTYHRLVDNGKPPKVAIVACMRRLLGILNALLRDQTPWQNA

SEQ ID NO: 42589 - protein, 392 aa, unidentified
MYIVGIDIGKNHHEASIVSPEGKQIGRSLRFATTHKGADSLMSFIFKNIGNSPCVFGMEATGHYWYPIYSFLKAKGYTIYVINPIQSDSLRKMYIRQTKNDSIDSFLIAEVIRFGQFGTTSMADENILAMRQLCRYRDSVISSRTEIKLRIGTIMEQIFPEYEKQFSSLWVSTSMGILEKYLTPENIENAPIDELFEIIKDKSHNRLTRAKAISIKEAAADTFGIKIAQDAFSFQLKQLIDRMNFLDKQIEALDCQILEYYEKFDCYLHTIPGIGIIGAATILAEIGDISRFKNSSSLIAFTGIDPTVRQSGEFNSTHNHMSKRGSPYLRHAIFLAATTCSFHNSPLNAYYKKKRDQGKHHLTATGAVARKLTTVIYAVLRDSKPYEPKKFC

SEQ ID NO: 42590 - protein, 351 aa, unidentified
MAVIGIDAHKDWHTLVAVDEVGRRIKELTVEARAVGHRKILTWLEGFETVTVAVEDCRHLTRRLEADLLKAGHRVVRVHTRLMAGMRRSSRERGKSDPIDAEAVARVALREEDLPTAELPGTSRDIKLLSDHRRTLVAQRTAMQSKARWFLHEIDPELEIPSRALRRYHLLDELIEYLEPVDGAVAEIARDLLVDIRELTARINTLESRLSRLVRAGHPSLVAVPGMGTLGAAMIIGETAGIARFRSRDAYARFNGTAPIPVWSGNKVRVRLSRGGNRTINTALHMAALTQIVWARKAPPTTTSSSPPARRAKRLCGCYDVDFRIASMPLRRRTWSLPSSRLRAMPQWSGR

SEQ ID NO: 42591 - protein, 448 aa, unidentified
MCKSKTKNENVKRISQLTVINPTAAGIDVSDTEMMVAYPINLEQLEIRVFGCFTRDLQLIANCLKEKGITTIAMESTGVYWVALFLLLQEYGFEVYLVNAKHVKNVTGRKDDESDAEWIQKLHSCGLLSASFQPDNMTRTLRSMVRHRKNLVRTSSTYINRMQKALELMNIKLHTIISDIDGKTGLLIIEAILAGERNPEVLANLRDKRIKASREDIIKSLEGYWTTEHLFELRQCYQLYCTHQQMINECDREIEKQLVEQIASTNEGVIPDIPKVKRKVSGKHKVPFNLAAYLKKILDVDITEVFGISELSALTILSEVGTDMTKWKTEHHFTSWLGLAPNTKISGGKVISSKIKKKKHHAGQAFRIAANSLYNSKSPLGDYYRRIRAKAGAAKAVVATARKLSIIFYKMVANKEAFNPKALEDYQQKYKEMKINQLKKKIALLEAA

SEQ ID NO: 42592 - protein, 414 aa, unidentified
MLKIVYRVCCGMDVHKSFVVACIASTNEHGVTTYKSKRFSTFTGDLRRCAAWLAENSCKDVCMESTGKYWIPIYNILERTCNIVLAHPKYVRAIRGKKTDKRDARWIADIFKHDLVAGSFIPPADIRQLRDLFRYRWKLTNFTTGEKNRAQNCLTVSNFKLDDVFSDVSGKAASAITARILENPTVKITDVSGFRTKRMKVTDEEILAAVDGEMCAEQAEKLRIIRSHMDSLELCRINLDSLILSTAEKYLPQLGLVMPAPGIQSFAAIGIISEIGVDMSVFPTSKHLCSWAGLTPQNNESAGKKKTTRISRAGAYIKPLLVQCALCAIRAKRFPEVRNRYLALKKRRGHKKAIIAIARMLLTAIYNMLKKNEPYNPELYRSADRPPAHREVSVEEAVFILQRQGYLVTAPPTA

SEQ ID NO: 42593 - protein, 379 aa, unidentified
MDTHKKEHVVAVAYADTGELEVFTVRNTVKDIRKMVRKVQRQAPGEVHFCYEAGVCGFTLKRQIEALGSRCQVIAPSLVPTKPGDHIKTDRRDAKKLLGQFVAGELTEVEAPSPAQEAAREITRCREAAKENLKRVRHQLLKFLTRHGYIYRDGRHWTQKHDRWLRSLQFDLADLREVFDWYYTELQHCLQRLATLDKEVAALADREEYREAVGALRCFRGIDTLTAVTVLTEIFEFGRFPSPRKLMAYLGLVPSERTSSESRRTGPITKAGNRRVRRLLVESAWHYRHRPFVSKELKRRRQDQPQWAVDLADRAMARLHKRYWRLLDRGKAPGVVVVALARELAGFLWAVLHEQQWRAARAGACGVTVTKNDGPRVPA

SEQ ID NO: 42594 - protein, 327 aa, unidentified
MSAFVCGLDVHKDSTYATILDQNGKIVNQTRMTNERVLPYLSHFNVCKVGMESSNQIAPLYRKLASKGYSVVVSHPKETRYIAEAKIKSDRVDSKAIAELVRLDALPLAYFPDEETAILREKVRRRAFLVRSRVKLRVKIKSALTYEGLKWPSDNGLFTRKGVEWLHGLNLQPVESYVQVMKPLDDEIMLLSKELRGMAEEDVELLMTIPGIGYYTALLMKSEIGDVNRFPFGERLCSYAGLVPSTHASGRTVRHGGITKEGSRWLRWVMVEAAQTHVHKYDTSITRAYNRIAEKRGKRIAVIAAARRLLMCSYSVLKNKRPYYDQA

SEQ ID NO: 42595 - protein, 414 aa, unidentified
MLKIVYRVCCGMDVHKSFVVACIAATNEQGVTTYKSKRFSTFTGDLRRCVAWLAENNCKDVCMESTGKYWIPIYNILEHTCNIVLAHPKYVKAIRGKKTDKRDAKWIADIFKHDLVAGSFIPPADIRQLRDLVRYRWKLTNFTTGEKNRAQNCLTVSNFKLDDVFSDVFGKAASAITARILKNPSEKITDVSGFRTKRMKATDEEILAAVDGEMCAEQAEKLRIIRTHMDSLELCKLNLESLILSTAEKYLPQLNLVMTAPGIQSFAAIGIISEIGVDMSVFPTSKHLCSWAGLTPQNNESAGKKKTTRISRAGAYIKPLLVQCALCAVRAKQFPEVRNRYLALKKRRGHKKAIIAVARMLLTAIYNMLKKNEPYNSELYRVGDRPPAHREVSVEEAVFILQRQGYLVTAPSTT

SEQ ID NO: 42596 - protein, 347 aa, unidentified
MTIVGNPDAVIGGVDTHADTHVAAVVNHVGGVLGVESFSTTSIGYRQLVSWLRSHGELALVGEEGTGSYGVGVSRYLQHEGVTVVEVDRPNRQTRHRQGKSDPVDAVAAARAALSGTATGSPKARDGNVEAIRVLMIARRSAVDTRIETLNQLRHVVFTATPEIRAKFTGLSAISLAHKASALRPRQADDPVRYTTHMTIRALGHRVQYLREETKQLNRMLRPLIRQTAPTLLEVYGVGYDTAAKLLVAAGDNPGRIRSEGAWAHLCGAAPIPASSGKTKRHRLNRGGNRQANSALYHIVITRMRHHQPTRDYVARRLSEGKSMGEIARILKRYAAREVFKHLPRPA

SEQ ID NO: 42597 - protein, 418 aa, unidentified
MKSMEITAVGIDVSKSKSTVAIRRPGGVIVARPFDISHSNHDLEKLVSILKTTGGDIRVVMEHTSNYWKPIALTLKEAGFYVSVVNAMLIHDFSDNSIRKLKTDRADSLKIANYALTFWNELPPFNDEDETRLVLREQSRMYERLASTATSLRNGLIALADQMFPSIDQAFGHAIKNADGHEKWVDFFSIYWHRDCVLRLSIEKFTESYRKWCLRRNYKFRTNTAHKLYALAQDAVPTLPKNNGTKALVLQACKSLNAVCEAKQSTQEEMNRLASLLPEYEVVMQMEGTGPITGPALMAEIGDVRRFKNKKALVAFAGIDAPPFQSGNFESKSRHVSKRGSPHLRRAVFLVANIILTLSHKDNSVFCFMDKKRAEGKHYYVYTIAGSAKFLRIYYARVTEYLRTQEIPVAASCLNGNS

SEQ ID NO: 42598 - protein, 347 aa, unidentified
MRFYNQQHPFYCGIDLHTRKMYCCVVDAAGEILVHRNLQTRGDHFLNLIAPYRDGLVVGVECMFSWYWLADLCKKEKIEFVLGHALYMRAIHGAKAKNDKIDSRKIALLLRGGNMPIAFAYPKELRATRDLLRRRMFLMRRRAELLGHVQSTNWQYNLPPLTKKLSYKKNRDGVAARFAEQSVRKMVELDLSLIGQLDTHLSDVERYLERTVKIDDPQNFYLLRTIPGVGRILALVLLYEIYDIKRFESVGRFISYCRLVKCAHESAGKKSGSGGSKIGNAHLKWAFSEAICLLLRESPEAQRFVARKEKKHGKAKALSILAAKLGRAVYWMLRKQEAFDVKTFFKN

SEQ ID NO: 42599 - protein, 368 aa, unidentified
MDDEMDTSCTTGVITRHIWVVDSNTTQKVSTMNITLIGIDLAKNVFQVCGVNQAGKSVFNRQVRRAALLDFLAQQTKVPIAMEACSGSNYWGRALQNLGYEVMLLPPQHVKPFVKGNKNDRNDAFAICEAARRPDMTVVAPRTLAQTDMNLGHRIRERQVGERTRLICQLRGLLNEYGIVLPRGKDSLLAAMPDILEDANNELTPSARTYFYGMLTEWRQLDNAIKTREKEIRQQCRAHEASNRLTEIRGVGDITATAAVAFAGNARHYHNGRHFAANLGLVPKEHSSGGKQQLGGITKRGNRYLRKLLVQCAWSIIRHINKAKDRISLWAKALIERRGPQKTAVALANKLARIIWAMLARQEHYRAA

SEQ ID NO: 42600 - protein, 343 aa, unidentified
MQYYVGLDVSLKQTSICVVDQAGLVVREGVVDSDPEAISVYVTSKAPNAVRIGLETGPTSTWLWTELKRLGLPVICIDARHAKAVLKMQINKSDRNDAIGIARIMQTGWFKEVHVKDIDSHSVRALLASRALLVKIKRDLENHVRGLLKNLGLVIGRAKFNVFAVRAEELIEGRPELVAAIRPLLEARNAVEQQVGELDRKVMKLARHDTQVRRFMTAPGVGPITALCFKATIDDPTRFARSRSVGAYVGLTSRRHASGEVDWTGRISKCGDAMLRSYLFEAAGVLLTRVPKWSSVKAWGVRLAKRNGLRKAKVAVARKLAVILHRMWIDGTEFNWSKKEIAA

SEQ ID NO: 42601 - protein, 371 aa, unidentified
MSMMHHRYVGLDVHRATIAVATADVDQPPTSYGKIPNDPAAVRKLMHKLGGRDVRLRVAYEAGPTGYVLYRQLTALGIDCIVVAPSLMPTQRGDKVKTDRRDALKLARLLRSGDLTPVWVPDQEHEALRNLVRARADAKADEVRAKHRLSKLLLRHGARPPVGVRNWCKRYVQWLRQLEFKELADRIVFADYLAEVTAATERVKRLEGALRQCAQTTPQKAVIDALQAFRGIGFLSAVTLVAEAGNLRRFPTATQFMAYTGAVPRESSSGAHQHRGRITKTGNRALRHILGEAAHHARHAPNLTDEVKRRQKHVPQSIIDLAWRAQLRLHARYRHLCVRLGPPKAIMAVARELAGFVWAVGQLAPEASNAA

SEQ ID NO: 42602 - protein, 342 aa, unidentified
MSEIITVGLDLAKNVFQVHGADSAGRAALRKKLRRAQVLEFFSQLPACVVAMEACGGAHFWGREIGKLGHDVRLIPPAYVKPFVKRQKNDMADAEAICEAAMRPTMRFVPVKSEETQGAAMVFRVRELLIRQRTQAINALRGHLAEFGQIFPQGAANTSRLIAIVEDPENDLPANAVPTLKALISALAHLEAEIRKLDAEIAHRAKENDVARRLMTIPGIGPLIATAIAVLAPPPKTFRKARDFAAWLGLVPRQHSTGGKQRLGATTRMGERSLRRLLILGANSVIIKRHVHSSARPGTWLAGMLSRKPPMLVRVALANKMARIVWALMVKGQDYRAPAAAA

SEQ ID NO: 42603 - protein, 368 aa, unidentified
MSRLAKVDRFFKNVNFTNDDEVFVGVDVHKKSYHVALFLNDMPAIDFRMAAEPKQLNKKLRPMACSIKDIVYESGPTGYGLARHLRKSKLPANVVATSKIPRPVGADDKTDRLDSRKLAEYSAKGLLRPVAIPTLKQEADRQLYRMRHRQARQFSKVKNQIKSFLLMHGIAEPEGLTTWKLAGIEDLRNMRLIGTLRLSLDELLSDYDYFNNRIKVLNKMLVENLDKGLLGQRIALLKTHPGVGPVVACQFATELYHYRDFSSRRQLYKYLGLSPLVSQSGERSSSGSINKAANSRLRGNLIQGAWSWVLKDVEAKKCFWRICDNCGGIKQKAIVAMARKLAGHLWAMLISDRPYDKNLAKSRHTKER

SEQ ID NO: 42604 - protein, 418 aa, unidentified
MFKIFRKNCCGLDVHKTWIYACIGITDANSRTEYFQARFSSFSKGLQELSHWLDKYNCKQVCMESAGKFWIPVFNILEKTCLVTLAHPKYTKPQKGNKTDRKDAKWICDLFMCDMIKPSFIPPPAIRHLRDLVRYRGKLTNMLTGEKNRAQNCLTVSNLKLDDVFADVFGKSARSITEYILAHPGEPFDVAQFVDRRCKSPLSEIQAAVDGAVSPEQAVKLRQCLDHIDQLRLLRQRLEQEILRICEPFADILQLLRTVPGLGNDPMTAIAVLSEIGGDMSVFPTAKNLCSWAGCCPRNDQSGAKVKSTRISRAGSYLKPLLVQVANALIHSRKHPEFAERYRRIKARRGHKKAIIAVCKMLLTAIWNILSKLVPYSPAGFLSASHDLPPSKSLTVAQGLSLLRRRGFILTDDPLSAP

SEQ ID NO: 42605 - protein, 398 aa, unidentified
MTESSDYESVQIFIGVDVGKDTHHAVAVNRSGKRLFDKALPNDEAKLRSLISDLKQHGQILLVVDQPATIGALPVAVARSEGILVGYLPGLAMRRIADLHAGEAKTDARDAAIIAEAARTLPHALRTLKLADEQIAELSMLCGFDDDLAAQTTQASNRIRGLLTQIHPALERVLGPRLDHPAVLELLQRYPSPEKLASLGEKKLATQLCKLAPRLGKRLTADITQALTEQTVVVPGTNAAVVVLPRLALQLITLRKQRDELALEVEQRVLAHPLYPVLTSMPGVGVRTAARLLTEVACRAFASAAHLAAYAGLAPVTRRSGSSIRGEHPSRRGNKTLKRALFLSAFAALRDPISRAYYTRKMSQGKRHNQALIALARRRCDVLFAMMRDGTFYTPTAS

SEQ ID NO: 42606 - protein, 342 aa, unidentified
MDKVSIIGIDLAKRVFQAHGSAPDGAVVFRKKLSRAQLLLFLAAQPRCIVAMEACATAHGWGREIGKLGHEVRLIPPIYVKPFVKRQKNDAADAEAIAEAASRPTMRFVAVKSEDQQARSMIFRTRDLLVRQRTQLINALRGHLAEHGVVAPQGTAHVKRLADVIGDETAVLPATVREIGRLYLEQIDLLSGRIDALEKKLRAEAGQAEATRRLQTMPGVGPITAVAIESFAPPMETFRRGRDFAAWVGLVPRQNSTGGKQRLGRTAKMGQRDIRRLLIIGAMAVVNSAARHGAPEGSWLERMLAKKPKMLVAIALANKMARGIWAMMTKQEDYRYPAAAAA

SEQ ID NO: 42607 - protein, 342 aa, unidentified
MSIVYVGLDLGSSNFQQVALNHDGVSRVNRDFTTSEANLVKAFSDLKGEIHVHLEAGELAPWAASVIAPLVTRVVCSHPQSNAWIAKDADKSDRIDAYKLAELLRLNRFKEVHYPREQRRREFKTLVQHYDELTSQQARLKTKLKARLRMQGVIVNGERLYSSSGRKAVLAAVKSPTVRTAISQLYAVLDQSVASQTEAKQLMLRMAQVFPEIKLLRTTPGVGPIGACRFSGYIHTPSRFSSTRKLWKYCRLSISHRSSNGKPLRRPRLDHCGCGRLKDVSRKAFDVAVRSRHDNGFKRAYQRALETTHDATHARLTVQRKIVSTLRAIWINQTPYRDELMP

SEQ ID NO: 42608 - protein, 351 aa, unidentified
MLSQTTATPKLFIGMDVHKKSWTAHFKTDLFDNKTVTMPAESESLMNYVERNFAGHAVSCCYEAGCCGYWIARALRQKGWEVKVVNPADVPRSNKQGWQKTDRIDSRNLCKHLSDGNLKGIYVPGEEQEQLRALFRRRIHLARNLRSIKNHIKSQLLYFGIKLPAQYDNPNWSREMKTWIANVKWKYSCAAESMHSRLKQLEFVWYEELHISNELRAYCRKHYKKDYYLYKSVPGIGGITAAAIIAELGDIRRFNRLDELAAIVGLVPGIYQSSENKINLGLTKRSNHQLRSLLVEASWVAVRDDMALQQYYRKHAHKEPNKAIIKVAHKLLSRIRAVIHSGIPYQPGLIK

SEQ ID NO: 42609 - protein, 359 aa, unidentified
MADKLIVGIDVSKDWLDLCASNAAGVERIANTRQAVAAWLERVAPGLIACEPTGGYERTLIAAARERAIPFVRVHPNDVVAFRKSRGIKAKTDAIDARLIAAFVCDKLARAELRTSLIGDERLRALAARRRQLVDALQAERCRLDAAALPAVRASLEAVIAVLRQSLETLEAELAEAIAAHPPTAELAKLLQTIFGIGPVAAITLIADLPELGLLSAKQIAALVGLAPHTKRSGKTRYRETTGHGRPGVRRVLFTLQCRSCRRAPSLALQRLLRPPCHRQPTAREKPAPAKAGVALTAVMRKILITANAVARDRQPWRGRPAAGTPCRPHAEQTAHRAGRVKTAAAPRAVARSASLEAA

SEQ ID NO: 42610 - protein, 400 aa, unidentified
MISVGVDVSKGKSMICIMKPYGEVLEKPYELEHTETGLCKLADLILKYDEEVRVVLEATGAYHLPVVNYLQRYEIFVSVINPLVMKKYSSVSIRKGKTDKIDAIKIANYGIDNWGRLVCYQASGETYEELNTLTRQYSQYVGLKIKSKITLVNLLDKTMPGITKLLRNHTENINKDKLNAFVKEFWHYDNITKYTEKQFIVRYLKWAKREGYHQNDAKAKVIYDLASQGIPTLSSNYHSTKMIVLEAVRVLREISKTLSKILTQMQSLSKSLDEYSIVRKMGGVGEKLAPRIIGCIGDARRFHNAKALIAYAGIDAPPYQSGAFDGTKRHISKRGSAYLRKTGYEIMKSVKIVKPTDDAAVYQFILKKEAEGKPKKVAKIAGLNKFLRIYYARVNEVYNT

SEQ ID NO: 42611 - protein, 335 aa, unidentified
MIYRLFAGIDVSKLKIDVVFFLAENPDKQFHECFENSDEGCSKMVYWINQISGLLISDMFFCAEDTGLYTLPVCTFFDEQGGNLWIENALRLKRSLGLKRGKSDKADAAEIANYGFLHRRKAILFKLPGKTISKLKHLLSCRKQLVKQQTALKNATGELEVFDKESADFTLCIRKSLITEYDRKINMLEEKLLACVKEDEILEKQYNLVKTVHGIGAQTAMFIVVLTQGFTLFENPRKFACYCGLAPFGNTSGTTLKGKPKVSHLANKRIKTLLTMCALNTIKKDNEFKRYYDRKIKEGKHHSSVLNVLRNKLISRAFAAVLKDRPYEKEVNLAA

SEQ ID NO: 42612 - protein, 368 aa, unidentified
MATTTHPAQPDHADPQNTPTVVLGVDTHRDVHVAAVLDHLGTLLDARSFPATADGYRRLLAWARTFGQVARAGVEGTGSFGAALTRYMRGESVQVVEVHQPNKALRRRRGKTDAVDAEAAARAVLSAQATAVPKAGDGHVEAMRIYKLARDSAVKSRSQAINQLKAVLVNADPALRESLAGLGTKTLIRTCAELPDPSPASTPAFAAAVHTLRLLARRIRQLSAEAYELEKQLRAAVLEHTPQLLERPGIGPDSAATLLITMGDNPERVRSQASFAALCGVSPVQASSGKTQRLRLNRGGDRQANAALYRIVLTRLRRHDPTRDYLERRTSQGKTRREIIRCLKYYVAREVYHLVRPQPDAAELTQAA

SEQ ID NO: 42613 - protein, 356 aa, unidentified
MSRDVKYIGMDVHKEATVIAVRNSRGELVMESMVETESSTIVQFIHGLRGELHVTWEEGTWAAWLYDLLKPHAHEVLVCNPRRNALLKEGSKTDRIDARKLSELFHAGMLGAVDHGENGVRTLRELACMYQTVSQDLTRVMNRVKALYRGWGIACAGTQVYAPRYREEWLQKIEQAGVRRRAELLYEELDGLQALRRKVRPELLTESQKHKAAKLLRQIPCIGPIRAARLIALMQTPHRFRSKRQLWTYSGLGIETRDSGQYRFVDGQLQRSKKPQQVRGLNRNHNHEMKEIFKGAAIRASCGVGPLREFYGSLLDKGRKPEMARLTLARKIAAITLTLWKKEERFDAEQLKTQAA

SEQ ID NO: 42614 - protein, 342 aa, unidentified
MQITTIGLDIAKNVFQVHCIDANEKVVVRKQLRRGKLMAFFEALSPCLIGMEACATAHHWARELTKLGHEVRLMPAKDVKAYVKRNKNDAADAEAICEAVRRPTMRFVRIKSPEQQGQLMQHRTRDLLMRQRTQLINALRAHLAEFGIVAAKGDGGVKELLAIVADKEDTRLPINARASVIVLAAQLEAVQTVIGAIEKRIKMQHRANEASRRLETIPGIGVIGATAIAATVSDPTVFRSGRDFTAWIGLVPRQDSTGGKQKLGPISKQGDRYMRRILIVGAHSVLRRAKQNPGKYPWLTQLLVRRPFKVVAVALANKMARVAWALLAYGGTYRAPKLAEAA

SEQ ID NO: 42615 - protein, 428 aa, unidentified
MNYNQNDKIAQITSQTLIIGVDIAKHKHVARAQDFRGMEFGKAFYFENTNSDFNHFLNWIQQLMNQQGMEKVVVGMEPTGHYWLNLAHFLIEQRINFVVVNPMHVKKSKELDDNSPTKNDVKDARVIAQLVKDGRYAVPNIPQGVYAELRVARKIRDLLSVDLQAVQGQIHNWLDRFFPEFLTVFKDWEGKSALQLLKLNLLPHELSKLTDQEILIHLRKAVTRAVGLSKITKLKEAASHSIGIREGSAMAKLELRTLINKYELINEQFEELESNIDDLLKQIPGVEQMLAITGIGKDTVAGFFSEVGDLSNYSHPRQIIKLAGLSLRENTSGKHKGQTKITKRGRKTLRALLFRVAMPLVAKNSAFKALHQYFTKRLNNPLKKMQSLIAICNKLIRILFTIGKKQCEFSEERMLRDIPHMVGLPKVA

SEQ ID NO: 42616 - protein, 388 aa, unidentified
MMHNRRPHRKKQASGPSLLERTNPNAAGVDCGSDAHYVAVPPDRDAAPVRSFKTFTMDLYRLADWLTACGVTTVAMESTGVYWIPLYEILEARGFDVALVNARHVKNVPGRKTDVVDCQWLQELHSVGLLRGSFRPTAAIAALRAYLRHRETLVQSAATHVQRMQKALVQMNLQLPIVISDITGVTGLRMLRDIIAGHTDAHALAKHRDYRCQASEAEITAALTGHYRPEHVFVLQQNLELFDAYQRQLTACDAAIEAHIHTLAAQAPAPAVPLPTPRTRKKPRDNEPRFEIRTPLHRLTGVDLTQLDAIGPYSALRLLAEIGTDMSRWPTEKHFTSWLTLAPHNKISGGRLLSSKTQPSANRAAAILRMAAMSLGRTETALGAFYRR

SEQ ID NO: 42617 - protein, 415 aa, unidentified
MSRTPIDISGHLLVAIDVAKSSHEVLLRWPTGKTKRWRVPATHVGLSDLIATLEASQLPVIAALEPTGDYHRLIAFHLIQAGITVQQVSSLAAARLREAMHNSWDKNDRKDARVIMEMILRGMTQIYHDPMVHGTFDAQELSNTYVQISLARTRAMHSLLGHYLPLYFPEMERFFNASRSEWFFRFLLAFPVPSTITNLSLSEFTDAAWGIVGRKVAKERFLAEVYEVATTSIGLPVAASSVAIQSYRLQLSRLLDLTTQREALESQSEVLLAENPQYRALRTLPGVGPIIALIIVSESGDLRRFPHHRQYLHFCGFNLSCSQSGNSQSGHRISKRGNKRLRYAYWLAATVAIRQRENTFRQKFEQYLRSQSDTADTRRKGVIAVAAKIARVAHALIKQGQNYRGYHEATILTTG

SEQ ID NO: 42618 - protein, 542 aa, unidentified
MAITSRRAARRSRRPTSVAKPSGSIHPRVQKVGPEHFGIVAVDCAKARSKWMLTDFYGNILIGPIVVEHTRRGLDDFTARIRRARTDHDLRDTIVVIERTGNYHLPVKRAAVAAGLEARIVHPLASRQFRLPADPGNKTDDTDLAAIQRAAVNGFGLIEPPIDETHARLRLLARHRRDLVRKNADVRNQIHVELDALFPGLSAAVGGIFDHEAALVIARGTGSAQEIRARGADGLAALLDAERVPYRRPTLQRILAWAERAHEASECPDVHRRIFTHLDDERRARLGSIRALEGELAALLVRTPYALLLSFPGINVVTAAEFAGEMGPIANSPRDNAITGRAGIYPARYQSDEVDHTGPLVGRANRALRYVILLIAENLLKCNEYFHGLGEAWRAAGAGYRAVVVRAAKRFCRIAYQMVAGRQVFRHPSCRERHYILEKLSIFYSEHETPLDQVLRDLHEAVNWLPAREYAAEAERLRAGLPPAPRSAAPAAAARPHPAAPPPKPVGRPRGPRPLSAILPELLLRLGVTMVESSASGEADPT

SEQ ID NO: 42619 - protein, 343 aa, unidentified
MQTITTIGLDIAKSVFQVHGVDTQGNVILRRQLKRRYLLVFFQKLPPCLIGIEACASSHHWSRELQALGHTVRLMPPAYVKPYVKRQKNDTTDAEAICEAVSRPNMRFVAIKTPEQQSCLMLHRTRHLFIRQQTAVINAIRGHLAEFGIVAPVGRNGVEQLLGVVADARDKRLPEVARACVAALGAQLQMLKAQILQFDRLIRAWHRSSEASKRLDAIPGIGPTLATALVASVADPKAFRSGRDFSAWIGLVPKQNSSGGKERLGNISKRGDRYLRSLFTVGALAVIRYAKIHGTKHRPWLTALLARRPTKVAAIALANKLARMAWAMLARGERYKEPVALAV

SEQ ID NO: 42620 - protein, 421 aa, unidentified
MNQLAEIPFTVYVGIDWADAKHDICVQEAGSEDREFDRIVHKSEEIEVWAQALYQRFGGPIAVALELTKGPIVSALLKYDFFVIVPIDPIRLASYRKSFTPSGAKDDPTDAEFALDYMMRHPEKLNVLKPQSVPMRKLTYLVEARDRLKGDQSRFVNRLIQALKQYYPQTLDWFSERNTVVFCDFLVQWPTLEKAKRARKKKLEAFFKNHNVRFAHVIDARIDAIKAATALTHDEAIISAHRIQVEALVQQLRLTIQAMKRFDKEIVATAEQLPDYELLFNPLPGAGKVLAPRLLAAFGEDRARYRCAEELQRRTGIAPVTKRSGQSQWVHWRWQCSKFLRQTFIDWSAQTINKSAWAGAYYRQQRAKGSSHQAAVRALAFKWIRILYRCWQDRSPYDESKYLEALRRSGSPLLKQLAEAA

SEQ ID NO: 42621 - protein, 342 aa, unidentified
MYYIGLDVHKKTISYCVKDASGQVHQEGKMGATRRELDSWIKTLPQPRTVAMEATIFTGWIYDHLLPHAQQVKVAHPLMLRAIAAAKKKNDQIDASKIADCLRCDFLPECHMASTQIRDRRRTLRYRHLLVRQMVQMKNRISGLLMETGVSYNKQRLHKVGYFRELLSTNEDVHESIRPLLRVSRDTIVRLQKTEYALVSSLQRDPLLTDRIKRLRTVPGVGPITALTWALEIGDVTRFHSIRQAISYCGLCGEEKSSADKVMRTPLSKQRNKHIQRVLVEAAKLAPRQDHDLALVYETEKQKGNAHRATLAVARKMVAYLLAVDRGQRDFVPAEDYQRAAA

SEQ ID NO: 42622 - protein, 339 aa, unidentified
MKVSTLGIDLAKNVFQLHGVGCKGQTVLKKKLTRDKFLPFLMQLEPCLIGMEACASSHHFARVLRQYGHEVKLIPPQYVKPYVKTNKTDAADAEAICEAVARPNMRFVQIKTAEQQAILVLHTERNILIRERTACANSMRAILAEFGIIMPRTLSQLYKKIPEILEEYDNELSAFVRCSVARQLEHLQGVEDQITLIEQELSRWAKTQPACQRVMKVPGVGLMTATYLVASVGNGQQFHSAKQFAAWLGLVPREFSSGGKQRLGRISKRGDRYFRYLLVHGARAVAAVIERHKDNMPWLYRLLNKKAYNVAVVAQANKTARILWSMLVHHTEYRTLSVV

SEQ ID NO: 42623 - protein, 340 aa, unidentified
MNENAVSTDAVVGIDVAKQKVDLYAVNNGKGKSKVFDNTHAGHKDTQNWLRERGFVPAQTHVCMEATGPYSESLATALVSGGWKVSVVNPARIKGFAQGELVRNKTDRADAALLARFCAAMKPSLWEPPPTAFRQLRGWVDRLQALKDMRQQEMNRIEALEASEQPDVLAHVNTHVIWLDNEIAKLARDIDDHIDRHPELKADAELIASIPGVGKTTVAKVLAYAGDVRRFDSAKALAAFIGLSPRQRQSGTSVRGRTMMSRAGHKALRHALYMPGLVARRHNKALKIFGDRLSAAGLAPKAVIGAVMRKLAHFIYGVIKSGKPFDLKKAMPTLDFQDGN

SEQ ID NO: 42624 - protein, 371 aa, unidentified
MKIYNLKAAPVASVKELKDEKRPKAKQILLGADVHLRGYQVGRKIDHAVVGVVESFRSEEALLHFVQKQLERAERVVLVYEAGPLGYSLYRKLKALGVECYVCAADSSEQQRKRRKNNRIDARNLTSKLFNYLNGDQSALQLVRVPSEEQEQVRLASRQHDQLVEERKRLGAKGNAMLLSQGFGSWSNWWRPKAWTRLSSLVPGWLLERLKIWVDVLKMLDEKICQAKVGLARGCSGPRPKGVGALSQMQLRSEVLDWHFYSNRRKIACLAGMVPSEWSTGEKERRGSITKVGVPAIRRIIVEMVWRMVLFQPQYKPVQKWQEVLRGSNPALKKKAVVAIGRQLIVDLWRLETGRVTAQELNLVMIETSGV

SEQ ID NO: 42625 - protein, 410 aa, unidentified
MISYTKRQRAQTAAAVVGVDAGKYTHTLVVRPRGGRDSKPHTFETTRDGFDGAVAFVREAVPDAAPAEILVGIEFAGVYGFTLAHYLDRLGFPVVSVLPAHSKRWKEVVHNQRLKTDAKDALVITDLLAQGNFVAFPFLEPAYADLRCLVSARERVSVERRAAITRLKSVLEIVWPEFERRFKDFSKKTPIALLARFPHPEAFLSAPKRSVLHVLRKASRGHLGDETYAELREAAARTLALPGARGALKDEVPLLVQRIELLVRQRRTLDEAMVETLERVPAARSVLSVPEVAPVTAAVFLGSIGDPKAYENERQVLKVAGLGLVEASSGTMKSNVRISKRGRPALRRHLYMLALRSVQTGGIYREAYEALLERNGGRKIPAVVAISRKLVGLLYSVARDGRLWTPEPPR

SEQ ID NO: 42626 - protein, 341 aa, unidentified
MENISIIGIDLAKRSFQLHGAASDGSVAFRKKLSRPQLTAFLRELPECIVAMEACATSHYWGREIAKLGHETRLIPPVYVKPFVKRQKNDANDAEAIAEAASRPTMRYVSVKSAEQQAQGMVFRTRDLFVRQRTQLINALRGHLAEYGVVIAQGMVQFRRMIACFEDVVPSIPAPVQDLCRMYFDQITHYDKRIAVLDKEIKHRAKTDAGTSRLMTIPGVGPMCTTTIQAFAPPMEEFSNGRDFAAWCGLVPRQKSTGGRQILGRTSKMGQRDIRRLLVTGAMAVIRWAIRKSPPVGSWLAKMLARKPRMLVAMALANKLARTVWALTTKKEEYRIPPLAA

SEQ ID NO: 42627 - protein, 410 aa, unidentified
MSLDPALPAVYVGLDWAAEIHAVCVLDHAGRRLASFTIEHSRDGIASLIARLAKHGDPADVQIGIERPNGRLVDLLLEAGHPVVPVSPNAIKTWREGEVVSGAKSDAGDAAVIAEYLRLRQHRLRPVVPYSSQTKALRTVVRSRDDLVGMRVAATNQLDALLDAHWPGGKAIFADTESEISLAFLRRYPTAAAAAHLGEQRLAGFLIKQRYSGRRPAAHLLARLRNAPAGTTDPVLTVAVADAVVAMVEVVEALNRAIKQLGRSVTARLGEHPDGEIFTSLPRSGQINAAQMLAEWGDVRAAYDSPDAVAALAGATPVTKASGKQHAVHFRWACNKRFRVAITTFADNSRHSSPWAADIYARARARNHDHPHAVRILARAWIRVIYRCWTEGTPYDPNQHGGAQRLALAA

SEQ ID NO: 42628 - protein, 450 aa, unidentified
MEGSFAGVDWASEKHDVVVQNAVGEELFAGTFMHDEAGLRALCRQLVRLNVQLVAIERPDGVLVERLLDAGLRMLALHPNQVAAARARFRVSGGKSDRFDAFVLCELARTDQHRFRVLEPDSDQTKALRALCRGREDLVQTRVAITNQLRAELERFWPGAVKIFRSIDSPIALAFLEKYPSPLDARTLGEQRLAAFLARQHYSGRKTPAELLRQLRSAPEGRAGDAEIHTRRQLVLTLVELLTPLVAQIKQLERHIAQALAEHPDGELFRALFRDPKSVITASELVAEIGDCRARYPTSDALAGDAGQAAVAIESGKRKVACYRWACNKRLRDAVCTLADSTRHWHPWAADHYARAIARGHDHPRAIRGLGRAWCRVIWRCWQDQTPYDPARHRALQQHSTVTVPTPPGPRPDTAATQRMLGTAVTHKAARRAEREALDGTPTSATPRGG

SEQ ID NO: 42629 - protein, 343 aa, unidentified
MQTVTTIGLDIAKSVFQVHGVDAAGQVVVRRQLKRRYVLAFFEKLPPCLIGIEACASSHHWSRELQALGHKVRLMPPAYVRPYVKRQKNDAADAEAICEAVTRANMRFVETKTPEQQSCLMLHRTRHLFIRQQTAVINAIRAHLAEFGIVAPVGRNGVEELLGVVADASDKRLPEIARACLAALGAQLRMLKAQILEFDRMINAWHRSNETSRRLDEIPGVGPALATALVASVADPRAFRSGRDFSAWIGLVPKQHSSGGKDKLGGISKQGDRYLRSLFTAGALAVIRYAKIHGAKHRPWLTALLARRPTKVAAVALANKIARMAWAMMARGERYKESVALAA

SEQ ID NO: 42630 - protein, 344 aa, unidentified
MNRTTIAVDVAKTVFEVAVSEHPGQVRERHRLSRAGFRQFLAARPPAIVIMEACSSAHHWARQAQSRGHDVVLVPPHAARPYVLRNKTDRTDAKGLLEAFRNDDLRPVPVKSETQQALAALHRLRSAWVATRTARLNTVRGILREFGVLIPTGAHHVGPHVRALLDDVDAGLPGLLRVALGEAIREIGELEERIRAIERQLATAAEPALVVRQLRTIPGIGVLTATALVAAVGDVQRFPSARHFASYLGLTPREHSSGQHRHLGAISKQGDTYLRMLFIHGARSVLHHAKSKTAPATDRLRTWALQVERLRGHNKAAVALANKLARIAWAVWRNGNDFAAVPAL

SEQ ID NO: 42631 - protein, 285 aa, unidentified
MPVDHPSVPSPYRLFAGIDIAATTFTAVWIAPGATPSRALTLDQTPHGFATLQGRLLAAGHARGEILVVMEATGSYWVALATTLAQAGFAVAVINPDQAHNFAKALLQRAKTDAIDARTLARLGTTLQPTPWTPPPAIYAELQQRLAERDALLDLRQQVRNQLHALVQLPVVIPAVRARMEELIATFSAQIAVIEREVERVLPQDAEWAASATLLLSITGIGVLTAAWLLVTTLNFTIGSSAEALTAYAGLAPHPKESGTSVRGRERIGHGGNKRLRTALYMGSE

SEQ ID NO: 42632 - protein, 425 aa, unidentified
MNSNTNKKINQVTENTLVIGIDIAKKKHYACAVDERGRVLQKSFPFSQSRGGFDAFYERILALRATHEKSEILVGFEPTGHYWMNLAAYLTLHGIPFVMVNPHHVNRSKELDDNLQTKNDQKDALVIARLLRDGRFSYPRILEGVEAELRNGATLRSKIQEDLNAIQNRIIRWIDRFFPEFMTVFKDFGKMAYAALEMTPLPSDIQGKTPEELLFLYRQVKGMKSPQLPKAKRLVEVAQHSIGLTEGLVMARIEIATLLTQYKLMQSQLDTLTEQLTELAKEMTDYDYLNSVPGISNGTIVELLSEVGSLTQYDHPRQLIKLAGLTLRENSSGQHKGQKRISKRGRRKLRALLFRVMMPLIRHNEAFKKLHEYYTTRTVNPLRKKQSIVVLCGKLLKILHTLCKKRVYFDVSYMMKDLYCLVKAA

SEQ ID NO: 42633 - protein, 338 aa, unidentified
MKLYCGIDLHSNNSVIVILDETDQMIYHKKLNNDLDQILSSLKPFESAIQTIAVESTFNWYWLVDGLLDANYKVELVNTTAVQTYSGLKHADDKDDARWLAHLLRLGILPTGFIYPREERAIRDLLRKRHHLVRQCTTNILSVQNIQMRNNADSLPAHKIKNMEADQIDQLFSDANIALAVRSNIHVIQCLQENIATIEAEVLKQIKLRPEYAQLLTVSGIGKILGITIMLESGDIKRFAKVGNFSSYCRCVKSERLSNGKKKGVGNRKNGNKYLAWAFIEAANFAIRYNEKIKAFYQRKKAKTNGIIATKAVANKLARACYHIMKDQVAFDENKAFA

SEQ ID NO: 42634 - protein, 369 aa, unidentified
MNQSSTVVGLDVHKEKITVAILPPRAPRPSEVLTIENHPKAIARLVKRVAARGHPFFVYEAGPCGYEVQRQIAQIGHTAVVIAPALVPRRPGDRVKTNRRDAEKLARLYRAGELTEIRVPTRSEEAARDLVRAREDALKDRLRARHRLSKFLLRQGRAHHETKGWGAVHRAWLRAQQFDSLVLQSTFEAYMHALDDAEVRLESLDQQVLALAQTEPYRVPVQYFRCLKGIDTLGAITLVVETQDFRRFPNPPAYMSYTGLVCSEHSTGANERRGPITKAGNAHLRRILVEAAWSYRHRNITGPELRKRRTGLPSEVIRIARRAQDRLHRKFWRLMSRSKLSQVAAVAVARELAGFVWALAQQCPQSMSA

SEQ ID NO: 42635 - protein, 426 aa, unidentified
MSITQNEKISQVKDTTLVVGIDVSSETYYARAFDWRGLELAKVFKFESASYGFGNFSEWLSELCKTNQKDNIIIGAEPTGHYWFTLAEYLKENGIKFVFVNPMHVKRTKELDDNHPSKNDRKDPKVIAKLVIEGRYLIPYIPEDIYAELRVMNESRMRINKELVAIKNRIQRWFAIYFPEYKNVFGNWECDSSIEVLLNIPLPADAVNMGADAINQLWRAKKIRAVGIKRAKLLVEVAANSIGVKQGVNAARCEISMLIEDFLKKKEQEQRVIEILETLCIQVPNADKLLNIKGVGILTVASFFGEVGDIRRFDSPKQIQKLAGLAITENSSGKYKGQSCISKRGRKLLRYTLFQAVMSMIMHLPEFKELHRYYTTRTKNPLKGKQSKVALCCKVIRIFYVLLNKGVEYDSQKLMKDIVRPEVIAA

SEQ ID NO: 42636 - protein, 403 aa, unidentified
MNAVGIDVSKGKSMVAILRPYGEIVSTPFEIKHTSSDINALVEQLKSVEGESRIVMEHTGRYYQVLAHQLSQADLFVCAVNPKLIKDFDNDSLRKVKSDKADAVKIARYALDKWQNLKQYSVMDELRNQLKTMNRQFGFYMKHKTAMKNNLIGILDQTYPGANTFFDSPARSDGSQKWVDFASTYWHVDCVRKMSLNAFIDHYQKWCKRNKYNFSQAKAEGIYGAAKELVPVLPKDDVTKLILKQAIEQLNRASQTVESLRLLMNETASKLPEYPIVMEMNGVGPSLGPQLISEIGDVTRFHSKGALTAFAGVDPGVNESGTYAQKSVPTSKRGSADLRKTLFQVMDALIKIMPQDDPVYLFLDKKRAQGKPYYVYMTAGANKFLRIYYGRVREYLASLQEFN

SEQ ID NO: 42637 - protein, 402 aa, unidentified
MNCVGIDVSKGKSMIAVMRPFGEVVVSPFEVLHTDSELSELARLLKSLDGETRVVMEATGNYPAPVAWLLHDAGLYVSVVNAMLVHDYGNNSLRRAKTDKKDAVKLANYGLDHWLTLPRYVPDEDTRLMLKTCYRQYQQYSKVQTMLKNNLISLLDTTFPDANRLFASPPRADGSEKWVDFVDAFWHCECVCGLSEKTFITRYQKWCRKHGYNFNENKALDIYASACGHFGVMPKTDTTKLLVEQAISQLRATSAALAALKQEMQSLAASLPEYPVVMGMFGVGPSLGPQLMAEIGDVRRFHSKKALVAFAGIDAPPYQSGQMDVRSRSISKRGSASLRRTLFLVMSVILQRAPMDEPVYQFMSKKHSEGKPYRVYMMASANKFLRIYYASVKAYLDSMEYD

SEQ ID NO: 42638 - protein, 346 aa, unidentified
MEHYVGLDVSLKLTSICIVDRTGKVEREGVVASAPEAIATFIKLHAPHVVRIGLETGATSTWLWTELDKMGLPIVCIDARHAKAVLKMQINKSDRNDAAGIARIMQCGWYKEVCVKDLDSHATKALLVSRALLVKIKRDIENQIRGLLKNLGLVIGRAKMNMFAVRAAQLAEDRSELFAAVDPLLKAREAIEQQIVDLDRKVLRLARNNAQVRRFMTAPGIGPVTALCFLATIDDPARFKRSRSVGAYAGLTTRRYASGEIDWTGRISKCGDKMLRGYLYEAANVLLTRVAKWSALKAWGIRLAKRSGLRKAKVAVARKLAVILHRMWIDGTEFKWSSKDAAGQPA

SEQ ID NO: 42639 - protein, 392 aa, unidentified
MFFVGIDIGKNNHVASMMDESGKVVFKAFSFPNTSDGGHALFSKLASYSSSPDDFEIGMEATGHYWLSIYSFLFEKKFLLHVINPIQTDGWRRGTEIRKRKNDIIDSVLIADLIRYGQFVETRLADEDLFSLRSLTRFRTYLVESISDLKRKVVCVLDQVFPEYQSIFSDIFGKTSKEILLQFSSPIDFESVSSQTLAELLAKLSRKQIGPAKAAQLKAAASCSFGVTFAKSSFTFQLKALIEQIAFIEKQVKETETEIAGIMEKLESPITTITGIGNITGAAIISEIGDISKFDSPRKLVAFAGLDATVTQSGEFEAAHNVMSKRGSPYLRKAIFQAALVAAFKDPVLSAYYQKKRAEGKHHLTCIGAVARKMCNIIYAVVKNNQPYVPKA

SEQ ID NO: 42640 - protein, 343 aa, unidentified
MQDVATVGLDIAKQVFQAHGADASGETLFNTQIKRENVLEFFSKLKPCLIGMESCATSYYWARQLLEFGHDVRLIHTSYVKPFVKRGKTDANDAEAINVALTQKTMRFVPVKTLNQQAAVTIFRTRSLFVSQRTQLVNALRGHLAEAGLVAAKGIQNYSKLVKLMESAADTVLPTALKQALTDICDQIHLLNDLVTKLDKEIDRRVKHDENACRLLTIPGVGPKTAMCVIATIPDIHRFPSGRHFSSWLGLTPRTHSSGGRSALRRITKMGNSKLRTMLYLGGTVIMMRDSKTPIGRWAALLRARRPYKVAVIAVANRIARIIWALLTNGGVYDPTYGREVSA

SEQ ID NO: 42641 - protein, 446 aa, unidentified
MKEKVSMNVVNPKAAGIDIGSRSHFVSIGQNAKDVREFGVYSPDHQDLIEWLMNVGIQTVAMESTGNYWQRLFSALQLAGFEVLLVNGRQIKNVKGKTDVKDCQWIQKLHSLGLLSGSFLPSTEIEKMRNYERHRSWMVEQCAKMSNKMQKALRLMNIRLDIAISDITGKTGMAIIKAIIDGERSGEKLSMLADPRVRKSKQEIAKALQGQWDAGLLFELKDCYELYCDYQQRIMESDLQVEQLLKSLPKRDGGSKSIQRAKTSKRPHKNQHRINIHEYSFQYLGVDLFAIEGVKQQTIMSFLSEVGMDIVRFKTAKNFVSWLRLAPNNKISGGKTLSSRTPKGKNKMAIALRNAANTIGLMKKGVLKRFFDRIAYKKGRAAAVTATARKLAVIIWNMVIKQQQFQPIDETSYNERIRKNVIDNINNKMRRMNLSINDLALSKIKS

SEQ ID NO: 42642 - protein, 339 aa, unidentified
MNVMIGIDPHKASHTAVAIDRDEDQLSSVKVRATRRQVDQLMSWAEPFEKRTWAIESAGGLGYLLAQQLVARGEDVLDVPATLASRIRVLATGRSNKNDPNDAHSIAIAALRAPTLRSVERADHGEVLRLLAKRNMDIGNHRTRVVCRLHALLAELAPGGIAKEIYVSDVDVFMATLRPDTSAQQMRYDLALELLDDVRRLDAQLKESHRRIRVAIKASCTSLTELYGVGPIIAATLIGYSGDVTRFANRDAYASYNGTAPIEFSSGGRTVHRVSTRGSRKLNHALHIAAITQIRNSGTPGRIYFERKVAEGKTKKEALRSLKRHVSNAVFRQLILDAR

SEQ ID NO: 42643 - protein, 400 aa, unidentified
MDHQLYLGIDVGKTEHHATALTAEGTVVHDKTLPQSEPKIRALLEALRAEHGPVLVVVDQPKTIGALVIAVAQDLGIEVAYLPGLTMRRVADLHQGQAKTDARDAFIIADTARTLPHTLRGITVAEENIAELSMLCGFDDDLAAQLTQVRNRLRGFLTQIHPALERVLGPRLGHTAVITLLTRYPSPARLRTAGRGHVRALLKKHAPRLAEKLTEEIFTALTEQTVIVTGTTAAEKIIGRLAEQLAQLGAQRSEIENEILTVVDAHPLTQVLTSMPGVGVRTAARILTEVVGKNFKDAAHLASYAGIAPVTRRSGSSIRGESPSRRGNKTLKRALFLSAFASINASPASRAYYDRKRAQGKRHNQAIIALARRRTDVLYAMLRDGTFYTEPTPPAVALAA

SEQ ID NO: 42644 - protein, 345 aa, unidentified
MEPMYYIGLDVHKQKISYCVKDSGGKIYGEGWIPATRHDLDCWMKDLPQPWSAALEATMFSGWIYDHLKPHAAVLKVAHPLMLRATAAAKKKNDRVDANKICDCLRCDFLPESYMAPAAIRERRPTLRYRNLLVRQMVQMKIKISSLLMEAGVSYNKQRLHKAGYFRELLASNPDINESLRSLLRRCREMVVRLGKMEAALTHSLQQDGLLMERVERLMSIPAVGPITALTWALEIGQVQRFSSIKKAISYCGLCGDQRSSANHTQRMPLSKQRNKHLQTTLIEAAKMAPRYSPTLALLYDKERQKGNANRATLAVARKLVAYLMAVDRGQTHFLVLDRDTCAAA

SEQ ID NO: 42645 - protein, 373 aa, unidentified
MNYSTVYVGMDVHKETFSLCCYTNEKEQSEYHQKVDGHYSKVINYIEAMRFHYGDDATFICGYEAGCLGFTLYHQLTDHNVKCIVMAPTTLLKPSGKKRIKTDKRDAALLARCLAHHDYCPVHIPTEKEEQVKEYIRMRCDHKLALKKVKQQILAFCLRHNYRFTETNHHWTQAHLRWLRTLKPGGAYQEILEEYLLTFDYLTAKIERLDSRIEELASDPDYHEKVRKLSCFLGIQTQTALSVLTEVGDFKRFGDAQHFASYLGLTPGEDSSGPDRNHLGITKAGNRHVRMLLVEAAQCFGRGQIGYKSKALKKRQEGNSPAVIAYADKANERLRRRYYHLVLGKNKRSNVAKTAVARELACFIWGMMTEDIA

SEQ ID NO: 42646 - protein, 429 aa, unidentified
MTRISVGVDVSKNRSTVCIMDQDGKFIMRPFLVWHSTEELDFLADTLKRLNGEVRVIMESTSVYQYPIALQLKERGLFISIVNAYEMKQFANIDFRGGKTDKKDSRTIASYGISYWYKLVEWQIPKDTYFNLDLLNRTYMNAKKHRQIILQELQHYIDCAMPGMDKELHSLNLNTKKDFMLDFVEKFWHRDEIVNMTEAEFTEVFTAWAKEKGYRPGKGKAAKIYAIAKSCIPYYPANPTVKTILQCIVDKLSGVNRTLVTIVTQMIEEAKKLPEYQIVREMPGVGDPLAARFFGSAGDIRRFKNSKTLVAYAGIDSPPDESGDFSSTHRHITKKGSKVFRDTGYEIMMALRAQKRTWEKVRKNPDVYDYMLKKEAEGKPRKVAKIAALNKFLRIVYARIKELYDNMALAERAKTKTRSKTRAKTKVTA

SEQ ID NO: 42647 - protein, 423 aa, unidentified
MPGTVNTMEMEREVVCGADIHKQFLLATILTKDGQKFQDRFDSNFEGLLNFRQWLLDHDCQRLAVESTANYWQPIYFVVGKDVEFVLANAYQIKHIPGRKTDVLDSEWIAELCLKDLISPSRIFSEDDRDLRSMTRTRENYVKMRRQIKNRIHQELESACIKLSSVLSDIFGKSGIHIIRGILNGLSIDDILDRIPSKKLKAKRGEIQDAIQANISPVQIDLISLLLDSVDFLNREIESIDKQIQSLISTRQEDLKIAMSIPGMGFTSASTILAEIANLKDFNNGEKLAAYCGLVPSVYQSAGKLITGHITKHGSPHVRRMLIEVAHAISRTKADSKLKRFYFRIKSRHGAKVAVVALARKVLCILHYLIVNREMFEDGISSKSKREKTGRSSSSTEMIIEDAIQIFVRAGYLVQKRSEKEGG

SEQ ID NO: 42648 - protein, 430 aa, unidentified
MEIVYPRSCGVDVHKSFIVAVICISESVKPKYIKKRSSTFNNQLIQFRDWLVENNCQNVCMESTGKYYIPVYNALEGHISNVVVANPKWVKAIKGEKDDNKDAKWIADLFKFAIVRSSYIPEKDIRVLREFTRYQYKLINMRSSEKNRFQNALTTGNCKLDIVFSDIFGKSASAIVDTILSNDPYTSEDILSKVHAGCKASHEDILSAVEGIQLNQFQKARIKIVQKHMEYLDSLLEEIQHHINLMVANYEEYIQILCTIPGINRKSAITIISEIGTDMSQWSSHRKLAAWAGLAPGCNESAGKKKSVKVSKAGVYLKPCLVQVAHAAVKDKECEYYADKFNKISKRRGKKRAIIAIARKILIAVYHLLKTGEVFNPTDMTDVETTKKQRIEYVKNNLRNAFNQLSRTGLSEAEILQLIRKGSKNSPQIE

SEQ ID NO: 42649 - protein, 404 aa, unidentified
MRVFVGHDWAEAHHDVFVEGGDGRRLGGGRLPDGLEGISGFHELVAPHIEDPAEVIVATETDRGLFVAALVAAGYTVLAVNPMSTSRYRERHTTSGAKSDPGDARVLVELARTDSHNHRPVAGDSELAEAVKVLTRAHQSLIWTRQRQLNQLRSTLREFYPGALEAFDELGHNDALAVLAVAPTPTLGRQASKSKIASALRRGGRQRRVNDRAEQIQAALRTDQLAAPPLVSEAMGSTVVALVSIAAELTAQIGRIEAELTESFDQHPDAEIIRSLPGLGMILGARVLAEFGDDPNRYADAKCRKNYAGTSPITRASGKSHIVLARYARNRHLADACYLWAFSTLTKSPGARQFYDQHRTAGDTHHRALRALANRLVGILHGCLRHNTPYDEHTAWGHRSQLAA

SEQ ID NO: 42650 - protein, 342 aa, unidentified
MEISTIGIDLSKTTFHVIGLNTRGEIVLQRKFSRKQLLQFTSNRQQMLIGMEACGGAHFLGRALRTQGHDAKLMPAQFVKAYRKSNKNDYLDAEAIAEAVQRPTMRFVPIKTDDQLDLQALHRVRDRWVARRTAVMNQIRGFLLERGITVRKGPSHLATQFQRMIEDADMPLSGRLRLLILELKHEWDELETRIEAANVELQRIAKQDDACSRLMEIPGFGPLVSTALVAAIGNGITFRTGRDLAAWLGLVPRQHSTGGKTRLLGICKRGNEYLRRMLLHGARSVVAQIGRTPSALGLWIADLSARSHRNVTVVALANKMARTAWAILSKGTRYCAPAMAAV

SEQ ID NO: 42651 - protein, 404 aa, unidentified
MYNAVGIDVSKVKSTVAVLQPGGTVIRKPFDVSHTSQNLNELADYLSSLDGTTKIVMECTGRYHEPMVKALSEAGLFVSIVNPHLIKNFGNNSLRKVKSDPADARKIARYTLDNWTELRQYSGMDNTRTQLKTLNSQFSFFMKQKVATKANLIALLDNTYPGVNKLFDSPTREDGSEKWVDYAYSFWHADCVRKIGLKAFTERYKSFCKKHHYIFQQDKPEKLFNASKELVAVFPKEKTYKLLIQQSIQQLNLASEHVERLRREMNELASTLPEYSTVMGIYGVGKTYGPQLIAEIGDVSRFTHREALTAFAGVDPGVDESGQHKSKSNRASKVGSARLRKTLFQIMTTLLQNAPEADPVYRFLDKKRSQGKPYYVYMTAGANKFLRIYYGKVKECLRNLEQTE

SEQ ID NO: 42652 - protein, 448 aa, unidentified
MKKETSPKQSVVNMPLVNPNAAGIDIGDTIHAVAVPVDRDKNHVKSFGAMTCDLEEIITWLHDCEIDTIAMESTGVYWKPLFNMLIRAGFEVYLVNSKQVRNVSGRKNDEDDAVWIQKLHSCGLLKSSYLPDDEQEALRTLVRHRKTLILDCNRFTLRMQKALEMMNIKLHTVIRDLTGKTGMAIVEAIIKGERRAESFLVHVDKNIRADRATIVKSLQGNWRSEQLFILEDCYKNYQYYKERITCCDAAIERQLQQYQIDVFPTAAVNKETKSTKRATKNKPKFNTCSYLKAILGVDVTAIYGISDISAMEILSETGTDMSKWETSKHFVSWLNLCPNNKISGGKLISSMLMKKKPNTASQAFRNAANAVQRSDNWLGDYFRRMKAKGGNKYAIVATANKMATIYYKMVMYKQEFKPLDLNSYQQKYKQAKITYLERKLNDLKKEVA

SEQ ID NO: 42653 - protein, 340 aa, unidentified
MGKFTEKKFFVGVDISKDQLDLALLIQGQNDQFFNLTVGNNFKGFDSITDWLKKNKAKPEDCLFCMEHTGTYGLLLFAWLSQVGIDYCVEPGLKIKRNSGVTRGKNDSVDARRIADYACTRKAKLEPFCLPTGLMLQIKQLLTYRVQLVRICSSLKNSLQSHQEYQRVSGLKSISEDIKAQISDFEDREKRIELQITDLIKSDKSLYKNYKLATSVKGVAFVIATYMLVTTNNFTSFENSRKYACYSGIAPFEHTSGTSIKVKSRVSNLANKKIKALLSNGANAACRCDPELRNYYKRKIAEGKDHKLVMNSISYKLVNRVFAVVKRQTPYVSIYQQNFS

SEQ ID NO: 42654 - protein, 351 aa, unidentified
MLMIGVDFHPSVQQIAFTDTETGECGERRLNHSDGEAGKFYRELKQRGLSVLVGMEATGYARWFERLLAELGFELWIGDPAEIKTKRVRKQKTDRQDAQLLLRLLLENRFPRIWRPSPENRDLRQLLWHRHRLVQMRTRIMNQLQAVAMNEGKRWKKKLFSAQGRAQLEELPLAPWASRRRHDLLELLDRLNPTIETLTAAIEQEAKRRPEVLRLMTLPGVGPITALAFVLIIGTPERFQCGKQIGSYVGLIPCEDSSAGRQRLGHISKQGNTLLRFLLVEAAQAAVRWDPDWRRRYLHLAMRRDRRISKVAMARRLGVRLYWMWRNGWEYSQLVKFGSHAGQPVHVHGVR

SEQ ID NO: 42655 - protein, 401 aa, unidentified
MVSDFMKGRYNLMKIFVGIDIAKLNHFAAAISSDGEILIEPFKFTNDADGFQLLVSKLESFDKNSIIIGLESTAHYGDNLVRYLVAEFYQVCVLNPIKTCQMRKNNVRKTKTDKVDTFVIAKTLMMQDDLRFITFFDLDMMDLKALGRFRQKTIKQRTRLKIQLTTYVDQVFPEIQYFFKSGLHQNAVYALLKEAPSPKEIASMHMTHLANLLKVNSHGHFTKEQAKELRVLAQKSVGANDSAISIQITQTIQQIELLDSQLDKIEAEMTDIMKFNDSVIMTIPGIGYINGGMILGEIGDIHRFSNPNKLLAFAGLDPSVYQSGNFQAKTTRMSKRGSRVLRYALVNAAWNVVRNNATFKAYYDAKRAEGRSHYNALGHCAGKLVRVIWKMLTDEVEFNLE

SEQ ID NO: 42656 - protein, 483 aa, unidentified
MKPKQVESNKKASCRATPNHWQRMNHKQRREMLRKIQSADLSLEVVHPDAAGIDIGNESHYVAVPSARDRQPVQRFGCTTAEVKAMADWLKQCKIQTIAMQSTGVYWVSVYDILEEAGFEVYLVNANETRNLPGRKSDVQESQWLMKLHTYGLLRNSFRPSREIRTMRTYWRQRNDLVRAAGRHIQRMQKALTQMNIQLANVLSDVSGMTGQAIVKAILAGERDSYQLAALRNWRVKASKEEIARSLEGNWQEEHLFVLQQEQDGYQFCLKQMAECDQRLQQYLQLQEDRSHGASLPEEKRKERLRKKKKGNTPQFDLRTELFRMTGTDLTQIDGIDVTTTMTILSEAGWDMSKWKTEHHFVSWLRLCPDNRISGGKIIGKGRLPTNNRVTNALRMAASTLRLSSTYLGAQFRRLRTKLGAPVAIKAMAAKLARLVYRMLRYGMVFIDRGAEFYESQHRKLQINYLKRKAANLGFQIIEAPAA

SEQ ID NO: 42657 - protein, 410 aa, unidentified
MEMTIERCCGLDVHQASVVACVMIGDSRGKVEKESRTFATFTRDLLALRDWLKDRGITHVGMESTGVYWKPVWNILEGRFELMLVNPRELKQVPGRKSDVKDAQWLADLLAVGLIRGSFVPPAPIHELRDLTRTRKQLVRERSRHTQRIQKILEDANVKLTETITAIHGLTGRAILDAIIGGETDPERLASLTRGRLKASHAQLVDALHGRVTAHHRFMLKLHLDQIAAIETALSTLEAQLTVALAPFRAAHDLVKTMPGISDTVAAVIVAEIGEDMRPFPTAAHLVSWAGLAPRLDESAGKRRSTRTQPGAPWLKTTLVQAAWAAARTKDSYFHAQYLRLRSRRGPKKAILAVAASMLTAVYYMFRDGVEFHDLGTDYFAHHDKDQITKRLLRRLRDLGVEVEVKNVAA

SEQ ID NO: 42658 - protein, 366 aa, unidentified
MPSVSSAAGPIHLGMDTSKNTIVVGVLMPGEEVPVIDRVWNEEGSVRHLIGRFGDPAALRCCYEAGPCGFELHRLLASMGVACDVVAPSLIPRRAGDRVKTDKRDASRLARLHRAGELTPVRVPSETEEAVRDLVRARAALLADRKRAQQRITAMLLRHGRVWRSGSYWTQAHEQWIAAQRFGEPALGAALAHYRAALDTRRAELDAVEAELSVWAGREPLAPAVARLGCYRGIAGLTGLVLAAEVVDWRRFPSARAFMGFTGLVPSEYSSGDKTRRGSITKAGSEPARTALVEAAWTYQHKPAIGVALRRRQRDASPDTLARSWKAQRRRHGKYKAMTARGKPTGMAVTAVARELAGFVWAEMTS

SEQ ID NO: 42659 - protein, 355 aa, unidentified
MNQEKYIGMDVHQATISVAVMDNSGKLIMECILETKAATILEFLDGLRGSLSVTFEEGTSAAWLHDLLKPHVTHLVVCDPRKNALLKDGSKSDRIDARKLAELLRGNQLHPVYHGEHGVRTLKELGRSYQTLTKDVTRVMSRIKALYRSWAIPCSGTTVYAARHRAEWLAKIPQPGVRLRAERLYQQLDLLHPVRQEARRDLLRESRKHDAVKMLQQIPAIGPIRAALLVALLQTPHRFRTKRQLWAYSGFAIETHDSGEYRYVRGKIQRNRERITVRGLNDNHNHDLKNLFKGAALSASTRPGPLYDFYAALLEKGMRPTMARLTLARKIAAITLTIWKKGVSFDAKQLHRQAA

SEQ ID NO: 42660 - protein, 392 aa, unidentified
MVSDFKKGRYNLMKIFVGIDIAKLNHFAAAISSDGEILLEPFKFTNDADGFQLLVSKLESFDKNSIIIGLESTAHYGDNLVRYLVAEFYQVCVLNPIKTCQMRKNNVRKTKTDKVDTFVIAKTLMMQDDLRFVSFYDLDMMDLKALGRFRQKTIKQRTRLKIQLTTYVDQVFPEIQYFFKSGLHQHAVYALLKEAPSPKEIASMHMTHLANLLKVNSHGHFTKEQAKELRVLAQKSVGANDSSISIQITQTIQQIELLDSQLEKIEAEMTDIMRFNDSVIMTIPGIGYINGGMILGEIGDIHRFSNPNKLLAFAGLDPSVYQSGNFQAKTTRMSKRGSRVLRYALVNAAWNVVRNNATFKAYYDAKRLKAGLTTMHLALCRQACQSHLEDAH

SEQ ID NO: 42661 - protein, 343 aa, unidentified
MNEVITIGLDLAKNVFQVHGVGDAGAVMISKRLRRRQVIPFFKKLPSCLIGVEACATSHHWARELGALGHEVRIMPANYVKPYVKRNKNDAADAEAICEAVTRPTMRFVAVKTKEQQSLMMLHRTRSLLVRQRTMLVNAIRAHLAEFGVVAPVGLRGMKALLAVIADAKDQRLPPLGRTCLESLVESLMNLEQEIAFTERHIHAWHRSSEASRHLESIPGIGPIIATALVASVSDPSIFKSGRELAAWIGLVPKQNSTGGKERMGRISKQGDKYLRWLLVAGAMSVIRHGRKTNFKNNPWLADLVYRKPAKVAAVALANKNARTAWALLANGEIYRQPAAAKA

SEQ ID NO: 42662 - protein, 417 aa, unidentified
MNLHPETIPIQRYIGIDIHKHYLMVGGQNAQQEWVLRPRQVQMMHFRSWAEKNLKEGDAVVVEATGSVWDIYDIVDPLVSKTVVANAHKVRQIAEARVKTDKEDIKRLITLLIADIIPEVWVPPVHVRELRSLISFRWRLSKQITMSKNRLHSVVQRFNLNAPEGGLLTDKNKSWWEEQEFSDLTGFQVDRDLEIVANLESQKAAIDQKLAELSNTEPWASDMAFLMQIPGMGLIFSMVVLSAIGDISRFSDPKKLVGYAGLGAGVHISGEKYQEKSITKAGRKELRWALVEAAWVAVRFDPFWKEQYQRLRGRMHPNKAIVAVARRLLVSIWHILTKREPYRHFDEETIAYKMLIWAQAIGEEGRQGLTRQQFAKYGLLRLGIGQDLERIVKGGGPRRIAPTEEVLALKPELAPPR

SEQ ID NO: 42663 - protein, 339 aa, unidentified
MWYSGIDQHKQFCVITTYGPEGPRVKQARVASTPLALARYFAEFPGPHQAVVESTGGWYWLADTLAGLGVELVLAHATRVKAIAAAKVKTDQVDSDTLALLLRADLIPRAHMIAPAQRGPRDLMRTRLRLVEKSVSAQNSIDRLLEKFNVATVAELEACYQLQASCHTAQLALLDTQIATLERALYPHLIPNADVQRLLWIPGLGKVNAFTIYTEIDGITRFSSARQFFSYGRLVPGADNSAGRTRHRSGSKAGNRYLKLAFSHAGIRAVQYNPEIRAFFKAKARKKPIRIARTLVGLELARIVYHVLSKQEDFNGQFKGRPLSHRKHAQWPRRASPSA

SEQ ID NO: 42664 - protein, 476 aa, unidentified
MKEHKKAKAKTKSEALKPIGEQERDSAGIDIGAKEIWVAVPPERAENAVRQFGAFTRDLNAIVQWLVQCGVRSVAMESTGLYWIPLYQLLEDAGLKVCLVNARHVKNVPGRKSDVRDCQWLQYLLSVGLLLGSFRPAQAICASRSIYRYRQNLLSMAGQHVQHMQAALDQMNIKLHHVIDDLTGATGQAIIAAILSGQRDPLQLAKLRHQRIQAAESTIVKALEGDWRKEHLFVLQKAWDQYQQLQQQLQDCDKELWQYTRELEACIRVVKAAKVVRLRPELVGVEPVNNQSGSKARKMRKKTSKNQPEGPWQQELERFFGVDLTAIPGISVLTGLTLMTELGNDLSTFKTEHHFASWLCLCPDNETSAGKVLRRRTRRSQNRVRYALRMAAYSLHRDKSYLGDKYRRLRTRLGAPKAITAMAHQLARILWTLITRQVPFDLSVFAHQQKLNEHRRLKHLVANARQMGYQLTPIAA

SEQ ID NO: 42665 - protein, 327 aa, unidentified
MKLYCGIDLYAKNSYLAIIDERRQRIFKHNVANDRQLILSFLSPYKAELAGVVVESTFNWYWLVDALMEEGYTVHLANPCAIQQYAGLKYIDDKHDAFWLAELLSLGILKEGYIYPRQERPVRDLLRKRGHLMKLRTSLLTSLHNTMANACGRKIPSHHVLGKEDRLSSHLSGNESLALMGQVSKASIDALTLQIKTIEAHAEKQYTIEPAYVGLLSLPGVGKILGLTILLETGPISRFPAVGNYVSYCRKAESTWKSAEKVKGKGNIKNGNRYLSWAFAEAAEHARRFDTASRNFYNRKVHERNGAVAHSALANKLARAAYYIMRD

SEQ ID NO: 42666 - protein, 428 aa, unidentified
MNKVDSIRLGQFRQLKKEIRGSKEHLIVGIDVAKDKHNAFFGTATGKALFKRLVFENTIEGFKRLLIQAEALKVHYGLTKTVFGLEPTANYHKPLAEFLIKSDHMVVLVSGVAVKRNRELLDGRWDKHDTKDSANVADLISQGKCLFYEYPSMALRELRSLLSLKRRLKKQEHGLRVRIRNHLLAAYFPEFDRYYRQSDSQGLAIVRWCLDPSVIADLKYDEFVRLVAPRTRTIGQRDRLKAIWKMAADSIGCDAGESLEFEAKVMVEGLKHVQEAISEVSDKIEYICCAFPEYSYLLTIPGFGPDVSSKVFGAIGDPFRFKTGKQVLKMAGLDLSAERSGKGSDAARPVLSKKGKAHLRYALYQAAHIASTRNQYFIMYFTNKLRGREREKGIKTKMRVKLAAKLLIVAWTLMKKEESFNPDYLNRA

SEQ ID NO: 42667 - protein, 262 aa, unidentified
MEQVVTIGLDIAKSVFQVHGIDAQGAVVVRQRLQRSRVLPFFAKRGPCLVGIEACGSAHHWARELARLGHEVRLIPPSYVKPYVKRQKNDMADAEAICEAVTRPTMRFVPVKSPERQSVMVLHKTRLILTRQRTQLSNAIRGHMSEFGLIAPVGRNGLQTLMEIVADREDTRVPDDARGCLTMLAEQLNLINEQILESDRRILDNARSTDVGRRLMEIPGVGPVLASAVVATVAHPAVFKSGRNLAAWVGLVPRQNSSGGKE

SEQ ID NO: 42668 - protein, 419 aa, unidentified
MTKRSSNPTDAVLVAIDMSKHRQEVLIERPEGGRRRRMTVMATKADYDRLATDLSDIGRPIIVGFEATGNYHRTLAHRLLSAGFELRLISSVALARTREALHNGWDKNDSKDAQVILHMLRIGATQRYVDPLAAGINDLQEMSKTHEAISKAKTQTWHRILTHYLPLYFPEIERFAGNSRSDWFLALLERFPTPASMTVLGQETFSREAWDLVGRKVSKARLINDIYETACASVALPVDEDSVSIAMFRMVIAQARNLIRQRDEIERTAHAMLAENRDYQLLRMIPGIGPINALTILAEAGDLSRFSHHRQFLKFCGLDLATRQSGTFRGRTMLSKYGNARLRRTFWMAAQVAARQRNNSFRDKLGRYTAGHADDADRRRKAMTALTAKMARVAHAVIKTGTEYRPFADSEGSRPLIPK

SEQ ID NO: 42669 - protein, 351 aa, unidentified
MRRLNRQKVTGEDLFIGIDLHKARWHVTIRSADVELFCGSISGEWEALRRLLDRYEGNRIQAVYEAGCFGFWLYDRLAEHGVECFVTPPSLVPQEYGNRVKTDRRDSRKLSSLLAKGLLKRVWVPSQEERYHRQVVRRRQLVRDRVRTQNRIKSELQFYGISLPTPKGRWTHIYFDNLRRIRFGNRWMQHSFNRLLEQYELLSELIDKQTKVLRDLAKTESYCKRVEILSSIPGIGVITAMEILLKLQDVARFRRADQLAAYVGLTPSQYTSADKVRMGRITGIGKDSVRTTLVESSWWLIRKDKAMRIKYEKIKARAGAKRAIVAVARILILRIRRMILDGQGYIFAEAC

SEQ ID NO: 42670 - protein, 364 aa, unidentified
MNNLYYVGLDVHKESIVMSVLCNTEDRPLYEKSVAGDGKGALEAMLRLKEKGEVYACYESGCMGFTLQRYLASNDINCVIAATSKILRKPGEHIKTDTRDARKLARQLRSGEVTAINIPTAGDEAVRDYLRTRDDIKDDLKRTKKRLLQFILRNGYRFESRVYWTGKHKKWMKALPFRQEMQREAFESYYQHMEALEDRLHLMDERIQEISQTDTYREHVNFLRCFKGIDYLTSLAVIVEVGDFRRFKEAEGFMSFLGLVPCEDSSGDKRSQGSITKSGNGHLRKLLIESSWHYRYPAPAGKRLDERRKGQSSDIIAYTDKALRRLQKKYAKLIHRGKSSQVAVTAVARELAGFIWGLMVGKIF

SEQ ID NO: 42671 - protein, 356 aa, unidentified
MSYEVKYIGMDVHKEAIVIAVLNGSGKLVMETILETKASSILQFIHGLRGELHVTWEEGTWAAWLYDLLQPQVQQVLVCNPRRNALLKEGSKSDKVDARKLAELLRTGMLRPVYHGENGLRTLRELGRSYQTISKDLTRVMNRVKAVYRGWGIPCAGTQVYVPRYREEWLSKIPQSGVRRRAELLYQQLDGLLALRREMRGEFLAESRKHKAAKLLRQIPCIGPIRAAGLIALMQTPHRFRSKRQLWTYSGLGIETHDSAQYRYVNGQLQRSKKPQQLRGLNRNHNHEMKEIFKSTATSASCGRGPFHDFYAALLDKGMEPEMARLTLARKIAAVTLTLWKKEERFDAEQLKTQAA

SEQ ID NO: 42672 - protein, 344 aa, unidentified
MVNIGIDMHKLFWRITALVEGDIVLAITLAKPKYDSFKKLLAQFEGNYVRIVYEAGPGGFDLYDKLTADGIECIVTPPSLIPTESGNKVKTDKKDSYKLAKLLERDMLKKVWVLTPEERAHRQLVRTRRQIVNHRSDVMHQIKSLLHFHGVELPFSSRQQWTGRFIKWLHELDLKDEYLNKSLEALVHLFDYLSAEQKRLTHEVIELAKEDKYAPKVKLLKSIPGIGVLSAMEILVELQDVSRFETADELAAYLGLTPSQYSSGEHIRMGHITHMGNSRVRTTLIESSWILINKDPQMRWRYENIKHRRGGKIAIVAIARTLSASIRRMLLDQVPYEIGFRKAA

SEQ ID NO: 42673 - protein, 346 aa, unidentified
MKHYLGLDVSLKLTAICVVDQTGSVIREGVVDSDPEMIAEFVRSNAPSVVRIGLESGPTATWLWTELKQLGLPVICIDARHAKAVLKMQINKSDRNDAAGIARIMQTGWFREVRVKDLDSHSVRALLASRALLVKIKRDLENQVRGLLKNLGLVIGRAKLNVFAVRAEELIEGRPELMAAVRPLLAARHAIERQVDDLDHKVMRLARNNAQVRRFMTAPGIGPITALCFLATIDDPTRFKRSRSVGAYVGLTTRRYASGEIDWTGRISKCGDKMLRSYLYEAANVLLTRVAKWSTLKSWGVRLAKRSGLRKAKVAVARKLAVILHRMWIEGTEFKWSSKEVANQPA

SEQ ID NO: 42674 - protein, 458 aa, unidentified
MGHARARKIPAQLVEDEDYQLRYERVAGIDIAKAKADVCTRLPPAREGGRRASRVEEVPATAAAVLALAARLLADGVELAVMEATSDYWRIWFYLLEAAGLKVQLVNPSAARQLAGRPKTDRLDAQWIARLAEMGLLRPSFVPPPEIRALRDLTRTRLQLVRDRTREWQRLEKLLEGALVKLSSALSSLAGTKTARVILEAVAGGERDPKTLAGLASAQVKAGRAGIEQALDGMQIGSHHPMLIRLHLDRAARLDQSIAALEDEIEAALDAIPAAWGADASGETGPAAGHGEDAAALPAAGRLAEIPGVSRKLAMAIIAETGMDMARFPTADHLVSWAGLAPVSRQSGPRDRKPGKGQGDAYLKGYCTQAATGAAPTDTFLGERLRRLSRRIGGNRARCAVGRSILVIIWHLLADPSARFTDLGPGWHDRHASRDRKIRAHLNQLRALGLEVTVTPAA

SEQ ID NO: 42675 - protein, 363 aa, unidentified
MNATAALPVVGVDLAKSVFQLAVADGAWHVIEQQRLTRTQFERWFSNRAVGLVVMEACGSAHHWARWLNGLGIEVRLLPAAYIRAYVKRNKTDSADACALLEAARCAEIIPVRVKSIEQQALQGLHRTRSLWMGTRTSRINALRGFCREFGIVIAQGSRLGVEQIGRVLADPHAPVPTLIRGTMTLLVEEIRLLEVRIAQLERELTTLARQSPACTTLLSIPGIGLLTATAMVAATSGEVSHFRDARHFASWFGLTPKERSSGGTRHLGRISKRGDRYLRMLLTHGARSVLRAASVARHAGRTIDALRHWALAVQGRSNHNKATCALANKLARICYATLRDGEPYGTAQLQKKVTRTAFALPA

SEQ ID NO: 42676 - protein, 434 aa, unidentified
MLNPDAAGVDLGSREHWVNVPADRDPKPVRCFGTFTADLKALAGWLKECRITSVAMEATGVYWIPLFQLLEREGFKVLLVNARQIKNVSGRKSDVLDCQWIQRLHTYGLLGASFRPADPYCVARSYLRYRDELVSARSTQTQHMQKALAQMNVQLHQVLSDVTGESGLAIIEAILKGERNPLKLAGMANRRVKATQSTIAKALVGDYRAEHLFQLQSALDLYKVYEAKILSCDQALTAEMERLPDRVDPQQKPPGKADPKKKIDEVIRACLYRKLGVDVTNVEGIGPLVGMTVLTEVGPDLSAFKTEKHFASWLGLCPDNRISGGKVLSCRTRRVVNRLSDALRLSATTLERSPTALGAYYRRMKAKLGAAEGITATAHKLARILYRLLTHGEEYVREGMVDYEQKHQARKLKSLQKNAESMGMQLVPKEATAH

SEQ ID NO: 42677 - protein, 343 aa, unidentified
MEHYAGIDVSLDESSVCVVDATGKVVREVKVASEPEELIRYFDELDLPVSRIGLEAGPLSQWLHAGLVASGRNAVLLETRHVKAALSAMTVKTDRKDARGIAQLLRMGWYRPVHAKSMPCKDSRALLVGRKLLQGKLLDVELSIRGILRGYGLKVGEVSRGMFEVRIRELIAGHVTLETVIGAMLAARMALWNEFTKLHREMLKIARADKICRRLMSTPGVGALVALTYRSAVDDPTRFEKSRTVGAYFGLTPKKYQSGETDRDGGVSKVGDAMVRTALFEAAHIMLTRATRFSSLKHWALEVAKRRGMKRAKVALARKLGVVLHRMWADATEFRWSKAAAAA

SEQ ID NO: 42678 - protein, 402 aa, unidentified
MVFVGIDWASDHHDVAALSPQGELLLKVRIPHSAEGFEGLRSALARLGVPFAEIAVAIEMHEGPLVLWLLDQGYVVYGINPRMADRARDRLSAIGAKDDARDALSLADFVRTQAIRLRPLRPEDPATGLLRQYVRLREDLVQERTAHKQRLGAHLQQYAPELCELLSPYRTEWGRTLLLQFPTMKRLQTAKPSQVRALARKHRMAKSTLEAILEIQSKPALPVPDYLDGPHAMEVEHRMRAIAELDHSIDELDQKIEDLINNHPDANLIQSLPSGGAATRGALWSGLEHGTQMCRTADELAARWGMAPVTFQSGKSRSVRQRRACDHTQTQYLLWFSFATSRRKDCWASEYYQRKRQEGCGHYAALRCVGRRWVRILWAIFTKRASYDETAVRRVACAPSIP

SEQ ID NO: 42679 - protein, 382 aa, unidentified
MACKGRGRVFGRLTRSMKKYTVFHSVTAAPAVAKSKVMRSGSLLKIGLDIHREKFVAVAQYDHATARPPQHFAPAEFVPWVEAQLREGFQVHVVYEACGFGYGLYRALLEAGASCYVIAPQKLDEANTRVKTDGRDSHALCLRLDRYLAGNKNSLAVIRVPSEEEERARHWGRQREQLVHHRQKLEAQGRSLLIDHGLPAPARWWRPQSWSRLDKLLPVWILSHLELYRPMLLALDQQIRTLTAELEKAAPVALPKGMGALSTVVISREICDWQRFNNRRQVSSYTGLCPGEYSSGTKRVGRSITRHGNSRLRAALVELAWRLVRYQPGYHAVQKRLTVLAKGARATRAHRKKAIVAVARQLAVDLWRLHTGRCTPAVLGFK

SEQ ID NO: 42680 - protein, 386 aa, unidentified
MQKLNDLSRSLTALEPDGTLIAVIEMSLSSWLVAGIVPGVERQPLKKLAVDESALLKLLHRWREEAEKAGRRIERIAVAFEAGRDGFWLARWLKARGIEAYVIHASSVAVSREHRRAKTDRLDTELLKRSFLGWLRGERDHCKMVEIPTMQDEDAKRPNREHDSLIGERSRIVNRMKAALVRLGIRGFNPKLKRASTRLDGLRTPEGEPIPPNALAELRRDMERRRLVNNQIRQIEEERLERIEQAPCDGPHVMVRLLARVMGVGIETADMLVHEVLSRNMRDRRAVARYAGLTGSPDESGRKRREKGLARSGNARVRRGMIQLAWRFLLHQKNSALTKWFRSRTENARGTRKPMIVALARKLLIALWRLMREGIVPDGVVLRPAQ

SEQ ID NO: 42681 - protein, 347 aa, unidentified
MNITMIGLDTAKSVFQVHAVNESGEVEIRRKLQRSELIPFFEKREACTVILEACGAAHHWARILTGLGHDVKLIAPEAVRPFVKKGKKNDAADAAALCAAASRPDVKFVPAKSLEQQGVLALHSARSLLVKQQTMLANAMRSLATEFGLTVPKGISKLGELMELVDADATFPKKALQAVRGLLDHCRALAEGIETFEAEIVAHARHDETARRLATIPGIGPITASLIAATVADIGVFKSARHFAAWLGLVPRQHSTGGKTRLGRITKAGNREIRTLLVLGATSMVNRAPHWNSAAGVWLRGVLERRPVRLATVALANKMARIAWALMTRNEVYHATGRVTATAEAAA

SEQ ID NO: 42682 - protein, 406 aa, unidentified
MDTRFAVVVGLDVGKSSHHACALDPAGNKLFDKPLPQDESELRELFTQLQNHGEVLMVVDQPNTIGALPIAVARDVGCSVAYLPGLAMRKAADLYPGRSKTDARDAFIIADTARTMPHTLRQVDRDSDVLSALKVLAGFDEDLAHETTRALNRIRSLLTQIHPALERVFVGGTLSTGLVLDLLEKFGGPTGLKSAGRSRVLRFARTHSRRNPEVLIDQIFTALAEQTVIVPATAAVELVIPRVAGQVKELKEQRATVAREVETMLEDFPLASVLMSMPGIGIKTAAQILLTIGDASAFETPGHLAAYAGIAPVTRRSGTSIRGEFPARSGNKRLKNALFYSAWVASHSDPISKAYYDRKRAEGKRHNAAVICLARRRCNVIFAMLRDGTYYQPPLVPTPEPAALAA

SEQ ID NO: 42683 - protein, 370 aa, unidentified
MHQSSTLDIGMDVHKDSIAVAYVAQDHGAEVTDLGALGTRQCDIDHLVRKRPSKATPLICVYEAGPCGDGLYRDRTKKGYDCWVVAPSLSPHKPGDRVNTDRRDAMPLARLARSGALTGVDVPTVEDAAIRDLSRAREDAISALNDAKCRLNACLLRQDSRDVGRANGGPAHRRWRSAVVCPTPAQPLVLQAYVHAVQEHAARLQRLAQARHAQVTSWRLNPVVAALQALRGVQVPVAVTMVAAIGDLTRVDTPRALMKCLGLIPAEYTSAERRRQGSMTKAGNTQARRALVEGAWASREPAKVSRHLHLRREQHPQVIQDISWKAQVRRCQRYRRLISRGQHPNVVTVAIARELVGFMWAIAQQVPVTA

SEQ ID NO: 42684 - protein, 410 aa, unidentified
MDILLPLCAGLDVHKDTVVACLRRVVKGKVEREVRTFGTTTRELLALSEWLASAGCRHVAMEATGVYWKPVWHILSDGDFELVLANARHVKNVPGRKSDVSDAVWLADLLAHGLIRASFVPDAETQELRGLLRARKQLVRERTSHVQRIQKTLEDANIKLDSAISDVLGRSGRAMIEALIAGESDPGKLAALADGRIKAAQADLREALRGRVTKHHRFLLRLHLRQIDAYDDAIAEIDREVDASIEAFRRAVELLSSIPGVSTLSAQVIIAEIGLDMSRFPSVRHLISWAGLCPKSDESAGKRRSTRMRKGAPWLKSNLIQCAWAAGRKKRSYLQAQFHRLRAQRGPKTAIGAVAASILTAAYHMLRNGVFYQDLGPEHFNRRGKDGQAKRLVKRLQNLGFAVEITPIAA

SEQ ID NO: 42685 - protein, 419 aa, unidentified
MMKLVFPVCCGVDVHKNSIAATIVSTQNTGISTYIQETFSTQNYDIERFHQWLIKNQCYHVCMESTGKYWIPIFNYLESDINVCLTHPKYVKAIKGKKTDKKDSKWIADLFKFDLVRNSFIPPKDIRALREIARYRFKLVCMKASEKNRIQNCMTVSNIGIASILSYPFGVTATQIIDYLLTSDTVDEKECRKLIKGKAKDKSDAIIASIQGFNIESDQAMKMNLAKNHMTYLHQMICETEIELFVRSNHHRNIVVLMTESPGITELSATLILAEIGADMSVFESAKHMVSWAGLSPANNESANKKKSVKISKAGQYLKPLLVQCALAAIKSKKQPYFSYKYQNIKKRRGHKKAIIAIARMMLVCIYHMISNGEHFSPCDYEELLNPHPKEKNVTLTVESALAFIASQGIDISSLMIPT

SEQ ID NO: 42686 - protein, 343 aa, unidentified
MELHAIGIDLGKTLFHVVGVDACGNVVVRKRCSRTQLLKYTANLQVQRIGMEACSGSHFLGRALREQGHDARLMPAQYVKPYVKTNKSDYIDAEAVAEAVQRPTMRFVPIKTEEQLDLQAVHRARERWVMRRTAVINQIRGLLLERGVTVPKGRSYLEQALPLILEDANLNLSDSSRVLLAQLKLELEQLTVRVEQMDSVIQCTVKENEACQRLTTIPGVGPVTATALVAAVGNGSGFRRGRGLAAWVGMVPREYSTGGKQKLLGISKRGNNYLRKLFVQGARTVMQHRAKQSPGLSCWLAQLLVRVHQNVAIVALANKLLRMAWAVLCKNQVYRSPVLATSS

SEQ ID NO: 42687 - protein, 381 aa, unidentified
MKSQDSNYVGIDCGKKSLEVIRINSEGSYERQQFSTTEIGISKLINWLNPNDVVGLVFLACKEPLAKLRCSLAISLFMNRSIGSQSFRIAKSILNKGIQVIVLNPGDLATIYQSLKKTDKEDSLKIARLIQRFPIEELPVVPVPTDEEEDNRRLCSEQENWTRQLTQGKNRLHSLFTQAGLTEITKKHLRTKSSRETSVALLPSRYHKEAERILKVLDLVEQNLKLIEEEIKEALRKNQTYTQTIMSMPGIGMITSLAILSYMGDCKRFSSAKQAAYYVGLVPRVDISGDSAYYGRIVNRGCHSIRRVIVQAAWSLVRCQHGGKLKEFYERLYSKKGAKKSIIAVSRKMIEVLYSMIRTGALFDSMPEEVLHRKLAQYGLM

SEQ ID NO: 42688 - protein, 408 aa, unidentified
MEVLYPRCAGLDLGKDALVACVRIHGRPVRQECRTFGMTTRELLALAAWLTEHGVTHVAMEATGTYWKAVWYLLEDGFTLTLANAAHIRNVPGRKSDVKDAAWIADLLAHGLIRGSFVPPAPIQEVRDLTRTRKQLVREIAQHTQRIQKTLDTATLKITGLMSNIIGVSGRAILRALIAGQTDPVQLADLAHGTLKNKRAALVEALTGRLRPHQRRLLTLHLDLIERLEAAVTDLDTDLGEALAPFRDAVARVDAVPGIDTVVAQAILGEIGLDMARFPTHQHLISWACLCRRLDESAGKRKSTRTRKGACWLKTVLVQAAWAAVRTKNSYYRAQFLRLRARRGPKKAIVAVAASMLTAIYYILRDGVEYHELGGQYFERLDRTKATQRLVKRLRDLGYHVQLEEVAA

SEQ ID NO: 42689 - protein, 351 aa, unidentified
MNYIGVDYHKKYSYMVVKNEDGRVEGRGTVNNTKEEVQHFLEPYHPGMAVVEATRNWGLIYDWLDEVLDDVALAHPLKVKAIAEARIKTDKISADILADLLRANLLPRAYAPSKPTREIKNILRQRMFFVRIQTMMKNRIHEILDRHPEVLCQAPEVSDLFGAMGMQWLSRIVLPGKDNELLVSEIELFKFLREKVSQSNDVVKCLAKEDARTRLLKSIPGIGSFFSVLILYEIDEIGRFRDEKKLCSYAGLVPSTYASGGKVFHGRITKTGSKWLRWAAIEAAQTAVRSDSEFRAYYQRIKVRKGTNAAKVATARRLLTIVYRLLRQGRFYERRTTTQEKIIIPAALVTS

SEQ ID NO: 42690 - protein, 347 aa, unidentified
MAISMIGLDTAKSVFQIHAVDESGKAALKRKLRRSEILPFFEKQEKCIVVLEACGAAHHWSRLIKAYGHDTKLIAPEAVKPFVKKGKKNDAADAAAICEAASRPHAKFVATKNMEQQGILSLHSVRALLVKQRTMLANAIRGLATEFGMVVPKGISRIRNLMELVNADEFLPREVKQAIRGLSDQCDSVDDGIETFEAEIVRHARSNDVARRLATIPGVGPITASLIAATVSDISLFGSARQFAAWLGLVPRQHSTGGKNRLGRITKVGNSEIRRMLVLGATSMVFRAVNWNSSLGAWTRSALLRRPVRLVTVALANKIARIAWALMTRNDVYRPSGRIAATAEAVG

SEQ ID NO: 42691 - protein, 426 aa, unidentified
MKLEEKELEKQICAWIGIDWADERHDVSLYDVGTGKQEAWIIRQSPEALQEWLGQLRSRYEGGYVAVVLEQGRGGLLNALMGCEFLVLYIINPKSLSSFRDAFYGSGATSDPVDAALMRDMVRQNPSRFRAWRPDDVMTRSLRLLTEGRRHLVNQSTAFTNQLTALLKGYYPQALSWVGALDTPWACDFLEQWPTLQSLQASSRRQILRFYEKHPRASLDLTEQLKQIQDARALTQDAAVLESSALMVQALVCQLRPLLASIAEFDRKIATIFRKHPDRPIFESFPGAGAALAPRLTAAFGTDRDRFQAATEMQELAGIAPVTEKSGKKSFVHWRYACPKFMRQTFQEFADHSRRWCQWAKAHYELLRQRGKSHNAAVRALAYKWIRILFRCWKDRKPYQDEFYTKSLLKHGSPLSSLLAKPVENP

SEQ ID NO: 42692 - protein, 352 aa, unidentified
MDRYVGLDAHSQSCTLAVIGPSGKRLKSLVVETNGQALVDALRGIPGQLHLCLEEGTQSAWLHELLSPYVQELAVVMPPKSKGAKDDLRDAWTRADELRTGAIETRVYKPPQQLAALRNAVRGYGFAVRDVVRAKNRLKSVFLSRGMLTPASIYAVAQRQPWLNKLKPPHRQLAEWLGRQLDQLAPLRDEAEEWLLKEAKTHPIIRTLQTAPGMGPIRTAQLVAIAATPERFRRRQQFWSYCGLSIVTRSSADWVRGKDNKWERSQVQQTRGLTRKRQPLLKSVFKGAATTVITQLPDHPLHKDYQRMLQAGIKPNLAKLTLARRIAATVLSMWKHKEVYDPKRQRGVTSKT

SEQ ID NO: 42693 - protein, 490 aa, unidentified
MVAAGQRGQTRVFFAAAPARRCIRVRVRWDESGSAPVTPMKTSRSRKKEKAAESTAPVTPLASRAQLDGPTDKGRARRRSAEKLADLSPPGFPGSTPTRSEDATQTGAKERSTMRKVALDLGAKKTSYCEVSGGQVVGRATVGSMETLRPLLGPEQPAATVAIEACREAWYVHDLLTGWGNQVVLVDTTRSRQLGIGQHGRKTDRIDAEVLARAVERGGIPVAHLLSPHRRELRRQLGVRRALVETRANLVTTMRGLAREQGDKLPSCTTASFAGAVRKAAKGALLTLLEPLLKTLDVLEPQLSAVEEELGKLCSKEPVIAQLCTAPGVGAIVAASFVSVVDDAKRFRRAHQVESYIGLVPSENTTGGRRRVGAISKKGNSYLRALLVQGAWAVLCKSSKDDPLRRWGEAIAERRGKRIAVIAIARRLVGILWAMWRANSVYEPAALGQKVARGLRNSAQNLEFRAEQLARAARKVSCQRLSQEVTSPAS

SEQ ID NO: 42694 - protein, 311 aa, unidentified
MNPNLVHVGLDIAKATLDLHLQGQAFRFAHDPPGCAALIARLRALDAPVLVVCEATGGWERPVRAALHGAQIALCITNPRQVRDFARSRGQRAKTDRIDARMLAEFGMVNRPDPTPAPSPAQVELAAWVTRREQLQSMLTAELARQIPGLPKSVARSLVTSISRLQKDITRVHARLAALLEATPELAAKARRLCTIQGVGPGTAATLLGHLPELGTRDGRSLSALAGLAPFNNDSGPRRGQRRIAGGRSSVRCALYMAAFNAIRFNPILKSFYQRLRLSGKPFKVALIATARKLLTTLNTLLQKPHFIPCS

SEQ ID NO: 42695 - protein, 427 aa, unidentified
MVVTPPVELRVSIDVGARQHHVAIGLSSGAVLEEFAITHQPEGFAHFFARIERHHQHYPGPVAVAMEGYNGYARPLDRLIQARGYQLYNINNLKLARFKEIFPGAAKTDRLDARKGLELFQLREHLPLAKAVLQEVGTIPVANERLKRLTRRRRRLVNERVRVVNTLHADLQAVCPGLLEITREVGNQWFLHFLVSADTLPQLTRLRKATLLNIPSVGRAYARIIQDWQPRAQWSPEVEWVGAMIQEDAQRVLDLDAQIAALEKTMRHVAQGSTIATTVASIPGFGPICTAELAGEIGAVTRFQQESSLALYLGMATLDNSSGQRHSSKRPKQVNVRAKAAMMTAVDRHRKSVPESQRYYEKKRRAGKSHNQAIRALGRHLCRIIYKLLKDERPYEIRTVEEDTAGHVAARSLPVGQLRRAKKLAHA

SEQ ID NO: 42696 - protein, 355 aa, unidentified
MNDAKYIGLDVHQATISVAVLDSAGKLVMEAILGTKAETILQFLHGLRGSLHVTFEEGTCAAWLHDLLKPHVARVLVCDPRKNALLKVGNKSDRIDAQKLADLLYLNKLNPVYHGETGIRALKELARSYLALTGDTTRAMNRLKALFRSWAIPCAGQRVYAPRDRSQWLGKLTEAGVHRRAEIYYQQLDALRSLREQVRRDLLAEGRKHSAMKLLRQIPSIGPIRAALLIALMQTPHRFRTKRQLWAYCGLALKTSTSGEYRIVEGQLKRSRKFLAIRGLNANHNHDLKNIFKGAATRAAAVPGPFQQFHAGLVARGMKPTMARLTLARKIAAITLILWKKGVDFDAEYLKQQAA

SEQ ID NO: 42697 - protein, 356 aa, unidentified
MDRSELQVAVDVGARRHRVAVGDATGRLIEEFDLEHTATGLNGFFDRLERLAAKRKMSVAVAMEGFNGWARPLDRQVLEHGWKLYNVNNLKLARYKEIFPAPAKTDAIDARRILELFRLRIHLPVAREVLQEVVAVTQEAERLKRLTRRRRQLVNEKVRVLNRMQADLQAVCPGLLAITAEADNLWFLSLLGAREDIRKLTGLRQSSLLTLDGVGRAYCAKIQAWQCEALFSHDAEWAGPMVVADARRVQALKREIAVLDQLIEPLTECCETARRLRTIPGFGPTCSGELAGEIGTIERFATEASFALYLGMATLDHSSGTHTGTRRPRQVNTRAKAAMMIAVARHMEQVPASRAY

SEQ ID NO: 42698 - protein, 338 aa, unidentified
MEIKRIAVDTSKHLFTLHGVDEREHPVLRRELKRHQVEAFFRKQPPTEVVLEACGGSHHWGRMLAALGHRVRLLAPQYVKPFVKRGKNDRNDAEAISEAAARPTMRSVPVKSAEQQAETMALSVRELLVKQRTQLVNALRGHAAEFGVIVGKGVGQAGKLAERVAADPAVPPPAQAMFALLGERIAELGGTLAELDRELGAQHKANPVSRQLAEVPGIGPLGALTLALTVDARQFKSGRHFAAWLGLTPKENSTAGKQRLGGISREGNERLRQLLVLGATSVIRAVRPGSRLATPWLLGLLGRRPRMVAAVALANKMARIVWAMMTSGEAYRPLPVAN

SEQ ID NO: 42699 - protein, 319 aa, unidentified
MDNNFIGFDVSKSFFDLAYLKSKNQWFCKQFDYDSKGLSQMINAIPVNSICVMEATGPYYLRLANCLYEKGFKVCVVNPLVIRRYSQMLLKRTKTDKADAKLIAMYGKLHQPKLWKPSEKSIQRIRHINSVLESLIKDKTQWSNKIEAAKQDSNFDKLSMKTMKDMIVLIRRRIEKLEAELDQIIEENYEQENIILRSIPGIGKRTSVMLLALTGCFSKFESYRQFSSYIGLCPRIYESGTSVKGKARICKIGQSRIRQLLYMCAMTAKESNKACKDLFERLVEKGKSKKLALIAVANKLIRQAFGCIKNMSIYNAEFC

SEQ ID NO: 42700 - protein, 385 aa, unidentified
MSAHPTPIQAAAQLQANTLFASLELSKARWLVTVSAPGSDKLSRHQVPGGDGQALLELLWRLQAAAARRTGAPVMIIVIQEAGLDGFWIHRLLVQNGITSHVVDPASIAINRRHRRAKTDKIDGVKLLRTLMAWMRGERQVCTMVQPPSPEDEDRRRLARERARLLKERIQHTNRIKGLLSGQGIPDYDPLHRDRRPCLAALTTGDGRPLPERLKAEIGRELDRLEMVVSQWTVVERERAALVARTAEADACAAPAALARLRGVGPELAALLWLEALFRRFDNRRQIAAYAGLTPSPWQSGGIDREQGIAKSGNPRLRRAMIELAWFWVRHQPGSALSRWFVERVGTARGRVRRIAIVALARKLLVALWRYVTQGVVPQGAVLKA

SEQ ID NO: 42701 - protein, 405 aa, unidentified
MKHVIAFDVSMGKSYMVIYNGLKKCIYEAEIKHTKPEFEKLRAQIDELIEGYGNQPYIVFESTGVYSRQLERFMRDNYYSYCLLNPLEAKKQCDALRIHKTDKSDAHQLALTHFSVSRRETNGTDTLFQQLKSLSRFYSELDDELSVTRSRMHKVIQLTFPELEKLFTIKSDLFLNIVQLFPHPDFVQGLSKTIIKNKIRANTNKNISGAMAEKKALTLIEASQQSYPAVSSSDVLCEQLRSYARRYQELLQQKEQCINDMVQLAEKRSEYKVILSFPGIGPNTAVRLIAEIGDIHRFENNKQLNAYAGIDIRRFQSGKTYFKDKINKRGNKHLRKLLFLIIQNMIKQRRYGQNHIVEYYDKLKTQPYNKCHKVASIACVNKLLKNIFFLISHNMNYDYGLASKS

SEQ ID NO: 42702 - protein, 355 aa, unidentified
MSQEKYIGMDVHQATISVAVMDGQGKLLMECLLETKAATILEFIQGLRGTLSLTFEEGTSAAWLHDLLKPHVSRLVVCDPRKAALLNDGNKSDRIDARKLAESLRTNQLKPVYHGEHGMRTMKELGRSYLTVTKDVTRVLNRIKALYRSWAIPCTGTTVYAPRHRAEWLTKIVEPGVRVRAEHLDQQLDSLQPIRLAARCELLQESQKHAAVKRLRQIPSIGPIRAALLVALLQTPHRFRTKRQLWAYSGFAVETHDSGEYRWVRGKLQRNRERITVRGLNDNHNKDLKNLFKSAAIAASTNPGPLHDFYVARVAKGMRPTMARLTLARKMAAITLTLWKKGVNFDPKQLHRQAA

SEQ ID NO: 42703 - protein, 314 aa, unidentified
MSTAMYVGLDVAKAHIDGAVRPSGDVHRVPHDDAGLTTLVTEVRALAPTLVVLEATGGYETDVASVLALAGIPVAIVNPRQVRDFAKALGRLAKTDAIDARVLALFAERVRPAARPLPDAAQQALVAMVARRRQLVDMLTAERNRLPLAHGAVRRDLREHIHWLERRLRDSDRDLAAMMRDSPLWRAQDNLLRSVPGIGPVTAAVLIAELPALGRLSRREVAALVGVAPLNRDSGTRRGPRTTWGGRATVRAPLYMATLVATRCNPVLRAFYRRLRTAGKPPRVALVAAMRKLLTILNAIVKTQRPWQPVALDL

SEQ ID NO: 42704 - protein, 358 aa, unidentified
MAQRTKKSAKCKAVVYGVEDRVFVGLDVHKKSYHAAVRVNGALGRTTVLPPTAAAVLAFLEPYRAASVAVVYEAGPTGFGLVRSLRKAGVKAEVIAPSKTPKPSGDTNKTDRLDCRLLALYAEKELLRAVGVPTVQEEADRQLVRLRDQVVDGLRRIKQQIKSFLLQHGLAEPPGLANWSKEAVRALETRDLLPALRFCLDVMLQDLTHRQEQLADVNRAIETLSRQPRHARAVALLKQAGVVGVVTAMQFHLEVFQPGRFANERQVAAYVGLAPRVRQSGERRRTGPLLKAGHGRLRALLIEAAWRWIRVDDQAREVYRRLLKNTAQPNKAITGVARRLAIRLWRSLVPPAARGRAA

SEQ ID NO: 42705 - protein, 410 aa, unidentified
MGYETLIRRAHVMTRKNTLKSLPTDTEFRVVGLDLAKSDVSVAAIPVDDNTPSLVDRMTYADLLDWAGKISPTLFAMEPCNGYSLLCLQLENLGHEIKVISGSTVSMWINTHLSGQKTDLNDAIALARLAVSDAELTPIRHKSITEIRIQTVQAVRQQLMSQRSKSIVSFKALAQQWGIPCAAGHRNLKKLRESIEAKVDLITRPVANAMLFLLDAVKSLDRQIGQLNQTLQELVMSDERGRLLQSVLGVGTQISARVITVVGNIERFNSPRSLVAYVGVAPRNFITGHKNLTKKKHGNCPDLSHKGQGKISRRGDKLLRSLFIQGAASLYMQFCKDQLPECQLKRWILKQLASQKPYGKLIVSLAAKLIRIVWAVLTYREKFNIQKAGMTRSMWSEMALETPLNKEVPA

SEQ ID NO: 42706 - protein, 393 aa, unidentified
MSKRYVGLDVHKNYLVAAAVGTNQELVMKPVKIASIDFETWIDKHLTAEDEVVIEAMSGAWVIHDLLINRVARVVVAHPYHVKLIAASMIKTDKRDAITLAKLLAANIIPDVWVPPKHVRELRSLIYHRNNLVHRRAAAKNRLHGICLQFRIIVPEGVITFKPEYWNNLNLPAVEKLRARHISDEIHLLTQEIQESEELISQMSAQSPWVEDVPFLLQLPGIGILTAMTILSSIGDIGRFPSSKHLASYAGLCSRIHFSGNTFKTGGITKQGRGELRYAMIEAAWNAIKYSPFWSRRYEQLARRMDNQKAATAIARMLLVVIWNVLTKREVDRAADFNMVGKSILIWGWKNRLATSLGMKPAEFAGKQLTTLGVKLEKIRYCSRVYPLPVPDG

SEQ ID NO: 42707 - protein, 350 aa, unidentified
MDKELYIGVDVSKQTLDLAYYDGESIDWKKAHIKVSNNNAGFKKIGSWVAKVSKGVDIVLFCMEYTGLYTQNFRLWLEEKHYIYRMVEPRKMHRFEPDLDDGLRSLDRIKTDELDSFRIAIYCEQNHRKILRNPSKLPPPVYFKLKRLLAERKQTVKQSVLYKQQLHDICAYDTDLSVERKNGQLKTLNDALKGIDNEIDMYIKEDADISKNFSLLTSIPGIGRVVALETIVLTENFMAIDNPRKYACYIGVAPFKKESGTSVRKGSSVSKKGFKQAKADLSIACLVCMQHIPNIRDYWERKRKEKCSGIVFNAIKFKIILRMFAVIKRGTPYVETDNYRNGKNKQPGVN

SEQ ID NO: 42708 - protein, 427 aa, unidentified
MYRIAGIDVHKKKLAVVVTDVEVHGEYQFERCWFAANPEQLRLLSQWLAEHQVEEVVMESTALYWKPVWGALERYWQPICQKREGAGPTSGILHLAQAQSNRGPRGRKKDFRDAERLVKRLVADELKLSFVPDTEQRLWRTLTRRRYQLTRARVQLQNQLEALLEEAHLKLSSIVSDLLGVSARRMLQAIAHGETNPEALAGLGDRRLRATPAQLCDALGACTELHPVYRRLIKMMLEELKVIEEHTAELNQELATLLRPHQDAVERLAEVPGLGVDSAQQILAEVGAKAATFASDKNLCSWVGVCPGDEESAGESSSHRSPQGNRQMRRLLNQAANAAVKSKGSIFEIAYRRLVPRLGHNQTIGAVAHRLCRLIWLILHKGVRYEERGPAVSQRSRQNRTGKMIRELRMLGYRVEFLNAVPCVPIP

SEQ ID NO: 42709 - protein, 337 aa, unidentified
MTLYCGIDLHANNSVISVLDEQDQVRYEKRLPNDLAMIVGNLQAYKDELSACVVESTYNWYWLVDGLMDAGFEVRLAHTGAIPQYAGIKHTNDQTDARHLAHLLRLGILPEGHIMPKEQRAVRDLLRRRMLLVHQRTLHHLSLQSLVARYTGERLSSNQIKALDTEALEQKLADPICFGAQITLAALRWLNKAVDLLEHEIQKQLKTSKNYDLLTSIPGVGKILAATIALETGEIKRFPGPGHYASYARCVSTDKISNGKHKGRGNKKNGNKYLAWAFMEAAHYAAIWNPEIKRFYQKRKAKRHILVAKKTLANKLARASYHMLSRQEPFDVQRAFG

SEQ ID NO: 42710 - protein, 356 aa, unidentified
MRKDNKNYFSETDIYVGLDVHKKSWDVSIYVENIHFKSFSISPPSSKVLVEFLEKNFIGGRYHVVYEAGFSGFWIYDELTERAIDCVIVSPADIPMSNKNKNFKTDRNDSKQLAQKLKAGLLEGIHIPEKVQREHRALLRLRNKFVKDRTRIKNYIKSNLMFFGKVIGKDYEDTRSWSKRFVESLSGIKYLSEEGKDIITELLKMLCFYNEALKRVEKKINQLSLKQQYKQDVEILCSVPGISTLSAMIILIEIGDFNRFVDTNKLKSYVGLIPQEHSSGEKEIKTGITKRGNKFLKKIIVEVSWVAIRKDKTLLSRYTRLTKRMKGSKAVIVIAGILLNRIRSIMRKHEYYKIAA

SEQ ID NO: 42711 - protein, 461 aa, unidentified
MGKYKRKSSSKASKKKSLDSLNPINLNAAGIDIGADSHWVSVPADRDEQPVREFKCYTLNLYALADWLKQCQVETVVMESTGVYWIPVFQILETRGLEVLLVNSHHVKTVPGRKSDVLDCQWLQQLHSYSLLAGSFRPRDEICVLRSYIRHQDNLIRSAGTHVQRMQQALTQMNLQLHRVISDITGKTGLKIIRAMVAGERNPQTLASFKDGRIRRTSEEIAAALIGDYRAEHLFVLQQELQLYEMYQQQIAQCDQEIEAYLTNLDSQIELEAIEPLKKSPLTKKYSSNTPAFDLATHLYRISGVDFTRIDGLGVLTVQTILSEVGLDPSRFPTVKHFTSWLGLCPGSRVSGGKVKSSQTRLVVNRAANSFRMAAHALRRSQTALGAFFRRLRSRLGTPKAITATAHKLARIFYYLWTKGGEYHDPGIDIYEQQYQQRVLKNLQRKADQLGFELVVKASSA

SEQ ID NO: 42712 - protein, 338 aa, unidentified
METLIAMDVHKRTSTIAALDPSTGEVVIIKAYTDRNDLARKLSSLPKPWVVAVEASRHSPPVCNWLQSFGAEVKLVHPQRLAELIKLRAAKTDEGDAETILYLMRGDMLPECYLAPEEVAELRALTRGRNSLREMATKARNIIHALLAQGGIILERSDLRGKAAREELAELIDKLGDLTGLMAGLFVTLLDDIEEIIKVVESEIDQQVEQHPVAKELASWDGTGNVLALSVVAELGDIRRFPHYKNLFSYGGLVPRISQSGDSKHDGELPKYCNRHLRRVAVQAAQCMVMCNADSKAKATYKRLAGHKGANTAKIAAARKVLLDVYFAWHQIIADQAA

SEQ ID NO: 42713 - protein, 431 aa, unidentified
MKVMYERVAGIDVHKDMIKVGVRSPGDKAWTRKTEILEYRTFYGVLQLMAADLRKRAVTHVVMEASGVYTEPVYYALCEQDFERVEVINPAHAKALKGHKTDAKDCARLAELYECGLLRGSYIPAAGLKELRDLTRYRVKTVQARTSEIQRLGKALESGGIKIGSVVSEITGKSATAMIEALIDGERRGAVLADLAIGRMRTAGKLADLSMALAGRFTEHHAMLCRLHLDRLAVFDTAVSGLDERITARAVPWRREQDLLKSVPGFGDIVSQAWLAEIGPAPHQWFSSHEKLASWVTLCPGNNISAGKRKHGRTGDAGTYIKPMLVQAAWSAIRTPGRLQARYGRLVRRFGGAKNPAAKKKAIIAIAHTLLKIAYQVLKSGMPYQDLGADFYTQRESPRQRQAYLLRQLEKLNPGCTITISPPEAALTPGA

SEQ ID NO: 42714 - protein, 427 aa, unidentified
MSATQNEKIRQVTDTAMVIGVDIASEIHWARAFDWRGLELGKAVKFENSAEGFNFFLRRASELAVEQKKDSIMAGLESTGHYWFTLAAHLQGGDFKLVLVNPYHVKRSKELDDGHPSKSDKKDTKTIAKLVLEGRYVYPYIPQGLYAELRVAMNCRWRVRKELASLQNQIQRWLKIYFPEHGKVFGRFTGAGSMALLHSAPLPSDLISLGVEGISGIWKQMKLRGIGKKRAQRIYEAAQTSVGCTTGMEAVRMELQILLEDYDAKLQQYERVMQVVENLCSQIPTVAELLKIQGLGLVTVAGLFAEIGDIRRFESPHQIQKLAGLAITENSSVKHKGPTEISRRGRSRLRAILFRAAIPLLAKNREFQLLHRYYTTRQDNPLQKIQSVIAICCKLLRVFYALATKGCAYSPEKMLADIQRTQPLKAA

SEQ ID NO: 42715 - protein, 353 aa, unidentified
MRYFLGLDVAKDSFAAALLDEAGQVVSTASFANNAEGFSELLAWLPVPAHTIAVCEPTGVYNHHLKETLATALESLHEINSQTLKQFAFSQVRTKTDQADALAIADAARTLFLSKPETLEKSRVSWNPQRENLALWLSEYDRLRKAIATLRQQIGELDHHAAPDAAKVQKRRQQELKRLLAQQDQVKRQIELVYQKLDDAQARLVDSIPGIGPLSTAATLVVVRDVHRFRSADALKAYLGIYPRRNQSGTRERRSHLAHHGNKLMRHVLWNAAKAAVKVKNESNPFRRLLERLMAKGRTYNYAIGAVCRKLVQVIYGVLKSQTPFQFPAATTRRRPDNLCDSLRLCVKNDHRP

SEQ ID NO: 42716 - protein, 342 aa, unidentified
MDHYAGIDVSLECSSVCVVDASGKIAREGKVASEPEAVIAYFGSLRLSVVRIGLEAGPLSQWLYAAMKEAGLAVELLETRHVRTALQTMPVKSDRNDARGIAQLIRLGWFRPVHCKSIGAQETRAVLTARKLVQSKLLDVENSVRGILRGFGLKVGKTTNRSFAGRVEDLVVHHASLHMIAAALLSVHAVLLRELKAFDKQVRSMARVDVKAKLLMSAPAVGPIVALTYASAIDDPGRFTSSRRVGAHFGLTPKKYQSGETDYTGRISKIGDATVRTALYEAAHIMLIKPIKGCAPLKSWAMRIARRSGMKKAKVALARKLAVILHRMLASATPFNAAMAAA

SEQ ID NO: 42717 - protein, 373 aa, unidentified
MSSNGCHQIIYLALELSSSSWVIAYRLPENDKAKLHRLEAGDGEGLLAFIAGLRRQLDPDDASTLVVSCFEAGRDGFWLHRLLTAHGVINYVVEPTSILVTRGARRAKTDRLDAVGLLRVLAAKFAGDPGACRTVVVPSVEEEDAKRPHREREFLVQERVRIENRIAALLATQGVRERPSLRSWDADMRALTTGDGRPLPTHLVAELNRLRRRLSLTLDMIRELDAVREQALEEQHDSASRTVKALCTIRGIGVNFASVLTREVFYRTFDNRRQIASYLGLAPTPFQSGGMDRDRRINRAGNSRARKTLVQLAWLWLRYQPESSHAAWFRDRVGSLQGRIRRITIVALARKLLIAIWRFVTLGLAPEGAIIAA

SEQ ID NO: 42718 - protein, 355 aa, unidentified
MTIVSHAHPFVIGVDTHARTHTLAIMVALTGEQLGSEQFPATPAGMDRAIGWAGRCTGGDLATLWVIEGIGSYGAKLAHTVAEIGYLVVEAPQMNARSRRGVAKSDPLDALAIASAARSTDVTALRRPRLEKGIRAALRILVAARGQMTTERAGNINALIAVVRTVDLGIDARRPLSSVQVKEIFRWRARVEEWAVAIARAEAIRLATRVVALTQEVECNQARMTELLQDSTAAPLLEETRIGPVIAATIFTTWSHPGRVRHEAAFASLAGVNPIPASSGNTVRHRLNRIGDRRLNKAPHQATIVSMTHDPDTRAYVERRQGEGRTNREIRRCLQRYLARHLYRTLNTLYANPAP

SEQ ID NO: 42719 - protein, 346 aa, unidentified
MKILALDLSKFKSVGCVYEAANGAHSYRRVNTTPQALHDLLVELEPDRVVIEVSSVSGWVSDLVKALGIELQVVNTNGEAWRWRSVKQKHDQADALKLARLSAMNQLELVHVPAPEMRQWRAVIKYRQHLVGRRTDIKNHVRELLVREGVVLPRGRKCWSQEGCAGLEEMARSWDEVGISELWRGELESEMQQLQVIQERIREVEAKLETLAVADDRVGLLRTIPGVGPRLAEAMVALIDDPHRFKRARDVGAYLGLVPRQYQSGEMNRLCRITKRGSKLLRSLLVEVSWVSLRHNPWLRSLYERMNRGSKTRKKIAIVAVARHLAIYCWAMLRDGTTWRPPCTNQ

SEQ ID NO: 42720 - protein, 388 aa, unidentified
MTRSRPDGNKLFDKPLPQDEAQLRELFTDLQQHGSVLMVVDQPNTIGALPIAVARDVGCTVAYLPGLAMRKAADLYPGRSKTDARDAFIIADTARTMPHTLRQVDRDNEVLSALKVLAGFDEDLAHETTRALNRIRSLLTQIHPALERVFAGGSLSTALVLDLLVKFGGPTGLITAGRARVLRFARSHSRRDPEALVDRIFAALGEQTVVVPATAAVELVIPRVAGQVKELKEQRATVAREVEAMLENFPLASVLMSMPGIGIKTAAQILLNIGDGSAFETPGHLAAYAGIAPVTRRSGTSIRGEFPARSGNKRLKNALFYSAWVASNHDPISKAYYDRKRAEGKRHNAAVICLARRRCNVIFAMLRDGTYYQPPTTVPNPEPTALAA

SEQ ID NO: 42721 - protein, 352 aa, unidentified
MYYVGLDIHKKYCISAVMDKEGKMLDRRRIESKPQALKHYFNELPEPCHVAMEACYNWGYFLDILEDVTEEISLAHPLKTRLIAETRIKTDAIDAKVLADLLRTNLLPLAYIPGSETRRLKNFLRYRAGLAAMNTQVKNKIHALLDQHEFAEKETLAQLTDLFGKQGRHLLTEVCLPGQDTQILKSWMNLWEHIHQEILKADVWIRHHAKEDPLSSLLQTIPGIGAQFALLVRYEIDQIERFRTAKKLVSYAGLAPSTYSSGGKTRHGGITKQGNKWLRWAFVEAAQRAPLTSPYFKQYYERIKDRAGWDRARVATARKIAEAVFGVMKNQQVYQEHLLGQLPSKGSSRLVA

SEQ ID NO: 42722 - protein, 380 aa, unidentified
MVFLPSTIPSRMARTNLASSLQPGGDPGPVSVFIGVDTHRDFHVAVALSLQGSLLGEMHLPACMAGYEALLDWALELAEGRATSLLFGIEGTGCYGAGLSRHLQAAQCSVREMNRPNRQTRRQRGKDDAIDAEAAARSLLAGTATAVAKAGNADAEILRVLKSTRDSAVRCRTRAITQLKALLIVVPAELREALQHLDTAELVNRCLDRNEEVATSPLTAARLAMRTLAERIRHLEQELIVLGRQLDRITQAVAPGLRAAQGIGPDNAAALLIAAGDNPQRLRSEAAFAALCGASPIPASSGTRQRHRLNRGGNRQANCALFRIALNRLRWDPATKAYAERRTAEGKSKREILRCLKRFIAREVYRLLQAGSLRPAAMSA

SEQ ID NO: 42723 - protein, 341 aa, unidentified
MEQVTTIGLDIAKHVFQAHGADAAGHVLFRKRITRRKLIAFLAAQPPCIVAMEACAGAHYWAREIGKLGHRVRLIAPVYVKPFVKRQKNDAADAEAICEAVQRPSMRFVPVKTEEQQANAIVFRARDLLVRQRTQCVNALRGHLFEYGYVFAQGITHVATLVALVEDPQSSLPESARIILKLLVDHFTALEGQIAELDAQINRRSKADPTARRLMTIPGVGPIASTAITALVPAAQDFRAGRDFAAWLGLTPLQKSTGGKQKLGAVSKRGERTIRRLLIIGASAVVRQASRRGASKGSWLAQMLARKPKMLVTVALANKTARIVWALLVKGGVYRAPVAAA

SEQ ID NO: 42724 - protein, 341 aa, unidentified
MNLKRVGIDLAKQVFQVHGVDYQDKVILRKQLRRNQLLIFFATLPPCLIGMEACGGAHHWARELQKLGHTVKLIAPQFVKPYVKSNKNDVNDAEAICEAVGRPTMRFVSVKTVAQQDLQAIHRIRSELVRQRTSKINQIRGLLAEYGLVVGRQVATLRRALPELLENAENGLSFDFRGLLEDLRQDLIRLDERVTEMDKKVHSLANSMPAAKRLQSIPGIGPISATAILCAVGDGKQFKRGRDLAAWLGLTPRQQSSGGKDRLLGISKRGDIYLRTLLIQGAKSVLKVVNNKTDPRSLWLQNLCGRRHKNIAAVALANKNARIAWALLNNETSYLPEGKPA

SEQ ID NO: 42725 - protein, 341 aa, unidentified
MQTTTVGLDTAKRIFQADGVDKHGKPTFQKTIKRPQLLTFFANLPRCLIGMEACASAHYWHRQLSALGHEVKLISPAYVKPYAKGQKNDVRDAEAICEAVSRPNMRFVPAKSIKQQDMQLIHRVRGRLVKQRTGLVNQIRGLLAEYGLIIPLGVAAVRRHVPLFLEDAENELTALSREVFADLYAQLRLLDEQIKHYEQRIQGLVKASPLCRQLMSMPGVGPVTASALVMSVGDAREFKNGRHMAAWLGLVPKQCSSGGKTRLLGISKHGDRYLRMLLVHGARTVAWSAQKRPAATNAWLRQLIERRGFNKACVGLANKMARQAWALLARGERYHIAHELC

SEQ ID NO: 42726 - protein, 322 aa, unidentified
MDEQGQVLREGRVLNDSGSLKRFLRGLPKPWKGVVEAGPTWGWIYDTLSQAGVEMVLAHPRNVRAIAEAKIKTDKIDARMLTNLLRVDLIPEVYVPCEEVRAQKMLWRERIWLVRMFVRVKNRIHRLLAHYHVPVPEFSDLFGAAGRRFLEGVELPEPGNRILKAELKLLESYRSQIQQVQRWAIEATQNHPYRVYLESLPGFGKVFAPVVALEIDDPKRFANPGKLASYCGLVPSLYSSGGQSWQGGIGREGNHWLKWAFVEAAWVAIRTSPYFRLLYQRLRQRKTAQVAIVACARRLSEIAYHLMKERRCYQERPLSYAS

SEQ ID NO: 42727 - protein, 425 aa, unidentified
MSPPLLPSYERYLAVDLHKHYVVVGGLNAQQEMIVAPRRIDLSDWPAWAKTHLRKTDILVVEATTNAWDFYDQVQPLVGRAVVANAGKIAGLVKTKVKTDRVDVLKLAKLLVAGMIPEVWVPPLDVRDLRALLAHRRQLIKNRTMLKNRLQSILHRHQLLPPEGELFGAKNREWWTALKVSPTERLHTQHDLTTLTTLEPQIAEVEADLYRLSTTSPWMEPVTFLLQLPGFGVIITMTILAAIGDIRRFEEAKKLVGYSGLGASVHISGETHPTGRITKTGRRDIRWALVEAAWIAVDTHPFWKREFERLARRMDKNKAIVTVAHKLLIAVWHVLTERVADKHAEPKMVAFKLMRWSWELTEEQRGGLSSRQFIRLGLMQLKLGENLTRVVYGNLPRRIASVEELLSVRPELRTLVNNPAQPSAN

SEQ ID NO: 42728 - protein, 316 aa, unidentified
MAMPVEALLAGVDVAKAELVIRSSWSSELVTVKNEPKAIDRYLKALPGPTCLAVEATNVFHVTLVERAHALGHTVYVLDGLRLKRYRESIGGRAKTDASDAALLLRYLAHERQELRPWVPPPAGYAAIQRLLRRRAVLIQAQTTLRQSLQCLPEMKVSVRAMLAKMTHMQRLIEKRMVQALEQHGWKVDAQRCQGIEGIGPVTAAALTLIFHRGAFKSADAYIAFIGMDVRVRESGTFSGRRKLTKKGDPELRRLLYMAAMTACRSPTWKPFYERALARGLSRVQALVALGRKLARVAFALLKSQSDYKPRISQTA

SEQ ID NO: 42729 - protein, 343 aa, unidentified
MKIMRIGVDLAKNVIQVHGVDRTEKPVWRRRLSREKWLKVLLEKVEPGCEIGMEACAGAHHWARRLQEHGLTVKMIAAQFVKPYVKSNKNDANDAEAVCEAMSRPTMRFVSVKSVEQQDIQAVHRVRTELVGQRTAKANQIRGLVGEYGLVAPKQLSHLRAALPGWLEDAENGLSERFRRLLNALWGDLVELDTRVGELDDEVAAIAKSDPVAQRLQQLRGVGPITATALVAAVGSAEQFAKGRDMAVSLGLTPKQHSTGGKDRLLGISKRGDPYLRSLLVHGARSMIRAAKGKDDRLSQWVTSLAARSHPNVAAVAMANKTARIAWAMIRNGTNYQPERAAS

SEQ ID NO: 42730 - protein, 327 aa, unidentified
MYIVGIDIGKNHHEASIVSPEGKQIGHSLRFATTHKGADSLMSFIFNNIGNSSCIFGMEATGHYWYPIYSFLKARGYTIYVINPIQSDSLRKMYIRQTKNDSIDSFLIAEVIRFGQFTTTSMADENILAMRQLCRYRDSVISSRTEIKLRISTIMEQIFPEYEKQFSSLWLSTSMGILEKYLTPENIENAPIDELFEIIKDKSHNKLTMKKAISIREAAADTFGIKIAQDAFSFQLKQLIDRMNFLDKQIEALDCQILEYYEKFDCYLHTIPGIGMIGAATILAEIGDISRFKNSSSLIAFAGIDPTVRQSGEFNSCLLYTSDAADE

SEQ ID NO: 42731 - protein, 354 aa, unidentified
MSKDIILTVDYHDRACVIRRLDRGADREQVFTEIPTTAASLGQVVDQARRDSGRRGRVVWIQESTTGWARVRELLADRVEFNLANVLQMPLPPKARRLKTDKVDTARMQREYLAGTLPLAYQPPAAWRQLRRLVAYREGLVSRRTAVRNWIDRYLAHETWFDRTGLWSPRGQRRLRALLEGWPRTDRVILAEKLDELARLEGQLGVALKELVAAYQDCAEARRLDAILGIDVVSAVSIVARIGPVERFGNAEALIAFAGLAPGIQESDRTRRDGRIGGGGTDRHLRHYLIEATVWARKLPRYQTTYERMKKRRGSKVGRLVVARMLVRSIYKVLKDEVAFDPGVPPRTTPAAAR

SEQ ID NO: 42732 - protein, 319 aa, unidentified
MAMKIQPIHIGIDVSKSTLVIADEDDSISEIPNESRSIRGWLKTLPGPARIGVEATGIFHVELIERAHQAGHAVYVIDGYKLNRYRESVGGRAKTDASDARLLRRYLAKELDQLRPWSPPPKGYRALQNLLLRRAKLVQCRTRIDQSLRGLTELGPSRRALLRQIDHLDRMIQRRILKVLRSQNWFVEARTVQDIEGIGVMTTAALVMVFRRGRFRTSDAFIAFLGLDVRVRDSGTMKGRRKLTKKGPPELRRLLYMAAMTASRSATWAPIYQRYLDRGLATTQALIILARKLARVAFALLKNGTQYQPKSVQGACMGT

SEQ ID NO: 42733 - protein, 356 aa, unidentified
MATYYIGADVHSNSIEMAIQNRKRIVKRYTVPASISAVAQVLNSLQGKKYMAIEEGPMSGWLYRNLHQKVDRFVVADPRRNKLISSDGDHDDRIDSAKLALLLAGGYLREVYHSDDEQRVELKNWVGLYHDRIRDAVRNINKIRARCRMYGINMPRKVLRQPEHRDVWLTKLKQPPLAKQLLMLWVGYDATAKQARMAKQQLINLSKKYPIIRIWKQLAGIGTIRAVTIFAYLDTPWRFKRKNKLWKYCGVGLQRTTSGTDKKGKPKPARLQLPWAANRTLKNAILGAALTAINQKQNTFKDDYERMMQNGIIPSNARHTVARKLLTVMWGIWKRSCQFDLSKASLSEPAEECVGI

SEQ ID NO: 42734 - protein, 534 aa, unidentified
MRTRKKVRRKKGRLSLKKARNSLQARLDRVGAEHFGILAVDSSKARFQVLLGNFCGTVLMEPLEVDNSGPALDRLVETVRLEMERHGLKDLVAAIERTGRFHHPIRTVLRRHWTVKMVHPFATKQLREPADPGNKTDATDLVAILRAILMGYGTDEQELSESGAAWRLVSREREALVRHRARARVRIQDRVEALLPGYAALFTDLWKMPAALVLAQDYASAAALREAGPDALIGHLRQAGLSMRRDTLGRILAWAATAAPADPSAPVLQRLLADERRLHAALESQIQAYERDLARFLADAPFVLLLSIQGIGVVSAAGYGAELGPIEHYPDAHKITGRAGLYPSRYQSDETDRADGPLVPHRNARLRDALMEIAHNLVRCNPYFKAWASLRRSRGWAEKKLRVAAACTFSRISYSMLAGRQLFDHPAVRGRDAILPKLTEFILDHGVPPDAARDLLRRAAQQIPPEARPAEAEALRPELTRRRQRHSIWTRGTGPQLLGEILPELLAWLGLPVAPEPERNAFTPTQEKPTRTPH

SEQ ID NO: 42735 - protein, 352 aa, unidentified
MSHKSAPSTAVGTIGIDLGKNSFHLVGLDQRGAIVLQLKCSRAQLERRLANIPSCLIGMEACSGAHYIGRQLAALGHDVRLIPAQYVKPFLKGHKNDYRDAEAIAEAVQRPTMHFVAIKTPEQMDLLALHRVRSRLVGQRTGVINQIRGFLIERGITVRQGVVPLRKALPDILSSYTDALSPRMVNLITELVQDWRRLDERIAAVSAEIESLAEQDEGCQRMMTVPGVGPIISSAVVAAIGNGAGFTQGRDFGAWLGLVPRQESTGDRTILGKISKRGNKYLRTLFVQAAHVVLVRRPRAAMRGLWPWIEQASKRLHRNMLAIALANKLARIAWAVLARGREYQPRIAPHAV

SEQ ID NO: 42736 - protein, 389 aa, unidentified
MLLDHPSDGPTAIRTHIAAIFVSLELSRSNWLVTSLSPGKGEKMSRHSVTAGNVSELLTLFAEFRRKAEVRTGPSYPVVTIQEAGLDGFWLHRVLQREGIESHVVDPASIAMPRRRRRAKTDRLDGEALLRALLAYKRGEPRVCAMVAAPSPEEEDRRRLCRERQSLIAERITHVNRIKGLLFAQGISGYEPLRRDRRARLEALRTGDGRELPAHLKAQIGRELDRTELLLEQIKAVEAERDALLAAAGRPEDKTTPDHPVAMLLALKGLGANFAAVLWSEAFYRQFSNRRKVAAYAGLAATPWQSGGIRHEQGVSKAGNPRLRTTMIQIAWLWIRHQPQSALTRWFKERSPQGRKRAIVALARKLLVALWKYVTAGETIEGAVMKPAA

SEQ ID NO: 42737 - protein, 444 aa, unidentified
MGKPQVFDDQEQGRVFERVAAVDVAKASGVVCMRLPHPAQPAGRRSQVWEVPATMRAVTELAGRLAAEGVQKVTLESTSDYWRIWFYVLEEAGLAVQLVNASQARNLPGRPKTDKLDAMWLARLTEMGLLRPSFVPPAEIRVLRGYARARTRLTQDRTRCLQRLEKLLEDALIKVSAVASKLTTRSVQDMIRAMIAGQRDPQVLAGLARTRMKAKHDALAEALAGLFTDHHAELAQLLLDQIAFLDTQIARLTMLTGEQLASIRAAWGIDADGAAGPSPGAIALPVIARLDEVPGVGAELAASIISETGLDMTRFPSPGHLASWAGLCGRTIQSGARTRTGKGQGNAWLRGYLGRAAIAAARTNTFLGERYRRLARRRGAARAQVAVARSILIIIWHLLNDPTARYHDLGPGHYQARTDKSRKARNHIRQLQALGYTVTITQAA

SEQ ID NO: 42738 - protein, 318 aa, unidentified
MEFILHNCCGLDVHKNTVVACILKTSNFSVYNNNTEVEKQIRKFNTFPDELLQLKHWLEQEGCRHVAIESTGVYWIPVYEVLETAFDGEIEIVVTNARHMRNVPGKKSDVKDSEWIAELLGCGLLRSSFIPPQNVRELREVTRYRKNIVHDIGMQKNRIEKTLQMAGIKLSSIISDIFGVSGRNLINVLVNKGHLTPEDVEREARYIVKEKQDKIKIAINGNLSQPKRDFLKVQLECLDYLLAHLITVESSIDKLSTPFIEEVERLVTIPGIAKTSATAIIAEIGIDMSKFPTAEHFTSWAGLAPGSNESAGKKKAHI

SEQ ID NO: 42739 - protein, 320 aa, unidentified
MMAQNDLVVVGIDVAKDKVDACIRAFSLRLTCPSTAQGHRKLVSWIRKHKVIKAVMEASGGYERDWVKVLRQAGIEVRIVDPKRVRSFALSAGRLAKNDAIDAEMIAWFAETFNEAPGQIHDAAHEELAALVKARKGLLDLMTRLQSQNEHAAPGPVQKANARVLKSLANEIAKLEAAISARIKATPDFAERAEIIESVPGLAETTSATLIAGMPELGQVSDDIAAALIGVAPYDDDSGKRRGERHIKGGRRWVRNAIYMPCLGAATQNNPVLKTFYQRLIAKGKEPKVALVACMRKLIIILNTLIARRQKWDPSRYALN

SEQ ID NO: 42740 - protein, 322 aa, unidentified
MDGSTANSSVSFVGIDVSKSKFDVVVLPEGTCVTCTYDSEGIGQLLAQLPGHDCVVVLEASGGLERRLAAELIDAGHQTAIVNPRQVRDFARGIGVLAKNDRLDARVLAIYAQHVQLRLSVKPSEKRQELTALVVRRRQLLALQTAESNRLQQTKIKLATKSIRHVLDLLRKELKKLDAEIARLIADDDDWRSKSELLQSVPGVGPATSASLVAELPELGKLNRQQIASLVGLAPFSRDSGQFRGQRSIWGGRGSVRTALYMAAFNAKRCNPVIRAFAARLEQAGKRAKVILTACMRKLLVILNTMLRNQTEWNTTVTLQNA

SEQ ID NO: 42741 - protein, 343 aa, unidentified
MDYYVGLDVSLKQTSICVVNQAGSIVHEGVADSDPEAIASFVRSKAPGAVRIGIETGPTTTWLWTELKRLGLPVICIDARHAKAVLKMQINKSDRNDAAGIARIMQTGWFKEVRVKDLDSHAVKALLASRALLVKIKRDLENQIRGLLKNLGLVIGRAKFNVFAVRAEELIEDRPELVAAVRPLLDARKAIERQVGDLDRKVHKLARHDVQVRRFMTVPGVGPITALCFKATIDDPTRFRRSRSVGAYVGLTTRRHASGEVDWSGRISKCGDAMLRMYLFEAAGVLLTRVPKWSGLKAWGAKLTKRNGLRKAKVAVARKLAVILHRMWIDGTEFNWSTKKTAA

SEQ ID NO: 42742 - protein, 378 aa, unidentified
MKRVKFVGLDVHAETIAIAIAEQDGEVRSLGAIPNREDSVRKLVRKLGTMEELRFCYEAGPTGYVLYWQLTRMGAKCEVVAPTLVPVKAGDRVKTDRRDALKLARNYRAGELTAVWVPDAAHEALRDVVRAREAAKKDQLRARHRLSKFLLRHGRRPPMGVKVWTIKYLEWVKREVHFEQLAQEATLLDYLHEVEHAAARIARLDGAIEEAVKVAPPKMRAVIEALQALRGVAHVSAVTVVAELGELSRFARAKQLMGYGGIVASEDSSGERTRRGNITKTGNAHLRRVVVEAAWAYRHRPDVGATLRKRQEHVSEEVKEIAWKAQQRLHQRYRKLLAKGKNKGVVVTAIGRELLGFIWAIGIKVETAQKEPLQRAAA

SEQ ID NO: 42743 - protein, 426 aa, unidentified
MHRMTHPPRQVTGGTHSDAKIHVTGGVDSHSEVHVAAAVCTLSHRLLGVARFATTSAGYVQLLVWLRSFGLLDAVGIEGTGSYAAGLTRYLAGEDVVVFEVDRPDRKARRQHGKSDPVDAEAAARAVLSGRATGTPKSREGIIEAIRVLQVVYRSAVKDRTAANNQFSAAVISAPAQIREEVEQIPDRQRIARVHRWRERSGDNLTDQATRQALRELAWRSNLLSEQAARVEAELDVLTEQAAPALRDLAGVGVHTAAQLLITFGGNTERITSEAAFAHLCGAAPIPASSGKTTRHRLNRGGDRAANSALWRIVMARRLYDPRTRAYVQRRRAEGLSDREITRCLKRYVARDIYRALTRPAPLAPRGKQLRQLRLAAGLPQRVVAKQFDIPVKRLSRIETGITRDPETQTRIHAWLTQHHTTQHAA

SEQ ID NO: 42744 - protein, 473 aa, unidentified
MPRRKSTSSRPAPARAALLQTLNPHAAGIDVGATALWVCVPPGARSSLCPSVPGPPAGLPPHVRRFGTFTAELHAIAAWLRQCQVTTGAMASTGVYWIPLYDLLERSGFQVLLVDPRQVQRAPNRPKTDVHDCPWVQRLHRLGLLSAALRPEEPIRVWRSSQRHRASLIEDAGRHVQRIAKALEQMNVKLPEVVRDITGLTGMGIIRAIVRGERDPQALAKLHDRRCKESAATIARAWQGTWQPEHLFAFQQSLALYDYYHEQIEACDRVIEEHFTGMALPAVPPLEPTRRVRRRRDNAVTFDARQRLHHVAGVDLTAIEGIEESTALVVVSEIGTAMSRWPSAKHFGSGLGLAPNPKKSGGKVQSSATRPGVHRAAQALRLAAKNVQRSTSALGAFFRRIAARRGLAKAMTATAYKLARIVYALLKHGTAYVAQGLAAYETAYRERVVRQVKRKAAELGLVVVEPEVVGQPS

SEQ ID NO: 42745 - protein, 492 aa, unidentified
MLRSGLKSRLYYKGFRSAERGSGPDSELLCNEVLMPMNSPTNTPSSSCPETPETEFAGFVGIDWADQEHAWALAVPGSERREHGQLAQSPEAIEEWAAELARRFAGRPVAVALEQARGALLYALSKYPHLVLFPIHPSLSSRYRAAMYPSGAKDDPKDADLLLELLWWHRARLRPLRPDTPLTRALQVLVERRRQLVDEKTAFTNRIIDQLKQYFPQVLEWFDELDTPLVAAFLERWPTLPQLQTAKPEEILALLQGQNSRSPSRNRQRLDQIAKARPLTVDPAIVEPAVLVVETLLQVVRALRAGIRKLEEEIEKRFAQHPDAVIWESFPGAGQVFAPRLLAAFGSQRERYASAGEVQTYTGIAPVISRSGKSVWVHFRWACPKFLRQSFQEYAQSSLQFSAWARAFYDKQRDKGKGHHAAVRSLAFKWIRIMYRCWVDRVPYCEQRHAAAVAAGQKAAPSTPSQLTQVTNPEQYVWKNVAGFSKFSLAAS

SEQ ID NO: 42746 - protein, 312 aa, unidentified
MSGESIFVGIDVSSQRLDVAIGDDPLESFGNDDAGVVALSQRLSAIGCELIVLEATGGYEALLVATLAGAGLPVRVINPRQARDFAKAMGLLAKTDALDAKLLRLFAERIRPVVLPHRSEAARELAALVARRRELVQMLTAEKNRLTLATRAVGRDITAHIRFLEKRIKDSDDELKRRIEAHTEFRITDELLRSVPSVGRVSSSTLIALLPELGALPHRQIVALVGLAPLNDDSGHRVGRRRIWGGRAEVRSVLYMATISALRSNPVIKTTYQRLVAAGKPKKVAIVACMRKLLTILNAIVRDQTPWNPAIA

SEQ ID NO: 42747 - protein, 337 aa, unidentified
MEYLGIDVHSKYSEVCGLSEDGEVTVRCRIPTTETGLKRFFGKRERSKVTLESGPVTPWVYRLLCELGHEVTVVNPRRVRLIAESTLKTDSIDAEVLARLSRLDLGFLRPVYQRTREAQELRTRLRVRTSLVKARTSLINAVRGTLRAQGYRVPSCPADSFVARFATMRLPASLAEVLEPMVTTIGELTERIQGLKAKLVAESSSDELVQRLQTVPGVGPLVSLAYVGWMDRPDRFRESRDVGASLGLRPSLRSSGGHEIRGRITREGDTEMRRLLVQAAHAALQCHKDSSLKRWAESLVERLGKGKAVVALARKIAVLLHHLWVTGESFRAFPQAA

SEQ ID NO: 42748 - protein, 320 aa, unidentified
MRVVGLDLHRVFAEAVMLEDGVVRRLGRIGMTRDHLAAFARTLTRDDHVVVEATGNASAVAELIRPHVGRVVIANPRQVRLIAEARVKTDVVDATVLARLYASGLLPEVWIPDEATLGLRRQVTRRTQIVRQRARLKTIVQSILHAYLVPPCPHADLFGPRGRAWLSGQPLPSDEGDAVARHLREYDRLTEDLKVVERELAREARADPNVTRLMTIPGIDMVVAVGLIAAIGPVARFDGPDRLVAYLGLNPSVHQSGEGRPRHGRITKQGRTHARTMLVEAAWQAVRGPGPLRAFFQRVSGRRGPHVAAVAVARKLGVTC

SEQ ID NO: 42749 - protein, 376 aa, unidentified
MREKLRFLGMDVHAETIAVAIAEPDGEIRSLGTIANREDSIRKFIRKLGTPEQLRACYEAGPTGFVLYWQLTRLGVDCAVIAPTLVPKKPGDRVKTDRRDALKLARSHRSGDLTAVWVPDEDSEALRDLVRQREAAKQDQLRARHRLTKFLLRTGQRPPLGLKAWTERYMRWLAQVRYTQPAQEVTRLDCMNEVEHMSARVKRLEEAILEVVKLAPQPMQDVIRGLQALRGVAHVSAVTIASELGNICSRFQSARKLMGYCGVFPSEDSSGNRVRRGGITKAGNAHLRRIVVESAWCYRHLPRVGEKLRKRHEGVPPAIIEIACKAQNRLHKRYMKLSMAGKDQRKIMTAVARELLGFIWAIAIKAEASCRQPIAA

SEQ ID NO: 42750 - protein, 422 aa, unidentified
MKSASNTPTDSMRLPEEPPGGVTAGLDWARDDHAVSVVDDRGREKARTTLTHTAAGLGELVTFLARYHAVEVAIERPDGPVVEALLAAGLTVVVISPNQVKNLRGRYGSAGNKDDRFDAYVLADTLRTDRARLRPLIPDSQATVALRRACRARKDLVSHRVAVANQLRAHLRNVLPAAVGLFADLDSMISLAFLTRFDTQDKINWLTPKRLGDWLAKQGYSGKVDPAVLHQRLLDAPHGDTGEHATSQAVITAGYVALLCTLLEQIKTLSAQIDRQLDAHADAHIFTSLPRSGRVRAARLMSEIGDCRSKFPTPESLTCLAGAAPSTRQSGKLRVVGFRWACDKQLRDAVTDFAADTRLANPWAADLYDRARARGHDHPHAVRILARAWLHIIWHCWQDNVPYDPAKHRALQRLTATQIEAA

SEQ ID NO: 42751 - protein, 343 aa, unidentified
MAHPPQLVLGIDTHKDLHVAVLLDRLGRWLAAASFGTTDAANRDLVAWTRSYGQVTTAGVEGTGSYGYRLAQHLTDQGITVVEVNRPDRARRRRKGKTDPVDAEAAARAVLAGDARAVPKHRNGAVGELRALVVARRSAIKARTQATNQIRALLVDGDDELRGRLRRLGKAHLARACVQLAPTAGLQLALASLGHRWLALDQEISRLDVAITTTVTRTAPGLLARHSVGVQTAAQLLITAGDNAHRLHSEAALAAMCGASPVQASSGKTIRHRLNRGGDRAANSALWTIANNRLMHDPRSRAYAARRTALGNSRKEILRCLKRALARELYPLILDALALPQPA

SEQ ID NO: 42752 - protein, 416 aa, unidentified
MEVLYPRCAGLDIHKDTVVACVRLAAEGTVQTEVRTFDTTTPGLLALADWLTDCGCTHVGMEATGVYWKPVWHILSDGDMTLILANAAHVKNVPGRKTDVADATWLADLLAHGLIRASFVPEPATQEMRALLRTRKQLVREQAGHVQRIQKTLEDANLKLASVLTNIMGVSGRAILEALIDGETDPNHLLMLIDRRVKAPRDKVHAALQGRVTDRHRFLWRLHLRQIDTLDAAVAEIDQEVDRELAPFRDAVRLLSSIPGVSDLTAQVIVSEIGVDMSRFPTAGHLISWAGLCPRNDESAGKRRSNKMRKGAPWLKTTLVQCAWAAVKKKTSYLQAQFQRLRHRRGPKKAICAVAASILTAAYHMLRDGTFYHDLGPDHFHRASPKAQAQRLVSQIEKLGFVCTLTDADPEVVVSV

SEQ ID NO: 42753 - protein, 431 aa, unidentified
MNQNTTANPTAPAGPASAAPAPTPVAWIGLDWGHQTHAFVLQDGSGPPEEGTLPHSAEALHAWLRDLEKRFGGRPVALALEASRGAVIHALVQYPWLTIYPINPVTSARYRSAFTPSGASDDLPDARVLLELARDHAAKLRPLETQDPQTLKLAGLVEARRDTVDRRTQVLNQITSLLRAYYPQALELVGELDTELAVDFLSRWPELITLKAVKPGVIKRFHHAHHLRRPELLEARLQLIQKAVALTTEEARVSVAVLQLRCLLDQLRAFRKHVAILDTEIKTVFAAHPEAALFRDLPGAGPALAPRLCVAFGTIRPLYPEPASLQKHAGVAPVREKSGQSLWTHWRWLAPVFLRQTLVEWAGQTVCDSAWAKGYYQRMKAKGKGHHAILRALAFKWIRILWKCWQTRTPYDEVRYLKQLVHRKSPNALPA

SEQ ID NO: 42754 - protein, 371 aa, unidentified
MKKDSTTKFIGLDVHSKTISVAIADEGREGEVRHYGTIENTFEAIDKVIKKLTATGVELKFIYEAGPCGFALYRYLTGNGFTCIVISPAMIPRRKNVRIKNDRRDAMTLARLYRAGELTGIYVPEPEDEAIRDLARTRDDARVAERKAKQRLNSFLLRHNLIYPGKTKWNRTYFNWLGSVGMKYPAQKIALQEYIETVNECTGRVARLSEQIGLAVEEWRMAPMVKALQALRGVSLICATVTVAELGDLSRFQNPKELMAYLGLVPSEHSSGETIRRGGITKTGNGHARRVLVEGAWTYKHHARVTLPLIKRQRDLPKSICQISWKAQLRLCARYRKMVARKKPNNVVVIAIARELAAFMWAIAQEVRAAT

SEQ ID NO: 42755 - protein, 328 aa, unidentified
MRDQYIGIDLHKTFFQACAIAPTGERVWEGRFPRSAAGLEALAARCTPRSALAVEASTPTWHFADGIVTAVGELRIVDPLKTKLKAGYAAKTDRLDARRLADALRRDSVVGIYYPPVAIRELRELCRYRHALVQVRTAIINRLRAVLLRQGIADGRRLARTRSDAWLETLALPPRAAASIAGLRRLLQTVRAEAQHAQGAVEAAAASDPIAERLQTIPGFGPVLSLMVRAEIGDIARVPTPGHLASYAGLVPRVDNSARRIRYGRITRCGSPWLRWALVEAALQGTRRTDRIGRWGRSLALRKGALKARVALARTLCEEIYRHWSVVA

SEQ ID NO: 42756 - protein, 367 aa, unidentified
MHRTDYKQTRFSSFSKGLKELSDWLAKYHCTEVCMESTGKYWIPVFNVLEKAYVSVILSHPKYTKPQKGNKTDRKDAKWICDLFMCDMVKPSFIPPADIRHLRDLVRYRFKLICMITGEKNRAQNCLTVSNLKLDDVFSDVFGKSSRSITEYILEHPGDLFDVTPFVDRRCKTPIEEIQAAVDGAISPEQAVKLRQCLNHIDELEKHLEEIEQEILRLSDKYQAALDLIRTVPGFDKNPMTAIQVLSEIGGDMSVFPSAKHLVSWAGCCPRNDQSNKKIKSTRISRAGSYFKPVLVQVANGLLRSKKHPEITDRYKRIKARRGHKKAIIAICRMLLTAIWHILSDLKPYTAEGFRESRGLMSRKSTN

SEQ ID NO: 42757 - protein, 343 aa, unidentified
MEKTTVVGVDLAKTVFEIAVSHTPGQVNEKKRLPRTKFLSFFKELPPATVVMEACGSAHYWGRVFEGFGHTVVLLPPHLVKPYITRNKTDRADAKGILEAYRNDQIHRVPIKTVEQQTLGAVHRLRSRWIKARTAQVNTARGLLREFGFTIPVGIEHVVPQVRLLVEDADSKVPDALRPLLVAVCDQIELSGQQIKLAEQQLEELAEQTAVVKRLQTIPGIGLISSTALAAFVGTVDRFPTARHFACYLGLTPSERSSGTKRRLGSISKLGDIYLRTLLIHGARSVITHARHAKSNDHLRSWALRLLSRTRYNKAVTALANKLARITWAVWKSGRDYEPKAAA

SEQ ID NO: 42758 - protein, 343 aa, unidentified
MLYLGLDVHSKWFTMAGFDQETGECFKAPKVMNDPSAIAETFAALPTPRCGAMESGTNALPMRRLLKPYFDNLIIVSPNKVWDRRRDAGPKTDSRDAFRLAEELSFGRLRPIYLPDDALRAQRTLVRGRIQTAQEITRQVNQLYALLRSWGAPIEKKLLTKGGRSWLDTVTLPEHAALVLEHQLDRLDALITQEMALDARIATLTKDDIVCQLLQTIPCVGPLTALVLRAEIGDIGRFVNADKLVSYAGLDPRVIQSGEHCRYGGLTKHGNAYLRYIAVLFAQNAMRSRADTPFKRRFYRLCHAHHPNEIKIMLARDFLTVVHSMWRTHTAWQYPRPAPSSVA

SEQ ID NO: 42759 - protein, 402 aa, unidentified
MTREYDVFLGLDVGKTAHHGCALTATGERLYDRELPQDETALRAVIEQLQDDGLVLVVVDQPNTIGALPIAVARACGATVAYLPGLAMRKSADLYPGRSKTDARDAFIIADTPRTMPHTLRAVDRDSDLLSALKVLAGFDDDLARECTRAINRLRSLLVQIYPWLERVFVGTILTRPIVLELLIRYHGPEGLKAAGKSGVKRWAKNHTRKDPSILIDQILAALAEQTVTVPGATTVELIIPRVAAQIKELKAQRALVATEAEAMVDTHPLTQVLISMPGVGIKTAATILLTAGDFSSFPTPGHLAAYAGIAPVTRRSGTSIRGEFPVRSGNKQLKNALFRSAWVASCHDPVSKAYYDRKRAEGKKHNAAVICLARRRLNVLYAMVRDGSFYQTTPEHIPQAA

SEQ ID NO: 42760 - protein, 353 aa, unidentified
MNRLKYIGMDVHKAITVIAVLDSLGEKLTEAFVRTTSMAILDFLHGQRGTLYVAFEEGTYAAWLYDLIRPHVANVVVCNPRKIVNQGNKNDKIDAMLLAGLLRTKALTPVYHGEQSTRAVKELVRSYNGIIQDSTRIKNRLKAIFRGRGIDCSGEAVYRSEERESWLCRLEDQAVRARAKRLLEQLESLDPLRDEAEKELLTEARKHVDTKVLRSAPGIGPLRAAVILGMVGTPHRFRTRKQFWTYCGLSVVTKTSSEYELINGQISKSKKRPLVRGLNHNYNRALKEVFKGAAKTAAAGQWKSRFDAMIANGTPESLARLTLARKIAAITLALWKRGERYDPNKLTMSSHAA

SEQ ID NO: 42761 - protein, 375 aa, unidentified
MGDHSEAFVAFDTSKLRNAVAIADGGRDGEVRYLGEIDNTPAATAKLIRKLADKYQGLTFCYEAGPTGYGLQRQITGLGHSCQVVAPSLIPKKPGDRVKTNRRDAVGLVKLLRAGELTAVWVPDERHEAMRDLCRARGAAVKDQRVKRQQLTAFLLRHGRHFVDGKNNWTKKHERWLLSQKFEHAEHRIVFEEMMLAMRQAQERIERLEQTIRDAVPGWSLAELVTALMAMRGLDLISTTTLLTEIGDLSRFRTPRELMGYLGLVPSEHSTGASVKRGPITKAGNNRARRTLVECSWCYQHPPRVGKDKQVKVEAAPRAAREIAWKAQHRLHGRYRALTRRGKLRTVAITAVARELAGFIWAISRVVTDARVAAK

SEQ ID NO: 42762 - protein, 415 aa, unidentified
MTHSALDARPARPAAVVTGGVDTHKDTHTAAVLDATGRLLGHRQFPTTPAGYGLLLAWLRSHGELDKVGIEGTGAYGAGLALHLRVAGVELVEVDRPDRKARRQQGKSDPVDAEAAARAAQAGRATGIPKDRVGAVEALRALRVARRSAVAARAQAQTQMKSLIVTAPDPLRSQLRELGVRQLVAHCAARRPDRGAAAESTTATLIALRALARRHQRLSAEIDDLDALITPLVTQINPALYALRGVGPDIAGRLLVTAGDNPHRLRSEAAFAMLCGAAPLPASSGRTQRHRLNRGGDRQANCALYQIVLCRLRWDPHTRAYAQRRTAEGMSKKEIIRCLKRYVAREVYTALLNPDPSSVPATSCAAQEESTCSARSAARTNEVDTDKRCETIKHGGSTRESTPPPTIAGNPASAA

SEQ ID NO: 42763 - protein, 486 aa, unidentified
MAKRKKSTFERLRDGEKLKQWERKEVERQFRAEDPGWEVVHRDVAGIDVGSESHFAAVDPKLALPSVREFGSWTAGLQTMADWFKQCGVKRVVMQTTGVYWIAAQEVMEGNGFQVAVVDARGTKNLPGRKSDVQECQWLRKLDRFGLLRESFQAPEAIRGIRTTWRLRQRWVSDAGRSIQQMQKALTTMNVQLANTISDVSGVTGQAIIRAIVGGERDPWKLAQLRARNIQASEEEIARSLEGNWREDVLFELAEVLEAYDFQQKRIVRCDEQLKKYMGTQPTREVGGGVEVAGEEVAEGPKPRGRKKKGPRKPRKNQPAFHLEVELKRVMGVDLTRIDGVKVMTAQTIYAEVGADLSDFPTESHFASWLMLAPKRDVSGGKVIKHLSFKGSNRVANSLKMAAESLKDSDSYLGARYRSLRGRLGGVRAVKAMARYLSCLIYRMLTKGEAYVDRGAAYFEKKRQDRDLVYLQRKAAALGLQLIAAV

SEQ ID NO: 42764 - protein, 433 aa, unidentified
MQDVHDEPLFCERAAGLDIAKAMVEATIRVPSDTTAGRRQQETRTFGTTRRELESLGDWLACWGVTKAGMEATGDYWKPVFFLLESRGFDCQLYNAAQVKALPGRPKTDKLDSIWLAKITERGSAAASFVPPGPIRRLRTHTRYRRHLTQARTAEKQRVEKLLEDGHLKLSSVISDIHGVSGRDMLDRIAAGQRDPKALAQLARGTMRGKIRRLEEALDCSFFTDEHAAVLAMMLAAIDHYATQIEALTDRIETLIEPYLHQVAQLDEVDGIGQVCAQDIIAEIGTDMTVFPTAGHLVSWAKWSPQVKQSAGKHKGSNSTGRGNPYLGAALGEAAVSAGRTQSFLGAKYRRLTRRMPKKKALVATGNSMLAIIHALLSDPDARYTDLGADYHEQRMHALRQARNHVKSLERLGYKVTIQALNPDTSQPLTATA

SEQ ID NO: 42765 - protein, 351 aa, unidentified
MKQITMIGLDLAKNVFAVHGVDAAGNVVIRRSFRRAALEKFFAKLPPCVVGIEACGGAHYWGRRLIALGHEVRMMPPGYVTPYVKRNKTDGRDAEGICEAMDRPTMRFVKVKSLESQAMGTLHRARSILVRQRTMLGNALRAMMTEFGVVAPKGVKGLCELMAQLAKPCDAIPELARCSLLELKRHWDELNASVRKMEARIVRDTKADATARRILAVPGVGPIVASATLAKVPDARVFKRARDFVAWMGLTPRQRGTGGKQRSGGISKQGDRTLRMLYVAGASAHLRQEMRRGASDPWLARLLAERPFKVVAVAYAAKMARIVWAMLTTGEFYRPRGQAHSASAIPAPAAA

SEQ ID NO: 42766 - protein, 382 aa, unidentified
MSRFIGLDLHKEYIHGCEWSPVDPRERHFRFPNTQEAWEQFLAELDGSCQVALEVTGGAFEIYDRLAEVAGQVVVANPLEMKRLGSGRHTDRNDAARLAKMLALGVLPGVWVPPASIRELRNLLRFRERLVCTRRRFINQAKAVLRRHGHTLPCRRDPRRIPAQTLASLPAGDRFIVESAHRQLVHLDQEIAWVETELARRTQDESMVQLLLTIPGVGLTAAISVFAFLGDPHRFRSAKQVARYAGLDPSVHQSGTTDFRGHISKNGCAQLRSVLVEAAHVVARYDDGPLGRFYRSKRARLGHKRSIIALARKLLIVCWKILQRGEPYRAAKPHMTNRKQRLIRRIAARPLLGEEPAESCTSVTDDAPSHRTRLKTRTRVPA

SEQ ID NO: 42767 - protein, 362 aa, unidentified
MLHAGLDLSRKRLDVHLVDEAGTTVEVGAVLPDRDGLRSLVGRTARYHQPVRAVIESMTGARFVHDQLALLGWQVEIADAQRAKGLAPLACKTDKIDAAVLAQLSCRDLVPAVWLPTPQVRAERERVRWRLHLVHHRVGLKNRVRAILITFGQQRPMADLFGASGRRLLDQLDLPEPWRGTLLASVRLIDELDREIDACDAALRRLGAEHPAVPLLMTAPGIGWVLASTIAGEIGDIRRFPSPKSLRGYTGLCPRVYQSGTKDRRGALAKNGPNYLRWALIEAAAHAAHHPADSAHYEATKKRLGGSAAPSSPASRWRASSPKPSGACSPAIRPFPRQAPQRVWSPDDPGLNWATGTGSHAT

SEQ ID NO: 42768 - protein, 400 aa, unidentified
MRAVFGIDVSKTSSEVAILVNGEKVHGYTILNDAIGFNRLLGDLKTVHNPEIIFEATGVYSRRLQAFLEEYSYAYTRLNPLEAKKQLDSLRIRKTDKIDAEKLAKSQLVHNRKPTYVQEEVYQHLRDLSRFYQNMTEDLVRTKNRLHKVLQVTFPELETLLSTPTGEQYWNLVMAFPCKEFVLSLSQSNLCEIVRQSTSKRISEKRITYLTDKLIKLAKQSFCAVKNTSPMLEEVRYYAQELLRLSERRQVVLNDMVALAQPLPEYDILRLIPGIAETTATSIIGELGDIRRFQSSNQINAFIGIDLRHYESGNFLAKEHITKRGNPYARKILFKCIHNIASASHTNPCHIADFYEKRKRQSTIASTKPHTIASIHRLIRTMYYLITHNKLYDYSLTQNR

SEQ ID NO: 42769 - protein, 323 aa, unidentified
MNKDIKYFGIDISALVFDVTDSDGNYYQFKNTEFGFKKFTKLLDNTSHCVMEATGYYHYQLAYHLLESGIKVSVENPLSVKRFIQMGLSKVKTDKSDSKLICAYAKQVDLKLWKGKSKDEMECLQITRALAIYTKQSTMLKNKLHGESVLGEPSKGVVRSLKRSLKQLEKEVKILEAKLIDLVNKSHRDLLTRLKTIPGIGPKTAMMLVVLTGGFDRFNSASELCSYAGLTPVIRQSGSSVKGRPRISKIGNQKLRNLLFMCSFNACKYNKACRDLYERIVAKGKSKKLALIAVCNKLLKQAFAIAKSGLIYDGEYKSTLVKN

SEQ ID NO: 42770 - protein, 349 aa, unidentified
MEQVEVILGVDTHLDVHVGAVISQTGKLLGTLSVSASASGYLDLLIWAQSLGTLRRAGVEGTGTYGAGLTRVLLDHEIEVWEVNRPDRADRRFRGKSDTTDAESAARAVLSGKAAAVPKDKSGAAEAMRAVTVARRSAVKAKTQAINQLRSLLVSAPQDIRERLSSTKMAECVANCARVRSLGNTPMLQTLAATLRLLAKRWIALEEELKALDAMLEKLTSQYAPRLRERFGVGPHTAAILVTVAGDNPERLKNEASLAALCGTSPLQASSGKTVRHRLNRGGNRSANNALWTIAMVRMRSDPRTKAYVQRRSHEGMSNKEIQRCLKRYIVRELYPLILADLAESKSFA

SEQ ID NO: 42771 - protein, 428 aa, unidentified
MKQKHHNTNENLKQLTSETLIVGVDAAKNNHVARAVDYRGTELSKTLTFSSNSKGFLMFHKFIRDLAAIHDKTNVIVGLEPTGVYGNTLVQFLRGKGINVVLVLGSQVAIAKELDDNTPSKNDYKDALTICKLIQGGRFRKFREFDENINALKEAMSLNQQLTKNLTRVKCQIDNWLCLYFPEFQLAFKDWTKKTAYATLKICPLPKDVLAVKPEGLVQMWRKSGVIKGIGIKKADELRHLARYSTGVTTAPEFAAIHIRDLLIQYEVFLSQSDELWALIDTLVKDIPLYKTLSGIPHLGKRAICGIISEIGDPFVFSHPRQLIRLAGLSLRESSSGSRRGTSQITKRGRPHLRHWLYIAVLNLLKEKEPSFWALHLYYTKRKDNPLKKMQSVIALCCKLLRVIYGMCMHGTAYDPRLVTPYLASNTV

SEQ ID NO: 42772 - protein, 410 aa, unidentified
METIVKRAAALDVHKARLTGCVRLPGRGRERRQEVAEFETTVRGLLLLRDWLQAHAVTQVAMEATGVYWKPVWAILEDEFDCLLVNARHVKQVPGRKTDVSDAAWLCQLLEAGLLRRSFVPPKPIRALRNLTRYRKAQIGERQREANRLHKILEDSGIKLGCVATDILGVSGRLMLDALVAGTTDPELLAELAKGKLRAKIPALREALVGRFDRQHALIVSAILAHLDFLDEQIELLSAEIEAQLAPFQAAVELLCTIPGVQQRTAEVIVAEIGTDMSRFPSERHLASWAGQCPGNDQSAGKRRSGTTRHGSKWLDTALTEAALAATRSNDVYLAAQYQRLRPRRGHGRAIGAVKHSILTSCWHMLQTGELYHDPGGDYFSRQNPERATRRLIAQLERLGHHVTIQEAAA

SEQ ID NO: 42773 - protein, 421 aa, unidentified
MDVHKDIIVATIGITDPSTLVTEYLQETFNSFNSDLYRLGQWLTSHFCSDVCMESTGKYWVPVYNILEELGFTVCLAHPKYTKAIKGKKTDKRDSKWICNLYKYDLVRGSFIPPKAIRELREISRYYHKLIGMASSESNRYQNCLTVSNIGIGSIFTDVNGKSAKRVMEAVLNAEDPNKLTEQDILKLVHKSCKKKDQLLDAIHGCRIESDQRFKMMEVQKHKEELDKHITACFAEMFKRASHFFDQFLHIAEIPGISVLSSILIISEIGVDMSVWDSARQLCSWAGLTPGNNESANKKKSTRITKAGQYLKPLLVQCALAAIKDPNGYFGIKYHRIKKRRGHKKAIVAIARMMLISIFHMILTGESFKPTDYEEPMNPKPHKPRLTVKDAVDFLKQSGEDLDEIIASLKAGPPALNASPS

SEQ ID NO: 42774 - protein, 405 aa, unidentified
MDAIYQRCCGIDVHKKLIVACLRVGRKEEIRSFGTSTDEICQMITWLEENRCEITAMESTGSFWKPLYNLLELCGLTTIVANAQHIKNVPGRKTDAKDSQWIAELLQHGLLEPSYIPSRDQRELREISRYRKSLTEERARELNRLQKVLEGGNIKLSSVVKDINGTTSRELLELMLKEGVNETNIDEHLYGSLREKRDELLKACKGFLTPLQCRLIRAILDHIDDMTKRIAEISRIIDDYMHDYEDAVKRLDEIPGISKQSAQVVLAEIGLDMSRFPTAGHLARWIGLAPGNNESAHRRKSGRTTKGNMTAKTAMIQCAKSAKRNKDSYFKAQFDRLAVRRGKNRAVVAVAHSMIIAIYHMLRDGEDFKDLGVNYYMEHNPERKIRYHLKKLASLGWVMPTVPAA

SEQ ID NO: 42775 - protein, 319 aa, unidentified
MAQNDLIVVGIDVAKDKVDACIRRFTLRQTLPNTAQGHRKLVAWLRKYQVGKAVMEASGGYEREWRNVLHNAGIEVRIVDPRRVRSFAQSAGRLAKNDPIDAEMIAWFAETFSQAPGQIPDAAREELAALAKARKALVDVKIRLQAQDEHAAPEPARKAYARVLKSLAAEIDKLEAAISAKVKATPEFAERAEIIESVPGLAQATSAILIAGMPELGQVSDKIAAALIGVAPYDDDSGKRRGERYIKGGRRWVRNGIYMPCLGAATQCNPVLKAHYQRLLAKGKEPKVALVACMRKLIIILNTMLARRQKWNPGRHAMG

SEQ ID NO: 42776 - protein, 338 aa, unidentified
MALYCGIDLHSRDCWLAILDGGLKVVREAKVGNDLEAILEILEPYREDLKGIAVESTFNWYWLVDGLDECGYQMHLVNTWAVKQWEGLKYSDDRHDARWLAHLLALGILPEGYIYPKQERSVRDLLRRRAFLVRKRTSFLLAMRGAFECRTGLRTTSREVKQWTVEEVESYLEDPVEALGITCLLEPMKTLDGQIRIIEKKALTRARLRDEFAPLQTVWGIGKILALTMMYEVGEISRFKKVGNFASYCRLVKTARLSAGKRKGSGNARNGNPYLSWAFSEAAHFAVRYHLPAKKYFQRKRSKTNGIIAIRALAHKLARASYYVMKDQVDFDSERVFG

SEQ ID NO: 42777 - protein, 339 aa, unidentified
MELHCGMDLHGDNVFCAVMDREYRVVFERRLPNDKQVVLAALAPYRDRLAGVAVESTYNWYWLVDTLQAHDYPARLANPARMQENIGLKSANDKTDARFLAKQMVMGVLPEGYIYPKEERSVRDLLRRRMRLVHMRTGEWLSLEGLVARQSGKDLGVQALNGLAAGELQALLDNDPLVLQAAQISYRHIEFLNKEIREIEKVVEGRTKLSAEYGRLLGVPGIGRILGMTISLETGPITRFPGPGNYASYCRAVKTEHTSNDRKKGEGNGKSGNRYLAWAYIEAANFAVRHSPELQAWYQRKAARTKRVIALKALANKLAKACYFILRDGVAFDVKRLVG

SEQ ID NO: 42778 - protein, 360 aa, unidentified
MAMILAIDMGKNKSVCCRYDPQSGKERYKTVPTCPQSFHDLLVEHPDDTVVIEISPLAGWVADLCQTLKINLKVVNTASEQWSWKKIKNKSDRKDARKLAVMEAMNQHRYVHMPSSPGRQWRELIAYRDDQVSRVTACKNRIRGLLDRQGQRWAAGSAGWTEAAIGQLKTQAKPLSECDSDNLWRGMLHEEIESLQQAQAHLAQVTAKLDQIAQQSERVRRLKTAPGVGNRTAEIVIAMLDDSSRFHNVRQVGAYAGLTPRQCQSGQMDRQLGISHAGSKLLRKMLVQSAWAGQQTNPWMKQTFERVCGGKADRKKKSIVAVARKLFVRLWAMDRDKKDWNGPEAVTPAWRALQKSKALC

SEQ ID NO: 42779 - protein, 349 aa, unidentified
MGKLWIGVDIGKTHHHVAAVDGDGRLVYSRRVANEETSLLTVMAEVSTHGRPVCWAVDVTTGLSALLLTLLWRRQVQVRYVSGTVAFHMAAAFAGENKTDARDALVIAQTIRMRPDIPILESTDRLLAELTVLTGYRADLVGQRVATLFRLQELLTGISPALERAVDLNRKGPMMVLACWQTPAAIRHAGVDRITALLRRGHVKNAAQVAEAMVAAARQQTVTLPGQRAAAVVVGQMATEILALEQRIAAVDDLIADHLDQHPLAPIVASLPGMGPLLTAELLVHTAGMTEYDSPAKLAAHAGLAPVSRDSGSVSGNHRQPRRFHRRLRHILWMAAFTAARECPTSRAY

SEQ ID NO: 42780 - protein, 420 aa, unidentified
MNTVSNKSFTAFIGIDWADAKHDVCVQAAGDERREFSCMPHKVEAIDNWAQSLYRRFGGQMAVALELSKGPLVYALQKYDFFVIFPVNPSTLASYRETFTPSGAKDDPTDAEYVLDLIMRHADCFEPLQPQSVEMRTLVSLVEQRRRLVDDRVRTTNRLRDTLKQYYPQALEWFDRIDTSLFCDFIERWPTLVQVKRARRTTLQRFFHQHNLRRAHLLDTRLSSIKAAMPLTLDEAVITPNRLQALVLVDLLRATLVAIKRFDEAIAELSPKHPDYALFSPLPGAGPSLAPRLLVAFGEQRDRFKSAAELQRYAGIAPVTERSGNKHWVHWRWQCPTFLRQTFVEWAAQTINKSYWAGLYYRQQRDKGCNHQAAVRALAFKWIRILYRCWQTHTPYDEALYLKALKRRGSPLLNQIEATI

SEQ ID NO: 42781 - protein, 412 aa, unidentified
MSHGHVMWVSREAAFRSTDDWKDTTMPSAISPPKAVLGIDVGKSSHWACLVTREGEVALNRRVRNSEGDLDGLFSQVACDTIVVVDQCRNIGLLAISRARLAGLGVAYLPGLAAHQAARLFAGDAKTDERDALVIAKTALGIPDALLPVPEPDESLEAARSLAAQRSHMVTCATRDKNRLRSILLESCPAFEALADLGDRHWLNMLEKLGGPWGCIDAGKPAFGAVTKGANRARMDAAWNAAMASTRPSKRRVDAENPQVRMLARRIREALEEADRIDREITALLAGDGTYECLVTIPGIGPRTASELVIGINIEDFPDHDHLASYCGIAPRNRQSGTSISSVSASRQGNRRLKNLLIFSCNSLVRSENRFGEYYRACRGRGMCHGEALKAVARKRLKVIYAIMRDKVPYSA

SEQ ID NO: 42782 - protein, 410 aa, unidentified
MEVVHAHCAGLDVHKDTVVACVRHMTDGKVTTTIKSFNTATQELLALSDWLSAENATHIAMEATGVYWKPVWNILSDGEFELVLGNAAHIKNVPGRKTDVKDAAWLADLMAHGLVSSSFVPDQTTQEMRDLLRTRKQLVRERTSHTQRIQKTLECANIKLDSVVSNVVGVSGRRMLEALIAGQTDPKELAAMAHGRLQATPADLEAALRGRVTAHHRFMLRLHLDQIDSFDEAIARIDKEVKDNDKNFRAAVELLKSIPGIGSLAAEVIVSEIGIEMNRFATAGNLVSWAGLCPKNDESAGKRRSNRLKAGAPWLKTTLVQCAWAAARSKGTYLHAQYVRIRARRGNQKAICAVAASILTTVYHMLKDGTFYEDPGPDYFDKRNKDQQANKLVNRLQNLGFNVTIQPAAA

SEQ ID NO: 42783 - protein, 359 aa, unidentified
MCRVGEPVDSLLPLTLRINIMTLQFKQTAQEPKPFFAGIDVGAEELILVIRNNGTPYQAQKFTNTPADRARLLKKLAKLPGIIVCLEATGVYHFDLSIALHDAGVALMVVNPKASHNFAKALMKNSKTDAVDAETLAQYAERMDFVAWTRPSDDKIALRGFARRIDALTRQKAAAKNHLHALSASQETPKAVLRDVNLSISQLEKRISRLGREARVLVREHPELERVFLLLVSVKGIAETSAIALMGELLLLPPGLSHREWVKFAGLDPRVFDSGKSVHKPARLAKAGNRHIRSALYMPALSAKQHDPHIKAYFQHLVDNGKKPLQAVCAVMRKLLHAIHGMLKYNKPFDNARFYAIPA

SEQ ID NO: 42784 - protein, 385 aa, unidentified
MLLDHLSDGPTAIRTQFGAIFVSLELSRSTWLVTSLSPGQGEKMSRHSVEADDVAELMKLFADLRRKAEVRTGLSYPIITIQEAGLDGFWLHRVLQREGIESHVVDPASIATPRRRRRAKTDRLDGETLLRALLAYKRGEPRVCAMVVAPSVEEEDRRRPCRERRTLIAERIEHVNRIKGLLFAQGISDYAPLRRDRRARLKALRTGDGRELPSHLKAQISRELDRLELLLTQIEAVEAEQDALLAEGKQPATPDPASMLLALKGMGANFAAVLWSEAFYRQFANRRQVAAYAGLAATPWRSGRIEREQGVSKAGNPRLRTTMIQLAWLWVRHQPQSALAIWFKAHSQRGRKRTIVALARKLLVALWRHVTQGVVIEGAVMKSAA

SEQ ID NO: 42785 - protein, 350 aa, unidentified
MVVVGADVHKRTHTFVAVDEVGRKLAEKVVAATSAGHHDAVCWVRQRFGVDVVWAIEDCRHLSARLERDLMTSNQKVVRIPPKLMAQTRSSARTRGKSDPIDALAVARAFLREPDLPVASHDEVSRELKLLVDRREDLVAQRTSTINRLLWRVHELDPERAPKPRSLDLAKHRTLLGEWLAGQPGLVAELARDELADITRLTAAINVLAKRIGQRVRAVAPTLLALPGCAELTAAKLVGEAAGVTRFKSESAFARHSGVAPIPVWSGNTAGRVRMTRTGNRQLNAALHRIAITQIRLHGIGQAYYRKRLASGDSSTEALRCLKRRLARVVFHHLHTDHQSRLQTCQPAAA

SEQ ID NO: 42786 - protein, 348 aa, unidentified
MRCYSGQHRFYAGVDLHARSMYIHILDHQGKTVLERNLPAEPDAFLEAVKPFRDDLVVGAECMFAWYWLADLCEDEGIPFVLGHALAMRMIHGAKTKTDRIDAAKLAAMLRGGLFPMGYVYPRAKRQTRDLLRRRSFFVRQRAQLIAHIVNSNTQFNLPPLSKKLTYAANRTDNLVERFSDPSTKLAVTADLGLIDAYDIQIAALERYLVKNAKVDDPVTFGLLRTVPGIGPILGLTLLYEIDAIKRFPEPGNFLSYSRLVRCVHESAGKKKGSGGKKIGNAHLKWAFSEAACLMIRSCLPVKAWMQRQEKKKGKKKALSILEAKIGRCVYHLWRKQVPFDVKRFLNG

SEQ ID NO: 42787 - protein, 376 aa, unidentified
MITCFIGIDAHTTNYTLSTAIDAEDKPFNTCKYAPKLTYILKYANALCKKYNLKKEDILLGYEAGCLGFKLQRDLNENGFNCVVMAPSTIPGTAINRRKKTKNDIRDAEAIAKALRNDDYSSVATPDEEDEAIREFIRAREDVRMELKRCKQHIMAFCNRHGQHYEETGWTQKHMKWLNNLAFSQPVLKETLNSLLLEYEYLTEKLEEKDRRIEEFAQMDKYRESVHKLTCFKGIKTLTALAVIVEIGDFARFMKAKNFVAYLGLSVGEQSSGNDHNQTGITKQGNRFIRKLLTEAAQCFSRATSKKSKELKKRQEGNVEEVIAYADKANERLRKRYRHLVIHNMKSPNKAKCAITRELACFIWGMMTDNIHTVLV

SEQ ID NO: 42788 - protein, 392 aa, unidentified
MYIVGIDIGKNHHEASIVSPEGKQIGHSPRFATTHKGADSLMSFIFNNIGNSSCIFGMEATGHYWYPIYSFLKARGYTIYVINPIQSDSLRKMYIRQTKNDSIDSFLIAEVIRFGQFTTTSMADENILAMRQLCRYRDSVISSRTEIKLRISTIMEQIFPEYEKQFSSLWLSTSMGILEKYLTPENIENAPIDELFEIIKDKSHNKLTMKKAISIREAAADTFGIKIAQDSFSFQLKQLIDRMNFLDKQIEALDCQILEYYEKFDCYLHTIPGIGMIAAATILAEIGDINRFKSSSALVAFAGIDPTVRQSGEFSSTHNHMSKRGSPYLRHAIFLAATTCSFHNSPLNAYYKKKREQGKHHLTATGAVARKLTTVIYAVLRDGKPYEPKSFC

SEQ ID NO: 42789 - protein, 354 aa, unidentified
MPERAKARVTVVGIDIGKNSFHVVGLDRRGAIVLRQRWSRGQVEERFANMPRCLIGMEACVGAHHLARRLRALGHDARLMPPKYVRPYSKGQKNDFRDAEAIAEAVQRPTMRFVVTKTPDQLDLQSLHRVRERLVSQRTGVTNQIRAFLLDRGVAARQGLRFLRCQLPIILATRSDVLSPRMMRVIEELAGDWRRLDERIDGLSQEIEALARQDPACERLMTVPGIGPIISSAVVAAIGNGAVFTKGRDFGAWLGLVPKQISTGDRTILGAISRHGNRYLRALFVQAAWVVLVRIKDWDRYGLKAWIDAAKKRLHHNVLAIALANKLARIAWAVLNKERVFECVRTRATASQPA

SEQ ID NO: 42790 - protein, 287 aa, unidentified
MQITTLGVDLAKDVFQLHGVDDKGRCRLQKAVRRGSLMTVMAKLPACLVGVEACGGAHHWARQFRGLGHDVQMINPQYVKPYVKTQKNDYNDAAAICEAVSRPNMHFVPIKEVEHPDILAIHRVRSRLVATRTALINQIRGLLAEYGLVMPRQIGQVRRCVPTVLEDAENGLSARFRVALPALYEELAELDERVQSSTNEIDRLCSSNPRCQRLAAGEGIGPITATALVAALGDVHVFRNGRQVAAWLGLVPRQHSSGGRTVLLGISKRGDRYLRMLLIRKRLAKAS

SEQ ID NO: 42791 - protein, 338 aa, unidentified
METYAGIDLHSSNNYIGVIDSQARRLYTKRHDNQLDCILRALDPFKKTLAGVVVESTYNWYWVVDGLQDNGYTVHLANPAAIQQYEGLKFTDGKWDALWLANMLRLNILPEGYIYPKEDRAVRDLLRRRMMFVGQRTAQILSLQSMITRNRGLNFSGAVVKNIMDFFVDKLFDSPHLRFTAKKNLAVIRFLDEAIKEIEAEVKSQARLKKEFEMLLTMIGVGDILGMTIMMEVGDISRFEAVGNYSSYCRCVESKRISNGKKKGKNNKKNGNKYLSWAYIEAANFSRRYCPMAKKFYQRKLAKSNKVLATKALANKLSKASYFIMRDQVPYDPEKLFK

SEQ ID NO: 42792 - protein, 327 aa, unidentified
MAKQKQPKEVTFEEVVERGCGLDIHKKEIVATVNGTGITQETRTFQSTTRSLTELKEWLLTLGVTHVAMESTGVYWKPVLNILETGGFTIMVVNARHIKYVPGHKTDKKDSAWICKLLRAGLLKGSFVPCRSQRDLRDLTRYRRKLVQQQAAEHNRMIRIFEDANLKLSSVFSNIRGKTCTAVIDAVIAGETNPEKLSELCTHWKLKSTKEEIALAVEGKFTEHHIFMIRAIRTSISNIEAEIDHLDKEIERRMQPIEERIRKLCEIPGMSTNSLRELLAEIGVDMDVFPTAEHLTSWAGLAPGNNESAGKKKVHTPTTETKLLRLS

SEQ ID NO: 42793 - protein, 347 aa, unidentified
MRFYTTQHPFYCGIDLHARMMYVCLLDQSGEILVHRNMKTDPDTFLKAIAPYRQGIVVAVECMFTWYWLADLCADEGIPFVLGHALYMKAIHGGKAKNDKIDSQKIAALLRGGMLPQASVYPAKMRATRDLIRRRMPLAHQRAELLAHVQNTNSQYNLPAIGKKIASKANREGVAERFADAAVQKSIEVDLALITYYDALLRDVELPIVKTAKHHDPNTLYLLHTVPGIGQILSLVLLYEIHDVNRFPRVQDFVSSCRLVKCARESAGKRYGTSGAKIGNAHLQWAFSEAAVLFLRDHPAAQKHLARLEKKHDKGKALTILAQKLARAVYDMLKRQGAFDKDKFFQR

SEQ ID NO: 42794 - protein, 455 aa, unidentified
MPKRTTGDRPELKPVNVGAAAIDIGSKMHMAAVDPTCTNTPVRAFGTFTQDLHDLADWFKACGVTSVAMESTGVYWIPAYEILEQHGFEVILVNARYAKNVPGRKTDVSDAAWLRQLHSYGLLRGSFRPDAEIATLRAYLRQRERLVEYAAAHIQHMQKALMEMNLQLHHVVSDITGATGMRIIRAIVAGERNPDVLATYRDVRCHSSIETIRAALVGNNRDEHVFALTQSLELYDTYQAKMLDCDRKLESLIAALTDKGARPVGKLSRPRVKTKQVNTPSFDVRAALYGVLGVDLTEIHGLGPSLALKLIGECGTDLRAWPSAKHFTSWLCLAPGNKISGGKVLSSRTRRSSSRAAALLRLAATTIGRSDTALGAFYRRLSSRAGKAKAVTATARKIAVLFYNTLRHGMTYRDPGADHYEEQYRSRVLANLKRRAKSLGFVLQAVPGDAEAAVS

SEQ ID NO: 42795 - protein, 408 aa, unidentified
MNPLYVGIDVSSKSNVVYLMLPDGKKHSNFSVPNSQDGSTQMIKRILSVLTFHSLDTVIIGLEATSVYGDNLVYFLREDAILAPYNRKIHVLNPKQVKKFKDSYNDLPKNDYIDSFIIADCLRFGRINNEVYVSDYRYKALQNLTRARFYAVQNLTKEKQRFINVLFKKYSTMTQEKVFSNTFSTTAFAVYQEIESAEALANMDLQELTDFIIKKGKNRFPDPDAVAKAIQKAARSSYRLPKTVNDSVNQVLSISITSMRALESQIKEFDKAIEAEMKLLPNVLTSIPGIGPVISAGIIAEIGDINRFPNQAKLGKYAGLAWKQHQSGDFDSEHTRLIQSGNRFLKYYLYEGAFSLVRCDTEYSNFYHSKYKEVNRFQHKRALALTARKFTRLVFRLLKDNRLYRAAE

SEQ ID NO: 42796 - protein, 476 aa, unidentified
MVKKLSNKTEEVIKLLERQKIRDVKDLESYKLSECHPASAGIDLGSKELYLAINPAIGAELDIAIVHRFETFTGALLACRDLLVCCGIKTVAMESTSVYWTTIYFILEEAGIEVCLVNPKKFRMVPGRKTDIADCQWLQTLHLYGLLRGSFHPCQDISMLRSYMRERDSIIKERSTFVQRMQKALVKMNLLLHNVVDDITGKTGMKIITSILAGERDPKLLASFRDPHCKKSEEEIAEALTGYYKEDQLYLLKINYQSFSFFDKQLCDLDQQITKLLKRFPHKKEKKEKRPANGKSKSRGKNDIRTTENLEDVLYRVLGIDLSSLPGIRANAILQIISEVGTDMSKFPDANHFASYLGFVPHNKITGGHVISSKTDRIKSSAAQAFRKLIPSISQTKTALGAFYRRLAPRIGKAQAIIATCRKLAILFYNTLAFGKEYLEQGELKYQQKQEDWERRKLANLAQKYKCTLVAQMVKQ

SEQ ID NO: 42797 - protein, 409 aa, unidentified
MPDSDYDVFVGIDWASATHQVCILDAGGRVRAEVTVAHSGAGLQQLVGEVAAVSQEAGRVAAGIEMPHGAVVDTLIAHGVHVYAVNPKQVDRFRDRHTVAGAKDDRRDAYVLADALRTDRHAYRRVKPEDPRLAEVRELSRMHGELTEEHTRLTNRLREQLQRFFPEPLTLCPGADEPWLWRLLERAPTPAEARRLRRSTLAALLAEHHIRRVTAGALHDALRAVPLPAGPGTVAAARTHIAVLLPRLRLVHEQRAACARQLTRALEELARGEQREHRDVSIIRSVAGVGTLVAATMLAEAWEALAERDYQRLRAHSGVAPVTRQSGQRRRVIMRRSCNPRLRAAVFHWARNSVRVDPRTREHYARLRRTHGHARALRGVADRLLGMLITLLRNSTVYDSARRAAPIAA

SEQ ID NO: 42798 - protein, 418 aa, unidentified
MKSMEITAVGIDVSKSKSTVAIRRPGGVIVARPFDISHSNHDLEKLVSILKTTGGDIRVVMEHTSNYWKPIALTLKEAGFYVSVVNAMLIHDFSDNSIRKLKTDRADSLKIANYALTFWNELPPFNDEDETRLVLREQSRMYERLASTATSLRNGLIALADQTFPSIDQAFGHAIKNADGHEKWVDFFSIYWHRDCVLRLSIEKFTESYRKWCLRRNYKFRTNTAHKLYALAQDAVPTLPKNNGTKALVLQACKSLNAVCEAKQSTQDEMNRLASLLPEYEVVMQMEGTGPITGPALMAEIGDVRRFKNKKALVAFAGIDAPPFQSGNFESKSRHVSKRGSPHLRRAVFLVANIILTLSHKDNSVFCFMDKKRAEGKHYYVYTIAGSAKFLRIYYARVTEYLRTQEIPVAASCLNGNS

SEQ ID NO: 42799 - protein, 323 aa, unidentified
MAKRITICAGIDTGKDKLDVALDGSSEELQIKNTAEGHQELLEWLKHHRVKRVGIEASGGYEQAAVAELRRKRFVVIVFQPIQVRAYATFHLQRAKNDKMDAALIAACTAAVKKIHPAPDPRLQPFAVHLTMIDQIKEDIAKLKNRLESCRNERIQKFWKEQIALLAKHRRAEFKALVAAIRKHRDLAARLDLIYSVGGSGLPTAVAILIRMPEIGQITREQAAALTGLAPYDDDSGKHVGARRIDGGRQRLRQALYTAALPASFRWNPQLMALYSRLIAAGKGHKRALVACARKLIVIINAVVARGTPWVAEPPKTATVPAT

SEQ ID NO: 42800 - protein, 350 aa, unidentified
MNEISIIGLDLAKQVFQVHGADDAGRRLLRKQLKRREVLRFFAGLKPCLVAMEACGSAHFWAREIAKLGHEVRLVPPAYVKPYVKRGKTDRIDAEAICEAASRPAMRFVPAKTIDQQSLAALIRCRDLLIKGRTMLVNALRAHLAEFGFVAAKGIGKLPDLIKIVNEAPAEALPEMARAPLLGFLDAIALINRRLDDIEKRLRAWHKGNAQSKRLETVPGVGLIGATALCALVPDAKLFRNGRHFAAWIGITPRLHGTGGKIRLGRISKAGGGALRRLLVLGATSLLRSLANKTTPLALWVQGLAARRSGRAAAVALANKLARIAWAVMARGEAYRPLFAARLPTPAGRP

SEQ ID NO: 42801 - protein, 430 aa, unidentified
MIAAIIERCAGIDVGKKFVAICIMTGPADGEARSEIRNFGTTVAELKQAREWIVSNGCTHVILESTGSYWKPVFNILEGHVEVTLANPEEVKARKGHKTDNKDAWWLAHLLRHGMVTPSFIPPRPQRELRDLTRRRRKLIQSAAAEKNRVSKVLEDANVKIGSVLSDVFGVSGQLMLEALLEGKADAAEVACFAKRRAKQKLPSIIAALEQHQMTDHHRTMIRLSLDHMRFLEEQLTVIDELIRQKIHEAGYEKQFELLRTLPAVEENAAAILAEMGPDPAPFPSAKHLGSWSGLCPGNNRSAGRSKSSHTTKGNRWLRAALTESAWGVSRMREGHLREKFWRIAARGEPKRSRPIAVVAIAHDLLKLAFFVLQRGTPYEEQRGKPMSDQQQQRLIRHHLRRLGKLGIRLRPSPPPSPSKCRRKATSPNH

SEQ ID NO: 42802 - protein, 477 aa, unidentified
MDDRRLVGIDLGITSAHTVRVLSGEGATVCRRKAAPTLHGLAEVERAALAGAAPATRLEVVIEPTGPAWLPIAVFFCSRGHTVYRVSSAKAHDLRRFLHRHAKSNGIDADTLARLPLVDPAGLHPLELPDAERAALDRRVRACDRLTQQAATHKRRIKDLVRQLLPCSPLVGELGMADLAVLERYADPHALLAAGRARLARVIVKASGGHLGAARAEQWLQAANAALDLYGDHPAVAFKDLAAEVATEVRLLRVTQAELAAHATQREACYHWVDPLALARSLPGLAEIGGPALTATMGKASRFPAASKFRAFTGLAPRASETGQTDRKPQPISKAGNRLLRTTLVRAADTARRQDPQLARIYWTQMVQRGKDHLGALCVVAAHLAERAWAVMDRGMPYVICDTDGTPVTPAQAKAIIDEHWTVPEEVRRRRRSKKGKAPQQVLTGHGMSAQGTTRRPSPASSLGRRAPRVKPAQART

SEQ ID NO: 42803 - protein, 352 aa, unidentified
MIPSQITATPKLFIGMDVHKKSWTVHIKTDLFDYKTIGMPPSPESLVGYVQTHLPGHEVTCCYEAGCCGYWIARNLEQHGWDVKVVNPADVPRTSKQNWQKTDKIDCRQLSKHLQAGNVKAIHIPGEEQEQLRSLFRRRVHLVRQLRTIKNHIKSQLLYYGVTIPDQYDNANWSGEMKRWIKSITWKFSTCLTVTNSRLKQLDFLWSEMLQVSNELRSYCRKHFRKDYYLYKSVPGIGGITAAAIISELGDLRRFSTLDELASIVGLVPRLYESSDKSQCLGLTKRSNRQLRSLLVESSWIAVGKDMALQQYYRKHAHKEPNKAIIKVAHKLLSRIRAVIITGIPYQYALVK

SEQ ID NO: 42804 - protein, 315 aa, unidentified
MDIMRNCIGIDVAKQNFDLHSLKTGQERRMDNSTDGIRQCVALCNKIRPELIATEATGGYELTLAAALQAEGFAVAVVNPRRIRDFARAAGQIAKTDKLDARIIAQFAATMEPMPTERINENTQKLKALVARRSQLVGLHTAESNRREHADGKEIRRSIAAVLKVIEAQLKTIDRQIKEHIENTPQLRQRSEILDSVPGIGPTTAHMLVTELPELGRLNRRQIAALIGVAPMARDSGTFRGKRMTGGGRKKIRSRLFMPTLVAVRHNPILRAYYNKLLSRGKCKMVALVAVMRKLICILNTMVKNNQEWNPNLIV

SEQ ID NO: 42805 - protein, 355 aa, unidentified
MDSKKYIGMDAHKESISIAVMNGAGKIVMECVIETKASMILQFFDGLRGDLQVTFEEGTSAAWLYDLLKPHVTKLVVCDPRKNASMREGNQNDKIDARRLAELLRLNHLNPVYHGEHGLRSLKELVRSYLTITKDLGRVMSRVKAIYRSWAIPCTGKQVYAPRHRAEWLGKIGEPGVRRRAEFYYQQLDALRTVRQEVRRELLAEGKKHKAWKRLCQIPSIGPIRSAVLLGILQTPHRFRTKRQLWTYSGFGIETQSSADHRSVDGQLQRVKKQSSIRGLNRNCNHDLKNLFKGAAIVASSKPGPFQEFYTALLTKGIRPEMARLTLARKIATIVLIVWKRGACFDAQHLKPQTA

SEQ ID NO: 42806 - protein, 416 aa, unidentified
MKKGQNTRGYQRYMALDIHREYVLVGAQNEEQEWVLTPRRVNLEKFPEWAKKNIRAGDIVVLETTTNVWTIYDIVAPLASRVLVANAAEVGEIANARVKTDKEDIKRLLKLLIGGIVPEVWVPPMHVRELRAFVSYRGRLVTTSTMIRNRLQSLLHKHNLMLSETGLQDQAWWAAQKNISPLEQLQIRQELALLQEVEKLKAAVDEELQRQSTSSTWGKPALQIMQLPGVGFIVAMTVLSAIGDISRFETAKQLVGYAGLGAGVHDSGKTHKEKKITKKGRRELRWAMVEAAWRAVRMSPFWKAEYEKHLHRMRKPNQAIVVIARKLLVAIWHVLSKEETDIHASEEELAYKMLLLSWSLSEEVRMGLTYKQFAKYALMKLGVETDITRFVRRNVPRRLAPTEEVLTRMAQLGIVQ

SEQ ID NO: 42807 - protein, 407 aa, unidentified
MTDAPNRYIGLDIHKEYFVAVGVNDKLETVFGPQRGSNYQLDDWISRYLTPEDAVVLEMSTNTYQFYDALLPHVHSVMAVHSPNVAMVTNVRVKTDKKAALALAQLHATGLLTGVWIPPCPIRDLRSLVARRDKMVRLSTMAKNRLHSMLHRHHLIAPEKPFEPEQRTWWENLSLCANEQLLVSCDLEMLDFAQKQAAQIEGCLKQASAEDVRIPLLIQLPGIAMLTAITILAAIGDITRFPSAKKLVGYAGLGTRVHNSGLTCSSGRITKAGRKDLRYAMVNAANHAVEHHVHWKKELARLAPHLGRSKAIVAIARKLLVAVWHVLSKQAADRFADPRDVASSFIRYAYRIGVKNLPNQQPATVFTRDQLDRLDIGKELKEIPWGSKRFKLPPSKLLLEKSERRPK

SEQ ID NO: 42808 - protein, 458 aa, unidentified
MYRELQPLREALSQGLKASLFPAAAGVDPNKLLETYLDRLTMYIGVDVADQSFTALALDAGQGILGSLEGCANDPDGFQPFVTWARALRDQHRLRIIAIAGETTGIYYWALWDFLGEQPDVARVLYNPRTTEHMGEVLSKKVRNELVDALLLAEQLRLGSTPEVLLQEDADLLTARYYSRAARDLAQQINRKKNQLRALLRAYCPPLSQVFPRTKLHHAAVYALLQEHLFPDEFVQAGAEAVATTLLTHCDTAFGLTEAQQLVETCRQAVIRPIGRDAIRHLVHALTQDITTFQQRKAFYLKTGYALIEDRQQTELLRTVKGAGVSNALALVSEIGDVQRFPSGEHLASFLGLTTSKHISGATLFQAKRITKQGSPNGRYAAVNVAQHLSHRVPRYHAMYQRIKGRKPPRKGHFIALVAIARDFVSNVLYDMWRSQRPFFLEVGDYRDYRRKKQRTDD

SEQ ID NO: 42809 - protein, 418 aa, unidentified
MNEDGNTRGSRRYIALDIHKKYCVIGGVDREGRVVLHAVRVEHADLEGWLKKNLRSTDHVVFESTTNAWHVYDLLEPLVERVVVANPAKVKQIATARVKTDVRDTFILARLLAANLVPDVWVPPVHVRELRQLLSQRRQLVETHTQIVNRMHSVAHRHHLQHERGKRFNEKNTVWQKDKRLSKIEQFQLELEMENRECIEKQISRIGKEVAKMSHQQPWAESMTYIMQLPGFGVITGMTVLAAIGEVQRFGTPQHLASYSGLTGGLDQSGTKLVQKGITKEGRKELRWAMVEVAQRAVKSDPLWKHRFQEMQKRMHRNQAIVAVARHLLELVWYVLTRRQPYRHFSQERIAYKYLTWAWQMDEAARDGLTRQQFTRYYLMRLGIGQDLTRIALDPKHPRKIATEAERLALRPELKHIE

SEQ ID NO: 42810 - protein, 294 aa, unidentified
MSTSGRAAYVGIDVSKATLDVAILPTGEHFVVGNDEAGIDELLGKLAEVSDALVVLEASGGFERPVAAALAASGVALFVVNPRQARDFAKATGRLAKTDRLDAFVLARFAQAIRPAPRAIPDAEAREFQEILARRRQIIRMMTAEKNRLGATSSKAVRGRIEAHIRWLEKELSRTDGDLDETIANSPTFKENEALLRSVPGVGPVLCRTLLAELPELGSLSPRELSALVGVAPLNRDSGTLRGRRTVWGGRARVREALYMGALIASRFNPAIKEFYERLLATGKPPRRWLWWRA

SEQ ID NO: 42811 - protein, 394 aa, unidentified
MIYAGVDIAKTDHVIGAVDERGAEACRPMPFKNTEAGLERAVAWLEGLAESPSDVVVGMEATGHYWMACYSFLVARGYSVAVINPMQVKAVRRLKGLDKVKNDRVDAGLIAEALRIGQYDETRLATDEVASLRSLSRYLQSLRGMIAELKTQCICLMDAHFPEYAGMFSDMFGAGSRAVLSKSPLPFELARRRADSLARDIAEASRRPGRSAGLAAEVKAAAKSSIGVRLGQEAASFQIKSLVRQIEFADSECAKVEARVRELLDEVEPLVLTIPGVSYVTGAQIVSEIGDVSRFRNAPALVSYAGLNSSVSQSGQFDSGGGPITKHGSPYLRRALWLAANRARQYDPGLRAFYDKKRAEGKPHRVAVTAVARKLCHIVFAVMRDQAPYDPERE

SEQ ID NO: 42812 - protein, 370 aa, unidentified
MDENIKFFVGLDVHKDTIAVAVAEAGREPARLVGSIAHDVVKLRKLLTRYGEPARVLVVYEAGPTGYGLQRELARRGYQSQVIAPSLIPKRAGDRIKTDGRDGVRLAELSRAGELRAVWIPDPADEAIRDLARAREDVVNARTQARQQLKGFLLRHDVRYTGKTSWSKTYYRWLGTLNFGLSGAQTAFTEYWQAVTAADERVARLTGALANSIEGWRFEAVVNALQALRGIDVISAIGLVAEVGDIRRFAHPRQLMAYLGLVPSEHSSGERVARGSITKTGNTHARRLLVEAAWNYRFQPRIGRRAQQRAEDLPQAIRDVAWKGQLRLSGRFARLRARGVQINKVCVAVARELAGFVWAIASAQAKLTPQ

SEQ ID NO: 42813 - protein, 376 aa, unidentified
MENGSRLEGSETIYVGMDAHKATIAVALARPGQERPRFWGTIPNTPEAVRKLVGKLGEPGQLQCAYEAGPTGYGLQRQLTTLGAACIVAAPSLILRKQGDRVKTDRRDAEHLAEQLRNHTLTAVYIPDDAQEALRDLTRAREDAQQEVVRSRNRLGKFLLRLGVAPAEGVRPQTQAYTNWLRHLSLPQPLQQTVLDEYRATVEEAQSRVKRLEQALADAPLEGALGAQLGAVQAFRGVARVTGTALVAELGDLRRFATPQQLMAYAGLVPSEHSSGPRTVRGHITKTGNRHVRYSVVEAVWHYRHTPRVGDALKRRQAGQSATVIAIAWKAQQRLYRRYHRLVRRGKTAQQAITAVAREFLGFVWAAAQEVTPVRG

SEQ ID NO: 42814 - protein, 373 aa, unidentified
MSSVINLREIVDVVIGVDTHVGSHAAAAVDTRTGGVLAQISVTADADGYEELVAFADRVGEEHAALRAWAVEGTSSHGRGLAVHLQGCEELVVELDRPQRATRRGGVKSDPADAIRAAREAISRTRYGTPRGSGPDPLTAQTRQGLATLLAIRRSAVQAAGDARRQLFSAVLTAPEPVRARLRGLKAEKLIATAAALRPGARWAQVDIETSVTVAALRTWARRIQHLTAEAAGHERQILALVRGWRPDLLTELGVGPITAATILCAWSHPGRIHSEAAFAKLAGASPIEATSGQIHTRHRLNRYGDRRLNCALHTIVITRQRHHQPTRDYTARRTTEGKNPREIRRCLKRYIARDIYRLLENPQHPQPTVDRT

SEQ ID NO: 42815 - protein, 458 aa, unidentified
MRRRGRPKRKRVRMQVVNPNAAGIDIGSEVHYVAVPPDRDPEPVRSFKCFTADLKALADWLDECGIETVAMESTSVYWIPLYQILEAHGFEVVLVNARHVKNVPGRKTDVLDCQWLQQLHTYGLLRGSFRPEDQICVLRSYIRQRDNLIKSAGAHIQRMQKALEQMNIQLHKTITDITGVTGVRIIEAILDGQRDPIKLAQLKHRNTRSSHETIAKSLEGDWREEHLFSLRQEFELYGIFRDKIIECDRKIEACLRSFENKVDPDQKPLPKFKHGKNKAQGNQPTLDLRNPLYRMIGVDLVAIDGFDVLTVQTIVSEVGLDMTPWPTEKHFCSWLGLCPNNKVTGGRIKDSRSKKVVNRASCAFRMAAQAAGKSHSALGGYYRRIKIRLGPAKANTATAHKLARIFYCILKYGIDYVDPGLHYYEQKYRQRVLNNLKKRARLLGYELIQNPEIRPAVS

SEQ ID NO: 42816 - protein, 344 aa, unidentified
MNSTTIAVDVAKSVFEVAVSEYPGQVRERHRLSRGRFSRFLAEHPPATVVMEACGSAHHWAREAQSRGHRVILVPPHAARPYVLRNKTDRTDAKGLLEAFRNDALRPVPVKSETQQALAALHRLRSTWVATRTARLNTVRGILREFGVVIPTGAHHVVPHVRALLEDADAGVPGLLRVPLSEAIREIGELEERILAIERQLARTAEPALLIGRLRTIPGIGILTATALVAAVGDVQRFPSGRHFASYLGLTPREHSTGQRRRLGAISKQGDTYLRMLFIHGARSVLHHAKSKTAPATDRLRTWALQVERLRGHNKAAVALANKLARIAWAVWRSGNDFTAAAAV

SEQ ID NO: 42817 - protein, 337 aa, unidentified
MEVYAGLDLHSTNTYVAMIDGENKVLYKQRHRNEVPAILSALDPFKKDIQGVVVESTYNWYWLVDGLMDAGYRVHLANVSAIKQYEGLKQVDDKRSSLWLANLLRLNILPTGYIYPKEERPTRDLLRKRLQFVRQRTSQVLSVKNILARNLGIRMKTYDIKKLKVSEVKALFPDKEMQVAVTSSVGLIQHFQEEIDRIEVIITKKFKIRKEFARLLTVPGIGQILGLTIMLEVGHIDRFPTVGDYSSYCRCIRSIRTSNGKVTGYGNSRNGNKYLSWAYIEAAHFARRYHETIRSFYERKMARTNRIVAIKAVSHKLARASYYVMRDGVEYHQTHFT

SEQ ID NO: 42818 - protein, 367 aa, unidentified
MRQQSIPTQLGRLFVGMDVHKDNHAAVAVNCFGAPLLRQELNNEIKDFQSLIARIQAVAGEHRLNPVFGLEDTSGSGEFLARYLFNQGYEVKTINPVLVKRERDYETHPEKSDLADALGVAKVLIQRIDSIPDYSITETTEISRDIRALTKDRETVVLEQTRLKNQLHALLHHSYGSLYKSLFRDVFAKKALSFWQSFPNAQILKSSRKRNIVKPDRVTKCAFDELPQTSETQANQIGRKTKRLLAIREELSEIEKELNGLLKQTGQHLDTLPGCGPILSAIVLAEVKDISRFKKPAELAKYAGCAPRKLESGQRKRHIKTRSGNRRLNKALYQIALTQISNQGISKAKAYFQKKAEEGKSKKHACG

SEQ ID NO: 42819 - protein, 452 aa, unidentified
MAKKGKRRCDTLPVLHPDAAGIDVGASELYVAVSADRDPQPVRSFPTFTRDLHALADWLVHCGIHSVAMESTSVYWIPVYQILEARGLEVYLVNAQHVKNVPARKTDVSDCQWLQYLHSVGLLRASFRPPGFICAIRSLWRHRGSLIQMASEHVLHMQKALDQMNLQIHRVLNDITGVSGLRILDAILAGERNPLTLARLCHGGVKSSEDVIAKSLEGDYRPEHLFALRQSLAAFRYYQQLVLEADREIQLQLAELKTAATAQPTTPAQTKVYPHYARHYEPRTFALRGELYRVFGVDLTNVPGISALTAQTILCEIGTDISRFRNASAFASWLGLCPEKKISGGKVLFTKSRRVRSRVATALRMCAQSLHHAKDYLGEFFRRITRKLGRPQAITATAHKLARIIFHLLTTKEAYNESVFHKTEEETIRRAQYRLRRQAAQLGFQVIPAENR

SEQ ID NO: 42820 - protein, 412 aa, unidentified
MYFIGIDISKFKHDCAIIDEAGDTVTASWSFANNCEGFSLLKQLLDALDGQKKIGFESTGHYGHNLKLFLETNNFSFMEFNPLLVSKFVRSKSLRNTKTDSLDAVSIAQYLMTVEYKPYPPSFYHMDQLKSLTRFRDSLVRQHSRQLVELTNILDKVFPEFKPFFDGRFSATALYILTHYQSPEKIANMNAKSYEALRKKSRGKFSMVKFAQLKTLAKNTVGRSDAFLLKQMEITIDIENQLDAKIDEIESQILECIRALNPPILTIPGIGELTAAIILSEYGNINKFENPAQLLSFAGLEPGYYQSGLAEHQGHMVKHGSSHLRYALMNACLPLITYEPVFAEYYAKKRAEGKPHRVALTRHLHPANEEHFLRSHLDPVTTAISFFSTRKRAYLRAPIFPQNIFLLLGLDF

SEQ ID NO: 42821 - protein, 355 aa, unidentified
MDSVKYIGMDVHKESISIAVRNGAGKIVMECVIETKASMILQFIDGLRGDLQVTFEEGTWAAWLYDLLKPHVTKLVVCDPRKNASMREGNQSDKIDARRLAELLRLNHLNPVYHGEHGLRSLKELVRSYLTLTKDLGRVMSRVKAIYRSWGIACTGKQVYAPRHRIEWLGKISEAGVRRRAEFYYQQLDALRTVRQQVRRDLLAEGKKHKAWKLLCQIPSIGPIRAAVLLGILQTPHRFRTKRQLWTYSGLGIETQSSADHRRVDGQLQRVKKPSSIRGLNRNCNHDLKNLFKGAAIVAASKPGPFQEFYTALLTKGIRPEMARLTLARKIATIVLIVWKRGVNFDAQHLKPQTA

SEQ ID NO: 42822 - protein, 358 aa, unidentified
MNKIKNNRLDFTGQPIYVGLDVHKKSWSVSIHSKQCEHKTFTQSPEVEKLVYYLQRNFPGALYHSVYEAGFSGFWIHDQLREKGIDCIVVNPADVPTKNKERAKKRDPVDCRKLARSLRSGELEGIYVPCRLKLEDRSLIRTRLGMVRKQTRCKNQIKGMLLFYGIHLPEELINSHWSRRFIRWLERIRMEKASGNIALNAHLEELNHLRKIIAALNRAILALARTEEYRVPVKLLKTVPGISTLTAMTLLTELYEIGRFPSLDELSSYTGLIPDTHGSGEKEYTGGITERRHRQLRCVLVEASWVAVRKDPALMMAFLQYCKRMRKTRAIVKIARKLLNRIRYVLKNQMPYVPAVVQ

SEQ ID NO: 42823 - protein, 408 aa, unidentified
MEVLYERCAGLDVHKDSVVACVRIAQQRDATREVRSFETTTSGLLELSDWLQQHDCTHVALEATGVYWKPVWHILEGNFELLLANAAHIRNVPGRKTDVNDATWIADLLAHGLIRASFVPPAGIQEIRDLTRTRKQLVREVAQHTLRIQKTLEDANIKLTGTISNVLGLSGRAILDALVAGETDPQRLAALVHPGIRAPQAKLVEALRGRVTAHHRFLLRLHLGQVDALRAAIAELDAQLGKALGEASRLAKLLTTMPGVGDIVAQVIVGEIGTDMTRFPSAAHLVSWAGLCPRSDESAGKRRSTRIRHGAPWLKTALVQAAWAAARKRESYYRAQFLRLKGRRGPKKAIIAVAASMLTAAYHMLRDGTEHEDLGADHFDRRDRTHAAKRLTRRLEQLGFSVELRPAA

SEQ ID NO: 42824 - protein, 370 aa, unidentified
MGAALQADGEYEVRLGGLKHQMEKRSMDHFAGLDVSVKEISVCIVDETGRIVREVKVASEPEALLAVLKNPSYHFKRIGLEAGPLSQWLYSALAEAGLPMICVETRHMQAVLKAQINKTDRNDARGIAQMMRVGLYRPVHVKTLRSQKLRMLLTHRKLLLSKAIDIENDLRGTLRNFGLKVGMVGTVKFEARIKELVENLPDLAVLVEPLLVVRRVLREQIEILHRRLLTIVRDDEVCRRLMTVPGVGAVVALTYRATVDVPARFRKSKSVGAVFGLTCSKYQSGEIDRSGRISRCGDEMMRVMLYEAAQVMLTRTNKWSWLNAWAMKIARHRGMKKAIVALARRLAVIMHRIWVDGTEFRWTREQAVAA

SEQ ID NO: 42825 - protein, 391 aa, unidentified
MTYFIGIDIAKYKHDCFIMDQDGTVIRDSFSFSNDKTGFALLLSVLDSLDPSHEKRIGFESTGHYGLNLMCFLENHDLSFMEINPILIKRFSSATTLRRTKTDKADAALITSYLTTVEYITYPTQSYHIHSLKSLTRSRDTLVRQRSQQLVMITNVMDKIFPEFKPFFNKSLKSSTAMYILRNYTVPSKIASMNSESYRKMSSKLRKTISYARFSKLRELAKNTVGQEDECLTFELHTYLELYQSLDSKIKEVEAYIEAEFKKVQSHIQTIKGIGWISAASIYSEYGGVENFQTPNQMLAYAGLDPSRNESGEHAYKGHMVKHGSSHLRYVLLNCAEMVIIHDPIFYEYYRKKREEGKHHRVALTHVARKLIRIIFFLEKNDTDYDTKKMR

SEQ ID NO: 42826 - protein, 380 aa, unidentified
MYTTATHTSEYSPPAQILYLAFELSNSSWKLFFSTGLAQPPRQRSVAAANLPALLQEISLARKRFGLPNDAPVLSCYEAGRDAFWLHRFLAQHGVHNLVVDSSSIQVPRRARRTKTDRLDGFKLLSMLIRHASGDKEVWHVVHVPTPEQEDDRQLHRELETLKQERTRHICRIKAFLASCGLRIKLSSSFLQQLTLLRLWDGSPVPPALQARLRREWSRLQVVEDQIHQLEAQRAHLLRTSSSPSVQKARQLMRLKGIGEYSAWLYTMEFFAWRKFRNPKELGALAGLTPTPSQSGESSRELGLNKAGNRHIRAMAIEIAWNWLRFQPRSQLSCWYRNRFASSSSRVRRIGIVALARKVLIALWRYLELGLVPEGASLKA

SEQ ID NO: 42827 - protein, 319 aa, unidentified
MQSKLTIGMDIGKAQVVVACHESAFAVLKMANAVPVLRRWLATLPAGSRLGLEATGGYHEPVAELAHSLGFTVYILNPKDVHHYARALGARGKTDWLDAQVIAAYVAEHNARLHAFVPLSADEKLLRELARRRATLVNAKSMLQQSLRVLPGFEREGRELLRAMGSFADRLERKLAEIAARSSERAALVKRLQTIDGVGTLTSIRCATLFTRVPLHRSDAAVAFFGLDPRPHDSGQHRGRRRLSKRGPSEDRRLLYNAAMSAIRTPTWRPLYQHLRNRGLASTEAIIIIARRMVRIAFAMYQNHSDFNPRLVPRPSCPT

SEQ ID NO: 42828 - protein, 455 aa, unidentified
MAKQKRQTKMKVQVNALEQIKPHAAGVDVCAEEVYVAVPPDRDTQSVRSFPTFTADLRRLAEWLKACQIETVAMEATGVYWIPLYEILEEKGFEVCLVNARHLKNVSGRKTDVLDCQWIQQLHTYGLLNPSFRPPEQIVAIRSLVRHREMLVQYRSAHIQHMQKALTLMNVRLTNVLSDITGVTGLKIIRAILAGERNPKVLASFREPGCKKSEAEIAKSLEGHYKREHLFALKQALELYDFYDRQLQACDAELEAMYQEFDPPEYPGTPPPAPRTQKRRKNQAHFDLAPALYRLTGVDLTQIDGVDELTVQKVLSEIGTDMSQWPTVKHFTSWLRLCPNNKITGGKIIQTGVQPTKNRASAALRVAAASLKTSDSALGAYFRRMRARLGTPAAITATAHKLARIIYFMLKERRPYHDFGADYYDQQYRARVLRNLNRRAAKLGFRLQPKFQEVS

SEQ ID NO: 42829 - protein, 355 aa, unidentified
MSKTNPVKIIIGVDTHKDIHVAVAINGIGAHLGTLTIPVSPKGYQNLETWARAFGSIHAFGIEGTGSYGAGLARFLQAKGHTVVEVNRPNRQLRHQNGKSDPLDAESAARAVLGGQANARPKSADSSVEMIRHLKVARDTAVKSRTQAMVTLKTIIINAPAALRQALDRIIGKMALIRHLAARPGPILSVTASAKGALRAIARRWLTLDAEIRAHDADLEALTASCVPAMLEAHGISTGTAAEMLILVGDNPERIRSEDAFAKLCGVCPVPASSGKTNRHRLNRGGNRQANAALYRVVIVRMRNHQPTLDYVKKRKADGKGKMEIIRCLKRFVAREIFGYLCGAQRSVPSISKAT

SEQ ID NO: 42830 - protein, 373 aa, unidentified
MKRLAATNVVAQGPHKQTNAVKSRKWRPAVEHIGMDVHQRESQLCIVTEQGEVLEQRIRTERGRLAEVLGGRARAKILLEASTESEWVARCLEQMGHEVVVADPNFAPMYGGRNRRVKTDKRDARALADACMTGTYRKAHRTTESRRQLKAQLAVRDELVRERARHIVLIGALVRQQGLRVTTGSAETFLARLTKVDLSEEVRNVVAPLMAVMRTLNEQIQVADAKLERLASDDEQVASLCTMPSVGPVTAVAFLANVDDAKRFAGAHQLEAYLGLVPSEMSSGEKQRGGRITKVGSPRMRALLVQVALSTMRLRKATTAGLWEWASRIVVRRGRKVAAVALARKAAGILYAMMRDGSHFKPRVSREAMTNAA

SEQ ID NO: 42831 - protein, 362 aa, unidentified
MFRPHTLYIRIRIVRKVHEPVFAMRDQDVSDVIKTKNRTAMQYIGIDVSKATFVVAYSSDKGGEIRTFNNTTAGIKQFIGTLPKDGSIHCVMEATGNYSALLLYMLNVAGITVSMENPLKVKNFARAMLSTVKTDKIDARLIALYGEKMNPQPFKIQGEAILRLRQKRTVIRQLTKQITAMSNLRGSLACLPVPDKGATHTVDETIEFLEKRRDRLQSELTDLVEVEFSRQLALLTTIKGIGITLATALIITTGGFTYFQNAKQVSRYLGICPTYEQSGTSVNIRGHINRNGDAYTRGLLYIAAWPASRFNAQCKETYTRLRQNGKPGKLAMIAVANKLVRQAFAVVAHDKEYIDGFVSNRP

SEQ ID NO: 42832 - protein, 417 aa, unidentified
MTTDDYVAYIGIDWADRKHDIALYDCASGTWQESVIQTRPQDILDWVNQLRLRYGQGKIAVALEQKRGPLLYALCQYDNLVLFPINPRTVANYRKAFQPSRAKSDPVDARILVELMQKHPEKLERWVTGCPQIRALRQWVESRRMLVQEKVRLTNRITASLKSYFPQVLDWFEDKDTRLFCDFLQQFPDVKSAQAATSQQLTLFFRSHTVVRRTAITRRIQQIQDAGPPLTPDEAIVVPAQALTLALVALLKVIIQQLTRFNDTIAHLFEALPDAPLFAELPGAGPHLAPRLLVAFGEDRSRFTSAQAFMSYVGIAPVKEESGKKRWVHWRWSCPIFLRQTFVEWVNQARRFSAWSQAFYEQQKQAGKSHQKAIRSLAYKWGRILWRCWQDNTPYDEEKYVAALRQKQSPLVKRLAI

SEQ ID NO: 42833 - protein, 400 aa, unidentified
MNSNRTVAGLDVHKDSIYLCIMGFDENIILQKTYGVLTPELRQMREDMLFYGVKECAMESTAVYWIPVWNKLYDSMEIKLVNPYFIKQLPGRKSDIKDAQWIAECVLKKLIRGSFVPEPVVQDMRKLNRRIMDLNEDMTYNCNKLDAALQRCGFRLSNYVSSTKSKSYQSVLKSIIEGRSNPDELVRLIHGRTINKQGYLSIKASVTASFSKTDLSIFKQLKETIDLIECQIEECQKELTELCKEHFPKQYERIQTIPGVKERAATAIIAEIGGDMKMFATAVCLVGWCGLKPRNDVSNGRFKSRKVTHGNRYLRQILIEIAWAASRTRNCFFSNFSYVQTTVKKKGKMKIQVAIVRKILVAIWHMLNKEEDFIDIYIKRLDILKKAEEQVRQFDSCMAN

SEQ ID NO: 42834 - protein, 382 aa, unidentified
MKTVIHIGLDVDDNAFHGYAISDSNIKEGFAFKSRPTMGDLLKKLIAISKEPGVFHVCYEAGYLGFTLARALRDKGYKCDVIAPHMIPRQGNRSIKTDRIDSKNLSLMLSKGLLTACDIPDVDTESVRALMRSRAFMSRRIRTLKNHTVSLCRKSGFHFKQETSSKAYWTVRHRAWLSSLINHEGVNAMLAFNLKQLLTEINNEETRVAEYDDQIAKLAHSDTYREPVEALSCFRGVSTIAAMAIAAETGDINRFAHPTQLMSYAGLGVREYSSGGKEVKFGITKTGNAFLRQIVVESSQKIYRSATLSDEVRRRQDKTRSEYGEIVNKGMKRMNKKGMHLLLRGKHTNLVKVACAREMLGFLWEAMKKAKAHTELQSLVLA

SEQ ID NO: 42835 - protein, 351 aa, unidentified
MLIIGCDYHPSVQQIAFVDSETGETGERRLLHKDGEAERFYRDLELRGVSVRVGIEATGHARWFERLLAELGFELWIGNPSEIKAARVRKQKNDRLDAELLLKLLVEDRFPRIWVPSPENRDLRQLLWHRHRLVQIRTRVLNQLQAVAMNEGVRRKKALWSKSGRAQLESFVLLPWASRRRQDLLDVLDRLNPTIDELSTAVEQEAKKRPEVLRLMTHPGVGPLTALAFVLIIGSTKRFACGKQIGSYLGLIPCEDSSANRQRLGHISKQGNTLLRFLLVEAAQAAVRCDEEWRRKYLHLAMRRGPRIAKVAMARKLAVSLFWMWRKEWNYEQVAKFGSHAGESEHLHGMQ

SEQ ID NO: 42836 - protein, 341 aa, unidentified
MSKLTTIGLDLAKNVFHVVGCDARGQRVLRKRLRRAQVLGYFSQLPPCRVGMEACAGAHYWGREIEALGHEVRLIPAQHVKPLVQGNKNDYNDALAIAEALGRPGLRFVGLKSAAQQDIQALHRLRSRCVGERTALCNQLRGLLAEYGIVLPRGVASLRRRVPELLEDAGNGLSELLRRLLAERYRQLRELEAHLAAYTRELARHSAASEACQRLQGIPGYGPVLASAFHATVGDGAAYRRGRDVAAAVGLVPRQHSSGGRDRLLGISKRGDRYLRSLLVHGARAVVSRAAGKTDPLSLWINRLRERRGFNRTVVALANKLARIGWAVLAHNTTYQAQRAA

SEQ ID NO: 42837 - protein, 347 aa, unidentified
MEVTTVGIDLAKNVFRLHGCDARGRAVLRKQLGRRQLLAFVARLPRCVVAMEACASAHYWAREIEKLGHRVRLINPRFVRPYVKANKNDASDAEAICEAAGRPTMRFVAVKTAAQQDVQAVHRVRQQLVKNHTALMNQVRALLAEQGIVIPQGSAHVHRSLPRILADDDNRLSGMMRELLNEIGERLRYIEERLRQYELRIRRLFREDERCRRLAEVEGVGPVTATALVAAVGNAAEFKSGRELAAYLGLVPRHRASGGRTTMLGISKRGDRYLRMLLVHGARAALRVNQRQHTTRSAWIERLKSRRGSNIAAVALAHKNARVLWALLRTGECYRPTPFPARVPHVG

SEQ ID NO: 42838 - protein, 454 aa, unidentified
MANSTGLTRGDRRRNQEIAALREVVGRDRAVLAVDLGEDKQVATLMDHDNVVLARKVVLVKAHNLGSLLVWAGQHAAKHGFLGVTVACEPTGHRWKALMGLADGAGMGFVCVQSLAVHRAREGDDYTRDKTDHRDAVLIGKLVTRLDCYLPERADTQWARLRHLGARRGRLVSEATACGQQVADLLSCAWPAALECAAKPLESTTWLACLGVITDRCNGNPAKIRKMGRDKFVATVRGELPRWEAKKVSHRVLGRVWDALNDSRGVPAQRRGALERVHLVMADWRSARARLRDVEGRMLEVLDQLGLRELVCSIVGLSGVGAAVILAETGDLARFASARSVVKHAGLNPTENTSATMRGQTRVSHRGRPQLRAAAWRAVWGALPHNPVLGAKFVHLTKRETDRLAAGQARAACAAALLRWLYAVVTKRQPWDQRVASGMVPAARSAGVGLPAAA

SEQ ID NO: 42839 - protein, 425 aa, unidentified
MRKIGLDVHRDFCEVAIAEGGRVRLAGRVATDPAALTLFAESLVASDEVVLEATANAVAIARLIEPHVGRVVLANPKAVKAATGLRAKTDKIDARTLAQLLAGGFLARVWTPNEPTVVRRRLVARRAQLVRHRVREKNQVHAILQRNLVPRPPMTDLFGVKGRRWLAEQLECLPEAERTMASACLRQIDFLGREIDLVDRDIARQALDSPEIRRLMTLPGVSAVTATALMAAVGDISRFPTPRELVGYLGLDPRVRQSGTEPARHGRISKQGPGNSRGLLVEAAWHAARTTGPLRAFHQRIAARRGANVATVAVARKLALIAWHMLSRDEDYAFARPSLVREKLRRLELMLGASRQQGKKLTGAGRSFATVEGRRLEKELATQQEAAYLRLVSDWKANRPKAGAGATPRRASQKPSKGKAARQTH

SEQ ID NO: 42840 - protein, 343 aa, unidentified
MEITTIGLDLAKHWFQVHGVDANGRVVVRRRLWRSGVIAYFRSLEPCLVGMEACATAHYWARELIALGHRVKLMPPAYVKAYVKRNKNDAADAEAICEAVARPSMRFVPVKDAEQQSVLMLHRARSLLVRQRTMLVNALRAHMAEFGIIAPQGLRHVEILTKTIAHQQERLPELARAILQMIVGQLNGTMVRIREIEGQLARWHRESPVSRLLATVPGVGIMGASAIAATVADPTLFRSGREFAAWLGMTPRQNSSGGKERLGRTSKRGDKYIRSLLTAGAVAVLRHARNRPTRDGEWVRALLARKPTKLAAVALANKTARIVWAVMMRGEGYQPKEVFGRSA

SEQ ID NO: 42841 - protein, 464 aa, unidentified
MVVLNIGVDLGVTAKHHAEVINSEGIKVCSSVIFPGTKEGFDMVSQHVLAHVNKEVKLRFICEPTSMSWFPLAVYAKRNGHEMMRVKAQKSHDLRKYYSRHSKSDKLDAKALAMMPIVDRESIEEVFLPDKITNALDRRCRQREKISKEIASIKTRIKSLYHWVMPGLTDCFEDPYGERAKAFYKKYTNPFNVKQLGVSRLRRVMEKTGRQQSSGGLAERVHEAAIRGCELYEHSDEYIDLDELQKEVECELRLLESHEKVQKKVDEAINRLYEGAHPTKDIETIPGIGETLGPVFVGIIANSDRFSSQSKARSYSGMIPKQKDSGESSKKGLKITKDGPSRYRRALYLASDTGRQWDPQLAKVYYDQMVYKGNCHTQAVCAVSTHLVGRIIRVLKDKRPYELRDLEGKPIRKKEAKILIKRELTVPEDVRKRTRSRRNMKGYQRNQIRGIAQKQSSRFSPYPS

SEQ ID NO: 42842 - protein, 422 aa, unidentified
MRKKTDYLYIGMDVHKETHTAVLMTYMEERIEEIEIQNNLKGFQRLTAYVEKCQKKLLNEKLTPLYGLEDVTHFGRNLSIYLLEKEHIVKEVNSALSYMERMSYPTMKKNDMWDAQCVCAVLMRRYEILPDADPKDYYWTMKQLVHRRNALVKTKSALLQQFHDQIQYDYPSYKKFFTDMECKTSMAFFEQYPSPRTLESTTVEELAEFLRIPSHNACSTKRAEKILDLVEADAVKERNYQSGRDFIVQSMMRNIRYILEELERIDKQQKKLLKEVDYQLETLPGVNTVTACALVGQIGDISRFKSADRLANYAGVAPICFSSAGKGKNVQNKNQGNRELYSVLYLLAMQQVHLNTKGQARNPLLRAYFESKVSEGKTKIQALLCIMRRLVNIIYSMMKNKTAYRMPEIIISSTEEKEQVIS

SEQ ID NO: 42843 - protein, 343 aa, unidentified
MTKLNVIGVDLAKNVIQVSVLSPSNQELRNSALTRRKFSEFLGRQRPSLVAFEACATSHYWARVAQRQGHEVKILPAKAVFPFRQGHKTDENDALAVAEAARRPNVKLAPLKTVEQQGMQAIQRSRELLVHERVSLANHLRGLLMEFGIVIPQGFASLYRLLPEILEDGENELPDLYRPTLNLLYGRLCDLREDLERLNREIEVLVQANPVCRRLTALEGVGPIGSVLLYATLGTGEAFTNGRQFSAYLGLTPKQFSSGGKVNLVGISKRVANRRLRAVLITGARAYVYHMKEPKTAKDRWLWAIVERSGKCKAAVALANKNVRTAWAMLTQNTEYQCYPLAA

SEQ ID NO: 42844 - protein, 374 aa, unidentified
MLSARPAGACRPPPDQQKELAITTIAHPERPRVTVGVDTHLDVHVAHAKDQLGRRMATVSIPTTPAGYQDLLAWARGLGEVQAWGVEGTGCYGAALTRFLGDQGQVVLEVNRPDRQARRRHGKSDPVDAEAAARSVQAGEVTTVPKAGNATVEMIRSLRVARQTAIKARTQAINALKALLVTAPAQLREQLRGRSAAMLVRQAAALEPGPLDTPTAAAKLALRCLACRYQALHAEVATLDTELARLVAKAAPGLVARFGVGPDSAGALLVAAGDNPGRLRSDACFSMLCGSSPIEASSGKTRRHRLNRGGDRQANAALYRIVVVRLRWHQPTKDYMARRLKEGKTTKEIIRCLKRYVAREMFTVLNQTVPTPAT

SEQ ID NO: 42845 - protein, 343 aa, unidentified
MAEVITIGLDIAKNVFQAHGADAVGRQVFSQRIARSKVLDFFARQPKCLVALEACGGAHHWARELMGMGHEVKLIPPAYVKPFVKRHKNDAADAEAICEAVQRPNMRFVAVKSEEQQASALVFRTRDLLVRQRTQTINAIRGHMTEYGWVAPKGPSWVTMLGELIDDEVGASLPHAAREMFRVMLNMLEKLDGQIADLDKEIARRAREDEVARRLMTIPGIGPIAATAIAALAPAAQTFKRGRDFAAWLGLTPLQKSTGGKTKLGRTSKMGERTLRRLLIIGSSSVILHASRRGAPEGSWLAGMLARKPRMLVTVAQANKTARIVWALLMKNEDYRAPMAAAA

SEQ ID NO: 42846 - protein, 408 aa, unidentified
MKTLHQRCAGLDVHKQEVVACLRLVTQGRVHREVRRFPTTTRGLLELAAWLEAARCTIVAMEATGVYWKPVWHILDGSFELVLANAAHIKGVPGRKSDVNDATWIADLLAHGLIRASFVPPQPIQDLRDLTRTRKQLSREIVRHTQRLQAVLEEANVKLASVITDILGASGRRILKAMITGETDPSHLAELGSRRLGCSRDTLVEALDGRVRDHHRFLLDQHLKTIAQLEETMAAFDARIEAALAPFRDTVERLTQVPGLSTRAAEVVIAEIGLDMSRFPTAGHLLSWAGLVPALDESAGKRRSTRVTKGAPWLKPVLVQCAWAAANKKNSSFEAQFLRLKGRRGPKKAAVAVAASILTTVYHMLRDGTCYQDLGPNYFARRNPARTARKLADRIRSLGYIVEIRSAA

SEQ ID NO: 42847 - protein, 319 aa, unidentified
MTQDQLVVAGIDVAKDKIDACIRTVTERKTCPATAAGRRSLIVWLRKHRVGKAVMEASGGYERTWAKALRQAGLEVRIVDPKRVRHFAESAGRLAKNDKIDAEMICWFAETFSEAPSQVDNPAQEEIKALVKGRQSLIDVRARLEMQKEHDAPALLRKARARLLRKLADEIAAIEAVIAAMIKAMPDFARRAEIIQSVPGFAEGTAMALLGGLPELGQVSDEVAAALMGVAPYDDDSGKRRGERCIKGGRRWVRNALYMPCVGAATLNNPVFKAFYERLTAKGKPPKVAIVACMRKLIIILNTMIARDETWDPKKYRVA

SEQ ID NO: 42848 - protein, 350 aa, unidentified
MDKELYIGVDVSKQTLDLAYYDGESIDWKKAHIKVSNNNAGFKKIGSWVAKVSKGFDIVLFCMEYTGLYTQDFRLWLEEKHYIYRMVEPRKMHRFEPDLDDGLRSLDRIKTDELDSFRIAIYCEQNHRKILRNPSKLPPPVYFKLKRLLAERKQTVKQSVLYKQQLHDICAYDTDLSVERKNGQLKTLNDALKGIDNEIDMYIKEDADISKNFSLLTSIPGIGRVVALEAIVLTENFMAIDNPRKYACYIGVAPFKKESGTSVRKGSSVSKKGFKQAKADLSIACLVCMQHIPNIRDYWERKRKEKCSGIVFNAIKFKMILRMFAVIKRGTPYVETDNYRNGKNKQPGVN

SEQ ID NO: 42849 - protein, 408 aa, unidentified
MKILHRRCAGLDVHSDTVVACARLTARTKASHEVRHFSTATRDLLELADWLAAQGITHVAMEATGIYWKPIWHILEGRFELVLANAAHIRNVPGRKSDVNDAVWISDLLAHGLIRASFVPPAQIQDMRDLTRTRTQLAREVAQHIQRIQKALESANIKLTSVISNVVGSSGRRILKAMIAGETNATKLAELGSTRLKCPRTELVAALDGRMTAHHRFLIAHHVGLIEELERHIAAFDARIEELLAPFRDAVERLITIPGVSRVSAEVILAEIGADMTSFPTAGHLLSWAGLVPRLDESAGKRRSTHVRKGAPWLKPVLVQCAWGAARTKGSYYQAQFFRLKSRRGPKKAAIAVAASLLTAAYHMLKDGTLHQDLGAEFLVKRDKARIAARLAKRIKDLGYEVSFATAA

SEQ ID NO: 42850 - protein, 341 aa, unidentified
MHLYFVGLDVHKQVIAYCVKTEAGEIVMEGTVAATRAALDQWVTTLPRPWHGGMEATMFSHWIYHHLKPHAERLEMGHPARMKAISSGKKKSDKIDARTIADLLRCDLFPACFVISPELGALRQQMRFRRLVVEETVTFKNKTAGLLMEAGVEYQRRRLHGKRYFKELVQDNQWIHEELRPLLTFNREQIETLQGMDQRLIRMLERHPRLQARVEALQAIDGVGPVTALTWALETGTPERFASIKTAVSYCGLSSALRESAGQQKRGPLSKQRNRHLQGVLIEAAKMAPLLNEKLKAVQQQAKEKGGHRNRATLAVARKLVAYLLAADRAFLASQGQSVAA

SEQ ID NO: 42851 - protein, 380 aa, unidentified
MASMHDSVRFKTTVYAAIELSKKSWVVAIARPDRDRPSIHRIAGGNLADLIGRLRKAAGEKQRIVVCYEAGYDGFWLARSLAKIGIDCRVLDPASIQVNRRARRVKTDRIDSLALLRALIAIDRGERHVCAVVRVPTVEEEDARRSHRERQRLVRERTGHINRIKGLLFAQGIRGIEPKRRRTRIDFGKLTTAEGRPLAERLRRELEREYQRLELVQSQLRIVEKERDTADAQDPAVERKRELLCALQGVGGASAAILAREVFARPSASRRQLGSYLGLTPSAYASGSTTRCQGISKAGNSWARRVLIEVAWLWRKYQPGSPLSHWYARKTADQSPRIRRIMLIALARKLAISLWRYVETGLVPDGAVMAKTTPHMAAAT

SEQ ID NO: 42852 - protein, 427 aa, unidentified
MSEVESIQSEPEFAAFLGIDWADQKHIWCLQTAGSKQRESGELEHTPEAVESWVANLYQRFAPRPIAVAVEQSRGALVFMLSKYELFHLFPVPAQMAASMRQALYPSGAKDDPRDADLLLDLLLQHRNKLRRLSPDSEATRRVQNLVEERRKLVDEKTAQINRLTDHLKVYFPQMLEWFGRLDSELVCGLLERWPALEELQKASPASLRTFFRKHRCRDRERIECRIEAIRRALPAIQDRAVIEAKSAVVKVIVQLVRILIEGIEDLDGQIEEAAAAHPDFFIFNSLPGAGPVMAPRLLAAFGSQRDRYRSAREIQSFSGIAPVTESSGKRKWVHFRWACPKFLRQSFHEWAGHSIVQSEWARVYYQQQRRKGNTHHAAVRALAFKWIRIVFRCWQDGVAYDENTYLAALVKHSSPLSGLVAIGKTL

SEQ ID NO: 42853 - protein, 369 aa, unidentified
MTDLTLFVGLDVHKKTISVAMVEATAGAEVRFYGTIANTPDAIRGLCKKLTKDGQQLHFCYEAGPCGYGVQRQLSRLGHRCDVVAPALIPRKVGDKVKTDRRDAMMLAQTLRAGQLTAVWVPDEAHEAMRDLVRLRAQATRDLRKTRQQLLSFLLRHGLVSPYGHWTKMHRRWLGELIFAHPAQHLAHEEMLQRIERAEALCDRLKRAILELVPQWSLAPVVQAIQALRGVSLIVASVIVAEVGCFSRFDSPRQLMAYLGLNPSEHSSGAMIRRGAITKTGNALARTCLVEAAWTYRFPARVTQIIRDRLNGLPEPIRNVAWKAQVRLSARYRKLIAAGKPAPKVVVAIARELVGFIWAIARMVEPKFA

SEQ ID NO: 42854 - protein, 344 aa, unidentified
MEITTIGLDLAKSVFQVHGVDATGQVVIRRSLRRAQMLPFFARLPSCLVGMEACGTSHYWARELIKLGHQVRLMPPAYVKPYVKRGKTDAADAEAVCEAVTRPTMRFVPVKSPEQQAALSMHRTRDLLVKQRTQLVNMIRGLLAEFGIDIPKGLERALLMAQRIVDGAAPDVPMEAAKIVVTLSQQALDIHVRLREIDRNLAVCLRGNDVARRLMTIPGIGPVGATALAASVTDPHQFRSGRQFAAWLGLTPLQKSSGGKERLGRISKMGDKYLRKLLIVGMTSLVRRAKYNPKTVDPRLADLLARKPVRVATVAMANKTARIVWAVMARGETYRAGHRLALAT

SEQ ID NO: 42855 - protein, 353 aa, unidentified
MPTDSSPTAPLKYVVGIDIAKDTFVACFGRIDGHQHLRFGKEAPFDNTLAGFTALLAWTAKQQATAAPLWFVVEATGVYYEALAYFLSDNEQALSVLLPNKVKHFAQSTEQKSKTDQLDARLLCRLGLERALPAWQPPTPALRQLRALARERQSLKRQGARLKTQRHAYDHSYQPDARTLERLSARQQLLVEQLKAVDQDLAALLEAEPELARKLAHLTSVPGIGLTTAIVVVAETNGFVLIENERQLASYAGLDVVQRQSGLSAQATRISRRGNVHLRQALYLPAVSSLRYNPQQMAFYARLRARQPSGKPGVIAVMRKLLLLCYSLWKNDRPYDPHYHPAHVAEKEVAPAT

SEQ ID NO: 42856 - protein, 404 aa, unidentified
MELDVIYRSVAALDVHQAKLTVCVLFETNTGEVVSQIREFGGFKRDRREMATWVSSFNPELVVMESTGIYWKSPYSALEKHDLKLAVVNAYHVKQVPGRKTDIADAQWLAILARSGLLRGGFVPPQHFREYRLISRQLQKLTGLASGEKCRLHKLLTDGGLRLSVVVSDLYGKSAKAMIQGILDGETPEQLLAHANPRLKASPDELRDALEGDLSESHRFVIRELMAHIDELEARILRFRQMLLAHLSSYQVILQNLQTIPGIDELSAAMLFVEIGDDMSAFGSPAKLASWAGVCPGQNESAGKRKSAKTRKGNPYLRRILCEAANAVSRTRCSLQDKFKGLMIRRGRKRAIFAIAHKLLKTVFLLIQRGDYYRDANTDYEALSVQRNAPRWIKKLVQYGYISA

SEQ ID NO: 42857 - protein, 380 aa, unidentified
MRTVCGLDVHKDSVFMCILGENGLKIEDNFSTLTPDLERMREMMVSQGVSEVAMESTSIYWVPVWNILESDFSLKLVNPLFIKQLPGRKTDVKDAHWIATVLQKELIRGSYVPEHSIQELRLIERRQADLRKKGVRVVQRIDNVLQRCNIRLSNYISDVESKSMLKVIEAIISGERDGKKLSYLVHGRTKNKHGSTIIEASLSGYITPSVVFNLKQLTEELSLLRKHEKECLQEMERICEKLYASQVELLDTIPGVAKQSAMTIIAELGVNLEMFATASALVGWLGLRPRNEESAGKIKSKKTMHGNKYLRVILVQCAWAAIREKNSRFKTKYNLLKKRMNKQKALIAIARKLALVIWNVLTKNEAYNPLMGHKPFLMVS

SEQ ID NO: 42858 - protein, 344 aa, unidentified
MEHYVALDVSLREISVCVMDGKGAVLFEGKTAADPAALVTLIRAKAPRVVRIGLETGATSPWLAHALTAHGLPVVCMDARHAHAALSMRPSKSDRSDARGLADMLRMGWFREVHTKSIVSHERRTLLGARHQLVSMRTELDAQIRGMLKTFGLVLGTGNSDILIQRAEELAKGHPVMSSLVAKLAEVRRHVAMQVGALDREIRALTRSEPTLKRLMTVPGVGPITALAFLSAVDDPARFKHARDVGPYLGLTPTRYQSGETDRQGRISKCGDSFVRTCLYEAAGVLLTRVQRFSPLKAWGMRLVKRIGGRKARIAVARKLAVILHCIWTDGTEFWWSREELSMG

SEQ ID NO: 42859 - protein, 369 aa, unidentified
MDKVIRAYVGLDVHKESIAVAVGDAAGGVARFVGTISHDVAPLLKVLGRLGQQGDLEVVYEAGPTGYGLQRALVAAGHACQVIAPSLIPRRPGDRVKTDRRDCVRLAELARAGELKPIWVPSPEDESIRDLARAREDAVNARTQVRHQLKGYLLRHGLRYPAKTAWSKGFYRWLGTLSFDGRPAQIAFAEYQQAVQAADERVARLTEALSSSIEGWRFATVVAALQALRGIDAVSAIGLVAEIGDIGRFVHPRQLMGYLGLVPTESSSGERIRKGSITKTGNAHARRLLTEAAWSYRFKPRIGYRAQVRQERLDEPLRQLAWKAQLRLTARFARLQARGLQINKICVAVARELAGFIWALARASAPARA

SEQ ID NO: 42860 - protein, 421 aa, unidentified
MNQLTDTVYTAYVGIDWAASKHDICVQAGAGGAREFACISSQPEGIDAWAQGLYRRFGGPIAVALELSKGPIVSALQKYDFFVLYPINPSTLANYRETFTPSGAKDDPTDAELAVDLMTRHAERFSPLKPQSVGMRKLIGLVEQRDKFVSDQGRVVNRLGHALKQYYPQVLEWFSEHNTVVFCDFLSQWPMLNQAKRARKASLERFFNRHHVHAAELIERRITAIKAAMALTADPAVIEPHRLQVEILVEQLRITIKALKRFDDEIAATAHKLPDYDLLFSPLPGAAKVLAPRLLAAFGEDRQRYPQADALQKYSGIAPVTKRSGKTTWVHWRWQCPTFVRQTFVDWAAQTINKSAWAGAYYRQQRAKGCSYQVAVRALAFKWIRILHRCWQDRTPYDESKYLEALRRKGSPLLKYLAEAA

SEQ ID NO: 42861 - protein, 403 aa, unidentified
MIKVWAGAGTGKTHHHCVVIDGPGRRLLSRRVTNDEPELEALITEVAALGEEVTWAADMAGGGAALLIGLLAAAGQRLLYLPGHALAHAAAGYRGEGKTDARDAAIIAGQARMRRDLQPLRPGDEITTELKILTERRKDLSCDRTRAINRIRGLLNGIFPALERELDLTSAGPLVLLAGYQAPAAIRHMGAARLEAWLRARHVHGATRLAAKACHAAARQHSALPGETLTASLIADLAREVITLGERIRETDKLIEDRFRRHRHAQVITSMPGIGPLLGAEFLAATGGDMTWFATADRLAGFAGLAPAPWDSGRIRGNLQRPRRYHRGLNRVFYYSAMISIRSCPESKKFYDRKRAEGKKHTQAVLALARRRVNVLWALLRDDRPYQPRNAQPPPSEPLGAAA

SEQ ID NO: 42862 - protein, 338 aa, unidentified
MGVYIGIDLHSNNSFVTVIEESGKVVYEKRLSNDLPLIVSELDPYREHCEGVVVESTYNWYWLVDGLMEAGYGLHLANTAAIQQNKGLKYSDDRSDARWLAEMLRLKVLPEGYIYPKGERAVRDLLRKRSQLVRQKVSQMLSIQNLVSRNAGISLNGNAVKTLTGWDVDRMLPDPLVARAAKSNLRVYRCLVKEIKDHEEMVLARVKGNAGFENLLGVSGIGKALGLTVLLESGDMGRFVSAGHFASYCRCVGSQRLSNGKKKGKGNTKNGNKWLAWAFIEAANFAIRYNAIVKRFYQRKKARTNGVVAIKAVAHKLARATYHVLKDGVPFQVERTFA

SEQ ID NO: 42863 - protein, 456 aa, unidentified
MVAVMIGIDPHKASHTAVAINAAEEPLGQLLVRACDAQADRLLAWAQAWPERAWAVEGAGGVGHLLAQQLLGAGERVLDVPPKLSARVRLLEAGDTNKNDSNDARSVAIAALRSRGAGEVRRDDHAAVLKVWSKRHRDLGRARTQVACRLHAVLCELVPGGVSKAITAGQAAHLLESITPADAVKAARCELAAEFTEDLHRIDAQIRDTRKKLAAVVRAAGTSLTGLFGVGPVIAAAVIGDVRTVSRFPSRDHFAACNGTAPIEVSSGPRKVYRLSRRGNRRLNHAIHMAAVTQIRNPGSEGRAYYGKKLAEGKTPKEALRALKRQVSDAIFACLQADARRAGDPGGQPGNHSASRAAGSHPEHPLFGQATPGPGHHPTTEASTPGRAGRSSIAATSPSAKPQVQVERPQRSEDERPGGAARRRPYSATRKARDHRPSVKVQPPTSRAAKKLDPTS

SEQ ID NO: 42864 - protein, 385 aa, unidentified
MPKTPTQTPVDYETTLVLALEVSNKSWVLAAHVPGIGQVKAKQVIAPNTEALEAAIERYRGRAAVSGRTVERVILVYEAGYGGFWLARWLEARGTEVHVIQPSSVPVERKRRRAKSDTIDAELLLRTLLAWLRGEPRVCSMVPVPDEAQEDARRPSREREELLRERVSLTNRIGAVLTTLGVDGFSFRPLRKDRRAQLEALRTPFDKPIPEHARAKILRSIDRLELVLAQIAALEGKRDAVVEQEEPGAAEKMIQALVLLRSIGAQTATVLVYEAFVRQFCNGKALGSYAGLTGTPFNSGGSEREQGISKAGNRRLRATMGELAWLWLRYQPESALSKWFRERLGGAKGRMKKVLIVAMARKLLIALWRYATLGVIPEGAVLKPV

SEQ ID NO: 42865 - protein, 357 aa, unidentified
MKKRLNADTINVNGKTVNVGIDVHKLSWHVTVLVEGIVVESATIKPSYRVLRKLLAPYKGARIRSAYEAGFSGFNLYDELVADGMECIVVSPSLIPVESGNRVKTDKRDSRKLAQYLENNLLKRVYVLSKQERAHRQYVRTRRQLSDHRADVMRQIKSLLLFHGLPSIVGIKGFWTRPVLRTLRNVAPDEYVSRSLNILIDLYEYLTQQVKHMTREVRRLARTEKYARKVELLTSIPGVGVLSAMEILTELQDVSRFATADHIAAFLGLTPSQYSSGQHVRMGKITHAGNHRLRTRMVECSWIAIRKDPGLNKTYQLIKKRRGGKRAIVAVSRKLIIRIRRILLDEVAYRLEYATAA

SEQ ID NO: 42866 - protein, 351 aa, unidentified
MSEALQADLVVGVDTHLDTHTAAICDARGRVISQLQVPATTAGYAQLLAQVRSAAAGGQVIWAVEGTRHYGLGLARHLAGQGEQVAEIDCSRHVGKRRAGKSDPIDAVRAARELLARPAPAQMRADGDREAPRLLMIDRDNAVQSCKTARTALAAVLVTAPADLREQIRPLPREQRAKACAALTCPDGADRQTRVLHQTLIRLGQRIAALAGVAAELEAQITEIVEEMAPGLVATEYGLGYLSAAQILLSWSHAGRIRTEQAFAMLSGTAPVPVSSGRTDRHRLNRLGDRQLNRAIHTIAVTRMRCHQPTQAYVQRRRADGKTDREIRRCIKRYLARHLYRTLNNGILSSA

SEQ ID NO: 42867 - protein, 323 aa, unidentified
MSMNPTASHFNHIVAFEVSKTELVVHTLPTDRQERIANSKAAVRRLLSRERARNLKLALGAMLVVCESTGGYERQVLDQAVALGIDLHRAHGSRTRLFARFNGRRAKTDKIDARLLALYGSTPGLDLYRPPSPEQHALRDLRRRRDEIAKMLRMETNRTEHARLSRLKASLSRHRKWLEAELEALEAEIEILIEQTPELSRKAGLMRSVKGVGPKTTAAILAYLPEIGTLSKAQAAGLTGLAPHANDSGNQHSPRHIAGGRAALRSSLYMAALVAQSRNPKLRAFAQALRARGKPNKLILTALMRRLIVILNAVIASGQPARA

SEQ ID NO: 42868 - protein, 376 aa, unidentified
MIEKLRFLGLDVHAETITVAVAEADGEVRSLGTIANREESIRKLIRKLGPVEHLRACYEAGPTGFVLYWQLMQLGVKCDVVAPSLVPKKPGDKVKTDRRDALKLARSHRSGDLTAVWVPDEASEALRDLVRQREAAKQNQLRAKHRLTKFLLRTGQRPPLGVKAWTERYVEWVQQVRYTHPAQEATLLDCLNEVQHMEERVKRLEQSIVEVIQLAPVPVQDVVRGLQALRGIAHISAVTIAVELGNITSRFERARDLMGYSGAFPSEDSSGERIRRGGITKSGNAHLRRIVVESAWSYRHRPAIGARLRKRQEGLPAEITEIAWKAQNRLHKRYMTLMARGKEQRKTMTAVARELLGFIWAIGIKAEASCKQQLAA

SEQ ID NO: 42869 - protein, 391 aa, unidentified
MICVGIDVAKDKHDCFILSSDGEVLVDVFTIANNANGFHTLLQVIRSCTKPSDIIKVGLEATGHYSCNILGFLLDCGLPTYVLNPLHTNLYRKSLSLRKTKTDRVDARTIATMLMSHVDLKPYTPTLYHNEELKSLTRYRFDKIRERTKLKQSVSRLVTILFPELEKLVSNIHIASVYALLSEFPSAEQISKAHLTRLKNLLSETSRGRYGKEKAVEIRDTAVNSVGARIPVKSMELKHTICLIGELDREIKEIESEIAALMKQIQSPITTIPGIGTHMGAMILAEIGDFSNFDSPDKILAYSGASPSTYQSGQLANCHAHMEKRGSKYLRYALYNAAKYVCLWEPSFATYLAKKRAEGKHYNVALTHAIKKLVRLIFALEKTGQAYRCMT

SEQ ID NO: 42870 - protein, 424 aa, unidentified
MSYRIAGIDVHKKMLAVVVADVEIEGEYQFERRQFGSTPEHLRLLAEWLIEQEIVEVVMESTAQYWQPVWGALERYWKPICQKREGAGPKSGTLHLAQAQSNRGPRGRKKDFPDAERLVKRLVANELTLSFVPDAQQRLWRTVMRRKYQLTRNRVQLQNRLEALLEEAHIKLSSLVSDLLGVSARRMLKALGDGETNPTVLAAMADKKLRATQTQLCDALGACTELNAVYRRLLKMTLEELQLLEQQVGQLDQEMASLLRQHQDSVKRLAEAPGLGVDSAQQIIAEVGATAATFPSAQQLSSWVGACPGDEESGGVSKSHRSPKGNRHMRRILNQSANAAVKVKGSIFEIVYRRLVPRLGHKQTMGAIAHRLCRLIWIILHRGVRYEERGPAVSERSRKHRTNRMIRELRSLGYRVESMNLQPI

SEQ ID NO: 42871 - protein, 344 aa, unidentified
MVYVGLDVHKEFCQAAVIDDSGRVLSNERFSSTRDELNEFLDRFEDAKFVLESTGIWEFIYEGIERRGFDVELAHPLKVRAIAEAKVKTDKVDAETLAQLLRANLIPRSWVPSRNVRDLRQLVRQRAYLVQQSTSLKNRIHAGLLRRGVRRPEKLKEPFSFKSIDWMRSLGIPTVDSCLNCLENVQAQIEDINTQLLDEYNRRPDAQLISTIPGIGFYSALLILAEIDDIRRFPHPENLCAYAGLVPTVRQSASSVHYGAISKDGSSYLRWMLTEAVHTHTRCEPDSRLSRFHAKVARRRGKQKAIVATARKLLIIIYWMLRTKEPYHCQGFNPVFPPARTSAT

SEQ ID NO: 42872 - protein, 340 aa, unidentified
MKITTVGLDLAKSVFQVHGVGAGQAILRRRLKRPQVLCFFAQLPPCLIGMEACGGAHYWARKLAEQGHTVRLISPQFVKPFVKSNKNDMADAEAICEAVQRPNMRFVPVKSTDQQAVLAVHRAREGFVGARVAIGNQIRGLLAEFGLVLPKGKANLARVPALLSESGVPATLQHLIEGLLAHYRQLETRTTELEQQLQAWHRSNEASQRLVTIPGVGVISATAMVATVGDARQFRNSRQMAAWLGLVPRQHSTGGKPTLLGISKRGDGYLRRLLIHGGRAVLRKAPTRPNAGTLWHVRVMRRRNKNIAAVALANKNARIIWALLARQATYDPFHRAAEAA

SEQ ID NO: 42873 - protein, 424 aa, unidentified
MKVTYQTCCGVDVHKSFLVATIVKTTGGIEPSYQKKRFSTFNNSILEFKQWLLDNNCRDICMESTGKYWVPVFNLLEDEINVVIANPKWVKAVKGNKDDTKDSKWIGDLFRLGLVKGSYIPCKIVRILREYTRYRYKLVSCRSSEKNRYQNALTVCNVALDSVVSDIFGKSSTSIIDYLLEQSGTSINHEEIASKLLRSLKSKEDAVIESVEGYQMTDAQKYRMRLVRAHMDYITAEINDVDKMIENMISSNPDFENAVQFLCTIPGVKRDSAITIISEIGTDMSQFSSSKRLCCWAGLTPGSNESAGKKKSVRITRAGVYLKPALVQCAHAAVKSDKSPYYKKKYESLVKRRGKKRAIIAIARMILTAIYQMLSTGEQWNPSDLYKIDMPEALVEKQKAKAIKQAKKLLQREGILPPDEPLAS

SEQ ID NO: 42874 - protein, 348 aa, unidentified
MKHYVGLDVSIKETSVCIVDENGKLCRERKVASHPDDLVAILNDPALNLDRIGLEAGPLSQWLFDGLAKAGFPVVCIETRHTKAFLEALQQNKSDRNDARGIANMMRVGLFKDVHVKTLGSQKRRALLTARSLLQEKAIDLENEMRGLLRNFGLKVGQTSGGTFERRILELVENDAELVEIMQPLLDGRRKLREGLAKLEKRVRSEAKNDDVCRRLMTVPGVGAVVSLAYVATVDIPTRFRHSRSVGAVLGLTPVLNQSGEVSRVGHVSLRGDAMMRRLLYEAAQSMMTRVVKWCWLKAWAMNVTKRHGSKKAKVALARRLAVVMHRMWVDGSEFRWTKIEPPTSVAA

SEQ ID NO: 42875 - protein, 317 aa, unidentified
METTVISFEQTVTVGCGIDVHQAVIVATISKGGESYQTREFSSFTSSLTELREWCKHERVTHVAMESTGVYWKPVFNILEEDFEIILVNARHVKNVPGHKTDKKDSKWISKLLLAGLLKGSFIPPRDIRDLRDLVRYKKKQVAHVSSEKNRLIRILEDANIKISTVLSDVHGASGSKIINDIIEGQVNVEELMKHIHGKVKASREDIRKALEGRLTTHHRFMLKIIKKSIQEKEGIIEELEKQIDVATAQYAVEIDLLQTIDGVGKDSAIGIISETGVDMEQFPNEKHLSSWAGMSPGNNQSAGKKKVQGPSKETPT

SEQ ID NO: 42876 - protein, 342 aa, unidentified
MELKTIGIDLAKAVMQVHGVDERGKATLKKQLRRDQMLPFFANLKPCLVGMEACASAHYWARKLEAMGHTVKLMAPQFVKPYVKTNKNDAADAEAICEAVSRPNMRFVPGKNGEQQAVLSLHRARQGFVKARTAQANQIRGLLAEYGIVIPQGIRNIPKRLPVILDDGESDLPGVFRQLLQRLGDHLKELDRQVGELELQIQLWHRECAASRTLAGIPGIGPITASALVATIGNAKAFDNGRQLAAWLGLVPRQHSSGGKSSLLGISKRGDSYLRTLLVHGARAMVRIAERKASTGDGWVGRLVGRRNPNIAAVALANKNARIVWALLAHDRHYDADFRTAQ

SEQ ID NO: 42877 - protein, 387 aa, unidentified
MQAPTVSTPITDHISTIFVAIELSQKTWLVTMHSPDRDKISRHKVQGGDHASLLALIDRVRDRAARTLGVAPAVVSCYEAGYDGFWLHRLLMAAGIANYVFDPSSIAVDQRARRVKTDRIDGEKMLRTLMAYLRGEPRVVRIVRVPTPEQEDARRDTRERHRLTKEQTAHTNRIKALLRLHGFAVGHPRRRDWLTWLAGQRDWQGQGVPPRVLTEIENEHARLMLVRKQLDALARTPAAADPAPAVAEMVRRSELLQRLKSLGPAFATTLTQEVFYKDFRNRREVASYFGLAPSPWQSGGTDRDQGISKAGNPRARCSALELSWLWLRHQPGSELSQWFRQRTLNAGTRIRRIAIVALARKLVVALWRYLTTGLVPAGAVLKSAEAQ

SEQ ID NO: 42878 - protein, 345 aa, unidentified
MNKISVIGLDLAKNVFQVHGIDLDGEVVVRKQLKRSQVCQYFAKLEPCLIGMEACGGAHYWSRELTERGHTIRMMAPIFVKPYLKTNKNDHNDAEAICEAVQRPSMRFVQPKTPEQQAVLHLHHGRRLLVRQRVALSNHMRGVLSEYGIVLPQGAKAILQRLPELLEDADNDLPILARHLLAELKEEYDQLIERIERLEGRIKAWHANNSVSQRLASIPGIGILTATALAVTVGEGQDFSNGRQLAAYLGLVPRQVSSGGKARLLGISKRGDGYLRGLLIHGARAVIYHIQRRLKAGQSGGNPWVEQLLQRCHPNEVAVALANKMARIAWVLLVKNETWCPARSV

SEQ ID NO: 42879 - protein, 371 aa, unidentified
MSSASAVAPARAPVAARPAARSVIYLGMDVHKDSITIAVLPAGVKVPTRVERLPNDLVKLKRLLERLARDGELRSCYEASGSGYVIQRVMLEWGYHGDVIAPSLIPKRPGVKRKHDKRDATELARLYRAGELTAVRIPTEAEERVRDVVRCRETFQREVVKSRHYILKFLARRGFVYREGANWRSGHLKWLQQLGSETAPLAAADRLVFREYLALLQYKLTRRDELDREIERLAELPTLAPTVGRLQCFRGISLHAAMVLATEIGGWRRFSRPGQLACYLGLVSREDSSGNRERRGSITKAGKQPLPPRARRSRLALSLPTELERCDPQATGGAAASGSSTRVESAAAPPRSLPAPRLSEVAPDRRRGGRS

SEQ ID NO: 42880 - protein, 350 aa, unidentified
MDSLSEIFDVVIGVDTHVATHSAAALDTRTGGVLAEITVDTTTDGYEALVEFASEQSGLRAWAIEGTSGHGAGLTRHLTKRDELVVELDRPERTKRRNGAKSDPLDAIRAAREALSRTKLGTPRTTGERQALSVLLAARRSAVEGAKVAQQQLFALVIAAPEQLRSKLRGMRTLAMARSGSRLRLQPGWDLETRTTASVLRDLARRTLELWAEADRHEKEILAIVRAWRPELLERRGVGPIVAATVLCAWSHPGRVRSESAFAMLGGAAPIPANSGQVTTHYRLNRHDDRQLNRALHTIVLSRIRWDESTQAYVKRRTAEGKTQREIRRCLKRYVARELFRLLESEPSNT

SEQ ID NO: 42881 - protein, 345 aa, unidentified
MEISTIGLDVAKNVFQVHGIDATGDVIVRKTLRRAQLLPFFAKLPPCLVGVEACGTSHHWARELIGLGHEVRLMPPAYVKLYVKRGKNDAVDAEAICEAVTRPTMRFVAVKSREQQSALSLHRVRSLLVGQRTQLVNMMRSMLAEFGIAIPEGLEKALSMARQIVDGEVETGLPAEATMIVAMLSQQAIDTHARLREIDKTLGALQRSDDVARRLSTIPGIGPVGATAFSASVTDPHQFRSGRQFAAWLGLTPLQKSSGGKDRLGRITKMGDKYLRKLLVIGATALVRYAKYKPDSADPRLLALLARKPVRVATVAMANKMARIIWALMTRGETYQARHKPMLVG

SEQ ID NO: 42882 - protein, 343 aa, unidentified
MNIMHFIGLDIHKKIIAFCVKTKEGIIHSKGVIPATRPALIEWMKTLPQSWTVAMEATLFTGWIYDFLKPHAFEVKVAHPEMLKAITAAKKKNDQSDAQKICDLLRVDLLPECYMAPSDLRELRRILRYRTYLVRTAVQIKNKISGLLMEVGADYNKKKLHTKKYFFEMLENIEDVPPSVIDMLKLSRSNLEIFNGIQKKLVLVLKNNQLIRDRVKRLQTIEGIGEITALTWVLEIGEPERFSSIAKAVSYCGLCAAQKQSAGKEFRGPISKKRNKHIQTVLIEAAKLAPHWNPQLAEVHNKELTKGNRNRATLAVARKLVAYMLSVEKNKKDFHHIESDQAA

SEQ ID NO: 42883 - protein, 417 aa, unidentified
MKKHNNSRKKSEPTSKRAKSRRPVRQDTKEVLAELVGKRRGKLDRKVAAGSTREREEHQRGALRPNVDRLTVGVDLGDQGSHYCILGLEGETLAEGQLRTTQEDFATFFQRLNAARVVVEVGTHSAWVQEVICGCGHEVLVANPRLMDGSKRRKRKNDRIDANKLARLGRVDPESLYPIQHRSREVRQDLVMLRARDALVAARTEIINTTRGLVKSMGRRLPKCSSRSFAQKGEEAVAVEMREALLPLVRLAATLSADIKEYDKKMEELGREKYGHTALLRQVKGVGPITALAYVLTLENPQRFAKSREVGPYLGLVPKQEDSGESQPQLGISKAGDAMVRKLLVGSAQYILGPFGPDTDLRRYGLRLCERGGKNAKKRAAVAVARKLAVLLHRLWVSGEVYEPLHHAKSVPIAAAA

SEQ ID NO: 42884 - protein, 386 aa, unidentified
MSRPSNILVRAINYDHTLVLSVELSNKSWVLAAQVPGLPRTKAQRTIEPNKNALLAAIDGYRARAAAVGYTVDRVITTYEAGWSGFWLARWLVAQGVEVHVVQPSSVPVDRRLRRAKSDGIDAELLLRTLLAWLRGEPRVCSMVPIPDEADEDARRCVRERTELLSDRVGLTNRIGAVLATLGVNDYNPLLQSRRRRLAELRTGLDQPIPPNALAKIERLLARLELVLAQIAELERERDEVAAADAPDRAGKMIQQLASLRGIGVQSATVLVREAFVRHFPNGKALGSYAGLTSTPYSSGGIDREQGIGKAGNRRLRTVMVELAWLWQRYQPGAAQVAWFRDRVGSTGRRIRKVMVVALARKLLIALWRFVIDGVMPEGAVMKPSI

SEQ ID NO: 42885 - protein, 339 aa, unidentified
MDVEYAGRRYVGIDLHRHRSVIVQMSPEGERLGAPVRIDNDPFELARQVASWGEHPEVVLEATYGWYWAADVLAEAGAEVHLAHPLGIKGFAYRRVKNDVRDASDLADLLRMGRLPEAWIAPPEVRELREAVRHRCKLLRSGLKAQVHAVLAKQGVRVAVSDLFGVGGQQLLDRLTLDAAYAARVDSLRRLIDAFTFEIEVLAQRTAAALRNHRGYQAIQAIDGVGPLLAAVFVAEIGDVTRFPGPQQLCSWAGMTPRHRESDTKVRRGRITKQGNNLVRWAAVEAVQRVHGGRLGATRARLTEHRGANIAKVAAARKLLTLVYYGLRDGHIRCLARPA

SEQ ID NO: 42886 - protein, 338 aa, unidentified
MKDIKYFIGLDVHKERTSYCVRDKLGNILTEAETATLYSELEPRLKPYLAYSLIALEASTSYYTLYQTFLKKGYRIKVANTIQLRQLIAKNDKLDAQRLSEMLRLGTLPCSYIPEEKIQHLRSMIQMRHALMQEKVRCNNRIQAFLDRNGVMMPPVKAFSKKWKHALMQHLGTGTASMELRYEYNHYVYLEKTNEQADQEIIGYTKTYWKLEYNLLRSITGFGVLLPCYVIAFVHPIERFLSNRKLRRYAGVISLSKESGDTTSPGRIPKTTSKALLRWALIQAANTIGKTNTRLGRYYRRKKNQKKKSGIAKIAVASTLVDIIYKVLTTKKPYVASC

SEQ ID NO: 42887 - protein, 337 aa, unidentified
MKYCGIDLHSNNSVVVVSDEEDRIVFHKRLPNDLRQIAGALEPYREELVGVVIESTYNWYWLVDGLMDAGYRVHLANTTAIKKYDGLKYSGDFADAAYLAQLLRLGLLPEGYIYPREERGARDLARKRLQLVRYRTAQILSIENTLARQTGARMSGEAVKRLTVEQVEALGFVPDVTLALESNRAVSQVLQQRIEVLEKRLKERVSLRSEYGLLKTTPGIGEVLATTIMLETGTVTRFAKVGNFSSYCRCVDSRRESNGKKKGEGNAKNGNKYLAWAFVEAANFALRCCPEAKRFYERKKRKTNTIVATKALAHKLARACYHMLREQKPFDVSRCFA

SEQ ID NO: 42888 - protein, 415 aa, unidentified
MGQQRNKVCGVDIHKKFLVATILTRDGTKMQKRFGTDIDDLLNFRDWVIKENCDCVAIESTGVYWYPVNAVLENKVELILANAHQIKHTPGRKTDALDSEWIAEVALNNLIDPSRILPKEDRELRRLTRTRESLVKIRSQMKNQVHQGLESCSIKLSSVLSDSFGKSGRYILDGLIKGKNIDEIIAGIPSKRVKNNGDQIRSAIKIGLDQIQVFLIQSHLDTIDCLTKKLDEMDLEIKQRISGRKDDLKIVMSVPGIGFIAATTILAEIGNYQDFSTPDKLAAWCGIVPSVYQSADKLRTGSITKQGSKHIRWIMVQVAQAAAKKKGSKLRKFFLRVKAKKGHNVAVVALARKILCILHHLLMNREMYQEEGVEKSRPSRLDWSSATTDKMSLQTMIEIIAKAGYEVRKTERDGG

SEQ ID NO: 42889 - protein, 427 aa, unidentified
MNDSSGFGFAATIGLDWADQKHDVWLRPADGSRPEHVQVEQSAEKVHAWVAGLRARFGGGRLALGVETSRGPVISALMAYDFIVIFPVNPKALKDYRAAFCVSGAKNDRTDAQLLEEYVRLHGQKLKALEPDDVLTRKLAGLTEARRQLVDERTRVINQTHARLKMYYPLAEQLVGAQLNTVMAADFLLRWPDLESLQRERADKVRAFFYGHNSRSKKRMEARLEAIKAAQPLTSDAAIVEPSRALVSALARVLKSLHQSIGQLDRAIEQAMDAHPDAAIFRSLPGAGPALAPRLLAAFGSRRERFESAEAVAQFYGIAPVVVQSGNMEVTRMRHRCPKFGRQTFHENASWAARTEAWARQYYQGHRQRHDEHHQACRALAYKLIRIYFACWKNKTTYRSDRYEEALKKHGSPISSRLSVQPVNKIL

SEQ ID NO: 42890 - protein, 353 aa, unidentified
MNITTVGIDLAKEIITVYAQDAVGRCVMSRNFKFKELAEWLVQLPAGCVVGMEACSSAHHWGRRMQAMRLEPRLMAAEFVQAFRKSKSAKNDHNDAEAIAIAVRQPTMRFVAIKNEAQQSRLAWHRVREGWKEERTALINRCRGLLLEFGYPIARTAAAFQRGLKTGLQEETLPPNLRRLLAQIDVQLQQLDQQLAECDREIAQSARDDEAACRLRAVTGVGVITADAVCASVGNAHDFKNGRQFAAWMGLTPRQYSSGGKTQLGRISRRGDSYLRSLLVQGARSSLQATLKKAPDKLNRMQQWIIRLYGRVGYHKTLVAIANKNARQLWALLAKGETYDLNAWQKYAIGEQS

SEQ ID NO: 42891 - protein, 411 aa, unidentified
MELSPLYKRVIGLDVHQAQITACALIEGPDGTTQIERRTFGAFKRDRRALADWCASHTPDLVVMESTGIYWKSPYAYLEKVGIRAIVVNARHVKQVPGRKTDVADAEWLATLARAGLLRASFVPPAKLRALRLVSRQRQKLGGQLSSEKNRLGKVLADAGIRLGVVVSDLHGKSARAMTKALIGGATPEAALVHASKQLKAPRKEIEAALDGELGATQRFVAAEILRHIEELEAQIARFDKHLLDNLSEPVELNALALLQTIPGVDRIGAAMLLVEIGITMSDFRGADALASWSGLCPGNNESAGKRRYGKSRKGNPYARRLLCEFANAAIKTRCAIQAKYQALVIRTGRKRAIIACAHKMLRIIFHMLSRKQAYRDTTVDIEALIVKRNAPRWIRALTRHGLLPSAAATR

SEQ ID NO: 42892 - protein, 354 aa, unidentified
MNQDAYAAYISIDWSDRKHDIYLYDCATGAAEESVIGSQPDAIQAWVEGLRKRYGNTPLAVCLEQKRGSLIYALCQYKNLVLYLINPRTVSNYRKAFQSSRAKSDPIDARILVELLRKHQDKIPAWQPESSQMRALRQWVESRRMLVGEKVRLTNRITSALKNYYPQVLDWLEDKDTQVFCEFLERYPSLKAAQAATVAELTQFFRVHHVIRRSAITRRIEQIAASGIPLTEGPGIVEPMQWLVPTSIGQLKPLLLRLTELTLTLKFDRCFTALPDADWFAALPGAGEHLAPRLLAAFGEGRSRFNSAQQMMCYFGIAPVRESSGKKNWVHWRWSCPIFLRQTFVEWANQSRHH

SEQ ID NO: 42893 - protein, 407 aa, unidentified
MLLVGDDWAEEHHDVEVQDEAGRRLARARLPEGVGGVARLHELVGEHLAGDADPGQVAIGIETDRGGWVQALIAAGYVVYAINPRQVARYRERHGTSGAKSDAGDAHTLADMVRTDRHQLRAVAGDSEQAQAVKVVARAHQTLIWERHRHLLRLRTALREFFPAALDAFGDLTAPDALELLARAPDPASAARLSRAQITAALKRARRRQAEGKAAGIAAALRTVHLAQPPAVAAAYAATVRSLVTMIAAFNTEIAAMEEQVKVCFGQARDAEIYLSQPGLGPVLAARVLGEFGDDEHRYAGARNRKNYASTSPITRASGKKKTVLARYIRNDRLADALHQQAFCALTASPGARAYYDQLRRRGQGHHAALRQLANRLVGILHGCLKTGTTYDEHTAWAHHQARQTAA

SEQ ID NO: 42894 - protein, 386 aa, unidentified
MIYIGFDISKYKHDCFIATETINQQFSFENNQVGFNELLIHFKPYPKQEMIIGLEATGHYGDNLKSFLTVHGYTFMENNPFLVKKFSDSKSLRKLKTDKKDAKLISEYMRTVDFKAYHNQSYHIQRLKSLTRYRSKLVSTRTRFYNMITKSLDIVFPEYKPFKDEQGYSELTLYLFSKYTSTNKIKSLNEKHYDSLRRLSMGKFSYPKFIKLKELARNSIGSNNETHISMIKDNIKFIKSLNSQIEKTEKEIEIIMQNYPTNFQVIKGIGINSAATIIAEYGDISRFRTAAQMTSFSGLDSRISESGTMASTGKLVKRGSKYLRATLINVCQTLYIHNRVFYDYYIKKKNEGKHHRVAMVHLAKKLIRIIFHLEKNNIPYDQSLLK

SEQ ID NO: 42895 - protein, 395 aa, unidentified
MRAIIGVGIDCGKNQHTVCISDNFGKQYGNTFVIHNFQKDIEYLIEKIFEVESEIGKSDIVINLESTGVYHLPLYSGLSKIFQTNIYQPKQIKDRSSKNIRKSKTDKKDAKTLSRIHLEITPPHTNYDDKEMYDIREIIRQRFCYKDIRTNLKKKFRRNLSIVFPNFDSLFKNPYTNVAWNLLKTCPTPEDVIRLGRDEISEIMKKAAKGQNLKVKPEDLIKLAEETIQCDISNRGSLFGLKTLMEDVEYFDKRIEQIDQEIKIYWDKVRRNLYFPTHPGIDMVKAAALHTEFGGFDRFSKPDKAVAFAGIENFVYISGDSKKFNGSMTKAGSPIIRRVFWEILSSPTIKMPKITDHMNKLKEKGKHNSIRIHSASKKLIRILWAMESHKQSYIW

SEQ ID NO: 42896 - protein, 334 aa, unidentified
MDQETGECGERQLNHSDGEAEKFYRELQQRGVSVRVGMEATGHARWFERLLAELGFELWIGDPAEIKRQRVRKQKTDREDARLMRKLLLENRFPRIWVPSPENRDLRQLLWHRHRLVQMRTRIMNQLQAVAMNEGYRWKKKLFSQQGRALLEKLSLAPWASRRRKELLELLDQLDPKIAELTAAVEREAHQRPEVELLMTHPGVGSITGLVYALVIGTPDRFPCGKKVGSYTGLIPCEDSSAGRQRLGHISKQGNSLLRFLLVEAAQAAARCNPDWRRRYLHLMMRREKRIAKVAMARKLAVRLYWMWRNSWQYSQLVEFGSNAGKLVTGHGVK

SEQ ID NO: 42897 - protein, 377 aa, unidentified
MTQFPVSTSNEQSIYAALELSKNSWLLAIQVPGRDNPSLYPIGGGNAEGLMAKLDAARNRLAKVSGQTPKVTLCYEAGYDGFWLTRFLEQRGIECLVMEPASLQVNRRARRVKTDRIDVENILHTLIAWCRGERHVCSMVVIPSVEEEDLRRTHRERNRLVRERTAHINRIKGLLFAQGIRGINVMKDYKTLAPAELITGNGRPLPKRLGREITREIERLALVQEQLVEIEHERDQAPTPCAATERKRHDLLRLSGIGPTISAILAREVYYRRFANRRQVASYIGLAPSPYDSGDGRRSQGISKAGNSLARYSLIQAAWLWLRHQPNSALTQWFHHRTEGQSKRVRCIMIVALARKLAIAFWRYLETGLIPEGAVVK

SEQ ID NO: 42898 - protein, 519 aa, unidentified
MKNKSIYQNQCPQLRELFASAQSPAQILIVSLDFARDKHLVLFCNGLGDALIKPFPVHNDQAGVDLLNQRIRKTIKRCRIDPAHVLLGGEDDPSYAKNFLWALHQNWLVLRVNAFKAKKYRENIQASSDELDLLGIAKMLLNREAAVVFNDRDSTDQAEHYYALKALGRARDALVRDQTRLSNRIHSHVKILFPGFLSDSKNNPIKPFSNACLDLMEKSDFTAAQYAGRKNAPLARTLKKLRLRQPEQQASQLIANARASLPPAPHMIQAHQDTLGCLVSTYRTIKQNAARLENRQAFHLAQVPAVLLTSLPGMAIINSSALAGELGSPDQLGSRGQMASYAGIIPRIKQTGGPDSPSRTFSVGHHCNHRLKNHLVRAATAIGQLHGPPEIKEDWQRLLEKDQHAGFIHARRLLATSKALMINGTIWLPESLRHGAGAGDEARQLFRQQMFEYLQELWPGLRNKWAEHKALELAFAPENPLGKWRQVIQQLYRIQLPLEELDPCMEQENRSASCEDGNA

SEQ ID NO: 42899 - protein, 415 aa, unidentified
MALKIVYKICCGIDVHKTFVVACIASTDSKGVTTYEHHRFSTYTKGLKDLLQWLLKHNCKDVCMESTGKYWIPVYNILENDCTIVLAHPKYVKAIRGKKTDKKDAKWIADLFKHDLVAGSFMPPADIRQLRDLMRYRFKLTCFMSSEKNRLQNCLTVSNIQLGNVVSDTFGKSAQAILDKLLENPADTSFDLEPLVYKSLKKKLPELRDAIDGYITPEQAGKLKVIKAHYENLESRKAELEELILALAAPYQQELAILQTAPGIRSDFTAIGIISEIGTNMEAFPSAKHLCSWAGLTPTNNESAGKKKSVRVSKAGCYIKPLLVQCANAVVTSKKHPEIRNRYLRLKKRRGHKKAIIAIARMLLTALYHMLKNGENYNAELYRKSDLPPVNQEITVEQAIIIARNQGYKIKSATA

SEQ ID NO: 42900 - protein, 349 aa, unidentified
MNEYIAFDSHKHYTWVEHERVSTGKTRQYRVEHAPGAIRRALAGCQPGTAVALEATANWYWIVDEIEQARLVPRLVHPRKAKLMMGMINKTDKLDAHGMNQLQRNGTLPTVWIPPGPLREVRELTRTRVVLGAQRTLWKNRITANLAKYGRPPSQWSDPYGKSARRELQTRIEGLPKQPCWATRQMLRQLDGLMEQIEEFERRLQELVVVTPAMQWLKSLPGVGVILAATIELEIGDIQRFPSAEHLAAYAGTTPRVHSSGGHTRYGRTRPDVNHYLKWAFAEAANSVAVNHTRCPKRHVSQLYRRLRERKGHSRAVGAVARHLAEASFHVLSRRQVYCDPALVRAREV

SEQ ID NO: 42901 - protein, 324 aa, unidentified
MFYLGIDVAKAKIDCCLILENSANKKKTKTFSNTPKGFEQLQIWLNQHAATSTQTIILMEATSIYHELLAKYLFDKGYQVSVTNPARARYFAQSMSKLNKTDKVDSEVLARFAMTANLHFWQPLPKHIQLLNALLDRRAVLCEDLQREKNRLEKAESTFTMEPVLQSLHKSIEQLNKHIQGIDQQIDDHIDQNPDLKNDKELLSSIPAIADRTSLLMLSFLRSHTFERASQAAAFVGLVPTQKQSGSSIHGRSHLSKAGSSKIRAGLYMAAIVATRHNPHIKGMNERLLANGKTKMMAIGAAMRKLVHLCYGVLKHQQPYQADY

SEQ ID NO: 42902 - protein, 407 aa, unidentified
MTNESTEVIAGVDTHADTHHVALINEHGKHLADQKFAATGSGYRDIIDYITRDGPVAAVGVEGTGSYGAELARVLATEGFHVVEVNRPNRQERRLRGKSDPLDAYQAAQAVLSERGTSTPKTRNGYVEALRVLRTARTSAMKARTAVLTQISSLLVTAPEEVRAKYRGQGTAARLTAMGGSRPADDPADPATATAITLKRLAKRHQHLTVELTDCDTDLSRIISENAPALMEITGVGTAVASQLLVTMGDNPERLTSEAQFAALAGVAPIPASSGKTTRHRLSRGGDRDANAAIHRIALVRMSKDQRTRDYVSKRTREGKSKREIMRCLKRYIAREIYRVVRNPRPVPLTNDLRPQRQAHHITLTTAAQQLGVWPSTISRIERSSSRDHALTERYRTWLEGQTKITA

SEQ ID NO: 42903 - protein, 347 aa, unidentified
MEYFAGLDVSLEETAICIVDETGRIVREARAVTEPEAVVAFFGACGMKLKRVGLEACSLSAWLHAGLMEAGLPVICIETRQAKAAMGAMPNKTDRNDARGIAQIMRTGWYRAVHVKTPACRSWRALLTARRMVLNKRRDVENGIRALLREAGLKVGTPSRKDFPTRVRELAADDVVLAGLAESLLSVVAVMTQEVEALTKRVLDEVKVEPTCRRLMTVPGVGPLTALAFRATIDQPDRFRKSRDVGAHLGLTPRRYQSGETDVQGRISRCGDELARTALYEAAHSLLIRSSKWSALRAWGMAVAKRRGMARARVAVARKLAVILHRMWADGSEFRWGKQSATSAAAA

SEQ ID NO: 42904 - protein, 420 aa, unidentified
MKVVYQTCCGVDVHKSFLVATIIKTTSGVEPSYQKKRFSTFNNSILQFKNWLIENQCRDVCMESTGKYWVPVFNLLEDDINVTIANPKWVKAVKGNKDDTKASKWIGDLFRLGLVPGSYIPCKPIRILREFTRYRYKLISCRTSEKNRYQNALTVCNVALDSVVSDIFGKSATSVIDYLIEQSDNSINHEEIASRLLRSLKKKSDSVIESIEGYQMTDSQKYRMRLVRAHLDYITSTINDIDTMLDSLIAPYENAVQLLCTIPGVDRNSAITVISEIGTDMTPFSNSKRLCCWAGLTPGNNESAGKKKSVRITRAGVYLKPALVQVAHAAVKSDKSPYYKKKYERIMKRRGKKRAIIAIARMILTAIYQMLSAGETWNPTDLYKIDMPEPLKEKQKEKAIKQAKKLLISEGIISESQLAS

SEQ ID NO: 42905 - protein, 355 aa, unidentified
MNGTKYVGCDVHTATISIAVLSYEGKLIMESVIEAKGATIIQFIQGLRGELFLTFEEGTWSTWLYDLLQPHVTKIIVCDPRRNALLKEGSANDRIDARKLAELLRANLLRSVYHGQNGLRTLKELARAYLTISKDLTRVMNRVKAIFRSWGIPCAGQSVYHPRHREEWLGKITQASVRHRAEFFYKQLDALVLLRKQARQELLGEVKKYPAWKLLRSIPALGPIRVAVLMAIVQTPHRFRTNRTLWKYSGFGVVTQTSADQRYVNGQLQRSKKPAFVRGLDRNHNHDLKFLFKSAAVQASTRNGPFLEFYEALVAKGMRPEMARLTLARKIVTITWNVWKKGVAFDAKYLKPQTA

SEQ ID NO: 42906 - protein, 372 aa, unidentified
MTETVYCGVDFHARTQTIAYCDSANGEIQLAQLDHRKDDVRGFYSQFTGQVIVGIESGGYSSWFEAMLEELGHTVWTGHATEIRRRANWRQKNDRRDAELILEMMLRGDFPRIHRHSRESVEVLRMLRYRARLIKMRTMICNNLQAIAISSGLTERSRMLSRATQQRLKSAHMTPAIKQQSEDLITLLVPINERIGKVDRWLKDQASTDDRVKLLMTHPGVGVLTALGVVHTLEPFNRFSKQRSVVAYVGLEPMERSSAERKRYIGISKAGSRLLRFLLGEAAHVAVRFDPELKQFHERVGKRRGKAKATVAVARKLLIRCWIMLRENVDYAEFRRRGVEARLARLGHRPTMPEVVIERPASSTSDGDLDVA

SEQ ID NO: 42907 - protein, 414 aa, unidentified
MIEVVNKACGLDIHKLFFIATILSRSGEKQQQNLRRDDEGILALKNWVISEKCDVVVCESTSDFWVPIYDSFIDHLPVIVGNARDMKAFTHKKTDKIDSKVIAQPALNNMIQPSRVFPKDHRDFRSYVRLRLTLVQKRTDLKNEAHSILASEMLNLKNVLTDIFGKNGRMILSGISSGKTVDQIIASLSPNVRTKSAQIREGLDKEISQSAAFRLQICLKVIKSLDDEIEALEKEIFNYAYINHKREMEILMSVPGIGELGAATLIAEIGNFTDFSFGDKLASWPGIVPNVYQSADKYYNGRITKRGSKTARWILIQIAQAAARTKNSKLKEFFNRKKKSIGHSKAIVALARKIATIIWHLITKDEMYEDEKGYKKGEIQKKKIVETEIFSVDERIKIISGIFAIMEKEGREST

SEQ ID NO: 42908 - protein, 341 aa, unidentified
MRRWIGVDLHKNQFTVCYLNKSGENNLQVFKVAAASIEAFKNTLSKNDEVAVESTGNTAYFVRQIESCVKVIRVINPAQFKVISSSVKKTDEHDAIIIARYLSKGLVPEVRMRSKEESQITSLISTRDKLVKLRTVLKNKIHSILNANGIVTKREIFGSEKGLEKVLAMDLEVSYQFELKIIVEQIRSLNKSINEIGKELAQRSKKIDGHKSLTSLTGIGDISAAVLLNTIGNVNDFKDDKKIAAYFGIVPRIAVSNETSHYGKITKMGNKIARTTLVQSTMVAIKYNPYLRSFYFRLKAKKGSGKAIIATARKFLTIIYRTLKNKWVFEDFDKFKLVQSS

SEQ ID NO: 42909 - protein, 416 aa, unidentified
MKLFVGIDVSSEKLDVCFLTDDDQLSILSEISIANDIDGASLTRKMILEFNENYHFTQIVIGMESTSMYSFHPSIFFHEDEELKKLNTLVTIENPFRIKQFGRMFDEDKTDRNDALRIADFLRIQRFTTSPIKEEKYMALQRLTRTRYQLIKQLTRTKQHFLENLTYKCNTLAREMKDESTSLFSTTVISLMTENFTLDELAELPLEAFRDLLQKKGKGRFKQPEKIVKAIQRAIRSSYRLGAVAQESIDVVLGVLVCELRALEKNIKELDKAIEQLVVIIPEYQCLTSIPGIGKVYAAGLIAEIGQIERFEDQTKLAKYAGLSWKVKQSGNYQSQNTPLTKQGNRYFRYYLVEAANSVKNYLPEYRAFYQSKYKEVPKHQHKRALVLTARKFTRLVDTLLRNHQLYTPPRSVIDK

SEQ ID NO: 42910 - protein, 413 aa, unidentified
MTDTRYAFYVGIDWASAAHQVVVLDHERRPVADRSVAHTGAALDECATWLATMAAGHSEQVGIAIEVPRGAVVETLLERGFHVFAINPKQLDRFRDRHTVAGAKDDRRDGLVLADSLATDQPAFRRLRPEEPAVIQLRELTRVDEDLQDEERRLSNRLREQLQRVSPPLLAFCPGADEPWVWALLAQAPTPEQGRRLTRAAVARLLAEHRIRRVTADEIVAQLRTPPLFVAPGTVAAVAEHISLLVPRLELLRAQRRHCAGRIERVLKDLEMPAEGQEGHRDATIFRSLPGAGRVVVATMLAEASRPLADRDYHALRAQGGVAPVTRQSGKRHAVHMRHACNPRVRQALYHWARVSTQYDPATRRHYDALRGKGHSHGRALRGVADRLLALLVAMLKAGATYQPERRRAWATA

SEQ ID NO: 42911 - protein, 414 aa, unidentified
MKTCLFVGVDTHKYSHTAAVLDGYFEVVATISFDNSTEGFNHLFDKLNKLVSRRDLVFGLEDSQGLGSFLACYLISKGHLALEINPVYTDRSRRRTVSREKSDKRDAIVIAKTLIRERANLHPVRIERNSIALREMVGYRQTLVNESTRIKNRLHVALFNQYKGVLGQFGSPFGKCALAFFARYPDPFLLKKVDPDTLSVFLKTHSKGRFGDKKARAILSSIDNSIADSLTGTRAHIIESHTKRLVQIDKELKKIQEVLEELVEASSYGCLTSIPGIDTVTASKIISGVMDIARFSSSSKLARFCGIAPAEKSSGRKEKYEKSKYGNKSLYSTIYFMALAHISRTRDGRDKNPVSRAYYLKKISEGKTKKEALTCLARRLVDLIYAVMRDRSIYNFSKSRFTKQNDSVINTAVA

SEQ ID NO: 42912 - protein, 344 aa, unidentified
MGQFVGLDVSLHETAVCAVDADDGHVIWRGSCGSTPEAIAATVGEHAPTVVRLGLETGTLSPWLARGLEALGLPVVCLDARQAKAVLSLRINKSDANDAHGLAELVRSGWYRQIQVKSQAAYQLQALVGARAQLVKIKVDLMNQMRGLLRTFGLVVGKGGGGKFDERVRELIAEDGALRTPIEALLCSWRQVCEQIGVLDRRLVAVAKRSATIRRLMTVPGIGVVAATAYAAMIDDPSRFARSASVGAYVGLTPRRHQTGELDYTGRISKRGDPLVRSYLYEAAGVVLHRMRRPSWLKSWGRKLVNRLGFKKAAVAVARKLAVILHRIWIDGSRFAWSREQATV

SEQ ID NO: 42913 - protein, 324 aa, unidentified
MSLPCLGIDVGKKKLYAALLIDPTKKPKRKTVNNDEAGHQDLLDWLRRQRVERVHACMEATSTYAHPVARLLYQQGHTVTIANPKQVKAFANSLLVRTKNDRVDAYIIAQFCAERRPRAWTPPPPEVEELQALARRLDALEKMLSAEKNRLETAPSEVVEDIKAHIAFLRQQQESVMEKIRQHIEKHEHLRRQRDLILSIPGIGEKTAAILLAEIGDIKRYKNARQLAAQAGITPKEYQSGTIQKKTHLSKIGNARLRKALFMPALAAITYNPAIKQFRERLLAAGKQKMAVVGAIMHKLIRFVFGVLHSGKPFDPDIASAQPT

SEQ ID NO: 42914 - protein, 381 aa, unidentified
MELHRRNDPTPDGGEGMRIDIGVDLHTTQFTVYARGEEKSGVNGQYLTNEEGYRTFLRKLGAWTRSGHDIRIGVESTGTTRYFKHRMEEKGYPVIVINTMKFKVIHESVKKTDRHDAATIAEFLSKDMLPESRLCSEASEHLRRLLKVRSTLVRARVTVKNQIHGLLVSMGMEDTKASLQSKRGRQRILDTLAGAGNGLVVQPLCATIDRLSENVKAIEGEIEKLVAGDRVVELLQTIPGCGPVTACTIRAYTDDIGRFSSDKKYASYAGLAPWVQCSNETEHYGRITKRGPEELRTAFVQLVMGIKRSRQSASWRLMERYEAMKRVKGSGKSIIATARKLSRIVWVMLTRGEEFNVSLMTDRTLERLSNSMRAAVVSLSA

SEQ ID NO: 42915 - protein, 351 aa, unidentified
MIVLGADTHKRSHTVAAVAAATGELLGEQTVAVGRRGFDALLRWGRGLDGERVWALEDCRHVSGSLERFLVGRGERVLRIPTHLTAKARGSARQRGKSDPIDALAVARAALQEGLESFPVAHLDGPELDLRLLVDHRERLVRQRVALNSTLQWHLHDLWPELELPGSSLFYGRWAPRVARRLARAEQTMRVRIARDELRRIRELSQTIKALEREIAGLVATIAPQLLSEPGFGPLTAAKLVGEIAGAHRFATAAKLARAAGVAPIPASSGNTRRQRLDQGGNRQINAALHRVIVTRARCHPATQDYIARRRAEGKSTREAIRCLKRYLARQVWRLLQPPHPVENKLSPSIS

SEQ ID NO: 42916 - protein, 361 aa, unidentified
MAQAKTWVAFDVHVSGVVAAMLDRDSGELRVRRLPGSSDEVAAFAGTLAGPVRATYEAGPTGFVLARKLRAVGVDCVVCAPGLIPRGATDRVKTDRRDAERLVRLLVAGELHRVAVPSVEEEALRDLVRAREDLRGDLMRARHRLAKLLLRHEVRFDGPQANWTQAHLGWLAGVRMGQPASQRALEDYRGAVHALMVRREQLEAEIARALPESPWAQTARRLMCMRGIDTLTAAGLCAEIGDFRRFQHPAQVMSYLGVTPSEHSSGERRRRGPITKSGSQHARRLLVEAAWHYRRAPRVAGSLARRQRDGEPEVIALSWKAQRRLHHVWARMEARNKRRTIIAVACARELAGFCWAVATTD

SEQ ID NO: 42917 - protein, 466 aa, unidentified
MCPGRLAATKVQWEVCAPSASTGIDDRRGGPGKQRGEAMTDAIEWFAGLDWASEMHRVHLHDRTGRNAGELDVPHGGEGLTRLCDWLVEKTGAEPAQIAVAIEMPRGPLVEILLERGFQAYAINPKQLDRFRDRFSPAGAKDDSRDADVLADSLRTDTKAFRRLAVDDPLVIELREWSHIAEELQQERIRLANRVRHQLWRYYPQALQLTEDHGADWFLALWQLAPTPAKAAKLHKETIARHLATHRIRRLDAAEVVRILRAPPLTVAPGTTEAASAHIRTLAPRLKVVNDQLKAAQHKLDELAALIVPPTPQPSAPAGEPHEPGQSYEQRDGAILRSMPGLGRIVLATLLGEASQLLQRRDYHSLRCLGGAAPVTRRSGKMRLVIRRYACNWRLANALYHWARGAMQREPRWRARYGALRARGCSHGRALRSIADQLLALLCALLSRQELYDPHHATRTPQPAGP

SEQ ID NO: 42918 - protein, 338 aa, unidentified
MRYFGLDVHKDTTTACVISAGGKILKEMEVPSDADGLSAIREYMRNNEYCVMMETSTYMYPLYRSFEELGIETHAVHAASLKTVTQSVKKTDRNDAHIIGETLRLWKRNEGIRLSMAFIPTREQCELKDICRYREEITVKLGNEVRRIKSHLHRNCQQMPSWFRDMDTKKARSYIRRTWPEDLTLMKRLDMYERLLEERNTVAKNIISRMNDDMNINLLEEIVGIGRQTAIQIMSMIIDVNRFGDSEKICAYFGMVPRVRDSGSKKYHGRMTKNGDRMMRMIMERVTLSHIQRCDSFITRYYKRKISEMGVKKALTAASRKMLTAIYAVLRSKRPFAP

SEQ ID NO: 42919 - protein, 320 aa, unidentified
MRNAVGLDISKLTFDASAMVGKTEHSAKFDNDSKGLNQFSDRLKSLGCQNLHICMEATGSYYEEVADYFAQYYSVYVVNPLKISKYAESRFKRTKTDKQDAKLIAQYCRSAQESELVKRQKPTDEQYRLLRMTAAYAQIKSECAAMKNRHHAAKDEEAAKAYAQIIKAMNEQLEVLKEKIKEQTEKPNCKEGVKRLETIPAIGRMTAAVLFHHLTSSKFETSNKFAAFAGLSPQQKESGTSVRGKGKLTKFGNRKLRAVLFMPAMVAYRIRAFPDFIKRLEEKKKPKKVIIAALMRKLAVIAYHVHKKGGDYDPSRYKSA

SEQ ID NO: 42920 - protein, 341 aa, unidentified
MITTIGLDIAKSVFQVHGVDAAGEVVIRRQLKRRYVLAFFQKLPSCLVGIEACASSHHWSRELQALGHTVRLMPPAYVKPYVKRQKNDIADAEAICEAVTRANMRFVPTKTPEQQSCLMLHRTRHLFIRQQTAVINSIRAHLAEFGIIAPVGRKGVTELLHVVADPSDKRVPEVARACLAALGTQLLRLKQQILEFDRMIMAWHRSNQTSKRLHYIPGVGPILATALVASVADPRTFRSGRNFSAWIGLVPKQHSSGGKDRLGSISKQGDRYLRSLFVAGALAVIRYAKVHGTKHRPWLTALLGRRPTKVAAIALANKIARMAWAMMAKGERYKQPVALAA

SEQ ID NO: 42921 - protein, 370 aa, unidentified
MGKSVLYVGLDVHKMSVDVAIAEAGSGGEVRYYGRIGGDLEALDKVTRKLQAQGAELRFAYEAGPCGYQVYRHLTGQGWPCLVAAPALIPRRPGDRLKNDRRDALTLARLFRAGELTPVKVPDADDEAMRDLSRAREDAISVERRAKQRTGALLLRHGRRYPGKTTWGRGHWRWLLQQVMEHPAQQIVLQEYLDAVREASARVQRLTGQIRELIPQWRRGPLVAAYQALRGVSLIVAVTVVAEVGDLSRFNNPKELMAYLGLVPSEYSSGASVRRGHITKTGNGHARRVLVEAAWAYRLRARVTRPLLQRQEGLPESIRQLAWKAQLRLCARYRRLLARGKAKQTIVTAIARELAAFIWAIGQAVEPVTT

SEQ ID NO: 42922 - protein, 315 aa, unidentified
MVNVPCFIGIDVAKAQLDIAIRPSGERWAVPNDASGVTMLVDRVQALQPTLIVLEATGGLERAATVALATAGLPVVVVNPRQARDFARATGQLAKTDALDARALAHFADVIRPTPRPLPDAQTQELRALLGRRQQLIGMRTAEQNRLAGTSERLTQDIKAHIAWLNTRIATLDDDLETMLRASPLWRENDDLLQSVPGIGPVCARTFLLELPELGTLTRQQIAALVGVAPLNGDRGTLRGRRMMWGGRAHVRTVLYMGTLVATRFHPQIKAFSQRLLAAGKRKKVALTACMHKLLTILNAMLKHRTSWQAQEVQN

SEQ ID NO: 42923 - protein, 384 aa, unidentified
MSNIASACAEASVGRSLETERHQFLYVGMDIHKDNHTAAATNCFGQNLLEVEVSNSKKDFDDLVARVERLSKAENLKPVFGLEDSYGYGLRLAKHLYGKGLLVKMIAPVLVDRERQYETHPEKSDSLDALGVAKVLIQRIDRLPNYSLSKNDEISKNIKELTLDREFLVKEQSRLKNQLHRLLHKAYNSEYRTKFKDPFSLKALRYWRGHPVPQKRADIMGNISIIKNQIRRKIKRLLDIRKEAKEIEQELGCLIQQTNQKIETLNGCGTVLASQVLAEVRNIDRFQSPHSLAKYAGLCPREKSSGKTFRHIKTKSGNRRLNMAIHRIALSQISKSGNQYAKTYFQRKISEGKTKVQALCCLKRRLIDIIFMMLKYKQSYNYIA

SEQ ID NO: 42924 - protein, 290 aa, unidentified
MRSIGMDVHRSFAQVAVLSDGAVTENFRVDLEHDAVVAFGRTLRPDDEVVLEATENTAAIVRLLTPFVARVVIANPLQVKAIAHARVKTDKVDAAILAQLHAAGFLPEVWAADDATLALRRLVSERVAVVRSIRRAKSRVHAVLHANLIPKYEGHLFGKGGRRWLEKAPLPKSERDLLRRHLDELDWLRARLEGLERDLIAFALDDARTRKLMSVAGISAVIATAVVASIGDIERFATPQKLASYFGLTPRVRQSGAGRAIHGRISSMGTRRPAPCWSRRRGRRRALRGH

SEQ ID NO: 42925 - protein, 442 aa, unidentified
MSQRKPVFELTHPNAAGIDIGGASHFVAVPPDRDDEPVREFPSFTEDLNRLADWLTACAVDTVAMESTGVYWIPLFELLESRGFTVYLVNARHVKTVSGRKSDVLDCQWLQQLMSFGLLNGAFRPKGDLCALRCVARQREMLLAYQSRHVQHMQKALTQMNIQLGQVISDVAGETGQAIIRAVLAGERDGQALAKLKNAHIRASEEDIAKALQGNWREEHLFALKQAVALYDAYAGQLAECDRQLEKMLADLARHEGQPGKPRRRGKAKNAPKFDMRSHLFQLCGVDLTRIDGIDVTTAFKVLAEVGADLSRFKSAKHFASWLGLCPGTKISGGKVLSGASKRTANRAAQALKLAAAALRTSQSALGAHYRRLCARMDKPRAVTACAHKLARLIYTMLTKGEEYVDQGQAQYEERYRQRVVKTLTKRAEQLGFQLVPVADAA

SEQ ID NO: 42926 - protein, 354 aa, unidentified
MIIIGADYHPGFQQIAFVDTDTGEFQERRLEHREEAEKFYRDLKARGTSVRVGMEASGHARWFERLLSELQFELWIGDAAEIRTKRVRKQKTDRQDAQLILRLLMEDRFPRIWVPSWENRDLRQLLWHRHRMVQARTRIMNQLQAVALNEGLRCKKRLWRDKGREQLESFRLAPWASRRRRDLLELLDRLTSTIAELTQAVEQEAEKCPEAQRLRTHPGVGALTALAFVLIIGRAERFQCGKQIASYLGLVPLEESSGQRRRLGHITKQGNSLLRFLLVEAAQVTVRSDPEWRSKYFHLAMRRGRKIAKVAMARRLAVRMYWMWRKGWDYEQLNKFGSHAGQPGHRDGVRLNTE

SEQ ID NO: 42927 - protein, 403 aa, unidentified
MIFVGDDWAEQHHDVYLMDEAGRRLASRRLPEGLAGIRQLHELIAAHAEEPDQAVIGIETDRGLWVAALIAAGYQLYAVNPLAVARYRDRHHVSGAKSDASDAKLLADLVRTDRHNHRLIAGDSADAEAIKVLARAHQSLIWARNRHTNALRNALHEYYPAALVAFEDLAHGDTLGVLDRAPTPQQGAHLPLGTIQSALKRGGRQRNIAARARQIQAALRSEQLVAPAPVTAAFAATTRAAVGIIAELNRQISELEATLAEHFDKHPDADIYLSQPGLGVILGARVLGEFGDDPNRYTDAKSRKNYAGTSPLTVASGRKRAVLARHVRNRRLYDAIDQWAFCATSSSPGARAFYDQHRAAGDTHHQALRALGNRLVGILHGCLRHHTVYDEHTAWDHRTQAAA

SEQ ID NO: 42928 - protein, 334 aa, unidentified
MKQVKLIGVDVDSEELVCAMQRAGERQPLARFANTAAGHKKFIRWATKGGHAARVCLEATGIYSLEFALALHHAKNVEVMVVNPRAIKDFTRACMQRAKTDAVDAGGILDYLERMPFVTWQPPTPEVLELQAINRRIVQLNTELTREKNRRHASEFAGASADAIAHDIEVNIHHLERRIERMHDNGLKLVRGVPALATKLAHLVSTKGIAEASAMRLLGELLVLPDDLAAPQWVAHAGLDPRPYESGTSVHRPRRISKVGNRHLRAALYMPALVAIQHDPNVKAFYNKLIAAGKKPMQAVVAVMRKLLHAIWGMLKHDEDFDGNKFFKLTAKTA

SEQ ID NO: 42929 - protein, 342 aa, unidentified
MLYVGIDVAKNKHDVTALNVPGKTVLKPLTFSNNKAGFELLDLSFRQLNQDCLIALEDTGHYAFNLLNFLHEQGYKVYTYTPLLIKEFAKSLSLRKTKTDKKDAHGIALKLLSDLNREQFQHDNRQVELKILARHIHRLKKKQSDWKVQYTRCLDIIFPELDKIVGKHSEYTYQLLTCYPNPQKRLEAGFDKLIEIKRLTASKIQDILSVAPRSIGTTSPAREFEIIEIIKHYKRLIDKAETCVNDLMAEFNSVITTVTGIGDRLGAVILAEIRNIHAFDNPAQLQAFAGLDSSIYQSGQIDLAGRMIKRGSPHLRWALIQAAKACARFSPAFKAYLKTKLE

SEQ ID NO: 42930 - protein, 387 aa, unidentified
MTQVDDLSRSLAAFDQITSLVVVVEMSEASWLVAGLVPGVDRQPLKKLEPDPSALLRLLERWQAEAEKTGRTIGRVTLAYEAGRDGFWLARWLQARGIEVYVIHSTSVAVSREHRRAKTDRLDTAMLMRVFLGWLRGERGHCGMVAIPTLEAEDAKRPSRERESLVGEQTRIANRMKSALARLGIRGFKPKLRRAPQRLATLRTPEDLPIPPNTLDELRRDMARLAVVREQIEEIEQARLERLEQAPEEGPNAMVRLLARIVGVGIETADMLVREVLSRNLRDRRAVARYAGLTGSPDESGSKRREKGLAKSGNARVRRGLIQLAWRFLMFQKGSALAQWYRARTEGAKGARKTTMIVALARKLLIELWRMVTTGSVPEGVVLRPAA

SEQ ID NO: 42931 - protein, 428 aa, unidentified
MSENEFRYFVGIDWATESHETCVLDRERRVIDRRSVEHSGSGIAQFVESLMQQSEDHPEQVAVAIEIPRGAIVEMLVERQFAVYSLNPKQMDRFRDRHSVAGAKDDSRDAFVMADALRTDLALFHRVQLDEPLILRLRELSRAEEAAQQAAVRAGHQLRDVLIRYYPQMKTLCPGVDEPWFWELLEMAPEPKLAGKLTVKKVAQLLNKHHIRRFTAEEILAQLQTPPLQLAPGGTEAASEHVLLQLPLLRTLSTQRETIAKRIQQVLDKMGEKGGEKEGDRPEHRDVTILLSLPGVGRVVAATMLSEASQALAERDYHALRSYAGGAPITRQSGKKKVVVMRRSCNIRLRNALYHWAANSVRLEQRSRTHYAELRAKGHSHGRSLRGVGDRLLAVLIAMLNSGTLYNPELHASRSPHPPPSQTESRAA

SEQ ID NO: 42932 - protein, 382 aa, unidentified
MKNIYSSITCGGMDVHYKFSAVTFRDEAGRVVRRERLEHPQRCQLREHLNRWPKGLPIVLEASFGWGWLSDLLSEAGLEPHLSNCYKLEQMRKARGWVKTNKKDADMLSLLPFETTAWWEVWRAPLKVRNRREQMRFRGDLVALQTAIKNRIHAIFHRHGIFHQFSDLFKGQGRRFLAELCISGSVYLSSEALQAFRGQIKLLDHLRKQLADIQRILRRQLDKTPLIRRLMTIDGIGLILAHVLAAEIGRIERFRNHKGLASYSLLAPRADDTGQDDSGHSPLGRHLGTRGNKTLKWAFIEAAHGAVRSGGRWRVMFDRVTNGGTKDRNRGYIKVARELVKVVYVVWKKDVAYRDIPPQRPGANRKKSRSGTGQLLHPMVHA

SEQ ID NO: 42933 - protein, 341 aa, unidentified
MHMRKVTSLPGKGKSIFALDFDHYVSLDWSVRTMAAGHLRRRDTEPVVFERPSDILGLKEYFKTLKGTIVLTFEETTTAQWLYLELRDYVNRIIICNPYRNRLLSEGPKTDKIDAAKLVLLLRAGLLKEVFHCDDSLYDLRLLVSAYNDLVQAGVRAQNQRTALERGHGDSTTHASFILEHLDSSIALYRQSKKAYTTKFENFCRRNKQLKLLLAVEGIDTIGAVKILAVVVDARRFLRTGNYLSYCGLVQNEKSSGGRSYGRRKPQFSRTLKSVYKSATLAALKGHNPVREYYETLLARGVSEVHARHEIARYLATVTYGILKTGTPYDPYRWRKNTTVA

SEQ ID NO: 42934 - protein, 344 aa, unidentified
MILIGVDPHKSSHTAVAVDAAGHQVAQRRFVVNAGTFRQLMRWCEQWRERRFAVEGAGGLGRSLAQQLAAAGEYVVDVPSTLSARARLLATGGDRKTDAKDALHVAQVALFRHDLRPVVQENQTTILRLLTERRDDLVHERTRVLNRLHAVLRDLLPGGAPTGLSADKATVLMKGIRPVTATDNCRRDIARDLLADLRRLDRQVKDNEAEMREAVAATRTTLTTLPGLGTVLAAKVIGHIGDVSRFPTEHHFASYTGSAPLDASSGNNVRHRLNTGGNRALNSVLHTIAVCQIRDGGRGQDYYLRKISEGKTPSEARRALKRRLSNVVYRIMKRDQRTRLAQAA

SEQ ID NO: 42935 - protein, 409 aa, unidentified
MTYFVGLDWAAREHAVCVIDGRGAVIAQFTVAHTAAGMADLAARLVKVAPAAELRIAIERPTGLVVDTLVDGKFAVVPIHPNVVKAARPRYSAAQGKTDLGDAYLLADLLRTDGHRFRTLVPLSDETKALRGVVRVRDDLVGQRVATANQLRCLLEQFWPGAAEIFADVDSPIALEFLDRYPTPQSASSLGEKRMAAFLARHSYSGRRTAAELVERLRSAPASVAGELEADAKGECVRALVAVLRPLVAQIATLTATIEHAVDAHPDGKIVTPLFRSGRVCAAQILAELGDDRARFVSADHLAAEAGAAPVTRESGKHRAVTFRWACNMHLRKAFTTLADTTRHTNPWARAIYQRARDRGCEHGHAIRILARAWCRVIWTCWQQRVPYDPTKHRAARPFTLRLVDQEAA

SEQ ID NO: 42936 - protein, 315 aa, unidentified
MKAYHSFIGVDMGKYSFVVNVFNEKNTVEYENTSAGIAQFLQDNETSLSNALCVVEATGGYELALVYALTAKSYAVHRADARKVKFFIHSFGSVAKTDRLDAKAIAHYAKERSEKLILFVPSSEKMVELFHLVQRRNDLKTMLVAEKNRHKSPGLFSVKEGIEKIITLLEEELLNMTKKIKEIIKDSPVLQAKMNCLKSVPGIGDIVAFELIIRLPELGTLTRKKIASLAGLAPKANQSGKFKGYQRTGHGRSGIKPILFMAAMAARNSKTSLKEFYEKLVNSGKKKMIALTALMRKILVIANARLKELTIEAVA

SEQ ID NO: 42937 - protein, 418 aa, unidentified
MTEIPYAALIGLDWADQKHDVCLYDCATQTHEHCVIGARPEAIEAWAMQLRMRYGGQPIAICLEQKRGPLIYALCKYEFLVLYPVNPQTVSKYRQAFTPSRAKDDPTDAQLQVELLQKHHDKLTAWQPASPNLRKLQALVEWRRTLIEDIGRTTNRLVDVLKGYFPQAIDCFEHRDTLVFCDFLTQWSSLSRVQQVSDEQLQQFFCEHHSRYKDCNARRIECLRNGIPLTQDPAIVESSQLMVQALVSQLRSLLTSVRQFESEIDRLFNQLPDAAIFAALPHAGSNLAPRLLLAFGEDRTRYQSAQDLLQYAGIAPVTERSGKKCWVHWRWGAPRFLRQTFIEWANESRKASVWAKAFYQAQKQAGKTHQAAIRALAFKWIRILFRCWQDRVPYDEVKYLLALHQKGSPLIQKIASQA

SEQ ID NO: 42938 - protein, 321 aa, unidentified
METVEFVQVVSRGCGLDVHKKTVVATIDGEGLKRETREFGTFTNSLTELKDWLLENGITHVAMESTGVYWKPVYNVLEPSGIMVWIVNARHVKNVPGHKTDKKDSAWICKLLLAGLLKPSYIPPKEQRELRDLTRYRRQLIQDIASNKNRIIRILEDCNVKISSVLSNTSGVTATKLIEKICDGKSITMEDIDAVYHKKIEATKEELWEACNGIISDHHIYMLQTIRENNRHIERLINELNQQIKKVLSPYDNALERLREIPGLSRKTVEDLIAEIGLDMNVFPTEHHLASWVGVSPGNNESAGKKKVDELRMETSKPNLH

SEQ ID NO: 42939 - protein, 368 aa, unidentified
MKNLITTIFWWIGLDVHADRIQAAVFRGNEQDPLDEFEIVNDSAGLGRLGRKLKALVGKVRCVYEAGPCGYELHRQLKRNGIACDIAAPSLIPRKPGDRVKTDRRDAVKLGRSYRSGDLTTIRIPSEEEEAVRDLVRAREDAKEDVTRRRHRLGKFLLRHGHRYRDGRAWTNKHSRWLGEITLQDPHTEAVLEEYRIGLDQTVEQLARLTELVERAAERPEYKRQAGCYQTLRGVKTITAMTIVTEVGDLRRFCGAPELMAATGLVPSEYSSGGKERRGAITKTGNAHLRRVLVEAAWHYRHRPVASKALRERRKGQPREVVAIAERADIRLHRKFHKLIYKGKRSTVAVTAVARELAGFIWAIGQVA

SEQ ID NO: 42940 - protein, 382 aa, unidentified
MERGSLMLNTTTFVGLDVHARSIKAVALDVMTGETKSATFAYDAAAVAEWVGSLDPAAKCVYESGVTGFDLQKKLTALGVDCVVGAVSKMIKPSADRKRKNDRNDAEFLARMLSVGNVVEVWVPDDECEAARDLSRALDDAREDLKRCKQRLSKFLMRHGYAFSETTPTGRRKDNWTAAHWTWIRSISFPEKADGDALAYYVDAARQAMEDKARLERLVEAEASKPRWKRRVDSVRCLKGIDVTSAADLVFEAGEFSRFKSARSFAAWLGLTPSERSSGESVRQGGITKAGNKHLRRVLVESAWHYLGCSPHSKGLAKGQAPDPAARRHAAKGVRRLVERRRAMLERGVHKNKANVATARELACRRWGGGLHGRGAQGVTAG

SEQ ID NO: 42941 - protein, 391 aa, unidentified
MVYVGIDVAKDKHDCFITNSDGEVLFNVFTIANNLEGFTELYQKIVSVESNPDNVKVGLEATGHYNYNLLGFLIDKGLPTFVINPLHTNLFRKSLSLRLTKTDKVDARTIALMMMSGVNLQSYSDKSYHNEELKSLTRYRFDKVQERAKLKTSVSRLMVILFPELEKLVPTLHMASVYALMTEFPSANAIAEAHLTRLSNLLQQSSRGRYGKNDAIRFRDAARSSIGSSMSAKSLELKHTIKLIQELSSEIDEIEEQIKLIMNELNSPITTIPGINLRMGAMILAEIGDFSRFDSPDKILAYAGLSPTTYQSGQLDSSYSHMEKRGSRYLRYALFNAAKYVCIWDPTFSAYLAKKRTEGKHYNVAVSHAAKKLVRVIYQLEKTRQPYVKVS

SEQ ID NO: 42942 - protein, 453 aa, unidentified
MTNPTTGGHPDLKMVNSNAAAIDIGSTMHMAAVHPDACDMPVRAFGTFTQDLHALAAWFKSCAVTSVAMESTGVYWIPAFEILEAHGLHVILVNARYAKNVPGRKTDVSDAGWLRQLHSYGLLRGSFRPEAEIATLRAYMRQRERLTEYAAAHIQHMQKALMEMNLQLHHVVSDITGVTGMRIIRAIVGGERDPEALAAFRDVRCKSSIETIRAALVGNDREEHVFALTQSLALYDFYKAQIEACDRKLEAAVGALTARANGDLAPLPKARIKGKQHNAPSFDVRAALYGVLGTDLTQIHGLGPSLALKLVAECGTDLRAWKTAKHFTSWLCLAPGNKISGGKLLSSRTRRSSSRAAALLRLAATTIGRSDTALGAFYRRLSSRIGKQKAVTATARKIAVQFYNAVRHGMTYQDQGAAAYDERHRQRVLSNLQRRAKTFGFALAPIPEAAAVS

SEQ ID NO: 42943 - protein, 421 aa, unidentified
MAKRRYSTVNCKRVDWSALAEAMAGRRAVFAVDVAKVKFVAALQEETGKTLVRVIWAHPFETAELLAGLEVLAHAGTLEVVMESSGVYGDALRWQLHQRGIAVYRVSAKRVHDSAEVYDGVPSLHDAKASELIGKLHWEGCSERWEILADARRDQLAQLRRLHQAKSRAQAERSRLEALLARHWPELPHLLALGSASLLRLVATYGGPAPLALLARSARQLLREVGGRLLAEEKIDAVLASARTTLGMPCTPGEVAQLRWQAEQVIAAQREKRQAERQLAQGISADEALAPMQEVLGKVTSAVLLATQGDPKGYPSAASYCKSIGLNLKEHSSGKHQGQLSITKRGPSLARFYLYFAALRLIARNPVIKRWYAIKTARPGAIKMKQVIELMRKLAKAFWHQANGHAFAVNRLVNLKAVADA

SEQ ID NO: 42944 - protein, 303 aa, unidentified
MNVGVDLHKSQFTVCVHELKDGRENRQYRTTSGGYAEFLARVKNWQECGEEVRVGVESTGNTRYFKNQMEAAGCKVVVINTMKFKVVNESVKKTDKHDAATIAEFLSKDMLPESSICSESSEQIRRLLKSRETLVKTGVVIKNQIHALLTGIGMEDKKASLQSKKGRQRIIDALNEAGNVLVVQPLIDTLNNLSENVKLIEAEIAKLTEGDKVVELLKTIPGCGDIGAWTIRAHTDDIKRFSSAKKYAAFAGLVPWVQNSNERVHHGKITKRGPKELRTALVQVVLGMRRCKKTTVAWRLMTR

SEQ ID NO: 42945 - protein, 361 aa, unidentified
MDLNIGVDLHKTQFTVYFKSIDRFREYATTETGYRSFIADIARIKDVDGRVRIGIESTGNTRFFKNYMERHSIEVTVINTMKFKVINESVKKTDKHDACTIADFLEKDMLPESRICSEYSEEIRRLLKVRTTLVRASVTVKNQIHGLLVGQGIEDKKATLQSKRGRQKVLSTLAKMANGLAVQPLFDILDNLAEQVKKIEKELEKITAGDEAIELLLTIPGCGPITAWTIRAYTDDIKDFKESKKYSSYAGLTPWVQCSNTTERYGKITKRGPEELRTALVQLVMGMNRTKSIADYRIMLQYKNMKKYKGSGKSIIATARKLSKIIWHMLTYSKPFNPCLMYDNDLNKIANDMRILSIKSA

SEQ ID NO: 42946 - protein, 355 aa, unidentified
MKYYTSTTQFNCGIDLHAHQMYVCVMDRLGNKLVHANVRNNDFEFFLKLIEPYKHDLTVCSECMFGWYWLADACQAAGLTFVLAHALYLKAIHGGKNKNDRIDSEKIAHLLRTNLIPPAYVYPADKRPLRALLRQRLFFVWQRSDLLARIQSHQLAHNRPVIRQSRSNRDPWEERLLAHEDNPLRQLALKNELAMIRHFDSQISAIEEQLHRLTKEAAPRDYALLQTVPGIGEHLGMTILYEIGDITRFPTVKDFLSYCRLVKGTVASAGKIKGLRGAKLGNPYLRWSFGEAAVIAKRDHHLIAPMAQRLEAQLGGNKFKANTVLAIKLARAVYFMLKNHTVFDPERLAAVMMKQ

SEQ ID NO: 42947 - protein, 427 aa, unidentified
MAKVEHTSDARVLVGIDISKHRHEVLIAAPGKTRRRRLTITNSTDDFMRLIAILREYGLPVRIGFEATGNYHRVLMYHLGIAGFDLKLVSSVALARTREALHNSWDKNDPKDAQVILHMLQVGAVQIFQDPMMAGTNDIQELSKTHDAVSRTKTELWHRILTHYLPLYFPEADRFHRSSRTDWFLAFLEMFPSPHMISALTKEEFTKAAWVVVGRKVEKTLMLSDIYETAKASAGLPVSPGSDAIRMFRMMLAEGRSLIRQRNAIEDRAVELLGDRPDYQLLRTIPGIGPINALTILAETGDLRRFHHHRQFLKFCGMDLATVQSGMFRGRSKISKYGNARLRRTLWLAGQTAVMKKANSFRDKFERYIAKDRHNPDLHRKAYTAIAAKMARTIHAVIKSGEPYRPFFEGTSPGGRTPLCRAVEAAS

SEQ ID NO: 42948 - protein, 401 aa, unidentified
MPPAAFTVWAGVDVGKTHHWVEVVDGDGTTLLSRRILNGQAEIDELIVEVVPLADRVQWAVDIVGAPSALLLALLAQAGQQVRYASGRVVSVMSSAFTGEGKTDAKDAHVIAETARLRRDLTVVDQMTDLARNLAVLTAHRADLVADRVRGINRLRDLMTSVFPALEREFDCAFCKGALVLVSEYATPDRLRRLGRTRLAAWLRTRHVRGYAQIADRAVTAAGAQHVVLPGQDITAGIVCELAASVLALDVRIKDVNAQIAATFELHPQAAIIVSMPGFGPFLGASLLAAAGDLRAFPTAGHLAAAAGLVPVPNDSGRRSGNLHKPRRYSRPLRYVFYLSAQTAMMRPGPNRDYYLKKRERGRTHTQAVIALARRRIDVLWALLRDERIFTATPPALEKAA

SEQ ID NO: 42949 - protein, 451 aa, unidentified
MNRVVIGVDPHKKSVTFEARDSGEVLCATGSFPTDASGCRLLIRYARQWPDRVWAVEGANGIGRPLAQRLVAAGERVLDVPAKLAARARVFDTGQGRKTDAADAHAIVIVALRDTKLREVSPDAELTVLRLLCDRRDELSRARAQALNRMHRLFLELVPGGAPVKKSAIQYKVLLATVRPHDLAGKMRRRMAAEELADTERLDAKLRAMKAELKAAVLATGSHLMDIHGVGPAGAARILADVGDVARFPSRSHFASWTGTAPIDASSGQQIRHRLSRAGNRKINHVLYMAGFVQLRNDTAGRRYYRRRLADRKTSMEAMRCLRRRLSDVVYRQLVHHVSAARGRPGRALGGVCVIQRGRPHPGRRLFGSATSRTREPDATPARRYQPRWPGDRRRHILKSLPGQPLTTAVIEGSQMRTFTIRVPLHKNTAGRTSLRGRNGIGQAANDAKSS

SEQ ID NO: 42950 - protein, 423 aa, unidentified
MTKRFSTPTGAVLIAIDMSKHRQEVLIERPEGGRRRRMTVMATEQDYGRLTTDLAAIGRPILVGFEATGNYHRTLAYQLLTAGFELRLISSVALARTREALHNGWDKNDPKDAQVILHMLRIGATQVYVDPLAAGINDLQELSKTHEAISKAKTQTWHRILTHYLPLYFPEIARFAGNSRSDWFLALIERFPTPGSVTALGREAFTTEAWPLVGRKVSKARLINDIYETACTSIALPVLEESAAITMFRMIIAQARGLIRERNRIEEIAQATLAEHHDYRLLRQIPGIGPINALTILAEAGDLRRFGHHRQFLKFCGLDLATCQSGTFRGRTKLSKYGNARLRRTFWMAAQVAARQRDNSFRDKLGRYVAGHADDADRRRKAMTALTAKMARVAHAVVKTGTEYRPFLERSDARWKDPSLQVP

SEQ ID NO: 42951 - protein, 315 aa, unidentified
MEALAKCCAGLDVHKALVVCTLLKECPTGEIVKETREYSTFRVELERLAKWLKDAEVELVVMESTGIYWKTVYETLEDSEVKTFIVNARHVKNVPGRKTDVGDSEWLAELARCGLLRASFIPPRDFRQLRLLTRYRRKLSGYLAGEKNRINKVLDDGGIRLGCVVSDIDGVSARNMIKALIEGQEMPKEIAELAVGRLKAKKPEIMMALEGRLSDRHRFLLSRIQSHIGWLERQIKEIDSQVVAAMKPHIKELGLLQTIPGIDKNSAAMLLAEIGVDMSRFGNKDRLSSWAGMCPGNNESAGKKRVVAPVKAMCM

SEQ ID NO: 42952 - protein, 417 aa, unidentified
MTFHFTQGYADKIRWTSGATFFEVITMIFVGIDVAKDTHYAAVSDDSGAVLVKPFAFQNNAEGFCLLLKKLSEFDRSKLLIGLESTGIYSENLICFLYESGFRLAVINPIQTATLRKTAIRKTKTDKVDTMLIIKSLMVNSYRLYSQRDADSLKLKTLCRFRQNLKKSKARLKIQLAGYVNLVFPEFGKFFKSGIHIAASYALLKKYSSPKEIAALRTSTLCTLLSKASHGRFGKDTAEALKSLALSSVGVKNPYISIQIAQTIAQIELLEQQINDLNSAIEEAMESLNSVLMTVPGIGAVNAACILGEIGDIKRFSKPCKLLAYAGLDPTVRQSGQFTAKSTRMSKRGSALLRFALINSAWQLTLNDTTFKAYYDLKCSQGLNHYGALGHVAHKLTRVIFKLLTSDTPFIPAKLVA

SEQ ID NO: 42953 - protein, 406 aa, unidentified
MNMNAVGIDVSKRKSTVAILRPGGEIVKKPFDVPHLSSDFRSLTRLIQDLDRETRIVMECTGHYYEPIARRLSQAGFFVSAVNPHIIRNFQGHDNPLRKVKTDKADSVKIARYTLDSWGNLKQYTLMDELRSQLKTMNRQFSFYTKHKTAMKNNLIGLIDQTYPGANTYFNSPVREDGCQKWVDFVDTYWHVDCVRKMSLTAFINHYQKWCHRRRYIFSKSKAEEIYGKAKELVPVLPKDNFTKRIIKQAIAQLNTTSKTVEELRNLMNETASKLPEYPVVMAMEGVGPSLGPQLMAEIGDVMRFTHKGAITAFAGVDPGVNASGEYSQKSVHASKHGSPVLRKTLFQIMEVLIKNKPDDAVYLFMDKKRAQGKPYYVYMTAGANKFLRIYYGRVKEYLLNLSELN

SEQ ID NO: 42954 - protein, 478 aa, unidentified
MIYSVGIDLHKGQHRVYCLDEKAQPCDAFSFQTAPEGLATLEQRIFRDGSNPIVVFEPAGLTWLIVAAYLRSCHPECRVVRAKGQKVAALRRYLRGPVKSDRIDALTLAKMPFIDPERLDEVYLAPAQTHALQRLTRQRKRLEDQITTHKKRIGSIVDGYLPGVRQAFSHPWSVQVRAFLHSQINPFAVIRAGEEVLHRFLTQAKPGNKGGRTESHFVYQACQKVLALQELCAAAGMLNEEFFVYLQDEIDRELRLMEVEEAESKALDRRIEELYQELHPSDNLRTIPGVGEHTAPVFVASIGDPTRFPGQSEFANWTGVVPAARQSSNVESKGLRMTKAGPTTVRWALYQAGQISRRWDPQLASVYYRQMVYHGKNHKQAMGAVMSHMAARIFTVLREGRPYELKDTEGKSISKLAARDLIMAKYRVPEDIRQERRKSKGRKTNTLGLQKKRGTAVGREHEAAIAPQPATNLPSLVI

SEQ ID NO: 42955 - protein, 385 aa, unidentified
MKPNSQMTLGEFFRQCVGIDISKSKFTACLYMYDRASDVGCCTKSIDFDNTKSGFNQMVKWSRKEAVKGYPVTFLMEPTGVYYERLAYHLHKIGQTVYVVLPNKARKFCESEGIKTKTDAMDARCLALMGCASRKLKPWLPPAIIYRELRQMTRFHADLCVIRRSVANRMEALDHMEGVSKTVRKHCEKLIEEIDTLTEKNDKDIMRKVAEDKEMQERVKRIATARGLGVTTIVCIIAETEGFHLIENRKQLTSYAGLDVKARQSGKEDPKHRISKEGNAHIRAALYMPALVAVRHNRQIREAYGRICQRHPKEKMIGVTAAMRRLLLLIYTLWKNGEEYDETRDKTHTPRKKELEPEYGPEDCIGTDKESIDWNAMDENGEPPF

SEQ ID NO: 42956 - protein, 345 aa, unidentified
MHNIITGVDLAKEEIQVCVCKRNKVQSNQAMTPTEFASWLASSKPMTIVFEACSTSNYWKQKALEFGHDARLISAKLVASVRQNQKTDKNDALAVAQAAQLTDVSFINGKSKEQQELQTLVRLRELAVKHKVAVQQQIKSLLLEFNIRVSPSQGGLSGVVEAVLEDAENGFSVVFRQALNTSWQHLQQGIESIKQYDLYLEKAANEHETCKSLQALEGVGPLNAVNLYMALGCGEMGQFETGRDASACIGLTPIQHSSGGKVKLGSVGKYVKNNMLRSCLVSGAMSAVNQAMRRPAKTKKEMWIQQMVERRGKRCTAVALANKTVRTAFAMLANGTEYKAELLAA

SEQ ID NO: 42957 - protein, 388 aa, unidentified
MIYVGIDIAKLNHFASAISSDGEILIEPFKFCNDSDGFHLLLSKLESFDKSSLIIGLESTAHYGDNLVRYLVAENYKVCVLNPIKTSAMRKNNVRKTKTDKVDTYIICKTLMMQDSLRFVSYYDLDLMDLKSLGRFRQKTIKQRSRLKVQLTAYVDEVFPELQYFFKSGLHQKSVYALLKEAPTPETISSMHMTHLAHLLKVTSHGHFDKETAQQLRVLAQKSVGASDSALSIQITHAIAQIELLNDQLDKVETEMTEIMKYNDSVIMTIPGIGYINGGMILGEIGDIHRFSSPNKLLAYAGLDPSVYQSGNFQAKKTRMSKRGSKVLRYALVNAAHNVVKNNATFKAYYDAKMAEGRTHYNALGHCAGKLVRVIYKMLTDDVEFNLD

SEQ ID NO: 42958 - protein, 363 aa, unidentified
MQNSITWVGMDVHAENIVLAAVRGSSEAIVFRAEFPNTPKGRERLAGKLTENGPVRCVYEAGPCGYELRRFLESRGIECDVAAPALIPRKPGDRVKTDRKDAEKLARCHRLGELATVFVPTPAQEALRDLLRTREDAREDLLRRRHRLSKFLLRLGRRYTEGERWTTKHWDWIRAQSFTDRNAETVFREYIVAIEQEVERIRRIEQQIVEESRSPEVGNAIARLRALRGVDTITAMTIITEVIDLNRFRSPRELMAFIGVVPRERSSGGRERRGSITKTGNAHIRRVLIESAWHYQRLPAGTPKAILARREGQPPEVIETARRAELRLHRKFRKLLGRGKPKGIAAVAVARELAGFIWALGRG

SEQ ID NO: 42959 - protein, 351 aa, unidentified
MKKFFIGIDFAKEKFDAAIIEACGLKEFGARQFGTFPNDKKGYRQFMKWVRGIAGTTAEDDCLFCGEDTGSCSLGLSRWLYGKGYDMWIENAYVIKHSNGIQRVKTDRADASMIAEYAWRHQDKAVPFEPLSDSLTQLREVFLYRHKLVQQRVAMDVRKQDKEASDKTRALIFINRKSKHLIAEIDKAIKECDTMIDHIIESDDELKENYTIVTSIKGVARQNGACLLIFTNNFKRFDMDARKIACYYGVAPFSKESGTSVHTPARTSHFANKLIKSLLSQAAQSARIFNPEIKEYYDRLIKRGKKHSVALNNIKNKLLRIIVALVRKKTLYDPNSYKFYRDRLNRQFSPA

SEQ ID NO: 42960 - protein, 424 aa, unidentified
MNLTQNDRLNQVTADTLVVGVDIGSQNHFARAFDWRGFEFSKRAFRFSNTSIGFLSFLRWLYELEQKTDTKRVIVGCEPTGCYWLTFQKFLKDHGVLLVTVNPHSVKKCKELDDNSPEKSDLKDPKTIAGLVKDGRFSTSYLPSGIYAEIREASACRDMIMKQHVRLANQIQGWLQKYFPEYFECYKDWDSTSGLMVLKNAPLPQDIIKLGAGGVNQIWREAKVRAAGIKRATTLVEAAQNSVGLEGGEAARLEIWILVNDYASKVEQLDRLDAFLKEKIMEVPNVEKLLAIKGVGLSTVIGFVAEVGDIGRFTDPRQVQKLAGLEITKISSGKRKGQPGISKRGRRKLRRTMYESARALINWNSAFLDVFLYYRNREHRPLGSMQAKIAVACKAIRVFFVIMQTGCDFDEERFRKDILRPEVA

SEQ ID NO: 42961 - protein, 314 aa, unidentified
MEKITVGIDVSKDHLDVAVRPSGEQFAVPRTSAGLDELVARVKVLKPNVIVIEATGGFETVVVAALAAAGLPVAVGNPAQIRAFARAIGQRAKTDPIDARVIAHFGEATGVTPRPLPDQATQQLADLVARRRQIVEMIGAERQREKLANSRIKKSIGRLVKALERELSSVEADIDSAVRSSPAWREKEDLLSSVPSVGPVISRTLIAELPELGSLGRKQIAALVGLAPFTRQSGQWRGKSFIGGGRASVRTALFMGAVVARRYNPVLKAFFDRLVAAGKPKKVAIIAVARKLLTILNAIVRDGTPWKGTVGAVS

SEQ ID NO: 42962 - protein, 404 aa, unidentified
MVFLGVDWAEEHHDAWLENEQGEMLGKARIANDVGGVRQLHELVAEHADDPSQVVVGIETDRGLLVAALVGAGYQIYAVNPLSVSRYRDRHKTSGAKSDRADAKLLADLVRTDRHNHRPLAGDSDLSEAIKVLARAHQDLVWTRKRFINRLRSALGEFYPAALEAFETDLGGLDAIAVLERAPTPWQGRQLSQAKIVSALRKAGRQRYLEHKAAEIQRSLRSEQLQAPSQLQAAMATVVSSCVAMIKSLNLQLEQVGAEMSASFKAHPDAEIYLSLPGLGVVLSARVLGEFGDDRARFADAKARKAYAGTAPVTQSSGTKKIVLARFARNRRLGDACYWWAFSSLTCSPGANHYYRALRTRGKTHHQALRGLANRLVGILHACLAASQTYSESVAWPQPQKIAA

SEQ ID NO: 42963 - protein, 345 aa, unidentified
MTVYCGVDFHARQQTVAYCDTQDGEIRFIQLKHDDRQTLRRFYTRFQSPVIVGLEAGGYSDWFERFLEELGIEAWFGNPTEIRRRARSRQKNDWRDAELLLDLLMKNEFPRVFRQNADSRAVLAQLRYRHKLVQVRTQVTNSLHALSIREGLSLQAALLTKAGRARLNSLPLTDVRAKQRDEWLALIDQLSDNIKRVEQELAKLAAQDEQVKRVRTHPGIGLLTGLALVHTLAPISRFANSRKVTAYVGLEPREFTSDAKQRWGGISKAGSPLLRFLLVEAAQHAARADSELKNIYQHLSVRRGKPKAKVAVARRLLVRAYILLRDEIDYATYLRRTVAVRSARH

SEQ ID NO: 42964 - protein, 395 aa, unidentified
MGSPLRASATSDLIKRWPRESVSIHWSRPRSPEVHPNKEANVFFAGIDAHTRYVIVVIINRMGERVLGPTRVKVGQPELLLELLAPYRPVDAIMETSSSWPWLHEVLSGVGVHFVLAHARRLRAIAEANYKRDDIDAELLARMRLAGLIPEVYPTPFAQREWATLLRHRTTLVTQRTALLNRIHAQLHMRGLHLERGRLLTREGRQWVRTVAWPHFGGEQRALVRSHFRVIAGLRPLIRAVDRHIAQVAATIPEAQLLTTIPGIGPQRALVLCAEALPISRFRTPGHLASYAGLVPRSKQSGLAPVRHGTIPAGANRWLRGALVRAVVTHVQHAPDSWLTHYYVAQKARLGWPTARVAAARKLARAIHAMLRTNSCWTNDPARGELDEPHAAQTA

SEQ ID NO: 42965 - protein, 377 aa, unidentified
MKRIKFVGLDVHAETIAVAVAELDGEVRSIGVIPNRCESVRKLVKKLGPVEELRFCYEAGPTGYVLYWQLTALDAKCEVVAPTLVPVRAGDRVKTDRRDALKLARSYRAGELTAVWVPDAAHEALRDLVRAREAAKRDQLRARNRLTKFLLRHGKRPPEGVNPWTLNYMNWVRKDVHFEPLAQQATLLDYLHEVEHMAARVTRLEQAIEEAVQLAPHQMREVIEALQALRGIAKVSAVTIVAELGELSRFGEARQLMAYSGTVSREHSSGESCKRGGITKTGNVHLRRIVVEAAWAYRHAPAVTACLRKRQERVSEEVKEIAWKAQHRLHGRYRKLTARGKNTGKVITAVGRELLGFIWAIGVKVEAEQRKALGQAA

SEQ ID NO: 42966 - protein, 412 aa, unidentified
MRVFCGIDWAEDHHDVALVDAEGMLVAKRRIGDDAAGFATLLQLLAAAGDSSQQPIPVAIETSRGLLVACLRATGREVFAINPLAVSRYRDRHSVARKKSDAGDALVLAHILRTDQSAHRPLPADSELAQAIAVLARAQQDAVWDRTCAHNKLRSLLREYYPGIIAAFADKRHGLLRPDARAVLAAAPTPRAAAKLTKTQLRALLRRAGRQRGIDAEADRLQAILRAEYLHQPPLVEDALGRQALALLRQLDTACANADELAAAVIEQFEAHPDAPIMASQPGLGALTGARVLAEIGDDRSRFADARALKAYAGAAPVTRASGKSVAVMHRRIKNHRLADAGYRWAFTALTASPGARAHYDRRRHAGDHHAAAQRNLFNRLLGCLHHCLATGQPYQETIAFPHPPTHQNAAA

SEQ ID NO: 42967 - protein, 387 aa, unidentified
MSAVVGIDVGAYKHAAAVCRSGEREAERGVFRLSADRAGFDELDRWLERQGPVERVVLESSGHYYWPLASHLHRHGYGVAVVNPLQVKYFAKSRLQRSKSDPADARTLAAMGMSEEPRVKDPLLGAEAKEAARFWGGLVKEQAQVRQKLLRLVEIGFPELKECFEDPLCETALAVLREAPTARVASRKRVSTLADTTRPGDRRRLGENKARRLHELAERTVAPPELDAQMSFEVGMLIQQFDLLDKQIEIAEQRVAEVLDSELARRLQTIPGVGPALAASFIAEIGDIWRFDDFDQLASYAGVHPKELSSGTKGQNPETSWRMAKTGKAYLRSAALTVASCGDTLTEIRYTTLKDATTRLLQPPVFVSVLLESVWEKGLPYTCKSVF

SEQ ID NO: 42968 - protein, 366 aa, unidentified
MPIYCGVDFHARQQLVKWCHTADGEIHERQLGHQSVAGVRGFYSQFQGEVIVGFETSGYSSWFEAMLEELGHQVWIGHATEIRRRARARQKTDRRDAELILDLLLQNEFPRIHRVSAQSREVLRQLRYRHRLVQQRTRSYNSLQAIALSAGVSLKAKLRTRKGKERLLGLSVTEAHGRQRQEWLDLIAQLNGYIERVETELELIAAADQRVQLVRTHPGVGLLTGLALVHTLSPVSRFANSRKVAAYVGLEPREYSSGERQHFGGISKAGSRLLRLLLVEAGHKAINKDAQLKQLYHRVLHRREKAKAKVAVARHLLVRTYIMLRDQIDYAEFVRRGVAVRSARVSYRPQVPGKLIERLASEQQLS

SEQ ID NO: 42969 - protein, 374 aa, unidentified
MEHHSEVFVALDTAKLRNAVAIADAGRNGEVRYLGEIDNSEAETGKLVTKLARKYARLTFCYEAGPTGYGLYRLIKSIGHDCIVVAPSLIPSKPGDRVKTNRRDAVNLVKLLRAGELTAVWVPDERHEAMRDLVRARDAAVKDYRIKRQNVSSLLLRLGPHYPGKKTWGRAHINWLTSLRLEHREQRIAYEEMLLAVRQVRERIDRLEQAMREAVADWTLSPVIEAVQAMRCIDMVGAIAFLAELGDLSRFESPRQLMAYPGLTPSERSTGESVNRGGITKAGNTRARRLLIEAAWSYRFPPRVSKDMQTRVGAAPRIAREIAWKAQMRLCGRFRTLTRKGKRPTIVVTAIARELSAFIWAINREVAGSHATAN

SEQ ID NO: 42970 - protein, 347 aa, unidentified
MFYCGLDIAMKSSYLYIMDSEGKKLASGEVATEKKSLAERLRPYLRGGLFTAIEAGNQTAWVHDLLVSLGAQVTVVNPTKVKLIAESRCKTDKIDAKILCELLRLNGLPHPVHMPDKPARALRGLLVARRQLVSTRVKLCNVVRGLARQEAIRLPAAALSSVVGWKRLLAGGFEQPHLVVVVSAYFESFKSLTASIRQLNQELAELERTDTRAARLKTMPKVGRIAALTFLAAVDDVHRFCSSRKLVGYSGLAPTVRSSGERTEYGSISRVGRSELRAVWVQIAHLIAIDKSKATAPLRSWFTKVAHRRGRKTAVVALARRLLVIAYHMLKEETVYDPERLKRKRAA

SEQ ID NO: 42971 - protein, 350 aa, unidentified
MKKVIAGMDLHSNNVVIGIMDMDGHRLASRKMPCELKEVVKFLTPFKRRLERVAVESTYNWYWLVDRLQALKYPVVLANPAGMAQYSGIKHADDTNDAFFIAELLRLAILPTGHIYDVELRPVRDLLRRRLMLVHQRTALMLSFKSLYTRTTGQGLTLSKLKELEIKEAQELYEHPANQLIAGMQIKHIEQLTESIEKAVLGSARELPYYEKLATLPGVGRILGMTITMEVGDINRFADAGNFASYCRTVAAQRFSNGKQKGENNSKCGNKYLAWAFVEAANFARRYDEQCRQWYDRKAGKTNKVLATKALACKLAKAAWHLMAKDVDYDPTRVFGQPAKAEAKTKTMRN

SEQ ID NO: 42972 - protein, 412 aa, unidentified
MEQIHERVAGLDVHRDSVAACVRLPGSRRGTVTHKQRFSTMTNGLGQLAAWLSEHRVEVVGMEATGVYWKPPFYALEGQGFELWLCNAHHVKDVPGRKTDMSDAEWLADVVAHGMVRPSFVPPPPIRELRDLARRRKTQVDMRAAETQRLEKILQDAGIKLSSVASRVLSMSGRNMVEALIAGERDTAVLAEMAIGRMRNKLPELMEALSGHFGPHHAIAARQILDHVDFIEASITGLSAQIAVRMEPFGPVFELLLPVPGLSRMSIEVIIAETGGDMSRFPTAGHLASWAGVCPGNHESAGKRRRVGTTPGDPWLRRTLIECAHAAARTKDSYFAVQYRQLAHRRGPNKAAVAVAHSLLVVIWHVLSTGVLYQDLGSDWFERRRDPERETRRLVRQLEALGHTVNLATPAA

SEQ ID NO: 42973 - protein, 573 aa, unidentified
MCAAVRRPRPGRRSRQRGHVGKPNGVFSPRVQKVGPQHFGVVSVDCAKDRSKWMLTDFYGHVVVPPTFVEHHRTAFDQAVAAVRSAVSRHGIKDLVVAVERTGRYHRPVQSAFAAAGFDTRVVHPSVSCYFREAGAYDTKTDDTDLEGIFRAAVNGFGLQEQPWDAVYGSLQLWSRQRRDLVDKTSQLRCQILEYLNEYLPGYQRCFDDVFISKVALLIACHYAAPQAIAAAGLSALVQLCRQAHVQVHNATLMRIMGWAQDAPAPEQSASFYQQWVCNLNEDRLTKEKQIAACEQQLVALLVQTPYVRLLALSGINVVLASELAGELGPMTYYATARVITGRAGLYPRRYQSDQVDHASGTLARRGNRRLRYVLVMSADTLMRCNQYFGVLRAKWAHQGRDPRDIRVRVAGRYSRISFQMVTGKGGFRHPACQGPPAVLSKLIEFHNEHDIDPYTARTNLQRAAAQLPRAEQAREKKALHAQLDAARQSWGRGPKQLCSILPAVLEQLGGVPTNCVRGDSLRRAESDHEPYNVVFWVRRKAVNEARRSVGSPTSDKASRGSPLISPRRDVNI

SEQ ID NO: 42974 - protein, 343 aa, unidentified
MEHCAGLDVSVKDTSVCIVDDTGRIVREVRVASEPAALLAVLNNSAYHFNRIGLEAGPLSQWLYSALAEADLPVICVETRHMRVLKAQINKTDRNDARGMAQMMRAGLYRPVHVKTLRSQKLRMLLTHRQLLQSKAIALENDLRGTLRNFGLKVGMVGTVKFEARIKELVENLPDLAVLVEPLLVVRRVLREQIAVLHRRLLAIVKDDEVCRRLMTIPGVGPVVALTYRATVDVPARFRNSKAVGAAFGLTSAKYQSGEINRSGAISKCGDEMMRVMLYEAAQILLVRSTKWCWLKAWAMQIARRQGMKKAIVALARRLAVIMHRIWVDGTEFRWTREGAATA

SEQ ID NO: 42975 - protein, 349 aa, unidentified
MELDTIGIDLGKTTFHVVGLSAAGEVVVRRKFSRTQLLWFTANLRVRLIGMEACGGSHFLGRSLREQGHEVRLMPAQYVKPYVKTNKNDYIDAEAIAEAVGRPRMRFVPIKSDDQLDMQSLHRVRDRWVAHRTSIINQIRGLLLERGITFRKGRRHAEASLPGILEDPENGLSGALRVLLAQLQSELRQLQSQIDEADALVARSASEHEPCQRLMAIPGIGPVTATAVVASIGNGAAFRKGRAFATWLGLVPEQKSTGGKQRLLGISKRGNRYLRRLFVHGARAVLQCRDRQSPGLSHWLAQLVARAHTNVVAVALANKLARIAWAVLFKGEPYRPPLLATRPASMVCN

SEQ ID NO: 42976 - protein, 388 aa, unidentified
MQIVTDRSQAPTAIRTDLGAIFVSLELSRSTWLVTSLSPGGGEKMSKHTVRSGDVAGLLTRFSQLKDKVQVRMGQVVPIIAIQEAGLDGFWIHRLLQDQGVESHVVDPASIATSRRRRRAKTDKIDGEALVRALLAYKRGEPRVCAMVQAPTPYEEDRRRICRERKTLTAERVEHVNRIKGLLFAQGISDYEPLLRKRRARLEELRTGDGRPLPKQLKAQIGRELDRLELTLEQIKSVESERDAMLSLSDEGTPAPGVMLKSLKGIGPEFAGVLWSEGLFRSFSNRRQVASYAGLAPTPWRSGSVAHEQGVSKTGNPRLRTTMIQLAWLWVRHQPRSILTLWFHQRVQLNGGRVRKVLIVALARKLLIAFWKYVTAGVVLEGAETEAA

SEQ ID NO: 42977 - protein, 452 aa, unidentified
MAKKRKKDPNKMIKMPVLNPNAAGIDIGSRSHFVCVSQDNVKEFTSFTVDLHQIAKHLAFYGVKTVALESTGFYWQQLFTLLQSYGFEVILVNARHVKNVKGHKTDVVDSKWLQLLHSIGLLSNSFQPDIFTKELRQYVRHRKSLIETSSRYISKMNKSLVLMNIQLKTVLRDLTGESGLKVIRAILEGERNPVRLAKNVGKNVKASRKDIEKALEGNWREEHLFELEQNYSLHQFTWAKIRETDNQIETLLKKKEDDHYKETKSKPYVKRKARQKNDPHFDISQYAHQMTNGIDLTQIDGVGVGTVMALMSETGFDLKSNFHSAKHFSSWLGFAPNRKITGGKIISSNTPKVKNPLSKAIRDAANAAGNSRGKLGDFFRRIAYRKGRIVAIIATARKISVIIYKMLENQKSFCYEYSKQESQRFKQIQINKTIKSIKKLGISQQDLAVALN

SEQ ID NO: 42978 - protein, 451 aa, unidentified
MSSRKGSPRGLPVIHERAAGIDVGSRFHVVAVGADLCDEPVQTFQAFTSDLQRMTDWLVGMGITTVAMESTGVYWVPVYEVLESRGIEVILANAREARSVPGRKSDVNDAQWLQRLHACGLLRASFRPGRDIAALRVYLRLRERHLDYAAAHIQHMQKALTFMNLQLHHVVADVTGVTGMKIIRAIVSGQRDPQVLAQMRDVRCKASEETVRAALVGNYQPEHVFALAQALALYDFYQARVDECDAKIQEVLAMLIAEKAPPSAPLPKARHRTAQPNAVSFDVRPILYQLAGVDVTQIHGLGPYVALRLIAECGTDLSRWRSAKHFTSWLTLSPGSKISGGKVLSAHTRKTSNRVTAHLRLAAVTVGRTDTALGAFYRRLSARVGKAKAVTATARKIAVLFYNAMRFGMDYQDPGAAHYEQKYRERAIKQLHRRAAQFGFTLQEAEAVSVS

SEQ ID NO: 42979 - protein, 350 aa, unidentified
MSLKLNSEIAVIGIDIGKNSFHLVGQDRHGALVLRQKWSRGQVEARLANLPPCLIGMEACVGAHHLSRRLQVLGHDARLMPAKYVRPYSKGQKNDFRDAEAIAEAVQRPTMKFVATKTVEQLDLQALHRVRERLVRQRTGVANQIRAFLLERGVAVRQGLRFLRTELPIILGSRADVLSPRMIRIIEELAGDWHRLDERIDGLSNEIEALAHQDPACKRLMTVPGIGPIISSAMVAAIGNGAAFSKGRDFGAWLGMVPKQTSTGDRTILGPISRRGNRYLRVLFVQAAWVLLVRVKNWERYGLKAWIEAAKKRLHHNVLAVALANKLARIAWAVLHKEREFECKVRAIAS

SEQ ID NO: 42980 - protein, 351 aa, unidentified
MDSKTTDSIVTAIGIDIGKNTFHLVGLDERGAIVLRQKLSRGQVSARLANVPPCLVGMEACVGAHHLSRQLLALGHDVKLVPGQFVKPFLKGQKNDFRDAEAVAEAVQRPTMRFVPTKSVDQLDLQALHRVRSRLVSQRTATVNQIRAFLLERGIAVRQGLRFLRHALPDVLANRAELLTPRMVNMIKDLAGDLHHLDTRLDEVTSEIETLARNDEACQRLMTVPGIGPIIASAMVATIGDGSAFRRGRDFGAWLGLVPRQISTGDRTILGRISKRGNGYLRMLFVQAARVVLLRPANWPKHSFGRWLEAAVKRMHHNVVAAALANKLTRIAWSVLHHGRGYEPWIRAELA

SEQ ID NO: 42981 - protein, 313 aa, unidentified
MSQNNPNILYVGLDVAKLSLQLHLAGRFHLLANDAKGHAQLLKRLRGHPHAHVVCEATGGYEQAVVRALQAAGVPVSIVEAGRVRYFARAQGQRAKTDPIDAAVLSEYGTTFQPAATAPASPQQQQLADLAQRRRQLIHLLVSERNHAEHYTDSFRVRQSRQLVKALEKQITQCDEAITTLIAQDTELARKAERLKAIPGVGPVVAATMLAEMPELGKLTTQTAAALAGVAPYNRDSGGQNGVRRINGGRAAVRCALYMATLSAVRHDRILKEFYLRLRAAGKKPLVAMTACMRKLVILMNRLLKNNDFQLAS

SEQ ID NO: 42982 - protein, 469 aa, unidentified
MIYSVGIDLHQGSHRARCLDERAQICDGFTFQTTPEGLTKLEERIFRDGANPIVVLEPAGLPWLMVAVYLRSQRPDCRLVKAKMQKVAALRRYLRGPVKSDRLDALTLAKMPFIDPEQLIEIYLPPAEIHALQRLTRQRKRMESDVSSRKVRISAILDGYLPGVRLAFSESWSSSFRAFLRGRVNPFAVAREGKEALHDYLSKASSRSRVQTHQVFLACQSVAHVCQMSMAVGTLNEDFFSDLQDEVARELKLLEIAEAESEALSRRIAEIYKKLHPSDNLVTIPGVGPHTAPIFLASVGDPARFRNQAAFANWEGVVPGAKQSSNVEAKGLRMTKAGPSILRMALYQAGEIGRRNDPGLAAVYYREMVHHGKNHRQAMGAVMSHLGARMLRVLKENRPYEIRDLEGKSIDKNEAKKLILSQYYVSEEVRRERRRRNTKTNRKRETATVSIYEAVDAPQAEQAKSVSRK

SEQ ID NO: 42983 - protein, 317 aa, unidentified
MTESVKVNVGIDVSKDFLDVHVGDVALRRVPNRSSGLSVLKRILSRYTVSLVLLESTGGYENLAVTYLQSLGYDVCVINPRQARDFARSMGRLAKTDKIDAQLLCRLADVIDASPERARFVKPLTDERRQRLVSMVRRRRQLCDLMIAERNRRAKTDAYGSESISTVLDFLTDEVARIDRDIAAHVGSCFSDISSLLQSFTGIGPVTASTLLGELPELGKLNRRQITALVGLAPFNRDSGYMRGRRRISGGRSGVRNVLFMAALSAVRFNPVLKAFFARLVAAGKPKKVALVACMRRMVCILNAMLRDGSRFEVVVG

SEQ ID NO: 42984 - protein, 348 aa, unidentified
MNHRYEKSRQYVGIDLHRRRSVIVRMDGEGEVLECVRIENSVPALVEQVAKAGHGAPVAVEATYGWYWAVDALTEAGFEVTLAHPRGVASMQGRRAKTDKLDATELADLLRLGRLATAWIAPPEIRELRELVRYRHKLVGDRAAVKASIHAVLGKCGVIPEISDIFGPVGSKMLDALVLPEPYGSRVASQRRILAMLSGEIAGLEVETVRRLKDNPEYRALLTINGVGPVMAAIFVAEIGDVHRFATADQLACWTGLTTRVDSSDRKTRYGHVSKQGSRLLRWAAVEGCQRAREPYLAGKRRDIIARRGKRAQHIATVAAARHMMKVVYYTMRDGHARCLDAPLPVAS

SEQ ID NO: 42985 - protein, 343 aa, unidentified
MTMAEYVGLDVSMKETAVSVRRDGKRVWRGKCGSDPRIVAEVIRRRAPEAARVVFETGPLSVWFYHALTAEGLPAICIDARHAKAALDMAPNKTDANDADGLAQLAEVGFFREVRVKGFDSMLARTLVAARNRLVQITTELSNQIRGLMKTFGLVVPAGKGSHFEAHVRALLVDQEGLAPILLPLLEAWRAMRLRAAELSRQLVASARRSEACQILMSVPGIGAVTATSFATAIEDPENFRRSRSVGAWLGLTTRRYQSGEVDYDGHISRRCDTHLRGLLYEAATVLLTRSSAESSLRTWDLKLKERIGFKRAAVAVARKLAVIMHAMLRSGQLFDRTAGVGA

SEQ ID NO: 42986 - protein, 315 aa, unidentified
MPNIIIGVDVSKDFLDTAVVNANRPSLRFSNNPEGIAKLVAWAQEIAPFRIIFESTGHYHKEAVTSLQVASLNAVVVNPRQVRDFAKASGKLAKTDAIDALVLAKFGEVFETTVRPLASKEIEEFQQLLDRRDQLVKMRTMEKNHLHAAKGLRLEKSIEKLVNHLNKQIKELEQEMNKFINETETFRAKDKILKTICGIAAQVSRTLLAFLPELGEGSRQGITGLVGYAPYNNDSGQGRGTRRIAGGRSKVRKALYLAAVSAVKNSPSMKEFYLRLRSRGKTSKVALVAVARKILVLAHAMIRDMKPYQERTNPI

SEQ ID NO: 42987 - protein, 377 aa, unidentified
MNRTTRNQESTRTEATLYMAVELGASEWKLAFGVEAGQKPRLRQVAAGDLNGLMLEIARAKQRFELPESARVVSCYEAGRDGFWLHRFLLSEGITNVVTDSSSIEVSRRSRRAKTDGLDAEKLLSSLIRFDRGERKVFGVAHAPTPVQEDERHWARELESLKQERTAHTNRIKSLLVSVGSSAKVDKGLLQRLDQVKQWNGEPLLPSLRERLRRECERLALLESQIKEVERSRRQAEVEATEKVRRLQELKGIGENSAWLFVVEFFGWRQFRTRREVASLAGLTPMPYQSGDTVNVEQGISKAGNRRIRTMAIEIAWAWLRLQPQSRVSLWFQERYGPGNRRSRRVGIVAVARKLLIALWRYLDQGVIPEGAELKAK

SEQ ID NO: 42988 - protein, 321 aa, unidentified
MKNSTNPVAVGIDVAKASLEVSIGTDGSTLQFANDIEGHDRLLAHVRDLAVSLIVLEATGGYEAAIAGALQAAGMPVAVVNPRQARDFAKAMGILAKTDSIDARVLARFAQTLFQRDDLQRFIKPLADEALKALQVQLLRRRQLCSMLIAERQRLSTSHHSTRADIEASIDFLKGRLNKADAELAHLIERDHAELNTLLRGVKGIGPNALATLIAELPELGHLTRREIGAPVGVVPLNRDSGQFRGRQTTWGGRATVRRALYMAALVASRHNPAIRRFYAHLIEQGKAPKLALTACMRKLLTILNAIARDQVPFNPALHQC

SEQ ID NO: 42989 - protein, 340 aa, unidentified
MSSMQLGVDLAKSVFEVAVSHAPGQVQARRRLSRTALAPFVAAHPPAEILMEACGSAHHWGRTFQQMGHTVTLLHPADVARYRDGNKTDRADAKALLEAARNAALSRVPVKSVEQQAVVALHRLRQGYLQTRTARINAVRGHLREFGCVIPVGPGHVLPRAYAALAADTVPAFLRVALETVLAEIATLEDQVEALRTALTHLAEQMPDAQLLRSVPGIGVLTATALVAFVGDIHRFRCGRVFAAYLGLTPRERSSGQHRRLGAITKRGNSYLRMLLIHGARSALRAGTVSTHPDDLRTWARALAVRKGHNVAAVALANKLARIAWRVWRDQRPFARREAQ

SEQ ID NO: 42990 - protein, 459 aa, unidentified
MGRARARKIPAQLVEDEDYQLRYERVAGIDIAKAKADVCTRLPPAREGGRRASRLEEVPARAADILALAARLLADRVELVVMEATSDYWRIWYYLLEAAGLNVQLANPSAARQLAGRPKTDRLDAQWIARLAEMGLLRPSFVPPPEIRALRDLARTRLQLVRDRTREWQRLEKLLEGALVKLSSALSSLAGTKTARAILEAIADGERDPRTLAGLAAPGVKAGRAGIEQALDGMQLGTHHPMLIRLHLDRAARLDQSIAAVEDEIEAAPHAIPAAWGTDASGETGPAAGHGQDAAALPTAERLAEIPGVSRKLAMAIIAETGLDMTRFPTADHLVSWAGLAPVSRQSGPRDHKPGKGRGDAYLKGYCTQAATGAAPTDTFLGERLRRLSRRIGGNRARTAVGRSILVIIWHLLADPGARFTDLGPDWHARKGDRDRKIRAHLRQLQALGLEVTITPTAA

SEQ ID NO: 42991 - protein, 320 aa, unidentified
MKQELTFIGIDVAKTRLDVAIRPTDRQWQVAYSEKGIQELVEQITELKPTLVLLEASGGLELPMVAALAVSNLPVVVVNPRQVRDFARATGKLAKTDALDAQVLAHFAEAIRPLPRSLPDTETQSLTALVTRRNQVMGMLVAEKNRLRTSRPPVSQRIQLHIDWLEQELDEIDRGLKEMLRNSPVWREKENLLRTVPGVGPQLAVSILAYLPELGTLNRKRIAALVGVAPFNRDSGTLRGKRAVWGGRSRIRAALYMAALVASRHNPVISAFYQRLLAAGKAKKVALTACMRKLLVILNAMLKHHSSWQSLNPQLLGPCS

SEQ ID NO: 42992 - protein, 316 aa, unidentified
MVTLGFDIGKKSLVAVQTDNSHSLKKSYTLENTKERVGCFLDQMLEKHKSFRVISEATGEYHHDLALACLKRKVPFYLLNPITTKQFVKATVRKKKTDLSDAYIIAKLGLQKQGTLLTHEAFAREKPIIRTSVKLTSFHSSLTLMQKRFAEYYPQETELIEELNHCRDRIKKSIDIFRKRAEKYVDPKTRELLQTIPGIGPTLATSLVAEIGNIDRFKDGKSLVAYAGLDPGVKQSGTSLNRNGRLTKRGSPYLRRFAFIAASLAAIHDPELKSYFRAKRDEGKKYTEAVVTVSRKVLYRVYAVWKRQTPYVKVSS

SEQ ID NO: 42993 - protein, 270 aa, unidentified
MKITTVGIDLAKNIFAVHGVNEHGRTVLKKILKRDQVAAFFANLPACVIGMEACASAHHWARKLQGMGHTVRLIAPQFVKPYVKTNKNDAADAEAICEAVARPNMRFVPVKNIEQQSVLSLHRVRQGFVRARTAQANQIRGLLSEFGIVVPQGIAHLVRRVPELFEDATNELTGSFRLLIERLMDHQKGINRQVRELEAQIQAWHRRDGASCKLASVPGIGPLTASALVASIGDATSFKNGRQLAAWLGLVPRQNSSGGKNVLLGISKSV

SEQ ID NO: 42994 - protein, 332 aa, unidentified
MKSVHIGVDVSKEKLDVYIPATKEGASPTTMEVDNNTEGFRKLRELARKAKATVCVEPTGGYELELIAFMHKFDVEVAYADALRVRQFARAEGNLSKNDAIDAALISRFADKIGVRTLEKQDVDTVELKRKTKFRQTLTDARTAMICRLETEIDADMKAMLKEQVRHLDKLIAKAEKSCLETVTRNEPMDTLRKRFVQVGGVGDVTAIAILAGLPEIGKLPDAKLNRLVGIVPEEKQSGTKEWQRKIWGGRKDVRNALYMATTASLMWNAKLGAYYRKKRAEGHPHKWAMVPTMRKLLSLLNRIARDPNFVPDPEPETTKRNATSWRKRKAV

SEQ ID NO: 42995 - protein, 418 aa, unidentified
MGDITTIGLDLAKNVFQVHAVDVAGSVVLRKRLRRGQVLAFFAGLPPCLIGLEACATAHHWARELIALGHETRLMPPSYVKAYVKRNKHDVADAEAICEAVRRPSMRFVPLKTAEQQSALMMHRARDLLIRQRTMLVNALRGHLAEFGLVEAQGLHKVARLIAIVMDEMDGRVPHIARQVLKVIVSQIEDIQTRIAGLETQVLAWHKSNPVSQRLATIPGIGPIIATAIAATVADPSTFRSGREFAAWLGLVPRQNSTGGKARLGGISKRGDSYLRRLLVNSAHTVLLCSKAAKTDPWLTSLLSRKPRVASENSIHLTRSHRRIRTRSSDDCNRPLVRPYAVRLLQAATAAGSRNPDTATSAQRPAAVHAAPSAAFALGRPRPVHLALSSQERTAVRMSLCASHRLPTVVRHLLDAAR

SEQ ID NO: 42996 - protein, 342 aa, unidentified
MLYVGIDVAKNKHDVTALNVPGKTVLKPLTFSNNKAGFELLDLSLRQLNQDCLIALENTGHYAFNLLNFLHEQGYKVYTYNPLLIKKFAKSLSLRKTKTDKKDAHGIALKLLSDPNREQFQHDNRQVELKILARHIHRLKKKQSDWKVQYTRCLDIIFPELDKIVGKHSEYTYQLLTRYPNPQKRLEAGFDKLIEIKRLTASKIQDILSVAPRSIGTTSPAREFEIIENIKHYKRLIDKAETCVNDLMAEFNSVITTVTGIGNRLGAVILAEIQNIHAFDNPAQLQAFAGLDSSIYQSGQIDLAGRMVKRGSPHLRWALIQAAKACARFSPAFKAYLKTKLE

SEQ ID NO: 42997 - protein, 375 aa, unidentified
MKEKVRFLGLDVHAETIAVAVAEPDGEVRSLGTIPNRAESIRKMIKKLGRAEQLRACYEAGPTGYVVYWQLAELGVQCEVVAPTLVPIKAGDRVKTDRRDAEKLARCYRSGDLTAVWVPDEGSEALRDLVRAREAAKQDQMRARHRLSKFLLRSGQRPPSGVRPWTRPYLIWVAQLRFTQMAQEATRQDYLHEVEHMRERVARLEQAITEAVKLASPALRQVINDLQALRGIGDISAVTIAAELGQVSRFESARQLMGYCGAVPSEDSSGRRTRRGGITKTGNAHLRRIVVEAAWSYRRPPCIWYGLRRRQESISEETKEIAWKAQHRLHKRYRKLGAAGKDQRKIATAVARELLGFIWAIGTRAEAIVRQQAAA

SEQ ID NO: 42998 - protein, 407 aa, unidentified
MDLLKTVFGIDVSSRKSNVCIMVHGQKVNDYAISNDMVGFNQLLGDLKQVTNPQIIFEATGVYSRRLQAFLDMHELRYVMMNPLEAKRKTKDDLHQNKTDKLDALYLAKLQSEHPQRLAYVQSEEYQELMANNRIYEQASHDLITNRNRLHKAIQLTFPEIEHLMVNPRGKNYWSIALRFPHPDIVLETKETDIIDFLKGLSGIGKKRANDITQSLIRLAKVACPAVKKNSAHIRGLKMAINNILSAEEECQTALQEMAKLAPKRDLEILTSIPGIGENTALRIISELGDIRRFNNPSQLNAFVGVDPQVYESGNLTAHLSISKRGTAIGRKVLYLAINQIQSAKKVGNPCHIADYYEKRKRSSETASHKKAAIASIHKLLRTIFALIKNDQLYSYDVAKHNQRLLS

SEQ ID NO: 42999 - protein, 317 aa, unidentified
MPQSERIVGIDVSKRRVEACLRARRERLSQPSTPEGRQAMIAWLRQHDVAVAVMEASGGYERDWAAALRGAGIAVRIVDPKRVRYFARSAGRLAKNDPIDAEMIAWFAETFAPAAAPAHDPEREAVDRLMTVRAMLVRLESQIGQLGEHRQPPLVERAGRVIAGVIVRQRKRLETAIAARIARQADWAERHRIIQSVPGFGPRCAAGIIAWLPELGQIGGKPATALVGLAPYDDDSGGHRGERHIKGGRREIRDLLYMAALAATRCNPVIKAHYQQLRARGKKFKVALVACMRKLMVILNTMLMRGQMWNPPAVAVA

SEQ ID NO: 43000 - protein, 410 aa, unidentified
MHHKLKYLYIGVDLHKRHHTAVMMTCFHEKRDEIQFENKPSAFPKFLQQVEKMAKREGLTPVFGLEDVGGYGRGLAMFLNENKYEVKSVNPALTISIRRSSPNNKKTDAWDAECVARILISNLDTLPTANPHDLYYAISQLVTRRENIVSVVTGIKLQLHQLLGYHYPSYKKFFSQVDGKTALAFWLKYPSPSCLSGVNVDELANFLYKKSNRYMSTKKAGDILSLVQQDGDTSKDYQEANDFLVRNVVQDLIIRDHQLRQIDTALAKHLALLDYKLETMHGISTVTAAELIAEIGDISRFSSADKLANFAGIAPVQHSSGNKQKSKKSKLGNRSLYDIFYNLAIRQLGVSRAKKPNHPVYHAYYERKLAEGKTKWQAIICVMRKLVKVIYSMMKNKTEYKMPVLTEQAA

SEQ ID NO: 43001 - protein, 417 aa, unidentified
MSQTVYRRCCGMDVHKDTVVVYVLPAVGQTGTVVRKTYRTFYADLVRMRCWLQLLKVSEIAMESTGIYWRPLWNVLEQHGFRLLLVNPAQVKALQGRKSDRRDAQRIAEFLQDGRLDASFVPPPEIRELRSLLRHRVSLLEMRNQVHNQIRDLFETANLKLSSVVSDLLGLSGRNIIEALIAGQDSAERLSWKVRGNLRKKEKLVKESLKGCFNEFHRHMLKTQYQHYQFLSGQIKECEAEIERRMKPYEEKVLALTTIPGVDRITAWHLIAELGPDMSVFPDADHCASWAGMSPGSCESAGKQLSARTKKGNKHLRRILAQAAWATTRCKKGYLRAFFHRVKARRGWGRAIVAVAHKILVIAYTILKTGFPYQDLGSDYFDKLHPERTTRRLVERLERLGHSVILETSPSAKPQIP

SEQ ID NO: 43002 - protein, 354 aa, unidentified
MSQNPNAGIAIVGIDIGKNSFHIVGLDQRGAIVLRQKWSRGQVEARFANMPLCLVGMEACVGAHHLSRKLKEFGHDARLMPAKYVRPYSKGQKNDFRDAEAIAEAVQRPTMKFVATKTADQLDLQALHRVRERLVSQRTGIINQIRAFLLERGVAVRQGQRFLRAELPRILATPPNVLSPRMVRIIENLAGDWRRLDERVQNLSDEIEAVARQDAGCERLMSVPGIGPIISSAMVAAIGTGDGFSKGRDFAAWLGLVPRQMSTGDRTILGKISKRGNRYLRVLFVQAAWVVLIKPKSWERHGLKSWIGAAKKRLHPNVLAIALANKLARIAWGVLARGRNFEARTNTNATVQAA

SEQ ID NO: 43003 - protein, 382 aa, unidentified
MKKVTRFVGLDVHAETIAVAIAEPGRGGEVRSLGTIPNRPEAVRKLVQKLGGAKAIQACYEAGPTGYVLYWQLTELGVDCDVVAPTLVPEKAGDRVKTDRRDALKLARCFRAGELTKVWVPDPAHEALRDLVRAREAAKKDQLRARHRMSKFLLRAGRRPSDEIKAWSSAYATWLSRVTFEHTARQATMIDYLGEVDHMAERIQRLEQAIDDAIKTAPDVLRAVIDGLQALRGIAKLTATTLAVEVGNFSRFEHPKRLMGYAGITPSEYSTGKSHRKGAITKSGNTHLRRVLVEAAWSYRHRPGKGHALRVRQRSLPAHLNEIGWKAQHRLHRRYAALQGKGKPHTKVVTAIGRELLGFVWAIAVRIEKDHAVQSEGSRRAA

SEQ ID NO: 43004 - protein, 374 aa, unidentified
MKDHSEAFVGLDTSKLRNAVAVAEAGRTGEVRFLGEIENSAAATAKLVRKLAAQHGHLTFCYEAGPTGYGLYRQITSLGHACIVVAPSLIPRRPGDRVKTNRLDALDLARQLRAGELTAVWVPDGRHEAMRDLTRARGAAVEDLRAKRQQVSSFLLRQGLHYPGRKTWGKAHMRWLASRTLAHPEQRIAFEEMMLTVRQAQERVERLEQAISAALADWSLREVVTALMAMRGLDTIAATTFLAEIGDLSRFRTPRELMAYLGLVPSESSTGDKVNRGPITKAGNRRARRILVECSWSYRHPPRVGKDKQEKVAAAPQAVREIAWKAQHRLYKRYRALVRKGKLPTVAITAVARELAAFIWAISREVATAGAVAR

SEQ ID NO: 43005 - protein, 338 aa, unidentified
MKRYLGVDLHRNCFTVYTRQEDGSGESREWSIRSLKAFAQTVTANDAVAVESTGNTRLFCEALKGRGCRIVVVNPRQFEVISRSVKKTDEHDAKVLAEFLAKDMLPEVRMKDEVHAQIASLAQTRDKLVKLRTTLKNKVNNLLAARGILIRKESLASEKGLAGVLAAPVSELARLELGILVGEIRHLNESIKKLEGLLHDQGPKLPGWENLKSIKGIGDTGASVLLATIGKIEDFADEGKLAAYFGIVPRVSNSNETEHSGRITKRGCKLGRTTLVQCALIAARYSPYLQTYYRRIAAHRGTGKAIIALARKFLGIIYKTLKNNWVFEDFPNFVLAKT

SEQ ID NO: 43006 - protein, 375 aa, unidentified
MTTIARLGIDTSKSLFQLHGVDEKEGVILRKQVRRGQFLAFVAKLSPTEIGLEACGASHYWARQLQALGHQVRLLPPQHVKPYAGHNKNDKIDAAAICEAMTRPKVRERFVAVKSAEQSAAQMLLGTRDGLLHRRTQLSNTIRGHAAEFGLVTPKGLAHIEPLLERLAADEAVPALAKELFATLGEEFAALAPRIAQLEKRLKAFQRSDEVCRRLVEVPIIGPVIASSMVVKISNPAAFRSGRKCAAWVGLTPKDHSTAGKMRHGGITRAGDEALRAALVSGATAYIQQVKRGRTRPSPWLAALLKRKPEKLAAVALANKTVRIAWKLMVSGERYDRAKAEAREALGAARQGGSAPSPSRHHHIAAHGTTAMTTA

SEQ ID NO: 43007 - protein, 336 aa, unidentified
MEEAPSSSSADSLAFSLGIDVGKEALEVALRGDEEAIARTTVANDSEGHDELLRWLQDQGSGPEETSVCMEASGDFEKAIAQRLYEEDYRVSVVNPRRIKGYASSQLQRTKTDSADAALIARFGRREDPRPWEPPSAAESRLQELTRARQALKKEKTRTQNRLDEAEDEAVRRAHRGLLEEIERQIEDLEEEIEEHVEENSELNDQCSLLETIPGVGLQTAAIVVSELRSPERFESARQAAAYAGLVPRHRQSGTSVRGSPRMSKVGNGRLRRAMYFPAMTALRFNSAVKAFGERLKERGKKKMVVIGAAMRKLLHICYGVLKSGRPFDPSLHPGT

SEQ ID NO: 43008 - protein, 323 aa, unidentified
MQGKVLSEPNAMLAVYAGIDVCKEWLDVYVHPVGQGFRVTNDGCGLRRLKRQLQSLAVRCVIMEATSKYHRAAQRSLHEAGLHVAVVNPLRARLFAEACGQLAKTDKIDARLLALMGVALDPSETAPASLAIELLQEMVGARSAASAERTALINRLATFKSPFLRAELNRRLKALQSHIVRLEAEIGRLISADPVLARRYTILMSVPGIGPATAATLLAGLLEMGTLNAKQAAMLTGLAPVAHDSGPHVGRRAIKGGRKGVRNALYMAALSASRYNNDLAVFASRLRNAGKPAKIVLVAVMRKLVVMANALITQDRTWSPIAP

SEQ ID NO: 43009 - protein, 398 aa, unidentified
MKKNHILGLDIAQNSAVAQLDRADGTRCWHEKLTTDQAGWQQLEKLRTAHGAQWADTCVLLEATGVYHLPWAERLHAAGAEVYVLNPLLAARLHSVANALRGHKTDRVDVHRLCESGRLYADQLARFRYRPEAQRQGLKQLTSARARLRTTLTNLKKSLHSHLELVFPALLATQLDPASARVAAILAAAPTAGAWRTLPAAERRQLAGDKCQSLDQSCAATLADETLAQACAPAMHALLAAQQALVLQLDACDERIAPQLPAARVALIQSLPGFGERTAAVLAAYLPASFEGWGKPKQITARLQAYVGMDPRLRLSGNWTGKIKLSKRGIVPARTALYQAAFCSLRSDPENHAYYQSLRARGKKHKPAMIDLMRKQLRRLVAVLLSNQPYVAKSPLAA

SEQ ID NO: 43010 - protein, 386 aa, unidentified
MTIQTQVTSFIPRNYDVFAGLDVDKKSMAVVFADHDGAMRSLRMANSATPLLNYVRKRFPGQRVAFAYEAGPTGFGLHDELTSEAYTCVVVAPSKVPRAPGERVKTNRLDGRRLAESLRGGQLRTIHVPGRAYRDLRHLVQLRDTHVRQLTSSKLRIKSLLLYEGISFPEPSEKWTARAMRELQTLACSETVRFKLDDLLNTLHFHFQAAALATKQIRRYCLNDPELRQSVDLLLSLPGIGWIVSSHLVARLGDPQQIKNGRQIAGFLGIVSSEHSTGDKENRGEITRSGDSRLRNKLIQSAWTAIKKDPELRAFYRRIYQRHPKKVAARKAIVAVARKLTTRVYVVLHEQRPYVMRPDSSIAPLTAEETVGPRDRLDTAQNDQSR

SEQ ID NO: 43011 - protein, 394 aa, unidentified
MKLVGIDVGKNSHHFCVMDKETGEFNVTPSSFSNNKEGFDFLINSLKPYSKKSVLIGMEDTGHYHVALLKFLLNNGYTVALINPKTTDLTRKMEGGITKNDKLDTITICDVLDTPERKKQYRITKVDRFDLYEQRQLTRHHHNLKEELNLYCNRLQKSIDLVFPEFNTLFSSKYGIVYMNLLKTFGSAEAIASTDIRTIRKCFEIKGRGGRISLTAEKLKECAKNSIGISSEVETIQIKHLVSQITLIKEQIAEIDKKIEEFSITNNSPILSIPGISHFSGTSILAELGDIGNYSKPSQIIKFAGVAPYHYESSQYNAQHTAITKKGSKYLRKTLYQIILPVINNNPVFKKYYRLKISQGKGHRCAQGHCIRKLLRIIYHLLETGQSFDPALLR

SEQ ID NO: 43012 - protein, 356 aa, unidentified
MSREVKYIGMDVHQEAIVIAVRDTRGHVVMESIVETKASSILQFIRGLQGELHVTWEEGTWAAWLYDLLKPHVHRVLVCNPRRNALLKEGSKNDKVDARKLADLLRTGMLRPVYHGEHGLRTLRELARTYQTLSQDLNRVMNRLKALYRGWGIACGGTQVYAPRYRDEWLGKIEHAGVRRRAELLYQQLDGLQALRRTLRSELLAESRKHKASKLLRQIPCIGPIRAARLVALMQTPHRFRSKRQLWTYSGLGIETHDSAQYRFVRGELQRAKKPQQIRGLNRNHNHEMKDIFKGAATRASCGVGPLRDFYVALLEKGMKPEMARLTLARKIAAIALTLWKKEERFNAEHLKTQAA

SEQ ID NO: 43013 - protein, 344 aa, unidentified
MQAEYDGRQIVGIDLHRRRSVIVRMAEDGERLGSARIDNDPMALMAEIAKAGEHPQVVLEATYGWYWAVDVLQDAGAEVHLAHPLGVKGFAYRRVKNDVRDAADLADLLRMGRLPEGWIAPPALRELRELVRHRAKLVAWRSGLKASVHAVLAKQGLHLRVSDLFGVGGRQLLATAPLDAAYRLRVNALCRLIDALDFEIQAVSGPLRVALAGDPGFAAVQAVPGVGPVLAAIFVAEIGDVHRFTSAAHLASWAGLTPRHRESDTVVRRGPITKQGSTLVRWAAVEAAHGAGHAGWLSEKRATIAGRRGRNVATVVVARKLLTLVYYGLRDGHIRALAQTRAAG

SEQ ID NO: 43014 - protein, 341 aa, unidentified
MPKFTVGLDIAKSVFQVHAIERSGQTVIQRKLRRNSVLKFFAGLEPSVVGIEACHSSHYWGRELIKLGHTVRLLPTQYVKPFVVGGKNDANDAAAICMAVTRRDIHTVPVKSAEQQSLQSLHRMREKAVQERTAKSNQIRSMFSEEGHVFPAGLPSLRKGILTLMDADDDETMLTPILKRLGQMYLDQMIALKAWLTELDAMIDENFRNNETCQRLATIPGIGPVIATAMVGLVGDPAQFKNGRRFAAWLGLTPRQHSSGGKTRLSRITKRGDSYMRKLLVQGARAVIYNVHRKTDARAEWIKALLARRPANIVAIALANKIARISWAVFMRGEKFVSTAS

SEQ ID NO: 43015 - protein, 348 aa, unidentified
MAKVSMIGVDLAKNVFQVHGVDAAGKVVVRRQLRRGQVEKFFAELPPGVVVGMEACGGAHHWGRVVQKLGHEARLMPAAYVKPYVKRNKNDGRDAEGVCEAMGRPTMRFVPVKSLESQAVLVLHRTRRLLVRQRTMSSNAFRSALSEFGIVAAQGLKGLRSLMEALEDPVSAIPDTARMALRVLAQHWERLNADICKLETQIVGAAKTDAVARRLMAIPGLGPIGATAILAAVPDARVFKTGRDFAAWLGLTPRQFGSGGKQRSGGISKQGDRTLRTLLVVGATAYLRYERARARDPWLRDLLARRPFKVAAVAYAAKMARIIWAMLVTGEHYRAADKRRRVPIEAAA

SEQ ID NO: 43016 - protein, 340 aa, unidentified
MSVIRIGLDVAKNVFQVHGVDEDGNVVIRKRLRRQNLLMFFGSLPPCLIGVEACSASHHWARELTALGHQVRMMPARYVKPYVQRGKNDALDAEAICEAVSRPTMRFAAIKTTEQQSVLALHRTRQLLVKQETMLANLIRGCLGEFGIVVPLGIRRVTELIGIIRDEADDRVPHEARTAMTAVADQLCDLQRRIKGIERAIQTWHRSNEASRRLATIPGVGTITASAIVATVGNPGEFKSARHFAAFLGLTPKEHSTGGRHRLGRISKQGDVYIRRLLILGGTSLVRYARGAGGSAWARQLLARRPTRIVTVALANKAARIVWALLARGGVYQPALAQAA

SEQ ID NO: 43017 - protein, 309 aa, unidentified
MEQFVGIDVAKDRLDAHVRPGGEAFAVARDGNGLAMLVQRLQALAPALVAMEATGGYETVVASAVGAAQLPLAVVNPRQIRDFARATGKLAKTDRIDAAAIAHFAEAVRPAARPIADAEAQALGELVARRRQVIEMIIAERHRRRLAAQRRVIRAIERHLALLQAELSELEADIDGAIRKSPAWQADADLLVSVPGVGKATLRTLIAELPELGHLSRRKIAALVGVAPINRDSGTLRGRRTIAGGRAAVRTGLYMAALVASRANPVIAPYYAKLRAAGKTGKQALVACMRKLVVILNAILRDRKPWQPA

SEQ ID NO: 43018 - protein, 411 aa, unidentified
MPSTLFVGIDVSSQSNSVFFIDQDGNNLIKKPFSVSNDIPGADSIISEVISHANAIDASCVKIGMEATSHYAWHLHLHLASSPDLAPFNPKFFVMNPAVVSGFKKAYTHLPKTDDFDARVIADCVRFGRVNPTPMPDFKYAALQRLTRFRYHLVQTISSEKSRALNLLYLKFSSYKEDCPFSDVFGSASTSVFDSFTPDEIAVMPMEDLVDFVLSHGNNRLSNPEEIAKTLKSAANRAYRLNPDMCDTVSMTLTMTLENIRFLESQLKKLDKEISKQLNAFRQTLTTIPGIGDVLAAGLVAEIGDVKRFKSECAVAKFAGLVWNKYQSGNFSAEDTSLAKCGNQYLRYYLVEAANCVRIHAKEYADFYCKKYNEVTKHQHKRALVLTARKLVRLVFALLSKGQIYQPGGNG

SEQ ID NO: 43019 - protein, 320 aa, unidentified
MQPSILTIGLDIAKSVFQVHVVEGAGQVVLRRQLKRRQVLAFFQKLPPCLVGIEACASSHHWSRELQALGHTVRLMPPAYVKPYVKRQKNDSTDAEAICEAVTRPNMRFVPTKTVEQQSCLMLHRARHLFIRQQTAVINSIRAYLAEFGIVAAVGRRGVEQLLEVVADPAERRLPEVARMCLAALGSQLRALKAQILEFDRRILAWHRSNATSKRLDAIPGVGPALATALVASIADPKAFRSGRDFSAWVGLVPKQNSSGGKDKLGSISKQGDRYQDPRHQASALAHWIVGAAAHQGRCHRARQQTRQDGLGHDGQERTL

SEQ ID NO: 43020 - protein, 378 aa, unidentified
MTISSSLPTQKMSINTNSVIVGVDVHKYSHTAVAMNPWGQEKATLTFSNDNLPDFIAWLEGLGDRASVVVALEDVNSYGVHLVKVLIREKFPIRYVPAILTERERKTSTKRHKSDHVDAKRVGRVLLTKYDETLPARESIATTDELEVGTTLDLLLMERRDLVRNQTMLKNQLHALLHQYYGDHYADQFTRAFNRQAVEFYEDDLLSPREGQGLLATSILRRLRRLTLLEEQIATITKEIVNVGDRSEAVVALYHELHGCGMITAAAIVAETTTIRRFPTKSKFATYAGVAPTDHSSGQHVRLHTNPFGNRRLNKALHSVALSQIAIKGDPRGKEYFKRKVEEGKTKLWALRCLKRQIANQVYRILLRASIPHLPLAV

SEQ ID NO: 43021 - protein, 390 aa, unidentified
MDARTVNNLPPAATHDGATRCLIAIELSKRSWVVAANTPLSEKISRYTLKACDAKGLLELIEKIRTRIARELKQPGEVICCYEAGYDGFWLHRLLEAHGIRNYVIDPASLQVDRRARRTKTDGVDVERLLRSLMAYLRGEPRVWSVVRVPSVAEEDDRRLHRERDRMINERTQHVNRIKALCALHGIYDYEPLRSDRMRRLEQLRTGDGRQLPPRVGAEIRRELQRLELVLQMIKAIEKERNAIASGKAASSHPYANKIRGLVKIKSIGSEIATVLAGEVFYRSFDNRKQLGSYVGLTPTHFQSGPMCRDQGISKAGNPKARTIMIELAWSWLRFQPDSRLSIWFRERVGSAKGRIRRITIVAVARKLLITLWRYLENGLVPEGAILKTK

SEQ ID NO: 43022 - protein, 530 aa, unidentified
MCTLILARTPCYILTRGLNDHRGISVTTHVDLPDGNDWLHPHQGGIFLYGFATGYSSSRIAWDLQAVPLLKYEALYFGIDIGKAKHVAGFVSSTLLERHERFEACPALAFDNSRRGFHALFERLRGLAQVEHCFVLMEKTGHYHKPLQQYLQELDIPVYLVHVQERPKGMLKTDKRDALSLANHLYSQLELGVQFSSKTQLVRRAVPSTPAAAQLKGLIRHRYELVRESTQRKNKLTAICDELFPEFVQILHDPNLPTALALRERFPTPQAIATASFTVLQEVRRKTRFLSDNKLLELQELAMNSIGIKDLVRQRSLVLEQSQLIRELRLLQEHIEQLNGEIKTIVENAREAQILASMGIGPIQVATIIAAIGSIENFPNAGSLKSYFGWAPVVAQSGKTMDQTTQTHGGTRTIKQMMFLIVTMVIRQETEWAILYQRLVQTKCPYDDRRGVRTGKLRVIGRVAGQMIETMYALLKTDAEVLSKVPQGKEPPPPFLYDPELHRKHREGHYRPLKSSPRPQVITLLPDLQK

SEQ ID NO: 43023 - protein, 422 aa, unidentified
MKKHRYSATNIKQADWKQIGAGTTGRRIVFGVDVAKEDFFGVLMGEDLAVSATVKWRHPEQTRALGAHLIGDLHADRLEVAMEPSGTYADALYRHLSELGIPIYRVSPKRVHDAAEVYDGVPSLHDAKAAYIIGRLHLDGSSSLWKEVPEQRRNRQALIAELDLYQDQQQRNLNRLEALLNRHWPEAVRVMELKRVSLLCVLAEYGDPASIAAHAEEAWELMRHNGRGLLSAETIEQLLACAQDTLGVPCTAGERHLLRVLAEELLRTHRQIKRIEAQIDQEVHQDALLTRLAAVTGKTTSLVLEAALGSPLDYPNPHSYLKAMGLNLKERSSGKHKGQLKITKRGPGIVRKYQYFTALRWLYQDPIIALWYRNKVRRDGGRKGKAIVAVMRKLALSLWYVARGEGFDSRKLFNVRAFGMAQ

SEQ ID NO: 43024 - protein, 369 aa, unidentified
MSDVITYVGIDAHKKDLFIAMLVGNQATPVAWTVPNEPNAIRRLAKKLEREAPGPVHAFYEAGACGYALQRQLTTPRVHCDVVAPALIPRKPGERVKTNRRDAHKLGELGRAGLLTAVRPPTPDEEAVRDLCRARDDAREDLQRCRHRFGKLLLRRGLQYRVGRHWTKAHRRWVDSLTWPHEAERVVVDDYLLAIDQTEARLRELDQQLTAVAATEPYRERVAWLRCFRGIDTLSAMLILAELHDFRRFASPRALMAYVGLVPGEHSSGDKHRRGRITRTGNALVRRLLVEAGWHYQHRPGVGVALARRRQGQPARIIAIADKAQQRLCRRFQYLVVLNKPRPTIVVAIARELVGFLWAALQPALVVAN

SEQ ID NO: 43025 - protein, 484 aa, unidentified
MKPKTHRQTENASGHATSVAWHEMNRKQRRDWTRKMQAEEISLQVVHPDAAGIDIGNEAHYVAVPPSRDDQSVRRFGCTTAELKDLAAWLKECRIHTVAMQSTGVYRIPVYDLLEEAGFEVYLVNARETKNLPGRKSDVQESQWLMKLHTYGLLRNSFRPSQEIRIMRTYWRQRNDLVRSAGRHIQRIQKALTQMNLQLANVLSDVSGVTGQAIVKAILAGERNPLKLAALRDGRVKASEVDIARSLEGNWQDDRLFLLKQEQDGYEFCVRQISECDARLQQYLKQREDRSAGASLPEEKRRERLRKKKENKPQFDLRADLFRMTGTDLTRIDAIDVRTAATVISEAGWDMSKWRTEDHFVSWLRLCPDNKISGDRVIGKGRLPTNNPLTVALKMAASCLRQSNSYLGAQFRRLRTRLGPPVAIKAMAAKLARLIYRMLRFGMEFVDQGAEAYEARHRQREVSFLIHKAAKLGFQLTELNTLQG

SEQ ID NO: 43026 - protein, 355 aa, unidentified
MNSTKYIGMDVHKESISIAVRNAAGKIVMECVIETKASMILQFVDGLRGDVQVTFEEGTWAAWLYDLLKPRVTKVVVCDPRRNALLQEGNQNDRVDARKLAELLHHNQLRSVYHGDHGLRTLKELVRSYLTITKDLSRVMTRVKALYRSWAIPCTGKQVYASRHRAEWLGKIGEPGVHRRAEFYYQQLDALRLLRQAVRRDLLAESKKHPAWKRLCQIPSIGPIRAAVLLGILQTPHRFRTKRQLWTYSRLGIEVHSSADHQVVKGQLERKKKHIEIRGLNENGNHDLKNLFKGAAVVASTKPGPFEEFYTALLAKGMRPEMARLTLARKIATIVLIVWKRGVCFDAQHLKPQTA

SEQ ID NO: 43027 - protein, 370 aa, unidentified
MKLSVGVDLHKSQFTVCMLSEDREVLAHSKHLTNKKGYEDFINTLEDYENEGDEVTVAVESTGNTRFFRNQVVKKGIEVKVVNTAKFKVVTQSVKKTDRHDAYTLAEFLEKDMLPESRLCSLESEQIRRVIKARSIVVKALISLKNQIHGLLLSYGIESKRGQLQSKKERQRILRGLEDHKFIGNAALTVKPLFNTIDKLYEEVKQLEKVLEVLVKNDENVDLLKTIPGVGMITAATIRAFTDDINRFESSKKYAAHSGLVPWVQNSNDTIRHGHITKRGPKELRTAFVQVVMGMIRYKKATGAYRVMNKYHIMKANKGSGKAIIATARKVSKFVWAMLTNRMPFDPLKMINMKEYRDMQIAACYAAMAG

SEQ ID NO: 43028 - protein, 385 aa, unidentified
MFYVGIDIAKTKHDLACMDETGETVITNFRFANSYQGFHQLKIKLEQLSPITQDVQIALESTGHYNYNIVAFLREIGYNVFAYNPFIIKQFAKSQSLRKTKTDTKYTLLIARKLRSDVTPDYYQTDKVMDELKELTRYQNRLIQSRSKCKNLYIRLLDIIFPEINSYVSNLHSHFVYELLTKYPSAQKIARARVSSLLKIKRLTADKAHQIQEIAKQTIGNTSTVLSLELVQLIESIKHYDKQINQVQEEINLLMIELNSPITSIPGIGSRLGAIILAEMKTIHNFRNPNQLQAFACLDPAIYQSGQMDNTGHMVKRGSSYLRYALIQAAKLISIYSPHFKAYLKLKISQGKHYNVAVTLVAKKLIRVIYHLLKTNQTFDEAKLR

SEQ ID NO: 43029 - protein, 332 aa, unidentified
MAEVTRFVGIDVSKAQLDVALGDNEGTFSIANDEHGIRELLKRLTPGADLVILEATGGLEVAVAGALATAGIAVAVVNPRQVREFARATGRLAKTDRLDAQVLARFGEAVKPPVRPLKDEQAQALEALVMRRSQLVAMLTAEKNRRTNAAKVIRRSIDEHIRWLEKRLSGFDDELSDLIRATPIWRARDELLRSVPGVGAVLSVTLLAHLPELGTLTRKQIAALAGLAPFNRDSGTLRGSRCIWGGRAQVRRVLYMATVAAVRANPNIRSFYTVLRQRGKHPKPALTACMRKLLVILNAVLRTNTPWHTLTPAASISTFSPLPGAVTQHGCC

SEQ ID NO: 43030 - protein, 339 aa, unidentified
MREFIRIGVDVSKGFFQVHAIEGEGSSAVRRKLSRAKFLSFFAGIAPTRIGIEACGSAHHWARELRALGHEVVLMAPAYVKPYLKRGKTDANDAAAICEAMSRPDMRFVPVKSADQQAVLMLHKTRALMIKQRTMAVNALRGHLSEFGLIAARGIHRIKDLLALAETDERLPEAAREATAMLAAEIQGLDGRIDGLEAKIAAASSPMIRHLDEIPAFGPLIASAMVAFNPDPRAFRSGSDFSASLGLTPSQHSSGGKEKLGHITKAGNRCLRTMLVVGCTSVLRVAHKYKGALAEWIVAMRARKPERVVAVALANKLARIAWAMMATGEAFRKELYFKA

SEQ ID NO: 43031 - protein, 343 aa, unidentified
MHIASIGIDLGKTNFHLVALGEHSKVVVRKKFSRKQLLAYTANLQASLIGLEACSGAHFIGTALRNQGHEVRLIPAQFVKPFLKSNKNDFLDAEAIAEAVARQNMRFVPIKTDDQLDLQAMHRVRDRLVHRRTAVINQIRGFLLERGLSFAKGPANLRNRMPAILEDAEQNITPRMRMLLDQIWQEWKRLENDIAIISDEIERISNEDEPCQRLRQIPGIGPLVSTATVAAIGNGAAFNKGREFAAWLGLVPRQHSTGGHAKLYGISKRGNIYLRRMFIHGARAVLLRVKNKTGSFGPWVHQLELRAPRNKVIVAIANKLARIAWAVLSKQMDYRPTPVVATA

SEQ ID NO: 43032 - protein, 321 aa, unidentified
MNASIFVGIDIAKFSLQIACLELKLETQLPNSLVGWNRLVKLLKIHGAKVLLICEATGGLERGLVDQLQKADLKVCVLNPRQARDFARALNRLAKSDKIDAAMLAEFGRRMEPRPAVKVAPWVRTLAALVGRREELTAMRTAENNRLEQNLLSFVAKQLNASIKRFTKDIQALEVQIDRLMESSPELKTKHQLLCEVQGVGSITASTLLATMPELGSLESNQVANLLGVAPLNCESGQWRGKRRIYGGRRFARRVMYMASLSATRHNEILQTFYRRLVQAGKPKKVALVAVMRKLIIYLNRVLQPKNIVTFPAPTAQAPCF

SEQ ID NO: 43033 - protein, 352 aa, unidentified
MNQIKYIGMDVHKATTVIVVLNTAGKAIAEAVIETTSSSIVDFLKSQRGTLHVTLEEGTQAAWLYDLIRPHVANVVVCDPRKIPKQGTKADKIDAKRLAELLRTHALTPVYHGEQSTKDLKERIQSYTSVVEDGTRIKNRLKALFRGRGIDCSGSSIYNPEERKQWLLKLDTSAVRARANRLWEELECVERLCEEAEQELMAEARKHAAFKILRSIPGIGPVRAAVILGVAGTPHRFRSKRQFWTYCGLSVVTETSSEYTVVNGRVGRSKKRPLVRGLNRNYSRTLKGTFKSAAKTTASGPWKSHFEFMVANGKRESLALLTLARKIASITLALWKKGERYDQTKLKLLHAA

SEQ ID NO: 43034 - protein, 343 aa, unidentified
MEDTIYDHYIAIDWALENMAIARMTKKSNKINVIDVPSDIGDLRAYLKNLKGSKILTIEETTTTQWLYTELKDYVDRIFICDPHRNRLLTEGPKTDKIDASKLVQLLKAGLMKEVYHSNDKFLYLRRLVSGYEDLVSAGVRTQNQRYALLRACGKKGKEKKDLNLNSRGEQFVLKCLDRQIKAYEEEKNGYEKEFARLAKKYPEIRHQKTLPGIGLINAVKIVARVVTPYRFADKGHYLSYSGLIKHKKISGGKSYGKKKPRYCRQLKTVYKSGVFAAIGGNNPINDYYEFLRRDKAYPENIARHKACRRLATLSLGVFKSGKKYQPHRENYVESKKKMSSGL

SEQ ID NO: 43035 - protein, 381 aa, unidentified
MKKDSIARLQVTKSQIRRMAAKQRLTVGLDLGDRSSRYCILDEAGEKASEDQLPTSKAGLDMLFAKMAPCRIALEVGTHSPWVSRHLAAMGHEVIVANPRKVRLITQSVKKNDRMDAEQLARLARVDPRLLAPIRHRGPEAQADLAVIRARAELVEGRTKLINAARGLTKPMGERLKSCDADTVKESMADGLSEATQKVIRPLLKSVEVITQQIKVYDQQIQEIEKRYPETKLLKQVHGVGPLVSLAFILTLEDAERFEHSRDVGPYLGLTRKQRESGESAPELGISKAGDELVRRLLVQAAHCILREDAPDSDLKAWGLTKVGAGAGKKGSKSRKKKAVVAVARKLAVLLHHLWVTGEVYDPQYNRKAVEASKRSKKAAA

SEQ ID NO: 43036 - protein, 346 aa, unidentified
MTIVGCDFHPSWQQIAALDVETGEITERRLMNGNGEAERFYQALPAPSLIGIEACGNSQWLIELWQRLGHEVWVGDAAQIRASYVRKQKTDRRDAAHILKLLVENRFPRLWTPNAEQRDLRQLLIHRHKLVSLRSRVKGGLQHLALNRGLQKKNKLWSAAGQKVLCELQLDPWAACRREDLLGLLASMNQLIGKLDTAVERAAQENSQARLLMTQPGVGPITSLAFVLTLGDVSRFKRGKQVASYLGLIPRERSSGGKQRLGAINKQGNMFMRTLLVESAQTVTRLDEGFRKQYVQRCHRMARGVAKVAAARRLAVRLFWMLRTNTKYPEIVRIESSSTLAVVSES

SEQ ID NO: 43037 - protein, 339 aa, unidentified
MEVTTIGLDLAKNVFQVHGITADEEVEFNRPLRRAQLLPFFAKLAPCLIGMEACSSAHHWARELTAMGHDVRLIPPIYVKPYVKRGKSDALDAEAICEAVTRPTMRFVAIKTVDQQALLSLHRARDLLVRQRTQLINGLRGMVAEFGVYIAKGLARVIGFAEDILAGEVLDLPDIANEVIHNLCEHLMALHTRIRWYENRLKQVAKEDARVRLLRTIPGVGVVTASAIIASIGDGHQFENGRAFAAWLGLTPANKSSGGKEKLGRITKMGDQYLRSLLVVGMTSLVRQTRSHPERASKWLTSLLERKPARVATVAMANKTARIVWAVLTRNQPYNPHTA

SEQ ID NO: 43038 - protein, 325 aa, unidentified
MSPYIQGRAGKVKVMGTCFIGIDVSKTHLDVAGLPDESSWEVDNNKTGITRLIRLLEKLDPERIVMEATGGYEKNVMFALEEAGLNVVVANPRRVRDFAKAVGKLAKTDRIDALVLARIAETLRPEVREPHDRFIQELACLVKRRSQLKDTITAENNHLEMASGFVKRDTKSHVKGLEKRVAKFEEYIMETIQSDPVCLKKYKIMTSVPGIGVQIAAALLAHLPELGKLNRHEIAALAGVAPFNRDSGRYRGKRAVWGGRAPVRKALYMAALVGTQHNPVIKKFYERLINQGKPPKVALVACMRKLLIILNSMVKNDQHWRPCFS

SEQ ID NO: 43039 - protein, 310 aa, unidentified
MQSYYVGLDVHSRESVFVVENEAGAIVARGSVPTMVNGLKQLRDGCGLPAATGVALETGTSAFFVARELARLELKPVVIDAHEVRRKAQRPEQKSDTRDALELCEGLRRGFYRSIVHVPSPAISDLRTTLSRRRHFIRIQTAEVNAVKRLLRGVGRNSGRRGSLRTDAHWQSLLAGDLVPEQLQEHVRHHYAVWRQGAERVRALDLSLGESARERRDAVKRLETVPGVGPIVALTAIAVLAEVSRFESAKHAASYAGLVPSTFQSGERDAHGHITVRCYARRRTTHAVPSIPCIRTSPGFARGAVTRPRW

SEQ ID NO: 43040 - protein, 314 aa, unidentified
MSMETKFVGIDVNKSVLDFDCLPVSAPRQFTNDAEGIVALVDLLKDSAVDRIVIEATGGYETAVASALAVAGLPVVVVNPKQVRDFAKAMGHFAKTDRLDAKVLALFGERIKPPLRTLPDEAQRALADVLGRRSQLVVMRAQEKARLATVAAVARKNVEQHIAWLDKCIAKLDLDLGDRLRKSPVWCSKATLLDSVPGVGDVTTFSLLAQLPELGTLNRQKIAALVGLAPFSDDSGKRKGVRYIRGGRADVRCALYMATLSAIKHNPPIKAMYDRLIKVGKPFKLAMTACMRKLLTILNAMLKTNQTWKMQPSA

SEQ ID NO: 43041 - protein, 435 aa, unidentified
MDEVTDEPLYRERVCGIDIGKAGMAATIRVPSDKNPARRAAETRSFGTTRREVLALADWLRCWQVPAVVMEATGDYWKPVFYRLEAEGFECVLADARQVKNLPGRPKRDPADSRWLTACFERGAVRACFVATPEFRLIREHTRYRRDLTAERTREKQRAEKLLESAAVKLSCVLSDLHGVTGRDIMGHLIAGERDPKALAQLARRSARRKIPQLEEALDGAEFFTPQHAALLAAMLARIDQVTAAIDELTAAIERLLAPCEEQLQQAESMPGWGRRAAQDAIAETGPDMGRFPTGAHLASWAGRAPLDHQSGARKGRARSKKGNRYLGAVLGETAAAAGRTQTREGARYRKLARRTGKAKAQVALGNTQLKVYHKLLSTPGTRYEDLGPDYYDQRAQAGRQVAHHVGKLSALGYEVTLCRIPGPGPHDPGQAHTA

SEQ ID NO: 43042 - protein, 418 aa, unidentified
MDVLVDRCAGLDVHKDTVMAVVRRPTANGSGREQEVRQYRTFTAALRELRAWLIAERVTQVAMEATGSYWKPVWHVLEAEDGYELRLCNPRHVKNLPGRKTDVSDAAWLAQLLECGLLRGSFVPSPVMARLRDLTRYAKKLTEERTREIQRLQRVLEDAGIKLDSVASDVMGKSARRMLEALIAGERDPAVLADFAQTRMRVKIPELRLALEGGFSEHHALLLRMLLDHIDHLTAAVDRLDAQVEAEVAPFSQAVELLGTIPGLGARTAWVILAEAGPDMTRFPTAAHLASWAGLCPGNHESAGKRPSGRARKGDTALRTAMVEAAWAATRTRSTYLGAQYQRFRRRFGSRGETKAIFAVAHTMLVIAWHVIAEQKPYAELGVDYFTRRADPEVHARRLAREIEKLGFDVTIQPHAAA

SEQ ID NO: 43043 - protein, 305 aa, unidentified
MSGAIGIDVSKASLDVAIHGDSQQKSFPNTPQGHRQLGKWLVKLTPRQVVLESTGSYDQAVVDALYEAGLPVVRMNPRQVRDFAKATGQLAKTDRLDAFVLARMGHVLELPRYAPKAQWQRRLAEWVHRRTQVVDMLVAERLRLETVHDPLLRRMARRQIRQLEQARAQLEQGIGQQVREQPELQVLRSLKGIGPIMQATLACELTELGRLSGKAIAKLVGVAPLARDSGTLRGRRTTWGGRPQVRAPLYMAALTAMRLDPHLQAFYRGLRERGKAAKVAIVAVMRKMLVILNARMRDHLAATTA

SEQ ID NO: 43044 - protein, 341 aa, unidentified
MEQATTIGLDIAKHVFQVHGADAAGHVLFRRRITRGKLLGFLAAQAPCVVAMEACAGAHYWAREVGKLGHRVRLIAPAYVKPFIRRQKNDAADAEAICEAAQRPSMRFVPVKTEEQQANGIVFRARDLLVRQRTQCVNALRGHLMEYGHVFPKGITHVETLVAVVEDPQSSLPDSVRVILKLLVDTFTALEAQITALDAEINQRSKSDPTARRLMTIPGVGPIASTAITALVPAAEGFPAGRDFAAWLGLTPLQKSTGGKQKLGAVSKRGERTIRRLLIIGASAVVQQASRRGAPKGSWLAQMLARKPKMLVTVALANKMARIVWALLVKGGTYRTPTAAA

SEQ ID NO: 43045 - protein, 468 aa, unidentified
MFLSPTNKYAIKRGRSVRQENSVLPGSPDPDYSLFPASLSHDRMIGPTKSPGKAGGLVGRQTLSCRQTSQGGGAMPELFVGIDVAKDTSSAQGIDSNGNGRFSLTFPMDSEGFMQLWKAIAAHSKDLSDVTAAVESTACYHINLYSFLTARGIAAVVINPLLISNFTKLSLRKTKTDKKDAMSIAQFLLAHEASISQLAVSQDLQDFRDIARERESAGNMLTVHKVEIKRLLQSTFPELERIGNLSTRVIQDFIAEFPSARLVKMAKPKAIQKILQRKWVETKLTYTAEDLIRAAKQSVATISPAKELLLQGKVRTLQHLQERYEGLTKILTEYCKASMLEDFEIMTSIDGINKRTATTFLAEVGCIGNYASLKKLIAFAGIDPMVYQSGKFEGSSRISRRGNRHLRRVIWLMTTCVIQHNTTFKASYMKKRGEGQPFKKAVFATAHKLIRVIFAMLSQKTMFMEACR

SEQ ID NO: 43046 - protein, 374 aa, unidentified
MSSNVCHQIIYLAIELSSSSWVIAYRVPRNDKAKLHRLEAGDGAGLLAFIAGLRHRLDPPDDASTLVVSCFEAGRDGFWLHRLLTAHGVINHVVEPTSILVTRGARRAKTDRLDAVGLLRVLAAKFAGDPGACRTVVVPSVEEEDAKRPHREREFLVQERVRIENRIAALLATQGVRERPSLRSWDVDMRALRTGDGRPLPTHLVAELNRLRWRLSLTLEMIRELDAVREQALEAQHDSASRTVKALCTIRGIGVNFASVLTREVFYRTFDNRRQIASYLGLAPTPFQSGGMDRDRRINRAGNSRARKTLVQLAWLWLRYQPESSHAAWFRDRVGSLQGRIRRITIVALARKLLIAIWRFVTLSLAPEGAIIAA

SEQ ID NO: 43047 - protein, 395 aa, unidentified
MEFLKYGLGIDMAMEKFDACISIIDKQQHVMIRAQCSFNNNKKGFETFILWVTKNTKLPIPAVYLMEATGIYYEQLAWFLHNKKCSVSVVLPNKAKKYKEALGLKSKNDRIDAKGLAQMACEQNNTIWKPLSGNLYVLRLITRQIQSVSEQSTVLKNQLHALEYCMYRDKAIEKMYAGQIDLLQKNKKSLQLRVEQIVEKDEILKKKFKNIGKIKGLGLQNLAVIVAETNGFTAFENIAQLVSYAGYDVVENQSGKRSGKTKISKKGNNHIRRCLHFPAFNMITYDVAPFKNLYERVYEKSKIKMKAYTAVQKKLLAFIYILWKKDEAFDPNYQDKESGDEESAPSFASVPQEPLIACGNEEKKLNLIKQKITPAITRVTQDKHPSKYRRMPSFA

SEQ ID NO: 43048 - protein, 417 aa, unidentified
MKLLFIGDDWAEGHHDVAAQDDAGKTLARRRLPEGADGIARFHEMVGSCLGEDAEPDPARVIVVIETDRGPWVKALAAAGYRVYPANPGQAARHKETVANPGKKDDFFDAGCLADMGRTRRHQMRELAAGSDVAEAVKIAARAHQKLVRERTRHLLRMRPALREYFPAALEAYADLTLAGKDALELLAKAPNPESAARLTVTQVTAALKRAGRRGDLAQRARDIQAALRAPHLAQPDVIAEAHAASVQAAAAVITALNEQVKIMEAKVSGLFRRHPDAGLYLSQPGIGDITGARIPGEFGDAPGRYATAKARKNYAGTSPLTIQSGKKKTVHARYIRNRHLIDALPAQALTALSVSPGARGSYDDLRARETGHDDAMRRVASRLAGILHGCLKTGREYDEATAWSHRAGNPEATKAA

SEQ ID NO: 43049 - protein, 356 aa, unidentified
MSIVAHSYPFVVGVDTHAKKHVFAIINTATGSLLQSRDFPTTSTGINRAIAWVARLTCADLAALWVIEGAASYGALLAGAVGAAGYPVVEAARMDARTHHGVGKSDSLDAHRIAAAVLPLDEQQLRRPRLNEGVRAGLRILISARESMTTDRTRAVNALTALLRVNDLGLDARKPLTGSQITEVSRWRARDEPLAISIARSEVVRLANHISKLDAEIKTNNGQITELVQISEAAPLLQENGFGPVTAAICLTAWSHQGRVRSEAAFASLAGVSPIPASSGNTVRHRLNRGGDRTLNRALHMAAVSRMTFDAATTAYVEKRQAEGRTKREIRRCVKRYLARRIYRTLNAAKLDPCTV

SEQ ID NO: 43050 - protein, 411 aa, unidentified
MSTTLLPHAPAGAARSASPSSPVDGGALPVGNIYLGLDVHKDSVTIAVLPAGSAAPSAITRLPNDERKLQRYFARLAAGGATLAACYEASGAGYVLQRAMTRWGYACTLVAPSLIPTRPGQQRKHDRADATALARLFRAGELVAIRVPSEAEERVRDLVRCRETFQRDALRARHHVLKFLARRGHLYRAGTHWTRRHWAWLRTLERDGALAEADRVVLGEYLAMLEYTLGRRDALDRRIEAVALTPAYQTAVARLRCFRGIDTHSAMVLQSELGDWARFDSPRELMAYLGLVPRESSSGPTQRRGAITKAGNSRCRHVLIQAAWAARRRPGTGATLRARQADQPPHVIAHALKAQHRLHARYQRLVQTKGPAIAVVAVARELAGFLWAVMRELEQERAVTRTRSAQMRPSM

SEQ ID NO: 43051 - protein, 375 aa, unidentified
MEHTRFIGLDIHKERISVAVAESGRSGAVEYLGEIANEPGAISKLCDRLRRPGKPLAFCYEAGPCGYGIHRQLTRLGHQCDVVAPSLIPTKAGDRVKTNRRDATMLARLHRVGELTPVWVPDADHEAMRDLIRLRSVIRQIVTRARQHLQGFLLRHGRKHGRGTAWRMAYRRWLSTLAFEHPAQQIALQDYVDAVMDAERRLKRVEEQVFGLLPDWNLRLVVDGLQAMRGIALINAVVLVTEVGDFTRFSNPRQLMAYFGLVPGERSSGETVRRGAITKTGNAHVRRALVEGAWAYRMKARIGRHKVDRIEALPKVVRDIGWKAQVRLCTRYRRLRARGKTANVVNVAIAREMVGFIWSIACTMQIRAKGGVTMT

SEQ ID NO: 43052 - protein, 461 aa, unidentified
MARKSNEGSSDSRRQLQGIPLIRRDVAGIDLGSEQHWVCAPSEDGGSREVAHFGGTTAELIRMAEWLKARHVKSVAMESTGVYWIAPHEILEAQGLEVLLVNARQLARVPGRDDRTDPTDSEWIQRLHSCGLLRGSFRPPETICMLRTLVRDKATLVAESGDWLRRMQKSLDQMNVRVHRAVSDIDGATGMAIVRAIADGERDVKKLAQFRNPHCRQSEEQIAEQLRGHWREDHLFSLQQALKMYDAITERIAAYEKEIQRKLAEMTPPPQRQAPVPPLKNANKARGIKRRGQEPMRQALYRMSGVDATQIDAIGVETVEVILSEYGPDLSRFATEKEFVSHATLAPRVPKSGGKPIKKKKRQSASTRVANVLRMAALSLGHSDTALGAYYRHISQRKGADVAVFASARKLATYVYRLLRWGQPYVDEGAEAYEKRYQQQRLKALVSKAKTLGYQLVPVSA

SEQ ID NO: 43053 - protein, 350 aa, unidentified
MQGSGRWIGLDLSKETYEMRYFDQKGNVGGSGGKTTKSGRAKLYAKLKPEDIIAMEANSLAFVMEREMRMIGCTVIILNASQLSVIYSSTKKTDKEDAVKLARLIKIYEKEDLPTVDVPTDKEWYRRKLIKECKILKDDRTREINRLHALFVQCGITTMKRSNVQTDVNRQQVLSQLFEYEARQAKRVCERLTVLDEQIEELEQLIKQECKEDKDIQRLQTIPGVGDKTALAFAAYVGDGKRFSNGDQVAHYLGIVPRVDCSGTINKYGHITKKGNKVVRALLYQAAWAIVRSKHGGALKAKYFYMTEHGKGKKISITAIARKMAKLLYVVMKNKQMVYQEMPAPSLRAG

SEQ ID NO: 43054 - protein, 328 aa, unidentified
MCTLGIDVSKNKIDLCLLTAGPGGKKKHKVLTNEPAVARKVVDWLNAQKCVPESVTVVLEATGIYHENLAYGLHEAGVSVCMANPCRVREFAHGMDILNKNDAVDAFVLACYGELKSPAVWVPPSPEVRKLRALLHQRDALREDVQRTVNRLEKANSTSTPQEVIRSLERTKSWLNEELARIEKLITDHTDNDPGLKADLDLLKSIKGVKDQVGREMLALLKDGMFKSASQVAAYLGLTPVEKTSGSSVRGRPHMSKTGPSGVRAKLYVAALTASRWNKQAKAIYERLVAKGKAKKAALGAVMRKLVHLCFGVLKTRLPWDENYVATA

SEQ ID NO: 43055 - protein, 419 aa, unidentified
MSKSNISKQLRQVPPGALHVGVDLALEKNVAVVINEKAERLDQFSFTQERGGYDYFLRRLEGVRQKHDAPCTVVAMEPSNYFWKLLAKELEEQKIAYHLVNAYTVKKHREGNQLDRSKDDRRDAGQIAELSRNGHYTQTRLQKGTYEELRQYAALYHRLVQAIRCERQVLWGLVGQVFPEYFQVFKDLGGETSRACLESCACAAAMRRITEEELIAKVRAVYTGKKLSVSKIRRAYRWAATSIGVAEGLQAIQLTVRLHLAQLQSLQAQMEQVTHAMIACLVSLPETPYLLSVKSLKAVSVALFLAEVGDPSRYQAAAQWVKLAGIQPAANTSGKKQRSQTPMSHQGRSQLRTLLYFTCLRLLRFDPLFAQLYAALQRRPKNPLTKMQALGVLMNKLLHILWALIHNQTFYDPSFASSI

SEQ ID NO: 43056 - protein, 474 aa, unidentified
MSKKTLKPEVRGSRGPIPAKSKRNKRPNQPDRSVFEPNAAGIDIGAREIFVAVPPDRDPNPVRKCETFTGDLHQMAEWLVSCGITTAAMESTGVYWIPVYDVLEQHGIQPCLVNPRNMKNVPGKRTDFHECQWIQHLHSLGLLHAAFRPDGEVCTVRSMMRNRNDLVQMASQHVQHMQKALTQMNVQFQHVISDITGLTGLAILDAIVAGERDPSKLAQLRDPRIKASEETLRKSLEGNWRAEHVWALKQRLSLYRSYRAQIEECDQEIERLAAAFEPRVDPDDRPLPEDRKKKQRRRKKKSGTPSFDMRTEAYKLFGVDLTQIPGLMTLVFMLFSEVGRDMSRWPTAAHFVSWLGLCPDNDISGGKVLWRGARRTKNRAGTLFRLAAHSLHRDQTPLGHYLRRMKAKLGPAAATTATAHKIAIIFYTMVSRQVEYDASLWGKRDELREKRSEVQLQKQAARHGYKLVPLKPAA

SEQ ID NO: 43057 - protein, 319 aa, unidentified
MSQATLGIDVAKLKLDVALLMAGKTFIKQFENSPKGFQALQAWLASFSLPTVHACLEATGSYGDAVALFLHEQGHLVSLINPLRVKGYAASKLQRNKTDKADARLIAEFGATQAPPPWTPPAPEIRHLQALTRRIETLAEMLQMEKNRREAAPVETLDSLDRIIDTLTEEIAKLQREINQHLDQHPRLKAQQNLLLSIPGIGEKTAQLLLSELDFARYENARQVAAAAGVTPRQQESGTSLKRTNLSKLGNGRVRKALYFPAVVALRHNPIIKEFASRLKKNGKTPMQIVCAAMRKLLHQAFGVLKNNCSFNPNITFAR

SEQ ID NO: 43058 - protein, 369 aa, unidentified
MKQHTDVFVGIDVAKSRNAIAIAEGERGGEVRYFGEVDAASDAMRRVVQRIVGKYGRAHFCYEAGPTGYGLYRLITGMGYPCDVVAPSLIPRRPGDRVKTNRRDAVGLAKLLRAGELTPVWVPDEGHEAMRDLVRARSAAVQAQRVHRQQVSAFMLKHGRIYPRKKSWSMRYLRWLQEQRFEHPAHQIALQELVDAVRISKERIDRIEAAIVEFLPSWSLAPVVRALQALRGVDLIVAVTFATEVGDVRRFDNPGQLMGYLGLVPSERSTGDTIRRGGITKAGNSRVRHMLVESAWTYRHPPRVGAKKLYLLEQTTPKVREIAWKAQSRLTGRYRTLSANGKKTTVVCTAVARELAGFMWAVAREVQTA

SEQ ID NO: 43059 - protein, 365 aa, unidentified
MNVIHYIGLDVHKKTISYCIKTAAGQIVQQGRLEASRSVLRSWAEGLPAPWYGAMEATLFSAWIYDTLKPYAEKLVMGHPARMKAITAGKKKSDAIDASTIADLLRCDLLPTCYVLPPELRDLRRLLRYRHLVVQESVRMQNKMAGLLMESGTPFDKDKLHGKKYFTALVKSLQEVPESVKDLLRMSRSSMEMFQATQKQLVERLLSEPALEQRVERLMSIRAVGPITALTWALEIADPHRFASIAGAVSYCGLTAAFRSSAGKQQRGPISKQRNAWLQSVLIEAAKLAPRWNPQLAALHAHELERGHANRATLQVARKLVAYLLAVDKSGQPFQVHTPPPPANTKAENKTRRKNKKAAALLPAA

SEQ ID NO: 43060 - protein, 381 aa, unidentified
MGNASTLHVGLDVHKESIAVAYATEDGATAPVPLGAIGTRQCDIDALVRKLQSKSARLVFVYEAGPCGYWLYRYLTRKGLTCFVVAPSLIPRKPGDRVKTDTRDAVTLARLARSGDLTPVYVPAVPDEALRDLARAREDALHDLNAARFRLKALLLRNDVRYAGRANWGAEHLRWLARFVFPTPAQQIVFQEYVRTVTERTELLQRLEAELLEQAKTWRLSPVVEALQALRGVQFTVAITTIAELGDLTRFDTPRQLMSYLGLTPSEYSSGERRRLGGITKAGNRHARRVLIEAAKAYRHRAKVSEQIHARQEHLPTVIRDIAWRAQVRLCGRLPQTARARQAPEHGGRRHRPRAGGLHVGDRQGAAGARVAVVTRTNEPT

SEQ ID NO: 43061 - protein, 315 aa, unidentified
MTSMIAQSVGVDISKDTLDVYLHPAGVAQRIANNPAGLRKLIAYLRGFNIARIVYEPTGAYHHAFERRLGDAGFPLVKVNPRQTRRFAEAIGCQAKTDPVDAAMLARYGALIEPPARPIVSQALDEMKELHVARRSLIKDRVAVHNREHIRRSGLLKRQAAERLRQIDKQIAAIDAALRGLSAADPVLKTRFDILMSIPGVGEVTAIAIIAQMPELGAIENKAAASLAGLAPIARDSGHSRGKRFIRGGRADLRQALYMPALVAVRFNQTLKAKYQAFIKAGKPPKLALTAIMRKLLILANALVRDGRTWTPTLA

SEQ ID NO: 43062 - protein, 423 aa, unidentified
MSRPQVIDDEQHEQVHERVAAIDVAKDSGMVCTRTPHPSRPGARRSTVWTVKARTGAVRALGRQLHKDGIEIVTLESTSDYWRIWFFILEACGLAVQLVNAAQAKNLPGRPKTDKLDAQWLARLTEMGLLRASFVPPKAIRDLRDYTRARTRLIQERTRCWQRLEKLLEGALVKVSSVASKLTTVSAQDMIKAMIAGERDPHVLAGLARTRMQAKHDDLVQALDGMFDDHHGELAGMLLDQIAFLDGRIARLSARAAELTAAMPEAWGINADGTTGPDAGATPDAPVLPAVARLAEIPGISEDLARAIIAETGLDMSRFPTAAHLVSWAGLCPSARQSGPRTRAGKKGQGNGYLRGSLGQAATGAARTATFLGERYHRIARRRGKGPLHPGDHLAPARRPRRPVHRPRRELLPDPHRHRPQAP

SEQ ID NO: 43063 - protein, 351 aa, unidentified
MVKTKLKRTTLSNNDYLRDLDTYDNYIALDWSQVNMAIARMTKNSKHTKVIDVPSDIDNLKAHLKNLRGKKILTIEETSTSHWLYVELRDYADRIVICDPYRNRLLSEGPKNDKIDADKLCKLLRNGLIKEVYHSSNNIYDLRKLMSAYDDLVKAGVRLQNQKSAIYRSEGKSYKDGEEINNGTISFILEHMNEGIEDYEKKKNEFEKFIKRVNKREDLIKKQLTIPGIGDIGAIKVVSTVIEGCRFRNSGKYLSYCGLVKHKKISGNRNYGNKNPRYSRKQKAVYKTAALAAIGGNNPLNDYYEYLITKKRLPEDKARHQISRYIARISYGMLKNGEKYDPYRWRKHKTT

SEQ ID NO: 43064 - protein, 340 aa, unidentified
MSEIRAIGLDLAKHIFQVHGVDAEGTTVLRKQLRRGQLLVFFSRLPRCVVGVEACATAHYWARELRALGHEVRLMPAQYVKAYVKRNKNDAADAEAICEAVLRPTMRFVPVKTAEQQAALLLHRGRERLVRQRTMMVNALRAHLAEFGVIAPQGLRNVGQLIAMIRDESDARLPDLGRRVLQVLAAQIEQIEAAVAELERQLMAWHRSNPVSQQLATIPGIGPITATAIAATVVDPIAFRSGREFAAWLGLVPRQNSTGGKTRLGGISKRGNQYLRRLLINGASANLLRSKATNTDPWVIGLRRRRPSLVVAVALANKTSRIAWAVMHRQEDYRRVALAA

SEQ ID NO: 43065 - protein, 287 aa, unidentified
MTEITIGVDVSKDFLDAHRHPDGDGRRFANTTAGHKALIGWIGKTAERIVFEPTGPYHGALERALAKAGLPLAKVNPRQARRFAEATGKLAKTDQLDAALLARMGALLQLEVRPVHSETIAELKQLHIAREALVKDRTAAKNRGKAINLAILKRQNAERLKHIERQVTAIEAEIDSRIQADAELARRLEILISIPGIARLTAFVLLIEMPELGHMESGQAASLSGLAPIARQSGRWIGKAFIRGGRANVRQALYMPALVAITTIMRKLVVLANALLKAGRPWIPKTA

SEQ ID NO: 43066 - protein, 342 aa, unidentified
MGSVLRKRRSRHVMSAFVCGLDVHKDSTYATILSPEGKIVNQMKMNNEKVLSYLSHFNVGKVAMEASTPVAALYRQLAGKGFDVVVSHPKKTRYIAEAKIKSDRVDSRAIAELARLDALPLAYMPDREISVLREQVRRRAFLVRQRVKLKVKIKSVLTYEGVKWPSEYGLFTRKGVEWLHLLNLDPIESYLRIMRAFDDEIRLLSRQLRGLAKEDEDVKLLMTIPGIGYYSALLVKSEIGDVNRFPFGDRLCSYAGLVPSTRASGGVVRHGGVTKEGSRWLRWVMVEAAQAHVHKYDTAITRAYHRIAERRGRRAATVAAAHKLLLCCYSVLKNKREYYDQT

SEQ ID NO: 43067 - protein, 360 aa, unidentified
MKKDIKERSGLTVGVDLGDRWSRYCVLDEQGQILEEDTVATTGRAFGKLFSDRPAARVVIEVGTHSPWVQRLLEELGHETITANPRYVRLIYSSRNKNDKLDAERLARLARVDTKLLHPIQHRGGTAQADRALLRSRNALVECRTKLINHARGIVKSIGGRLPSCSTTCFHKRVREDLPDELKPALSPVLDTLAALTKKIQCLEARIARLAAKRYPETGLLRQVSGVGPLTSFSFVLTLEDPERFKNSRAVGPYLGLRPRQSQSGESDPELRITKAGDTDLRRLLVGSAHYILGPFGPDTDLRRWGLALAARGRKNAKKRAVVAVARKLAVLLHRLWVTAEVYEPLRNNKSLIVPEAVSA

SEQ ID NO: 43068 - protein, 410 aa, unidentified
MKHQNGVDVSIVPQLDKACGLDMHKDKIVGFISAKDGSGQELKEFTFTCELRQVKEWVQNHQVEHCLMESTGIYWMSLYAILIEAGIHVTVANPTHIKQVPKRKTDRKDAKWLCTLLLNGLVRPSFMPTAEQRILRDHCLSRLFYMRQQNKTQNRLLKILESNNIKLRSVISSIKTKSAMDMIRLLAIGVTDKEQLAGCARGQVKRKKDALIKALDGTLAPHHLVQLQMLLQDFDHVQTQLNTLEVIITEITQEHYSLAFECLDSITGIAGRSAQIILSEAGSDMSRFSTADHLTAWCGLAPGNNESAGKRRDTSVKKGNPYLKTAIVTAAWAAVRVKDSYWRALFERLRKRMKVQKAIVAIARRMLKVVHKTLDTLTMYQEKGIAHFVDLQAKAALYHRMKQQWPSTES

SEQ ID NO: 43069 - protein, 344 aa, unidentified
MKKLNVIAIDLAKNILQVCKISKHGELLLNKSMRPGKLKELLAKASPSIVAMEGCGSCHYWGRLAREYGHEVRILSPKKVKAFVQGQKTDANDALGIAIAAIQVGMVYGSLKEEDQQILQTLETSRKFLDKELTALGNHIRAYLFEYGITTNRGRNSLIETVAIVLDGIDTRLPQCLKSTLCELMDRYSATIRQLKSTEKEKAALVQQIEPCQRLMAIEGIGEVCAAMLYANIGNGKEFKNGRDASVYIGLTPKQHSSGGKTTMIGIGKHSGNKELKAALYQGALSVISRLPAEPRTAKQSWLIALVKRAGIKRACIALANKSVRTAWAILATGKDYEAAAFNG

SEQ ID NO: 43070 - protein, 456 aa, unidentified
MIRCKISKPVAGEMSNFTQINPNAAGIDIGSQEHWVCVPPDRTSQNVRKFGCFTPDLIEMASWLVECGIDTIAMESTGVYWIPAFQIFEARGIEVKLVNAHHVKTVPGRKSDVLDCQWLQQLHTYGLLSGSFRPDDQSCVLRSYIRHRDNLIKSSSSHVLRMQKALIQMNLQLHKVISDITGVTGMAIIRAIVAGERNPQVLANLKNSRIKSSTADIAKALSGDYRVEHIFVLKQELQLYDIYQEQIASCDVEIERYLASFASEENHPPPDPPKRGNRKPRGHEPNFDLRHQLYRISGVDFTQIPGFDVLTVQALLSEVGLDATRFPTVKHFCSWLGLCPSARITGGKVKSSHTRCVVNRAANAFRLAAQSLSRSQSALGAFYRRLRARLGAPEANTATAHKLARIFYHLWSTKTAYADSGADYYEQKYRQRIVSKLEKTAQSLGFELVACASKLD

SEQ ID NO: 43071 - protein, 453 aa, unidentified
MARKRKQGSKTNSAALPVMRPDAAGIDLGATEIFVAVPADRAAENVRSFPTFTQDLYALADWLKQCGVKTVAMESTGVYWIPLFQILESRDFEVCLVNARHVKNVPGRRTDVCDCQWLQFLHSVGLLKASYRPDQEVCAVRSLLRHRESLVQMAATHVNHMQKALDQMNLQLHHVISDIVGQTGLAIVDAILAGEHNPQILAKLRGERIKATEEVIAKSLVGDYRHEHLFTLKQSLAAYRSYQKLVEECDHEIRTQLQEFQPPSSPAAPTEEPPAPTSKKFSTDGILKSELRRVFGIDLTKIPGIRTGIAQILFGEIGPDFTKFRSASAFASWMGLCPDNDISGGKVLWVGTRKVNCRAATALRMAAQSLHHSKSALGDFYRRMRAKLGAPKAITAAAHKLARILFHLISTRQEFDDSKFAADQLRFQKRQEIKLRAKAKSMGFELIPVQQAG

SEQ ID NO: 43072 - protein, 436 aa, unidentified
MKKHLPVLDPRAAFVDIGSEHMHVSVGGDVPVVFGTVTSQLHALRDWLRAQGVSSVAMEATGVYWLPLYSVLEAAGLDVRMVSGRQTRNAPGRKTDMQDSQWGATLHMHGLLRAGFVPTADIRRLQDYLRLRADHVGQAASCVQLMQKALERMNIKLHDVISALAGASGMAVMRAIVSGERDPAALLGLCDIQIRRAKAEQVKEALRGTWSDEHVFALQQALQSWDHYQQLIAQCDGRIQAVLPPHDPTQPALPGPAKRAGANAPEISMLREILAQMCGGRDLTKLPALTHYGVLQLVGETGTDLTKWPTEKHFTAWTGLAPGSRDSGKRKGNVKRRRNRAGRLFCMMASALARSKTIALGAFYRRMAARRGGLVANKALARKLAAWYWRVMVKGDDYVEKGIAHYEDQIRRGKERALRRLAKELGQQLTPVANPA

SEQ ID NO: 43073 - protein, 334 aa, unidentified
MGVQLECVREIAAAAVEEAVDILGIDVGKEYIDCELLGEKSASKRVHNTVRGFEQLQSWLRNRKVRKVHACMEATGGWSEELAYYLQERGHVVSIVNPMQIRAFGQSELLRTKTDKADAALIARFCKAMQPSAWEAPTPAERRLRQLVRRRRALVEMRVQELNRLEAPGTENVEKSIRDMIAMLDNQIADLEADIKKTIDDDDDLKGKRDLIESIDGIGPTTSATLLAETPHIEKFESAKALAAFAGVCPQIQQSGRSVSKSRTTNIGNRAIRKVLYMAALAALRSNAVIKAFADRLRERGKRNMEVLVAIMRKLLVLVFGVLKTRRPFDPNWA

SEQ ID NO: 43074 - protein, 365 aa, unidentified
MSRDGNIVSEKKFSTNVKVLEAWARTHPKDYVYAMEAGTPTKQLFWALKEMGREVHMAHPAEVRRMMGTKKKTDRADSAFLADLLRMGRLPKAYVPDPEANEERQLLRFRMDLAKKTIVVKNQVHSVLTSAGVTTSEFSDLFGRGGSEMLRKVKLHGHQQYILDGHLKQIELLTAQIEDVERALAKLAQKNPVARTLMQMKGIDFYSALVILNEIGDVTRFPSAKHLTSYAGLVPRNYQSGDVARTGHIHKEGPKALRAIMGQCANAAVKGAGKFQRIYKRLEKRIGHQKAVIAVARRMLSVIFVLLTRGCDYEERDDANVSRKMRRMERMAKALPDVEVDRTFAGLPENARQILRGERSITDAG

SEQ ID NO: 43075 - protein, 423 aa, unidentified
MNHLTGGQYTAYIGIDWADTKHDICLQAANTHQREFACIPHQVDEIEQWALSLYQRFGGPIAIALELSHGPIVYALQKYDFLVLFPINPSTLAKYREAFTPSRAKDDPTDAELALDLLLCHPDRFQPLAPQSVELRALATLVEQRRGLVNDRVRITNRLRNTLKQYYPQVLEWFDRINTPLFCDFITRWPTLDQVKRARKSTLERFFRQHRMYRLQVLEKRYQSIKAATALTQDAAVITPHRLHAVILAERLRVTLQAIHRYDEEIARLAPQHPDYELFSALPGAGPSLAPRLLVAFGEQRQRFTNAAEMQKYSGVAPVTERSGRKHWVHWRWQCPTFLRQTFVEWAAQTVNKSFWAGAYYRQQKAKGASHQAAVRALAFKWIRILYRCWQAQTPYDELTYLEALRRRGSPLLNQLSTVTENA

SEQ ID NO: 43076 - protein, 383 aa, unidentified
MRTNNHTMPKITLYIGLDVHKDSITIAVAEPGPKGEIRTFGTIANSVQALERTLIRFRQAHPDAQFEVAYEAGPCGFVIARRLKQLRIPCLVAAPSLIPKQPGSPFKTDKRDARSIARLLRAGELTAVYVPEPTDEAIRDLCRARTDAVDDQRRCRFRLKAFLLRHGYRYQGKANWGQPHMRYLRELVLPHPAMKAILEEYLQGIDAAHARVERIEASMLQLLEGWSLKPAVQALMAFRGFQLVASMITVSELGDIHRFAHPRQLMTYLGLVPTESSSGPRQRLGGISRCGNGHQRWLLTECAEHYALPPKVSKELSARQEGQPPAVRDLSWKAQNRLHLRFTKLLARRLQRNKAKVAIARELCGFIWALLRSQQCYQRRVCS

SEQ ID NO: 43077 - protein, 349 aa, unidentified
MMIIGVDYHPSFQTIAFFMEETGECGEQELNHSDGQAEKFYRDLKQRGISVRVGMEATGYSRWFERLLAELGFELWIGDPAEIKAKRVKKQKFDREDARLILRLMRENNFPQIWVPGPENRDLRQLLWHRHRLVQMRTRIMNQLQALAMNEGYRWKKKLFSEQGRAQLEKLTLAPWASRRRQELLELLDRMNPTIEELTVAVDREARKRPEAMRLMTHPGVGPLTALAYVLIIGTPTRFERGKQIGTYVGMIPCEQSSARKQRLGHISKQGNSLLRFLLVEAAQAAVRKDPDWRRRYIHLAMRRHKSIAKVAMGRKLAVRLYWMWRNGCEYSPLLEFGSYAGQLGTEMA

SEQ ID NO: 43078 - protein, 348 aa, unidentified
MTMVCGIDLHRQQITFDSLVVESGEQWRGRLWQPDRLRFRRWLRQDVARRANGDSVSFAVEGCTGWRYVVEEITAAGFEAHLAEPADTQAARGPKRHAKTDRSDSRLLRELLQEGKLPESWIAPEVVLEWRERVRVYKSLVDQRTTWVQRIHAELFQHGVAVPESAIRGEKTRGTLRSAELELSSAARQRIAIGYSMIDAIDVLAKPLKADLQRFGQRQAGCRALVDAQYGIGGLLAVAIWSELGDCQRFARSDQVVRHSGLDVTVDSSDRRRSSGFLSRQGPQTLRWALYEAAKNSSHHRSPDHDYYATVKDRHDGKLAAISMARKLARRSYHILRAVDPDVVYATP

SEQ ID NO: 43079 - protein, 427 aa, unidentified
MKMADLLSTLFVGIDVSSRENVVCFLDFQSQKPLASFSVPNNQPGASSMADRIVEFMHQHKDLSFVTVALESTSYYGIHIANYLSSCTLLLPFNITVYCVNPMLIHTYKKTFVGMSKNDYVDAFAIADFARVGKITSSPWRGSQFLALQRLTRHRLHLAKSLTSEKTYMLSNIFLKFSQFPILDKDSQPFSNIYSATAASVLTDFLSTDEIADMPLNKLVDFVCDKGKNRFSDPEKTAELLQKAARDSYRLDKCLYEPLTIALSSSFNVVKAYTKELKTINSAIEQNIKGLNPSAYTVLLSIPGVGPVYAAGIIAELGSIDCFKSQDALAKYAGLTWRESQSGKFKADETSMTRAGNIYLRYYLLEATTHLIWHDKAYAEYYHKKFDEVKLHQHKRALVLTARKFVRLIFGLLAKNQLYSQSRESLT

SEQ ID NO: 43080 - protein, 344 aa, unidentified
MNKPTFYIGIDISKDDFAASIFTNPNSPVLSKIEIQNDVPGFEVFESWLINSQITQANCVICLEATGVYSEAFSYWFAAKGYPVAVEQPLKVKRAFSEKSHKNDKVDSQKIATYAFRFLDELRIWNPKSDIIEQLKALLMTREQLVQQKTASINTLKSLKIKVVQTPLANKIYAKNIEHLKRQIEQIEKEIKRLINKHPGLANTVAYLSTIPGVGMLLATNFLVATDGFTNDLAQDYRKAAAFIGICPYEHSSGTSVYKKPRTPKFGPSRLRKLLHLASRSVVHHKVKFAGYYGLKQLQGKNNQLILNNVSNKLLKIMCAIIRTQRPYIDNFVSLNPQNALFNT

SEQ ID NO: 43081 - protein, 326 aa, unidentified
MQGKESSEQKTKVKSSAGIDVCKSWLDAHVLPEGLSLRVANDARGHRQLKKWLTEHDVSLVAIEATGKWHRQVHRMLHGSGFGVAVVNPLRARLFAEAIGLLAKTDRLDARMLALLAVSLSPPARPPMPEAVEALQELIAGRSGAVAEQTALENQLAAANTTFLRRQLKGRIDRIAKDVASLQTEIERRIGCDQALARRYAILLSIPGVGPVTAATLIAGMTELGACSAKQIAMLSGLAPLADQSGARDGQRAIRGGRAAVRRVLYLCALSAKRCNPAMTAIYNRLIDAGRPHKVALIAIARKLIVLANTLIAQNRSWQSQPPIQA

SEQ ID NO: 43082 - protein, 342 aa, unidentified
MLYVGIDIAKNKHDVTALNVPGKTVLKPLTFSNNKAGFELLDLSLRQLNQDCLIAFEDTGHYAFNLLNFLHEQGYKVYTYTPLLIKEFTKSLSLRETKTDKKDAHGIALKLLSDPNREQFQHDNRQVELKILARHIHRLKKKQSDWKVQYTRCLDIIFPELDKIVGKHSEYTYQLLTRYPNPQKRLEAGFDKLIEIKRLTASKIQDILSVAPRSIGTTSPAREFEIIEIIKHYKRLIDKAETCVNDLMAEFNSVITTVTGIGNRLGAVILAEIRNIHAFDNPAQLQAFAGLDSSIYQSGQIDLAGRMIKRGSPHLRWALIQAAKACARFSPAFKAYLKTKLE

SEQ ID NO: 43083 - protein, 370 aa, unidentified
MDENIKFFVGLDVHKDTIAVAVAEAGREPARLVGSIAHDVVKLRKLLARYGEPARVLVVYEAGPTGYGLQRELARRGYQCQVIAPSLIPKRAGDRIKTDGRDGLRLAELSRAGELRAVWIPDPADEAIRDLARAREDVVNARTQARQQLKGFLLRHDVRYAGKTSWSKTYYRWLATLNFGLSGAQTAFTEYWQAVTAADERVARLTAALANSIEGWRFEAVVNALQALRGVDVVSAIGLVAEIGDIRRFAHPRQLMAYLGLVPSEHSSGERVTRGSITKTGNTHARRLLVEAAWNYRFQPRIGRRAQQRAEDLPQAIRDMAWKAQLRLSRRFARLRARGKEINKVCVAVARELAGFVWAIASTQAKLAQS

SEQ ID NO: 43084 - protein, 387 aa, unidentified
MQKPHDNSKASPAAFMQDNTLIAVIELSLSNWLVAGLIPGVSREPLKKLEPNPEDLLKLLHGWRDEAIKAGRPITRIAVAYETGRDSFWLARWLRERGIDAHVIHATSVTVSREHRRAKTDRLDTAMLKRGFLGWLRGERGHCTVAIVPTMEEEDAKRPHREREGLVHEQTRVVNRMKSALIQFGVRNFNPKLRKASVKLETVRTPEGKSLPPNTIAALRRDMERLKIIKEQIKAIEQARLQQFEQKPEALANRMVYLLVRIYGLGLETADLLAHELLSRTLRDRKAVARYAGLTGSPDESGSKRREKGLSRSGNARVRKIMIQLAWRMVKFQPDSALVQWFKQRTENAKGSRKPMIVALARKLIIALWRYANDGVIPEGFRLHSAA

SEQ ID NO: 43085 - protein, 294 aa, unidentified
MRTSTATPLWPPTKWVAQLGEKTVKATTAGHATAIMWAREQFGLELIWGIEDCRNMSARLERDLLAAGQQVVRVPTKLMAQTRKSARSRGKSDPIDALAVARAVLRETDLPLATHDETSRELKLLTDRRDVLVAQRTSAINRLRWLVHELDPERAPAARSLDAAKHQQALRTWLDTQPGLVAELARAELTDIIRLTGEINTLAQRISARVHQVAPALLEIPGCAELTAAKIVGEAAGVTRFKSEAAFACHAAVAPIPVWSGNTAGQMRLSRSGNRQLNAAKILSSDSASDATRA

SEQ ID NO: 43086 - protein, 347 aa, unidentified
MRFYNTQHPFYCGIDLHARAMYVCILNQAGETLLHRNMKTTPDAFLKAIAPYRPQIVVAVECMFTWYWLADLCADEDIPFVLGHALYMKAIHGGKAKNDRIDSQKIAVLLRGGMLPQAYVYPAEMRATRDLLRRRMHLAHKRGELLAHVQNTNSQYNLPAIGKNLAYQANRDGVAERFADPAVQKSIEVDLALVSHYDTLLRDVELTILKTAKQHDPNTLYLLQTVPGIGKILSLVLLYEIHHIERFPRVQDFASYCRLIKCAKESNGKRSGTSGSKIGNAHLKWAFSEAAVLFLRDNPEGQKFLSRLEKKHGKGKALSILAHKLARAIYYMLKRKVAFDMKRFLND

SEQ ID NO: 43087 - protein, 419 aa, unidentified
MKVEYGNVAEDAVWAGVDTHAATNWLSVVDARGSELFSGEFATDPEGYRKLCDEIRRLGSPVAAGVECTGTYGAGLVRAMAAYGIACYEVITPGRPRRGPGCDKDDAADALRAAKQALSGENLAVPKSQDGWVEEVRNMTVAREELVKQCTSLANLALATVRKGPDEIRARLERLGTEKMMGVLAGWDEAEADPICDAVMFSLAALGRVWAEARRSARLLEERIERTLKAGNPALASMYGCGPISAAMLAIAAGDNPERMGSEASFAALCGVSPIRASSGKVERHRLNRGGNRNANKALHIIAMHRMRTDPRTAEYVERRRAEGLSDREIRRCVKRYIAREAYRLIMHPYDVPIEGKGPEMRAERIASGVSQKDAAIALGVTASTLCDLELGHHQFRELALRYRQWIDDGFPLEAGIAS

SEQ ID NO: 43088 - protein, 341 aa, unidentified
MMIIGCDFHPRFQQIAFLDQQTGEFGERRLQHRGEAEAFYRRLLGQPVRIGMEATGNYRWFRRLAEEQGHELVLGDASKIRACCVRKQKTDKRDARHILDLLLENRFPAVWQPDAANEDLRVLLLHRVKQVRLRTRLKNQLDGLAKSEGYLSPRVWSAGRRAELEALALRGWLDRRRRDLLQLHEELDERIAPLDEALREAANQDTAAQLLMTHPGVGPVVSLAFVLTIGDVSRFARGKQVGSYLGLIPSEESSGQHRRLGSVSKQGNSLVRWLLVQAAAVAQRYDPSWHRQYVRLSMNKHHGVAKVAIAHKLAVRLYWMLRTGQNYEQLAVRGSHVGQSV

SEQ ID NO: 43089 - protein, 413 aa, unidentified
MDAIVERCAGLDVHLDTVVACVLYGKLDIKPKKEVKTFSTTTKGLLELLDFINQKECTHVAMESTGIYWKPVWNILESGAFELIVANAKKIKNVPGRKTDVKDAEWIASLLRCGLIEKSFVPPERIRDLRDLTRLRKELLGEVNRNKNRIHKVLQDANIKISSVLSDVFGETGKSILNQIIDNQCITEEFIYSLYEGRGKSKLKSTPMEMYEALNGKIRGHHVILLGMHNSNIVFLEKQINELEKEIDILLQKERDSLELLETIPGISKISASSIIAEIGTSMDVFKTEKHISSWAGLCPKNNESAGKKKRSGIKSGNNWLRSMLCECAWSATKKKDSRFKNKYWSMVPRMGRKKALIAIANMMLRLIYHLLKTKSTYKELEIQYFIDKDKRREDRIIKELKSKGYLVEKDSL

SEQ ID NO: 43090 - protein, 340 aa, unidentified
MEAISVIGIDLAKSVFQVHGVDAQGLVVVRKRLNRAKLLPFFAKLPRCLVGMETCASANYWARELMLLGHEVRLMPPQYVKPYVKRSKNDASDAEAICEAVTRPTMRFVGVKSPEQQSVLVLHRTRSILTRQRTQIGNAIRAHLAEFGIVAPVGRQGLDRLIAVIGDEQDDRVPIPARRCLAMLVEQHRLVLAHLLDADRAIRTDSRASELGRRLQEIPGVGPLVASALVATVPDPHVFKTGRGLSAWLGLVPRQNSSGGKERLGGITKAGDTYLRKMLFVGAMAVIRHAERYGTRRPWLTKLLSRRSPRVAAIALANKIGRTAWALMTSGERYREPVVA

SEQ ID NO: 43091 - protein, 409 aa, unidentified
MLFVGDDWAEDHHDVELMDASGKTLAKARLPEGVAGIARLHAMIGAQLGEDVEDDAAGLVKVGIETDRGLWVQALIAAGYEVFGVNPLQASRYRDRLGVSGAKSDPADAHLLADMVRTSAYQLRPVAADSADAQAVKVVSRMHKTLIWERTRATQRLRHALREYFPAALVAFADLDAVDTLELLAKAPDPDAAARLSLTQISAALKRARRRDIPAKAAAIQAALRSQQLRQPAVVTTAYAVSTRSLIAVLDTLNEQVKALQGQVEAHFGQHPDAEIILSQPGLGAVLGARVLAEFGDARARYASAKARKNYAATSPITRASGKKKTVLARFVHNDRLIDALMTQAFSALQTSPGARAYYDRQRARGATYNAALRQLANRLVGILHGCLKTSTPYDEATAWSHHRFEVTT

SEQ ID NO: 43092 - protein, 301 aa, unidentified
MFVGIDVSKARLDVALRPGDENFSVANNPRGIASLVKRLKKLQVSRVVLEASGGYEIAVASELAAAELPLAVLNPRQVRDFARATGRLAKTDAIDAQVLAQFADLIRPPTRQVPDAQSRELMALVARRRQLVDMLTAESNRRGHVPGCVNRAMVAHIRWLRKQLAEFDAILEEAIRRSPLWCEKARLLRSVPAVGSVTVTTLLAHLPELGTLGRRKIAALVGVAPFNRDSGKMRGTRTIWGGRAQVRAVLYMCTLVATRRNPVVRAFYLRLRAAGKKPKIALTACMRKLLIMGQVPQPLGH

SEQ ID NO: 43093 - protein, 407 aa, unidentified
MLFVGNDWAEAHHDVELVDAQGTVLVRRRLPEGVTGLATLHGWIADHLGEDDEPDQVLVGIETDRGSWVQALIAAGYTVYPINPLQVARYRERHGVAGAKSDPGDAHVLAEIVRLDRAHHRPVAGDSTIAEATRLAARAHQSMIWTRQRSTNTLRSLLREFYPAALEAFHEDLAGRDALAVLKVAPDPERGRRLTVSRVKALLKAAGRQRNLQTRAAEIVAALRTEQLPIRAGLVEVYAVSVGALVAVITEMVTQTGVLEEQVKQGFGQHPDREIYLSQPGLGPILAARVLAEFGDDRDRYADARARKNYAGMAPITKASGTKRVVLARWARNRRLADALYQQAFAALTGSVGARACYDRHRARGATHHQALRTLANRLVGILHGCLNHHTLYNEATAWPTKHQLAA

SEQ ID NO: 43094 - protein, 441 aa, unidentified
MAMRKREEDEVFPNAAGIDVGGSSHWVAVPRQADEEPVREFGSMTDDLNAMADWLLSCGVDTVALESTGVYWIPVYEVLERRGLVVWLVDARQMKYVPGRKSDVQDCQWLQKLMSLGLLRAAWRPGDEVCVVRAVVRQREVLLAEQARWVLRMQKALVQMNLQLTEVLTDVMGMTGQAIVRAIVAGERDPRVLARHRNGRVKASAADIERALTGNWREEHLFVLGQALAMFDSVAQRVLECDAKIEALLAPLGRHEVELAGPGKRRGKNTPGFDVRTALARWAGVDLTRINGLAVTTVMTILSEIGPDLSRFANVKHFCSWLGLCPGTKVSGGKVLSARTRRSTNRVRQALKLAAMSLSRNDSALGAFYRRLCSRMDKPRANTAVAHKLARMVYFMLTRGEAFVDQGQQHYEEQQRQRSIDALRRRATALGFQITPTAPTA

SEQ ID NO: 43095 - protein, 363 aa, unidentified
MSESRTVTVGLDVHARSIRLAAIRGDELLTERTLPYDEEAVERVLRGWPRVRCCYEAGPTGFGLYRHLVERGFECEVVAPGLVPTRPGERVKTDSRDARKLARLLAGGLLQPIHVPSRELEAARDLVRAREAARLDRMRDRHRLSKFCLRHGRLLPGSSWTVTRRTWLSEQRFAFAAEQLTFDTYLHAVDLVDLRIAALERSIREAAEEDSWRQLVARLRCLRGIDTLSALGLVTEIGDFSRFRTAEEFMAFVGLVPSEHSSGERRRQGSITKAGNAHVRRLLVEAAWHARRRPRVGYELHRRQRGQDAVVVERAWRCQQRLHSRWQRMAGRGKPSQKIVVACARELAGFIWAIATEQPLRSA

SEQ ID NO: 43096 - protein, 358 aa, unidentified
MVDKVTEAAVVGGVDTHKDLHVAAVVDQNNKVLGTQYFSTTRQGYRQMLAWMTSFGTLKRIGVECTGTYGSGLLRYFQNAGLEVLEVTAPDRMERRKRGKSDTIDAECAAHAAFSGIRTVTPKTRDGMIESLRVLKTCRKTAISARRVALQIIHSNIISAPDELPEQLRNMTRMQLIRTLGSWRPDASEYRNVTNVYRISLKSLARRYLELHDEIADLDVMIAAIVDELAPELIKRNAIGYESASQLLITAGDNPQRLRSESGFAALCGVSPVPVSSGKTNRYRLNRGGDRAANSALHIIAIGRLRTDAKTKEYVARRVAEGHTKMEAIRCLKRYISREVYTLLRNQNRRINSIPITA

SEQ ID NO: 43097 - protein, 419 aa, unidentified
MKKKEYRRCCGIDVHKDSVEVCVLPAVGESGPAKRKRFGTFRAELIQMRKWLKLLQVTDIAMESTGVYWRPLWNVLQDQGFEHLLLANPAQVKALHGRKSDRRDAQRIAEFLQDERLDGSFVPTAEMQRLRMLLRDRVALVEQRNEVHNHIRDLFETAGVKLSSVLSDLMGVTGRGIIEALIAGETSADKLSWKVRGSLRKKEKQVKESLAGCFDDFHRDVLKRFYRQYTFLSEEIAQFEKLIEERMAPHAEMVTRLDGIPGVDRLVAWHLIAELGIDMAVFLNADHCASWAGLVPGENESAGHSKNNRCRKGNRVLRRVLTQAAWAASRCKKGYLRAFFYRCKGRGSWAKAIVATGHKILTIAFCMLRDGTPYRELGDDYFDKLNPARTAKRLIARLEALGVKIQATMPPAVPSELRH

SEQ ID NO: 43098 - protein, 402 aa, unidentified
MYFVGIDWADLHHDVAVLDEKGQELKFFTVPHNREGLEQLKRTLLSINPDPESFACLVETKNGLLVQFLLEAGFPVYPLNPKVVDYRRKPSGAKSDPIDARLLASIGRSDLAQLKRLKPDTELVCELKILTRDQDSLIQESTRLNNKLIACLKEYYPAALEFFSKPTLPVALEFYKRYPTPELVREATVPEIAAFLKKHKHPRPNQTAISIWQKAQEPQLNASAPTVRAKCRLMLALVGQLEVVKEQIAAYDKEIDRLFQQHSDSKIFASLPGAARRLAPRLLAEWGDERDRYENAAVVQALAGTSPVLFQSGKYRFARQRKSCVKPFRRVMHLFSFQSIRWVPWAREYYYAKRCQGKTHHEALRALANIWVRIIFAMWKNRTCYDEAVFIAARSRHFNRVA

SEQ ID NO: 43099 - protein, 320 aa, unidentified
MSASSVVVGIDVAKAHVDVSVLGAKLDAQRFDNLAEAHSALTAALKPLDVALVVMEATGGYETELACALQAAGLSVAVVNPRQARDFAKSMGRLAKTDAVDARMLAEFAAVLLRRDDLARFLRPLVDEQQQWLAALVTRRRQLLSMLLSERQRLQITPKGLHPSIEAIITAIKAQLDDIEAQMVVHVGKHFAELDALLQSASGIGPVASATLIAELPELGRLNRREIAALVGIAPMANDSGSSKGRRRIQGGRFDVRRVLYMAALTATRRNPVVKAFYERLIAAGKLPKVALVACMRKLLTTLNAMVRTNKPWDKSLHGA

SEQ ID NO: 43100 - protein, 400 aa, unidentified
MQQQAERVVIGMDPHKRSATIEVMTADESVIGGGRYATDEAGFAAMTDYVNTLRPAVEDRVWAVEGCHGIGHHIAMRLLAAGERVVDVPPKLSARARVFATGQGRKTDATDAHSVALVGTRMAGLRSVVNDEQLAVLRVLVDRRRSSGEDHTRMVSQLHHLMLELIPGGAKKDLSAAQAKALLAKVRPRDLAGKTRRRVAAELVGDLERIHARKKAADKELRELVAATGTSLLHLNGIGPSGAARLLVEVGDITRFPDRGHFASWNGTAPIDASSGDQIRHRLSRAGNRQINRTLHIMATVQLRNPTEGRDYYDRRKADGKTSMESMRALKRRLSDIVYRTMLDDAVAHTIGDRRTGPGGHRGNVSVSSAAGSHPHTNSSEKSLPGPATTNPRTPLPTAS

SEQ ID NO: 43101 - protein, 341 aa, unidentified
MKITRIGLDLAKDVFQVHGVDRDGRRVARRRLRRGEVLKYFAGIEPCVVGMEACGGAHHWARELGKLGHQVRLVSAQFVKPYVKSNKSDANDAEAICETISRPGMRFVELKTVQQQELQALHRVRSGLVGERTGLANRIRGLLTEFGVVLPRQLAQVRRGLPWVLEDGENGLSGALRGLLEGLRADLERLDERIGELDRLIGQAVREDPACERLAAIEGIGPLTASALVAAVGTGKAFANGRGMAAFLGLVPRQHGSGGKARLGAISKRGDPYLRTLLIHGARSVLLHAARKTDARSRWLQGLMARRHRNVAAVALANKNARIAWALLAHEQSYRPAAGGQ

SEQ ID NO: 43102 - protein, 467 aa, unidentified
MKSNRNRRPHRKKPATGPSLLERMNPNAAGIDCGSDTHHVAVPADRDPTPVRAFQTFMADLHRLADWLTACGMTTVAMESTGVYWIPLYEILEGRGFDVVLVNARHVKNVPGRKTDVVDCQWIQELHSVGLLRGSFLPTAAIAALRAYLRHRETLVQSAATHVQRMQKALVPMNLQLPIVIRDITGVTGLRILRDIIGGQTDPHALAQHRDYRCQASAAEITAALTGHYRPEHVFVLQQNLELFDTYQHQLAACDAAIEAHVLTLAAQAPTPASPVPAARTRKTPRNNEPRFEIRRPLHQLTGVDLTQIDAIGPYSALRLLSEIGTDMSRWPTEKHFTSWLTLAPRNKISGGRLLSSQTQPSANRAAAILRMAAMNLGRSDTALGAFYRRLAYRVGKAKAITATARKLAILVYRTLKDGLVYQDPGAAAYDAQHRVRILHRLRQRAANLGFSLLNRATGELLEGAVS

SEQ ID NO: 43103 - protein, 329 aa, unidentified
MGQPTTFIGIDVSKDTLDACLLAPGGATRQASFPNDACGHAALLAWADRHTAAAERHFCLEATGPYSEAPAAALAEAGRRVSVANPARVKAHAVAAGQGNKTDPADARAIAEFARDRDPPAWRPPAPEVRELQALVRRRDDLREMAAREKGRLDSPALTRAARQSIQRAVKFLGREADRMQAQADALIAASPALRADRDLLESIPGVGRQTAATVLAELPPVDRLPSAESAAAYAGLAPREFRSGASVRRRTRLSKAGNARLRKALFLPAQTAVRFNPLLKEFFARLVGAGKPKMQAVGACMRKLVMLCYGVLKNRAPFDPAWASKKAA

SEQ ID NO: 43104 - protein, 368 aa, unidentified
MELTTIGIDLAKSVFAVSGADRRGKVVMRRQLRRAQVLEFMGKLGPCVVGMEAGGGAHHWARAIGKLGHEVRLLSAALVRPYRSGPNKHHRNDADAICEAVRRPQMRYVAVKSVAQQDQLALHRVRAQLLKQRIAQSNLIRALLHERGVVGRLGAAGLRQALTQALQAENSELSGAMGELLLELSSGLRELERRIAALTRRIERAAKDDERCARLMEVPGVGALISSALVATVGNAREFKRGRELGAYLGLTPRQHSSGGKTVMLGISKHGDRYLRTLLIHGARALLYRQGRGRAHPRAAWAARLVARRGPNVAAVALANHNARVLWALLSRGDGYRPPTSSVPSRPSAGAVIKRAREGKLLLASKRA

SEQ ID NO: 43105 - protein, 349 aa, unidentified
MRKTICVLGVDIGKNLCSLVGLDASGKVVLRRRAKRETLITLAAKLPACIVAMEACCGAHHLGRIFAARGHEVRLMSPEYVRPYIKAQKNDERDAEGIAEAATRPTMRFVELKTQAQLDVQTLHRSRDRLVGERTALINQLRAILLERGIVVAKRKRNLEKFVAGLLEGPDDCGLNGRIRTLIADMRAQWVELDRRIRTFDAEFAAFLRENADARLLASIPGVGPLIASALIAAIGAGETFEHGRDLSAWLGLVPRQATTGGKPKLLGISKRGNRYLRRILIHGARAALPHIAEYDTPLGRWLKGLLARAHKNLAVVALANKLARIAWAVLRRKEEFVAMRPAGVVAAA

SEQ ID NO: 43106 - protein, 315 aa, unidentified
MRIPQAFMVGIDVSKAHFDVAVEGKSAVGRFDNDAPGRTALATAIAGAELVVVEATGGYEMALVRTLMAAGIAVAVVNPRQVRDFARASGRLAKTDQVDARVILHFARAMRPAQIPHIDDGRIALAALVARRRQLIDMAVAEKNRLEHAPQAVAALIGETLAALKSQLARVDAAIALAIEAEPDMAARRDLLLTVPGIGEVGAAVLIAELPELGAIDDKKLAALVGVAPVAHDSGTWRGQRHIAGGRATVRCALYMATLSAIRCSPAIKAFHKRLRDAGKPPKVALVAAMRKFIVMINTIIKRRTPWSEPQQHGC

SEQ ID NO: 43107 - protein, 428 aa, unidentified
MTIDRVPSRKFIHGGASMKRVYDNCCGIDVHKKLIVACFRKGNEQELREFGATTRELLELADWLKSGNCEMIAMESTASYWKPLYNVLEASELNTIVVNAHHMKAVPGRKTDAKDAEWIADLLQHGLLKASYIPSKDQRELRELVRYRKSLVGERTRELNRLQKMLEGANIKLSGTVSDINGKSARSILEYLITGESIDSEKYDEMYEKKVIAHNLKASKEQIIDDLNGIMTPLQRRMMKELLTHLDELNIHIKNLDDEINDFMKPEEKQAAKDIQDITGIGNSSAQAIISVIGVDMERFPTDRHLSSWAGLCPGDHESAKKRKYGKTRKGNALLRSTLVICAHSAVKNKKSYFYAQFMRISAHRGKKRAYVAVAHSMLIAIYHILKEGVAFKDLGAEYYNQFNRERKINAYLKKLKALGWEAQAVAA

SEQ ID NO: 43108 - protein, 326 aa, unidentified
MHILGIDLAKRSFDVTLLREGGDRRHKQFPNTPTGFEQLQQWLHSQHIKRVHACMEATNVYWEALAAFLADAGHVVSVVNPARIKGFAQSQMNRTKTDKQDSRIIALFCLQCHPDAWTPPSAEQRRLRALVRHRDDLLQTRTQLSNRLGDTSDTVVRTSLEAVLASVEEQLKQVHNQLKQHLKEYPELGEQAALVRAIAGIGVITAYKLLAEFYDIDAYGSAKSLAADAGVTPAHYESGTSVRRRARLSKVGKASVRAALYWPAIVAMQRCDGMKAFAARLVARGKAKGVIIGAVMRKLLHVVYGVLKHKAAYDPNKVLGPSRTST

SEQ ID NO: 43109 - protein, 343 aa, unidentified
MKLSYLGVDLAKNVFQLHGVDRKGNAVWRRRLRRHQWVRVLLETVEPGCVIGMEACTGAHHWARRLQAEGYEVRLIAPQFVKPYVKSDKSDRNDAEAICEAVSRPHMRFVTIKSIEQQDLQALHRVRQSLMTHRIAKSNQIRGLVAEYGLVAPQHVKGLREAIPDWLEDAENGLSDFFRGLLNDLCADLRQLEARLAEVDKQLEDIARSNPDTQRLLQVSGIGPLTATALVASLGDARQFKRSRQMAAAIGLTPRQHSSGDKQRLFGISKRGDVYLRTLLIHGARAVILASKHKQDPLSLWVKGIMRRSHKNVAAVALANKMARIAWAMLSQGTDYNPELVAG

SEQ ID NO: 43110 - protein, 401 aa, unidentified
MTSVGIDVSKGKSTVCILRPYGEVVASPYEIQHTEPEIRALVSHIRSMKGEVRIIMEATGAYHLPLLSSFKEAELFVSVINPLAMKKYASTAIRKGKTDKMDAVRIANYGIDHWFKLVDYTVPDEVYAQLRLLGRQYAHYITIRIESKLALTDLLDRTMPGIKSLLSGKRSEEPTKDKLSDFVAEYWHFDNITKKSEAQFIRNYCTWAKKKGYHASESKAKAIYALACNGIPTLSSSAASTKMLTLEAVRVLKEVNKTLESILTQMQELAITLPEYDTVRSMNGVGDVLAPRLIAEIGDVRRFHSGSALIAFAGIDSPPFQSGSFTGTRRKISKRGSSLLRKTGYEVMKCLKTVKPSQDNSVYLYMLKKEAEGKPKKVAKIAALNKFLRIYYARVSEVYAG

SEQ ID NO: 43111 - protein, 353 aa, unidentified
MKTYYVGMDVHRASIVIVVLNGAGKVVMQLVIETGAERVRGFLKQLRGKVYVTFEEGTQANWLHEVVRPLVTEVVVCDPRHNKLMQSGNKSDRVDAQKLAELLRLGSLKAVYHGDNGMRALKELVRTYDCLVSDTTRVMNRLKAIYRGRAIGCAGHDIYRQDRREQWLEKLTERGAKQRASFLYQQLAALKPLRHEAKRMMVKEARRQPAYPWLMSVPQFGSVSVAQLLAIVSTPHRFRSKRQFWTYVGLAVVTRSTADHEVVNGVLRRSQRPVSTRGLNRNHNHLLKRVFKNAAQGACHGGPFKAAYELRVTQGMVPSLARLTVARQLAATTLAVWKRGEQFNPERMKQQTA

SEQ ID NO: 43112 - protein, 372 aa, unidentified
MPQRSRVFVGLDTSKLKISVALAEEGRQGEVRFLGEIDNTPEAVRRLVGKLASRYSEVLFCYEAGPTGYGLQRQIAALGHECDVIAPSLIPKRPGERVKTNRRDALTLARLHRAGELTAIWVPDPGHEAVRELVRAREAAMADLRAKRQHLQSFLLRHGRLFPGRKPWTRAHARWLSELAFEHPAQYLVLREYRQGIEDAEARLERLTQQIADVVTTWSMAPVVEAYQALRGVALLTAVTFVAEIGDVRRFESPRQLMAYLGLVPCESSTGERVRRGSITKAGNTRVRRVLIEGAWTYRFPARMSRLLQERQANLPQIVRTIAWKAQVRLCARYRRLMAAGKRQTVVTTAIAREMAAFLWAIGHAIEPRSAA

SEQ ID NO: 43113 - protein, 349 aa, unidentified
MSQDLNSTVAVIGIDIGKNTFHVVGLNDRGAIVLRQKWSRGQIEARLANMPPCLIGMEACVGAHHLSRKLKALGHDARLMPAKYVRPYSKGQKNDFRDAEAIAEAVQRPTMKFVATKTADQLDLQALHRVRERLVSQRTGIINQIRAFLLERGVAVRQGLRFLRAELPRILATPPDVLSARMVQVISDLAEDWRRLDHRIDDLSNEITLLARQDAGCERLMSVPGIGPIISSAMVAAIGAGEAFSKGRDFAAWLGLVPKQISTGDRTILGKISKRGNRYLRVLFVQAAWVVLIKPMSWERHGLKHWIDAARKRLHRNVLAIALANKLARIAWGVLAGSRTFEASKLQTA

SEQ ID NO: 43114 - protein, 317 aa, unidentified
MSNPESFVGIDVAKGWLDVAWLTGETLRIDHAEKAIAVLVERLRSQPPALVVMEATGGLETGVASALAAAGLAVAVVNPRQVRDYAKACGRLAKTDRIDALILAAFAAAIRPQVRELPDEHTRALGDLLARRRQLVEMRVQEKLRLQRASNVQRASLREHIVWLDERIGRLDIDLTHALRSSPAWRDKDDLLKPIPGVGSLTRATMLALLPELGTLSRRQIAALVGVAPFNRDSGQHQGGRVIWGGRAQVRRTLYMAAVAPMRCNPVIRSFYQHLRSQGKPAKVALTACMRKLLVTMNAMLKHHSAWSNRLDTQHSC

SEQ ID NO: 43115 - protein, 348 aa, unidentified
MMEILKQVIGIDVAQKELVVSLGRVFDDFSIDIHAYGVFKNTPKGMADLLKWATKITLYEKPLLFVMEATGVYHEKFAYFLSDQGYRLSIVLPNKISNYMRTLDIKTITDKSCSEAIARFGLERKLTEWEKPNVIYKTLKQLTRERDQIVAARSIVKNQLHAETSEAYPVKSTIKRCNELIKLLNKQEAQIKLELEQVKDQEIKDKIKKITTIPGVGTLTATILLAETNGFELIKNKKQLTSYAGLDVKEKQSGTSVKGKPRISKKGNRSIRKAMHFPALSAIKHNECYKEIYARLVSKNGIKMKGIVAVQRKLLELIYIIYKNDTIYDAEFEKKKREKQILPIPLRS

SEQ ID NO: 43116 - protein, 307 aa, unidentified
MFLGIDVSKSTLDAALLKAGAKPRHKVFSNDAAGHGALIAWLCQHASRPVHACLEATGTWAQQAALALHQAGHIVSLVNPARTHAFGKSQLKRTKTDKADAILIAEFCRMHNPPVWAPQSLQVQQLQGLVRRLEHLEHLEHLEEMQKMEENRLAAGGLSPQVEESLQEHIAYLAQQIEKTRRQIKDHIDGTPDLKEQADLLESIPGIGATTAALLLAELGDISHFSNARQVAAFAGLVPRIRESGTSVRGRSRLSKVGSSRLRKSLYFPAITALRFNPLIKAFGLRLSVQGKSKMLIKARCLSLGRP

SEQ ID NO: 43117 - protein, 315 aa, unidentified
MTNQIKSKTIINVGVDVGKQFLDVYIYEKSIHWQEENTVQGIKRILKRLAFYQVERLVMEATGRYEFELAQAAYEKHLPVCIVKPLLVRRYAGAINQLAKTDKIDAALIAEFAAIVQPIPTPRKSKNLIAIKDLITRRRQLMNLRTQEMNRLKIMGKGFEVSCKRMIKCFDAEIKRMEKRLATHVEQQAAWTEKQTILRSAPGVGNTLIYTLLADLPELGELSNKEVASLVGVAPINRDSGRMRGKRRIQGGRAAIRTVLYMATLSATQCNPVISAFYKKLVAQGKHKKVAITACMRKFITMLNAMVRDKCVWAY

SEQ ID NO: 43118 - protein, 338 aa, unidentified
MSKVTTIGLDLAKNVFHVVCCDQRGKVVRKKCLRRVQVIEFFANQVCCLVGMESCASSSYWARELQILGHTVKLIPPQYVKPFVRGNKNDYNDALAIAEAVVRPEMRFAAIKTPAQQDIQALHRLRERCLQTRTGLCNQTRGLLGEYGLVLPKGINELRRQLPRLLEDGTNGLSDLFRRLLAESYQQLQELDEHIKRYTHELVQQSRQSEACQRLLTIPGYGPIVASVFYSVVGDGAAYPRGRGVSAAVGLVPRQHSSGGKDTLLGISKRGDRYLRSLLVHGARSVVIQAVKKDDRLSQWINAVRARRGFNKAVVALANKLARVGWAVLANKTAYQAL

SEQ ID NO: 43119 - protein, 318 aa, unidentified
MTPPITFVGIDVAKASLEAHLLPHAEAVTVENTHDGLRTLLDVLKKHPRCLVVLEATGGLEIPVAAELNEAGLDVVIVNPRQVRDFARALGVLAKTDRIDAAVLARFAERVRPEVRPIPDAQHEQLKELMARRRQLVQMKVTEQNRLSRARAKRVRRDVEAHLAWLERQLRKLDKNLDDTIRQSPIWREKENLLRDVPGVGPVLARTLTASLPELGRLNRRELAALVGVAPMNRDSGMMRGRRTIWGGRAALRAVLYMGALAATRCNPVIRRFYHRLLKNGKPKKLALTACMRKLLTILNAIIRTGVPWQNQLDSENA

SEQ ID NO: 43120 - protein, 453 aa, unidentified
MGKSNRKAIKIGFHEGLPQIRANAGGMDIGASEVWVDVGGKDPEPVRRFETFTAELQEMGDWLKRCGIETVAMESTGVYWIPICQVLESKGIEVVLVNARYAKNVSGRKTDMLDCQWLRILHSYGLLEASFRPARDIGVLRAYMRHRQMLIEYAAAHVQHMQKAMTQMNLQLQHVLSDITGSTGMRIIRAIVDGERDRNRLAAMRDVRTKANETTIAKALEGDYRAEHLFALKQSLELFDSYQKQIEACHQQIADHLRSLESKADPAAGLKPARTTKKKRRNQPDFNIREEAFRISGVDLTEIDSIHESAALGLLAEIGVDLSPWKTEKHFASWLTLCPNNKISGGKVLHRSTRKSASRARDILRLCAQSLLVSRSALGAYCRRMCARLGKPKGIIAAAHKLALLVYRMLKFGRRYVDIGQEQYEEKYKERALKQLARKAQHFGFQLVPSSQQ

SEQ ID NO: 43121 - protein, 389 aa, unidentified
MPTVADRPEAQTAIQTNLAAIFISLELSRSIWLITSLSPGGGEKMSKHSVPAGDIAALLARFSELKQKALARTGKSFPIVTIQEAGLDGFWLHRVLQSEGIESHVVDPASIATSRRRRRAKTDRIDGEALLRALLAFKRGEPRVCAMVRVPTPEEEDRRRLCRERKVLIAERVKHVNRVKGLLFSQGVSGYEPLRRDRRQRLDELTTGDGHPLPTHLKTQISRELDRLELLLDQIKAAEAERDALLAAQQAATPAPAGRMLLDLKGIGPEFAANLWLEGLFRHFDNRRQLASYAGLAPTPWQSGSVDREQGVSKAGNPRLRTTLIQLAWLWLRHQPQSALAQWFKQRVSRNGGRLKKTTIVALARKLLVALWKYVTAGVVIEGAVMKAA

SEQ ID NO: 43122 - protein, 404 aa, unidentified
MWYVGLDWADTHHDVEVQDEAGKRIGARRFAHSHEGLHELQAFLLGIAASPEELACIVETNHGLLIAFLLEAGIPVYPVNPKTTHRLRKAAGAKTDRIDAHLLAKTGRFDLAELRRMAPDSPSVAELKTLTRDQDALIQTQTRLVNQLTACLKEYYPAALQLFAKLQQRSTLLFLQAYPTPQAALAASVEEITATLRAGKHTNPRRVAPKIVEELHRPQLVASEVIVRAKSRLMLSLVKQLLVVIQEIESYDKAIRPLFLSHPDQELWRSLPRAGKRLAPRLLAEWGDDRSRYVDANSVQQLSGTAPVPYESGNYAKAHKRFACLKPLRNALHQFARATTRQEAWARDYYQRKRAQGKTHSMALRALANVWVRIIYAMWVNKTSYQTTTFEAAQRAHAPRQRVA

SEQ ID NO: 43123 - protein, 340 aa, unidentified
MNKFNTKSWFVGIDISKDSIDVSLFNKYNSNSYYDQRFKNDLKGFDLMLKWLLKHQANLNDCLFCMEHTGTYGLLLFTWLSGKETDFCVESGLQIKRSLGITRGKNDKVDARRIAKYAFVNRESLSPFTLPTKSLIQIKQLLTYRDQLIKCRGSFKNSLKSHKQYQQISELSFVAEDIQEQIESLSKRIVRLEERILETIQSDPALKTNFKLATSVTGIGFVIAAFMLVTTNNFSSFENGRKYACYTGNAPFELSSGKSIKHPRSVSHLANKRLKTLLSNGANAAYRSDPEIRNFYKRKTEEGKDHKLIINAISCKLINRVFAVIKRQTPYVTTYQQKIV

SEQ ID NO: 43124 - protein, 355 aa, unidentified
MNDAKYIGLDVHQATISVSVLDSAGKLVMEAILETKAETVLQFLGGLRGSLHVTLEEGTWAAWLHDLLQPHVTRVLVCDPRKNALLKAGNKSDRIDARKLAELLYMNKLNPVYHGEQGIRTLKELARSYLTITRDLTRVMSRVKAIYRSWAIPCAGQQVYAPRYRAEWLAKISEAGVRRRAELYYQQFDSLAALRQGARRELLAEGRKHLNTRLLQQIPSIGPIRAVLLLALMQTPNRFRTKRQLWAYCGLALRTYISGEYRIVGGQLKRSKKVLAIRGLNRNHNHDLKNIFKGAATRAASTAGPFQDFYEACVARGVKPHLARLTLARKIAAITLLVWKKGVRFDAEHLKQQAA

SEQ ID NO: 43125 - protein, 452 aa, unidentified
MEQKEISMKVVNPNAAGVDIGSRSHWAAVGQRSDEVQEFGVFNDDLKRMALWFKENKIKTVAIESTGTYWQSLYAVLLSEGIEVILCNGKFTKNIKGKKTDIKDCQWIQKLHSLGLLSNSFLPDKQTEQLRTYCRQRALLLDSSASACKKIQKYLRLLNLRLDVVVNDIVGQTGLAIIKSICEGETNPEKLSELRHYNCRKSREEISKALHSNGREDYLFALKQELDMYQMFQIKIGQCDIEIQKMLDRIIENDDNKRQHHIEKKPHKKINKNSPKNIDLNMKSYQYFEGVDLMAIEGMSYSTVLSIMSEVGLEGIKQFTTAKHFASWLRLAPNNKISGGKILSSKVPKGSNRLKIALRNAANAIGNLKESTPLRDFFQKINFRKGRVSAISATARKLAVIIWNMVVKNKPYYNPKEYLYLDQKRKLGLVKRIQKQITKFELSKENFEFVTN

SEQ ID NO: 43126 - protein, 317 aa, unidentified
MDKPPAATCFVGIDVSKGHVDVHVRPDGTAFSCTTDPDGLANLITRLAPLQPQLVAMEASGGYEAVIAAALTEAGLPVAIVNPRQVRKFAGAIGRLAKTDAIDAGVIAHFADAIRPAPKPMPDALMLRLRELLARRRQLVVMVNAEKQRLGKAADKLAQRSFKTILRSLEAERARIDRAIDTLIQQSPLFCAKQDLLKSVPGIGDIVARTLIVELPELGSVDRHQIAALAGVAPMNRDSGRYRGKRRIQGGRVEVRAPLFMACLTAIRHNPPLRSFYRRLRDAGKPARLAIVAVMRKLLTTLNAIIRDNTAWTHAHI

SEQ ID NO: 43127 - protein, 337 aa, unidentified
MSYLGIDLHTNSMTVCYRTQQGKERLKTFALRDLDAFRKTLRRRDRVAVEATGNTRWFVKQISKRVKEVIVVAPNKFEVITKSVNKTDKHDARTLAYFLSKDMLPKARQKDEQTAQLHSLAETRDKLVKQRTALVNKIHNILNSHGLKWKKETLTSEKGLRSIEAFEWEPIVRVELEVLSDQIRSLNKNIQTLDQQMINRGKKLKGHKNLASIKGIGDKSATVLLSVIGNVKDFESEHKLAAYFGIVPRVSNSNETVHHGRITKRGSKLGRTTLVQCTLVAKRYSLYLRRFYERLKLRRGSGKAIIATARKFLGIIYQTLVNDWIFEDFPNFVIAES

SEQ ID NO: 43128 - protein, 408 aa, unidentified
MFFVGIDLSDKDFCACMTDASGNRVSASTFDFNDDGFYSFIDWVKKHEPSSDKCMIGLENPRSRLVDFLSQRQYTVLPVNPNATAKYRESRFPSGAKSDPGDAHLIADYIREHEKALKPISIPEEKIRELRLLLEDRDRLIGQKVRFSNQLTHALKDYFPQALDAFGSIDNKCALEFLNRIDTFQQVKDLSCEQIEELLKECRCYQKKSKSRFTKAMKQRVSHISPEMIRARIVLKNSLVSHLTLIIQHIEQYDELIQELMSDIPNGNIFTSLPGADFLLGAKLLVLYAAKDFSNANEAQAFYGTAPYTASSGNYRSVRFRMGCHKFGRNAFQQLACCSIKTSQWARKQYTRKRQEGKGGNHALRCIANLWVKVTFAMWRSKTPYDEAKHMASVAVHIINQPDYVISA

SEQ ID NO: 43129 - protein, 344 aa, unidentified
MQATTIGIDLAKNVFQVHGVDDEHEVVLARQLRRKQVIPFFAKLAPCLVGMEACATSHHWARELMKLGHTVRLIPPVYVKAYVKRQKNDAADAAAICEAVTRPSMRFVPIKTEDQQAVLAVHRARDLLIRQRTQLTNALRAHLAEFGIVADQGPEGLAKLVAIVSDDNTLQSLPSSMLGPLRVIIDQLTSLQQQIGELDRLIKAQHRASDISKRLEAIPGIGIMGATALAASVTDPGQFTSGRDLAAWIGLVPKQHSTGGKIRLGSISKQGDRYLRRLLVVGGTSIVKLAKIFPWKYPWVAKLLAKKPAKVVAIAVANKLARIAWAIMNSGETYRPRTRRVRLS

SEQ ID NO: 43130 - protein, 449 aa, unidentified
MNNGNGVSRGDRNRNARLARLRELVPVANAIVGIDLADRKQMVVVTDHDSKVLARRTFRCRAWDLGVALDWAAERAAAKGWAAVTVSCEPTGHRWRVLGQLAAQRSMPFVCVQPMMTSWARRSEDLTFDKTDEKDAVLIARLTAQLRCYVPEPVDETWGRLRHLGTRRSQLITEASSQIQQMRDLIECVWPAALDTAQRPFRSRTWVASMSVVLGRDGGDFARTRRLGLARFEHAVRREITRRGGQKPCLRILRNLFTALADPAGVMAHRAGALERVQLLLEDWEVNIQRLVETEARMLSVLDELELTELVTSITGLSAVGAAAILAETGDPRRFTTARALVKHAGLAPREKLSGNFTGRTKLTGQGRPELRLAAWRAVWGAQRANAVYQARYRHLTTREDNKLTATQAQTAIAAAILRHLYAVITTGKAWDPDIATHGTRRPEVPLAA

SEQ ID NO: 43131 - protein, 360 aa, unidentified
MFRERTSVGLDVHARSVAAAAIDGLTGELVQARLTPRHEEILGWVGRLPGPCAVTYEAGPTGFGLARAFGAVGVRCEVAASSKLHRPAGDRVKTDSRDAVLLARLLRLDEIVSVWVPTASQEAARDLVRARESSRQDLMRARHRLSKLLLRHGIVYSGGKAWTQLHDRWLTGQHFASPATQAAFDDAYETVVLATARRARLDEKIIAMAGDGEFTALTRRLACLRGISTLTGFALAVEIGEWDRFTGAGIGAYLGLVPSEHSSGSSRVQGPITKTGNTHVRRLLIEAAWHHRAPYRPSAVLRRRWDQASAAARARGHAGNQRLHARWVNLNLRRKRPVIANVAVARELAGWCWSLAVLPD

SEQ ID NO: 43132 - protein, 433 aa, unidentified
MGFRREAVHLLRRSELAAWIIDRPPALLSHAVENPRPLEPAFTRSAREAAQGRGAGTQSNPIVRMVMKKNERAKLAVQDFAGIDVSAHELDVAMRRGIDDQFTIATFSNNAVGHKALLRFWLHGKARVRVCVEASGNYTLDLALTLQAHPEVEISVINPRRARRFAESLGKRSKTDRVDAQVLCEYAWRMPWVPWQPPSAVALHLRAITRAIADLSSIHTQQNNRAHAAAASQALPALVVKEMQHHQKYLEQRMTRLRRQALCLIAEDPELDRRFRLMLTATGIGETSALQILGELAVLPDTLDARQWVAFSGLDPRLFKSGKSVEKRPRISRGGSRHLRRALYMPALVALRRDPYLRRFYQNLLVRGKARLQAVVAVMRKLLHALFAMFRTNQPYDGSKLCAVSPTAMPCCLRLTDSQKERGSPAPLQREKN

SEQ ID NO: 43133 - protein, 351 aa, unidentified
MAASRRSIIGGVDTHRDTHHAAILDEVGGLLGDAEFPATPDGYQELLSWMRGYGRLRLVGVEGTGSYGAGLTRYLHGRKVTVVEVDRPDRGGRRQHGKSDPIDAVAAARAALAGTATATPKTRTGPVEAIRTLRVVRRGAVKARTATLNQIRGLIIAAPEHLRCQLKGLAPTTLAKRCAALEHDPTRIHDPAHATAIALAGLARRVLTLTAEITALDKLLIPLVKKAAPRTIALFGVGTDVAAQLLTTAGDNPDRLRSEAALAHLCGAAPIPASSGRTHRHRLHRGGDRHANHALHTIALCRLRYDPRTRAYATRRSAEGLSNNEILRCLKRYIAREVYTSLLADFTALTT

SEQ ID NO: 43134 - protein, 402 aa, unidentified
MRNSVFVGLDWAYRSHAVCVVDAQGSVLKHLTVSHDAQGLGELRHALAAFGKALPIAIERPSGLIVDALVEAGHQVFAIHPNAVKASRPRYRSTNAKSDAGDAFMLADLLRTDGHRWHALQPQSAAIRGLRTLVRTRDDLVATRVRLANQLTALLDAYWPGATCIFAAVDSPIALAFIEQWSTARKLTARQIAAFCKRQGYSGRRSPGVLLDRLQAAAPSLCEPMLAHAYATAALALVALLKPLAAQIKSLDGHIARTMAALPQAISVMSLQRAGCISAAQILAELGDVPERFASAEQLCSEAGVVPVTYESGKSRAVTFRWACNHRLRRAITCLADNSRHASPWAASVYQAARKRGCDHPHAVRILARAWTRVLWRIWTDGTEYNPAIHSSACRIENTQAG

SEQ ID NO: 43135 - protein, 313 aa, unidentified
MKKTICGVDVSKAKLDVCIEPGHRLSSFDNDTAGIAELAAFCREHAITLVVMEASGGYERRAFVELWEKGISCALTNPRNVRRYAEAMGILEKTDRIDSSVIARFADAKNLAPTPLRSQAQQRLKALVARLRQVTDDLTVQKQRRASLLDNPEMLASLDEVIALLKRQSRSLEGEIASMIDDDPLWAKLAETWREMKGVAGRTVARLHAEMPEIGTLSNKAIAKLAGLAPIANDSGKRKGKRSTRGGRAGVRSILFLVAAIAARYDKSLGEFRDRLLKAGKEKMVVRIALARKLLVRLNAKARDARAEYANAT

SEQ ID NO: 43136 - protein, 426 aa, unidentified
MNCTQNYKIDQVTEQTLVVGIDIAKRTHYACFVDDRGRVLRKSFPIFQSKEGFRQLYEAIQEAMQAFGKPQVIVAVEPTGHYWLNLAYFLEEHGIPLVMVNPAHVCRSKELDDNLPTKHDAKDALVIARLAKDGRFLVPRLLHEIEADLRVGSTLKEKLRKEQTAVKNAIVRWTDRYFPEFWTVFRDLGKTALSVLEWTPLPADMASRSAEELIEVYRQSEGLKCPQKAKIQALIDAAKDSIGVTEGTTMARFEIAALVRRYRQLEAEIAALDAELKALVQTTMEYQWLKTVDGLGDATIIDLLAEIGSFAHYRDPRQLVKLAGLTLKENSSGQRKGQKHISKRGRKRLRSVLFRAMIPLIRHNEAFRELHEYYTTRPVNPLTGKQSIVALCRKLLNVLFAICTKKQAFDAERMKQDVLSQVQRAA

SEQ ID NO: 43137 - protein, 394 aa, unidentified
MKKVCGLDVHKDTIFLCILAENGQTFLKEFGTLTAQVEEMRDLIKAERVSEVAMESTGIYWMPIWRILQGHVEMKLVNPYFIKQLPGRKSDVKDSEWIATVLQKKLIKGSYIPGKHIQELRQYERRYVHICENVTRVEQAIDRQLHRCNIRITNFTSKVGSVSVMGVVKGLVNGETAPEELIKHIHGRITNKHKEKIAASLKGVVSGSDRFIFRQNYEELELLTRQQQECVVEMEQICDTLYKEEMNLLCSVPGIQKLSAMTIIAELGVDLKTFITAASLVGWAGLRPRNDETAKKIKSRKITNGNKYLRRILVQCAWAITRSKKCWLSGKFSELAKRLSQKKALIAIARKLLVIIWHILSKHETYKEYKPKLSPEQKQKRIARLEKQILELQA

SEQ ID NO: 43138 - protein, 418 aa, unidentified
MTATYSIAPTVLVAIDISKHRHEVLIGVPGKKRRRRMTILNTLDDFQRLSATLASYDLPVRIGFEATGNYHRTLAHHLGQAGFELKLVSSVGLARTREALHNSWDKNDPKDAQVILHMLEIGAVQFFHDPMVVGTADIQELSKTHEIVSRSKTELWHRILTHYLPLYFPEAERFHRSSRTDWFLAFLEKYPSPHMISAMSREAFIADAWDVVGRKVSKEQLLSDIYATAAASVGLPVHADSDAVRMFRLVLAEGRSLVRQRDVIEARAVELLSDLPDYQLLTTIPGIGPINAMTILAEAGDLRRFRHHRQFLKFCGMDLATVQSGMFRGQSRISKYGNARLRRTLWMAGQTAVLKRTNSFRDKFERYISKDRHNAHLRRKAYTAIAAKMARTVHAVVNHGEPYRPFYEGVSPGGRTSL

SEQ ID NO: 43139 - protein, 327 aa, unidentified
MKSSEQSKTDSCVLHVGIDVSKDTLAVYAEGLFEGDVPNTKKGIASLVRGIRRQIGRDRAVLFAFEETGSYSLPVHLELDRLHELACVLNPARVRHYAIARGVMAKTDRVDARIIRHYAAECGCEPTPIPSQTRLELRDMIRARNLLSKVRSMIMCLQTITRQSTCRTILGEVVRFVNTRIKKLEREMVMKAKQDASIHRVAEELDRLPGIAPLTAATIATLVPELGTLGRRQAASIGGLAPVARESGRFKGLRKIGGGREELRRALYMPALTAIRRDPEIKRFYERLVDGRKKKKKVALTACMRKMLVHMDRVIGRLNASTGNPAL

SEQ ID NO: 43140 - protein, 316 aa, unidentified
MNISKSITRSAGVDVSKPWLDAALHGCEATLRVTNTPAGHGELVDWLLARGVLRVGLEATGGYERALVKAVCDSGLELVVHQPIEIKLFARLKRLRAKNDRIDAKLIASATAQVDTIKAAADPRLVELAERLTAYEQATDLATLLKTQMEHMSLPDLVAEARAQLAILVTRKTRMIADIMARIRLWPDLAHRLGLLRSLPGVGPIVALSLLIRMPELGSMRRGQASALIGVAPFDRDSGERKGQRFIAGGRRRPRKLLYLAALTAKRCDPCYGVFAKRLIAAGKPPKVAIVAIMRKLIEAANLILQRDRPWQQAPQ

SEQ ID NO: 43141 - protein, 340 aa, unidentified
MKNTKYFIGLDVHKEKTSYCVRDKRGNILLENETATLYSELEPRLKPYLNTAKIGLEASTSYYTLYRMFLTNSYDISVANTIQLRQLIAKNDKLDAKRLSEMLRLGTFPCSYIPDEHIQHLRSLVQVRHSLMEEKVRCNVRIQAFLDKNGVLMPPQNAFSKHWRQTLQEHLSTGAVSGELQYEYDHFLFLEKKQRQVEQEMKHYTQIHWRKEYTLIQSVTGFGPVLACYVIAHVCPIERFPSNRKLRRYAGVIPVTKQSGETTSKGHIPKGSSRKQLRWALVQAANTAGKTDTPLGRYYRKKKKQKKITAIAKIAVASSMIDILYKVLTTKRPYQAVSAE

SEQ ID NO: 43142 - protein, 414 aa, unidentified
MTEEEIISWFAGVDWGSERHQVCLLDARGTTVGEREFPHSGEGLAELGDWLLSMASAASTVAVAIEVPHGPVVDALIDRGFVVYAINPKQLDRLRDRFSVAGAKDDRRDAYVQADSLRTDRRLFRRLQVADPRLIELRAWSRLAEELRAERVRLSNRVRHQLWRYYPQMQKLTKDLAAPWFLELWAIASTPAKAGRLRKSTVERLLKQHRIRRMDAETVLRILREPAIKVAQGVAEAASIHMRSLVARLRIVNRELREAERKLDELCTTIGEIEQTSGEGLQRRDVAILRSMPGIGRINLGTLLSEASGPLSRRDYEGLRTLSGAAPVTKRSGKSLIVVRRYAAHVRLRDTVYHWARVATQRDPKCRARYTALRKRGHSHGRALRSVADRLLALACVLLQRQTLFDPHFGRPTT

SEQ ID NO: 43143 - protein, 389 aa, unidentified
MQRNDLSRSLVAFDQNSTIMAVVELSLNTWLVSGVVPGVKRQPLKKQAADPERLLGLLERWRQEAIKAGHAIERIAVAFETGRDGFWLARWLRARGIEAHVIHASSIAMPREHRRAKTDRLDTEALMRAFLGWLRGEARHCRMAALPTLAQEDAKRPSRERESLVAERTRLVNRMKATLVWLGLPNVNIKLRKVAERLGDLRTPEGEPVPPNTLAELRRDLERLVMIRVQIKAIEQARLQRLAAAPAQGTHPMVLMLAKILGLGIETADMLVHEVLSRRLRDHRAVARYGGLTGSPDESGSKRREQGLAKAGNARVRRGMLQLAWRWLMFQKNSALTQWYRSRTADGRGGTRKGTRKTMIVALARKLLIALWRYVTVGEVPQGVVLKAV

SEQ ID NO: 43144 - protein, 346 aa, unidentified
MEYYVGLDVSLKLTAICIVDRTGKIACEGLVSSDPEAIAEFIKSHASHVERIGLETGPTATWLWTELRKLELPVICIDARHAKAALKMQINKSDRNDAVGIARIMQCGWYKEVRVKDLDSHAIKALLVSRALLVKIKRDVENQIRGLLKNLGLVIGRAKMNVFLLRALQLTEGRPELAAAVAPLLKAREAIEQQIEDLDRKVLRLARNNAQVRRFMTAPGVGPITALCYLATIDDPTRFKKSSSVGAYAGLTARRYASGEVDWTGRISKCGDKMLRSYLYEAANVLLTRIAKWSALKAWGIRLAKRSGLRKAKVAVARKLAVILHRMWIEGTEFRWSSKEAANQPA

SEQ ID NO: 43145 - protein, 351 aa, unidentified
MRMTTIGIDLAKTVFAVHGVNAHGKAALKKQLKRYQMLTFFANREPCLIGMEACGSAHHWARQLTALGHTVRLMAPQFVKPYVRTNKNDAADAEAICEAVARPSMRFVPGKTAESQALLAVHRACQGFVKARTAQANQIRGLLSEFGLVIPQGIAHIAKQIPRILEDAENGLPDTMRPLIARLAAHLGELDRQVDELEAQIQTWHRQNAESRRLAEIPGIGPITASALVASIGDAKTFANGRQLAAFLGLVPRQHSSGGKPTLLGISKRGDAYLRTLLVHGARAVVRVAERRTEPTDTWLKRLLDRRHKNVAAVALANKNARRFACTATAWALLAHGQNYRGDYAPSGRSA

SEQ ID NO: 43146 - protein, 392 aa, unidentified
MPISVGIDIAKEIHWVTAIDAGGVVQVDRKLLNTPAGIATLVDELTALRGTVRIGLDVIGGIAGLAEAMLADAGFALVHVPGIAVNRARQGTVGGENKSDPRDARTIAEQVRTRSDLRPIEPATELDLEIRLLVGRRSDIVQAQTQRLSRMRDLLVGIFPGLEACLDLKTKGPLHLLTKFVTPAELRDAGKKRLVRHLQAAGGVPKVEDLADRVLTVATEQRIAVPAERTTARLIRELAVEALASRTRLTELDRELEALLARHPDAALIRSLPGMGAVLTAELIAEAGNLARFRSADALASAAGMAPVLRQSGRSRFLRRPSGGNKGLKRVFYQSAFCSLAHDDSRAFYERKRREGKRHHQAVIALARRRVNVLWAVVHSRTPFQTAFKTAA

SEQ ID NO: 43147 - protein, 359 aa, unidentified
MNIIGCDLHSRFQQIAMLDTTTGEIVTRALQHEEGEAREFYASLSPGAVIGIEATGYTQWFERLLAELKHELWIGDPAEIRARMVRQQKTDTRDAEHLLELLMQDRFPRLWVPSVEERDLRQLLKHRDKLVQMRTSVKNQLHYLAMSQGVCRKQKLWTAKGLAELRRLILDPWASRRRQELLALLEPLEPRIEELDKAVEEEAKKRPDSVLLMGQKGVGPVTALAFVLTIGPVERFRHSRQVVSYLGLNPSEHSSGGRQRLGHISKQGNEMLRWLLGEAGQSAARWDSQLRRKYLRLKFRRGKNVAKVAMARQLAVRLYWLLRDDREAKLKVAREASCEATILASNEASHVAEAGSHVR

SEQ ID NO: 43148 - protein, 366 aa, unidentified
MKKVSTVAARQTKNFSDWKLTIGLDLGDRSSWYCVLDEAGEVLLEQKVGTTPKAMQEVFGGMPRSRIALETGMHSPWVSRLLSELGHEVIVAHARNVRLIGESRRKDDRLDARTLARLARIDPQLLAPVKHRSAQAQSHLTVIRARAGLVRARTSLINTARGLTKSYGERLRGCNPRNMNPEKAQGLSPELQAALAPLLAGIESLSEQIREYNEQIEQLAQTSYPEVALLKQVKGVGTLIALTYLLTLEDPHRFRKSRDVGCYVGLQPGRRNSGQSEPQLHISKEGDPYLRTLLVQGAHHILGPFGADSDLRRWGLKLAERGGKNGKKRAVIAVARKLAVLLHRLWVSGEVYEALRNSNRALPAAA

SEQ ID NO: 43149 - protein, 343 aa, unidentified
MSVFAALDVSQEETAICVVDRDGGLVAEAKVPTCPDAIVRWFAERAEGLERVGMETGPLAVWLWNALTARQVPLVCLDARHASGVLKMMPNKTDHHDARGLAQIVRTGWFKPVQIKSHDAYVNRALLTAREALVGMRVKLENEIRGLLKTFSVMFGKRVGGFKRRAEEIILDELAVSPDLVPIFEALMQARRDILARIAALDSRIRSIARRHATVRLLMTAPGVGPITAMAVVAAFDDAFRFRRSSSAGAYLGLTPRRYESGEISRNGRISRRGDMFTRKCLYEAAKAIFCRNLGDTRLRSWAKAIAERTGPRKAKVALARKLAVTLHAMWRTNTPFREEAMA

SEQ ID NO: 43150 - protein, 359 aa, unidentified
MQTQSNKIDFNGQNIYVGFDVHLKSWTVTVMTEKLTHKTFSQPPKPEALYHYLIRTFPGGTYHSAYEAGFSGYWIHNKLTKFGVDSMVVNPADIPTTGKEIVMKDDTRDSIKIARSLRNGDLKPIYVPSLPTLEDRGLVRTRATLVKDLTRYKNRIKSFLYFHGIELPEAFNKPKTYWSNRFNKWLEDVEMTESSGKASLNVLLEQSKQLRASILQVTRQIRELAKSDRYKMQQELLRSIPGIGLLTAMIILTEIETINRFNSIDQLCGFIGLVPSTNTSGDHEIVGDITPRGHSVLRTAIIESAWMAARLDPALNKCYHDYCKRMEPNKAIIRIAKKLISRIRFVLKNNQPYVCSVVK

SEQ ID NO: 43151 - protein, 411 aa, unidentified
MVREPGRAIGLDVHREFCEVAICEEGKVRSAGRVDSSPEAVEALAASLGADDRVALEVTGGAWAIVSILERHVARVVVVSPGDTGIAQARAKTDRLDARTLARLLWAGELEGVWAPDELTRLLRRRLARREQLVRARSRAKNEIHAVLMRCLVGKPPFSDLFGVAGRKWLRRLELPVEECETVEACMRHIEFLDTEVAEVERVVARYALSCSDARRLMSVPGVNVICAATFLAAVGDIGRFRTSRQLVGYLGLDPRVRQSGSSPAKSGRISKRGSGSVRWALVEAAASVIRQPGPMRAYYQRLRARRGHQIAVVAVARKLAVLFWCLPSREEQYAHQQPSLTAKKLRLLEIRGGAPTKKGSPTGTWATREKMREAEKALALQAEASYVRMVSDWQAAAPKRAGAGVTPGRA

SEQ ID NO: 43152 - protein, 341 aa, unidentified
MGEVSIIGLDLAKSVFQAHGADASGSVIFRKKLRRDRVLGFFAAQPKCVVAMEACASAHYWAREIGALGHETRLIAPAYVKPFVKRQKNDAADAEAICEAALRPTMRFVAVKSAEAQAASVVFRTRDLLVRQRTQTINALRGHLAEFGVVVRQGPGHVTKLVEFILDPASDLPDAGRRVLVLLAQSLEQLLIQIGVLDREIAQRVRSNATARRLMTIPGIGPIAATALVALAPPPETFRRGRDFAAWMGLTPLQRSTGGKERLGKTTKMGERSLRRLLILGASSVVKAAIRKPLPPGSWLGRMLTRKPRMLVIVALANKLARIVWALMAQGGTYRASAPAA

SEQ ID NO: 43153 - protein, 385 aa, unidentified
MGSQAFIARDYDVFAGLDVDKKSISVTFTDHQGLLKSMRMPYSVDHLVNHVRKYYGDKKVAFAYEAGPTGYGLYDGLVAKQYPCLIASPSMIPKAPGQRVKTNRLDSLGLAENLRGGQLKSIHVPTTLYRELRHLTQLRDALVSEVVAMKQRIKSLLLMEGLEFPPAPPGSQWSFLVKAKLRKLPCSSVVRFKLDQLLDNLEFGEKQVLKVTREIRRFCHNDPELSQCIDYLKSLPGIGWIVASQMMARIGDWRQIKNIREVPAFLGLVPTESSTGERTTRGSITHSGDPRLRSKLIQASWSAIRQDGELLKFFRTVAKKHPRHLGPRVAIVAVAHKLCVRAAVVLMKQRPYEMREKVQSAPLTQEETVPQGTTRRRRVPGEKIS

SEQ ID NO: 43154 - protein, 357 aa, unidentified
MKVTTIGIDLAKDVFGLHGVDGQGRVAFKKRLVRSRLLEFMSQLPSCLVGLEACSSAHYWARKIERLGHRVRLMSPRFVKPYRKSDKNDANDAEAICEAVTRASMRFVPIKSEAQHEVQALHRVREQLLKSRTALVNQVRGLLAEHGIVAPQGIARARRLLLEILADPERHGLSGLFRETLQEIAERLRFFDERVGAYDDRIERVFKEDERCRRLAKIEGVGPLVATAVVAAVGNASEFKSGRELSAWVGLVPRQHSSGNRSQLLGISKRGDRYLRTILIHGARAALRRADHKRDQRSRWAMRIKLARGYNKAAVALANKNARIIWALLTRGENYRPPAISVASPTADRIRLTQVQA

SEQ ID NO: 43155 - protein, 317 aa, unidentified
MEQRQSNTKVAGVDVGKARLDAAVHGLEGSVQVDNQTQGFSELIGWLKAREVGRVGLEATGGYERGVRVALEAAGFEVVVHQPLEVRLFAKLKRRQAKNDRLDAQLIAAATAQVDAVRAAQDPRLVALAERLTAYEQITDLAAQLKTGLEHVSLKDLASSLRAQIVSLTRLKARLALQILTAIKAQAELVEGYRLLTSLPGVGPIVAANLIIRMPELGRLRRGQAASLIGVAPFDRDSGQWKGLRFIHGGRSRPRRMLYLAALSAKRCDPGLKAFAESLVQRGKPAKLAIVAVMRKLIEAANLVLQRGQPWERRPAT

SEQ ID NO: 43156 - protein, 447 aa, unidentified
MIVEQIMAMRKRDDELVFPNAAGIDVGGSRHWVAVPPHAADDPIREFGAMTDDLNAMADWLLACGVDTVALESTGVYWIPVFEVLEQRGLKVWLVDARQMKYVPGRKSDVQDCQWLQKLMSLGFLRAAWRPTGEVCVVRAVARQRDVLLADQARWVQRMQKALVQMNIQLTEVLTDVMGMTGQLIIRDIVSGERDPKALARHRNGRVKASAEEITKALTGNWRDEHLFGLHQALAMYDDIAGHLAECDAKLQTLLTELGQTKVDLGKAPRAGTKSRTEFDARQILANWAGVDLTRINGLGLTVVAKVLSELGPDLRRFETVKHFCSWLGLCPGTKISGGKVLSAKTKRSANRVRQALKMAAMSLSHSDSALGAFYRRLCSRMDKPRANTAVAHKLARMVYYMLTRGEAFVDKGQQHYEEQQRQRSIAALKRRAAALGFEISANSVPA

SEQ ID NO: 43157 - protein, 428 aa, unidentified
MQPDSSTTPLYVGIDIGKNVHCFGGYAGGQLELICPRQEVRNNQSGYDTFRTWLQKQITNKRYAPIVVGLEPTGIYHETWAYAIQQDFANQIDFRFLNPYQTRQKRRQLQNGRKKKTDPIDVEAISYCLRDGQGNPACLPGQQTLRFDLWAAEFRQAYREQQRLQLSILTQWDRLWPGVLVDIKAFRKAHPHLTPPRPLVLSRPLERQLVRFLLQENPNPYYWRAFQAEALQIFLHEQGPHCGPITAQRVYQLAHEALLPPQHLAESLSERLQTDFRHFLQLDARLAQLQQQAEILIPQSPAAVLTTVPGIGAYLAAQYLAYVVDPLRFAHADQIWSMAGFDVTQDDSGDRRRMGRITRRGDPAFRKVLFSIGLNTSQYCPAIARARHQALKHGKKRVGAVIHAAHKANRMCFHLLLYQVPYDPMLAR

SEQ ID NO: 43158 - protein, 480 aa, unidentified
MNVKATRTKKQVNVENQAIKLLSKEELGIKIEVIKKELRSYTWRDLETNGKFAKNDKLSFITDDMLIAGCDIGSETHYIRAIDVRGRELSSRAFEFSNTSEGFANAKAWMLALAEKNDKKQIALGLEPTGHYWFALAAWMVSNGISVVQVNPYAVKQSKEIEDNSQLKDDRKDPKLIANLVKDGNYGMPYLPEKVYADMRRLSMFRDQLTEDRIRNINRLHRELKIYFPEYMDAFGKIDGAFTLEVLKVSAIPSDITALGAEGIKNIWHNEKLRGRGYSRANEIVSYAEKSVGLTDGTDAGREAVKWYAEQILKLDEQLAVIESTLHEKCREIPYAENILEIRGVGENILAGILAEMGDISRFDDVKEIQKLSGMGLVACSSGKHKGQTKISHRGRKRLRYWLFQAAKSAVSHADEFKQLHEYYTTRTNNPLKKMQSLVVIACKILRVSYTILKTGTTYDPQKLLKDIKRPTASQAPMAA

SEQ ID NO: 43159 - protein, 351 aa, unidentified
MTIISHYIGFDVHKKSISYCVKTKDGTIVEEGRLRATREVLRQWAAKRQEPWHGAMEATLFSGWIYDALQPFAAKLQMGHPARMKAIFAGKKKNDKLDARKIADLLRVNLLPACYVGPAEMRELRRMLRYRNLVVAQAVQMKNRMSGMLMEVGAEYSKRRLHGKEYFSELLDQLEEVPESVKDLLRLSRGSLEMFETVQRQLLERLQKEPLLRKRVELLRSIRGVGEVTALSWALEVCDPRRFPSIDDAVSYCGLTSALVESAGKQQRGPISKQRNAHLQTVLIEAAKLAPRWNPQLAAIHERELERGHRNRATLEVARKLVAYLLAVDKSGRPFQPRTAPTRETEAPKVA

SEQ ID NO: 43160 - protein, 345 aa, unidentified
MELHTIGIDLGKTAFHLVGVNLHGEIVVRKKFSRKQLLHFTANLQVELIGMEACGGAHFLGRALREQGHEVRLMPAQYVKPYIKTNKNDFIDAEAIAEAVTRPRMRFVPIKTDDQLDMQSLHRVRERWVMRRTAIVNQVRGLLLERGITLPKGRSHLDTALPRILEDADLKLSGALRALLAQLKLELDQMTMRIGEADAVLNKTARDNADCQRLMTIPGLGPVTATALVAAIGNGGAFRNGRGFSAWIGIVPGEYSTGGKQKLLGISKRGNPYLRRLFIQGARAVLQQRIKQSSGLRAWLEQLAARTHPNVAAVALANKLARMAWAVLTKAEPYRPPLQASPIAA

SEQ ID NO: 43161 - protein, 311 aa, unidentified
MRITIGIDISKDTLDAYQLPDNQHIQVANDKTGHKTLSRWIGAYNQPLVVFEATGAYHRNLEAALTASDTAFAKVNPLQARRFAEATGRLAKTDRVDATGLAKMGAVLELKGHKPRSEALLILRELITARRALVKDKVAAKTRLQTITQTLLKNQINARLKQIDIQIRQVDVAIAQKVAQDEALSQKLGILISIPGIAEATAFSMLIEMPELGTLEGKQAASLAGLAPISRQSGKWQGKERIQGGRTFLRRAIYMPALVATRYNPDLKAKYDQLIGAGKPGKVAITAIMRKLLITANALLRDGRKWSAIRP

SEQ ID NO: 43162 - protein, 343 aa, unidentified
MQVTTVGLDLAKRIFQVHGVDAAGKVVIRRRLQRSEIAAFFADLPACLVGIEACATAHHWARLIGASGHQVRLIPPSYVKPYVRRSKTDAADAEAICEAVGRPSMRFVPVKSAHQQAALLHHRARDLLVRQRTMLINAIRGHLGEFGIIAPAGRRRVADLLNLLQGADDAEVPALAREALQSLFAELSALEIRIKVVEAVIMREHRSNAVSRRLTTIPGIGPITASALAGTIADPFAFKSGRELAAWIGLVPRQHSSGGKQKMGRVSKQGDRYLRRLLTVGATAVMRRLPGKTDGLSLWVRALLDRRPFRLVSLALANKMARIAWAIMVRPETYKASAMTAAA

SEQ ID NO: 43163 - protein, 448 aa, unidentified
MNKVKEKKTKAKTVMEMPVVNPYAAGIDISDKEHVVAVPEGMATQRVRSFGTMTCELTALVEWLKQCEIDTVAMESTGIYWKSLFSILVRNDFEVCLVNASHTKNVTGRKTDESDATWIQKLHSCGLLKSSYLPDDEQEVLRTLVRYRRTLVQDSSRFVNRLQKSLELMNIKFHTVIRDITGKTGRAVIEAIIRGERKAQNFLPFIGKQIKADKETIVKSLEGNWSAEHLYILKDCYEMYQTYRLRIADCDKEIEKQLQQYEAKRNEGVIESAENKTKPERIKKGKDKNHPRFDVRGYLERIHGVDVLAIYGLSDIGGLELLAETGADLSKWNNEKQFVSWLNLCPNNKISGGKLISSKLLRKKTNPASQAFRQAANAVQKSNHWLGDYFRRMKAKGGNKYAIIATANKIATIYYKMVRYKEEFKPMVLELYQQKRWLNPSPWKLYRS

SEQ ID NO: 43164 - protein, 341 aa, unidentified
MKLYAGIDLHSTNSYLAIIDEDGKRVFKEKLPNDLVTITDRLSLYSGTLEGAVVESTYNWYWLVDGLMAAGFAVHLANPAAIQKYNGLKHADDKHDAFWLAEMLRLNILPTGYIYPKEERPVRDLLRKRSHLVRLRTSLMISLQNIIARNCGFKLKPDDVKCLSDNRVAPLLAGNEDLALAGQASKEAIDALTRQIRTIESFIEKRLKLKEGYRHLLSIPGIGRILGLTIMLETGPIERFEQVGNYASYCRTVSSKWTSNGKAKGKGKGNKKNGNKYLSWAFSEAAELARRFDDQARAFYNRKLNKTNFMIAHAALAHKLARAAYYIMRDQVPFQPGKIFT

SEQ ID NO: 43165 - protein, 408 aa, unidentified
MNTLYVGIDVSSKSNVVYLMLPNGDKHSNFSVANSHEGSTQLVKRILSALTSYSLDTVLIGLEATNVYGDNLVYFLREDATLAPFNRKIHVLNPKQVKKFHDTYNDLPKNDYVDSFVIADCLRFGRINKEVYMGDYRYKALQNLTRARYYAVQNLTKEKQRFINVLFKKYSTMTQEKVFCDTFSSTALAVYDEFDSAEALANMDLHELTDFIIKKGKNRFTDPDAVAKAIQKAARSSYRLPKTINDSVNQVLSISITSMKALESQIKEFDKAIKAQMELLPNVLISIPGIGPVYSAGIMAEIGDINRFNNQAALAKYAGLAWKQHQSGGFEAAVTRLIPSGNRFLKYYLCEAAFSLVRCDKEYSDFYHLKYKEVNRYQHKRALALTARKFVRLVFRLLKDNRLYCPAK

SEQ ID NO: 43166 - protein, 393 aa, unidentified
MRICVGIDVAKDVHWVHAVDQDARVLIDRAVSNEQEALEALASDLVGLDGEVRVGLDVTGSIACFLEAVLIAAGLALVHVPGIAVNRAAQGHAGGERKSDPRDARVIADLVRTRADLRPILPDEETTVAIRLLVSRRGDLVQDQTRRVSRLRQFLASIHPGLERSLDLGAKGPLVLLTRFVTPGEIRAAGNARIVKQLRKTPSLRDPERLAEIALSAARAQTIVVPGEATLARLVRELAVEALAARERIAEIDKELAALVAAHPDGALIRSLPGMGVVLSAEFIAAAGSIARFRSADAMASAAGLAPILRQSGKARALRRAFGGDKALKRVFYQSAFCAVVAKDPTSRAYYDRKRREGHRHVQALVALARRRVNVLWAILNHRQPFDPSYRAA

SEQ ID NO: 43167 - protein, 412 aa, unidentified
MEVVYPCCCGLDVHKKRITACVLWAEAKGKSRKEKRGFGTFTHDLLRLADWLQECGVTHVALESTGVYWKPVWNILAEQFEVLLVNAQHIKAVPGRKTDQKDSEWIADLLQHGLLRGSFVPPRPTRELRDLTRYRVSLAQEINRIANRIQKVLEDANIKLASVATDALGASGRAILEAMLAGEQDPTRLAEMSKGLLRNKIPELKLALEGRMTEHHRFLLRQLFDHLRFTESKLSEIEQEIDRRTRPFEDKVTRLCTIPGVDKVTAWGMLAEIGLDMNQFPSSEHLSSWACLCPGSFESAGKRLSGKMRKGNVSLRRCLSQAAWAISMTKNNYLSALYRRIAARRGAKRAIMAVAHALLVIAYQMLKRQEDYRELGADHFDKIDINRIRRSLVRRLERLGHKVTLEPIAQGA

SEQ ID NO: 43168 - protein, 367 aa, unidentified
MKKISTVAAKPSKKISRQKLTVGLDLGDRNSWYCVLDESGQIQLEQRVRTNAKALREVFSKMPRSRIALEIGTHSPWISRLLSELGHEVIVANARKVRLIGESRKKDDRLDAQTLARLARIDPELLYPVKHRSAQAQADLMTIRARAGLVRARTALVNTARGLAKSYGERLHGGNVRNMNPEKAEGLSPELQAALEPLLNAIESLSERIVEYNDRIENLAQQSYPQVALLKQIKGVGTLIALTYMLTLEDPHRFGKSRDVGCYLGLQPGRRNSGQSEPQLHISKEGDPYLRTLLVQGAQHILGPFGIDCDLRRWGLKLAERGGKNGKKRAIVATARKLAVLLHHLWVSGEVYEPLHNSRRTTVAAAA

SEQ ID NO: 43169 - protein, 429 aa, unidentified
MSYRIAGIDVHKKMLAVVVSDVEIESEYEFERRKFSSSPEQLRSLSAWLLEQEAEEVVMESTAQYWKPVWEALERYWKPLCEKREGARRKSGTLHLAQALSNRGRRGRKRDFPDAERLVKRLVARELTLSFVPDAEQRLWRTVTRKKYQLRCDRIRLQNQLESLLEEAHIKLSSLVSDLLGLSARRMLKAIAEGATNPVTLAALADERLRATPEQLCDALGACTELHAVYRRLLKMALEELRLIDEQIGRLDQEMASLLSEHQDAVQRLAEVPGLGVDSAQQIIAEVGPTAATFPSEKCLSSWVGACPGDDETAGVNYSHRSPKGNRHMRRLLNQAANAAARTKGSIFELAYRRSVPRLGHNQAIGAIAHRQCRLIWLILHQGVRYEERGPAVNKRSKQLRTWRMIRQLRNLGYRIEPPNPQPSQASAQ

SEQ ID NO: 43170 - protein, 346 aa, unidentified
MSSSNVHIYGIDLGKNWFHIVAMDRQGHILWRKKFNRSQLKTFVVNTPPTIVAVEACPGSQYWGRLFNDAGFSVKIIPAQFVKPYLKSNKNDFNDAAAIAEAGNRGTMRCVALKTHEQLALQATHRVRQRFIVERTATVNQMRALLLEYGITVPVGRKVFERNLPSILEDAENGLPDFIRALVFRLRERWQHIDVQIDEMSAQLQQASIASEKCQLISSVPGIGPIVATGLIAAVGSGTQFKRGRDMSAWLGLVPRQYSTGGRSNLGGISKRGNVYLRRQVIQGAKALKIHMKRDKSALGQWIAKLEATHHHHVVLIALANKIMRICWKILTSGQAYQPYPASAAK

SEQ ID NO: 43171 - protein, 468 aa, unidentified
MPTARPHPHPHGRRAAPPPPDLHRINANAAGIDIGAASHHVAVPPGRDPDGCDVRAFGAFTADLYVLAEWLTRCGIQTVAMESTGVYWIPLFELLSARGFEVRLVDPRQLKRVPGRKTDVLDCQWIQQLHTFGLLAAAFRPDDQICVLRSYLRQRAMLVTYAAQHIQHMQKALELMNLKLAHVVSDIAGRTGLAIIRAILDGQRDPRALATLRDPHCKADAATIARALEGSWRAEHLFELRQAVELLEFYQKQIAACDREIEAQLTRFADKPGAPPVADAARRRKARRTALSFDARQHLHRLTGVDLTRIDGIDAPTALTVVGEIGLDMTRWPTEKHFASWLGLAPGSHLSGGKQRSSRTKPSSSRAAAALRLAASSLYHSHSALGAFHRRLKARLGAPKAITATAHKLACLIYRMLRFGTDYVDRGQDYYERRYQGRVVSNLMRRAQELGYTLTMNHSPATPSPAAP

SEQ ID NO: 43172 - protein, 425 aa, unidentified
MRITQNLREIKLNQVLDVSVDVHKEILNFFFSMEGKEYRDECPNHTRSIEKRLSKYHDIAKEQGFARLRLICEPTGDYQNKLLRTARRHGHLTCLVNAESVCNFRVIESNDTNKTDTKDPKVIASLGRLNKVIRHRVLTEDYQVLRKLGRIYHELDSDITALRCKIDRLLIELFCDFSFTKDFLYGNSGAVLIERFGCNPYRIIETGFEIFAMTMKQAIPRIRKDTIARLWQDSESSILNELPAGYRDVLEEQFQDLIAQFRDRERRKEQIVEQMKIIFRRLRDDDPRIPPPTAGVISEKYLALLIAETGPISDFRNWRQLIRYGGLNIRMRQSGKYTGKNRISKKGSPLLRKVLNHIALPLVRQGCLYGAYYQKKREVDKMPGTKAMTIVARHFLRKFYGWYKSGAAFDEKRFFVSEGEYLKAA

SEQ ID NO: 43173 - protein, 345 aa, unidentified
MPVAEVDTFVGIDVSAHELSVALRRGQSHDKAAMAKFPNHPSGHKALVAYLLRGGGRVRVCLEASGNYSLDLALTLQAHRQVEISVINPRRARRFAESLGERSKTDPVDARVLCEYAARMPWVRWQPPSPVALHLRALTRAIADLGVIHTQQNNRAYAAAASQSLPVLVVKEMQRHKKYLEQRMTRLRREAVRLIACDPELERRFRLMLTTIGIAETSALQILGELAVLPDMLDARQWVAFSGLDPRLFKSGKSVEKRPRISRSGSRHLRRALYMPALVALRRDPYLRVFYQNLLARGKARLQAVVAVMRKLLHALFAMFRSNQPYDGSKLCAVELAVHAIAACA

SEQ ID NO: 43174 - protein, 483 aa, unidentified
MATDKMNKKQRKELKRQLRSEDPGLDVVHPRAAGIDIGNSVHYVAVRPDQDPQSVRRFECFTADLHRLADWLQECRVQTVAMQSTGVYWIPLYEILEERGFEVYLVNARHTKNLPGRKSDVQESQWLLKLHTYGLLNNSFHPSTEIRVARTYWRQREEHVRGASRCIQRMQKVLTQMNVQLANVISDVSGMTGQRIIRAIVGGQRDPKKLADLSDHRIRAGREEIAKSLEGNWRAELLFVLQQEVDMYDTYQRRIGECDRELEGHFKKFVSKIPPSPAEEGSPSEGGKGNQPQSTSKVKPTPVLKKASGNRPQFDLRSELHRISGVDLTRIDSIEVLVAQTVISEVGLDMSRWKTEANFASWLGLCPVNRISGDKVLSKGTRHVINRAATALRVAATTLLRSKSYLGAQYRRLRNKLGAPKAITAMAHKLARLVYRMLKYGQEYADKGMQYYEDRYRRQQVELLKKSAAKLGLQIVETQTVAG

SEQ ID NO: 43175 - protein, 319 aa, unidentified
MSSELVYVGLDVAKATLDVALRPSGECWQAANDDAGVADLVARLRALAPTLIVCEATGGFERPAVAACAAVGLPIVVANPRQVRDFARSTGQLAKTDTLDAGILALFAERVRPTPRPLPSAAAQLLDALLTRRRQLLEMLVAEKNRLGFAPRPLHRGIRQHIQWLERQLDDVTAELAALIEASPVWQAKSNLLQSVPGIGPIVSAVLLGELPELGALSHKQIATLAGVAPLARDSGTLRGKRMVWGGRGGVRTALYLAALCGRRWNPQLRVFYERLRAAGKPKKVALIACARKLLTIVNAMVRDHAHWASPTLRVQHSC

SEQ ID NO: 43176 - protein, 410 aa, unidentified
MAEERSALLKEALPFLVDQQPTDEGVNAMIEEVVIGLDPHKKSNTIAVVQRDETLLSRRRFEHSDDGLVAMLDAVGEFPKRVWAVEGANGIGLNIAQKLVACGERVVDVPAKLATRVRVYSTGHGTKTDDTDALAIARAAIHSRHLRFVQAPGSNEALKLLSDRRSELVQARTQAVCRLHRLLRELIAGGARTSLKAEGAFDLLTALEPTNPADEARVEIALEHIGDIARLDLKIDEATRRIGAAIKACGTTLTRVYGIGPISAAVILGEVGDPGRFANRDRFASYCGTAPIAVSSGDNNRHRLSRSGNRQLNRAIHMAAVTQIRNDTPGRDYYRRKIGEGKTKLEALRCLKRRVTDAVFRQLQVDRQDDQTQDDAWPRRVSKRQGSPTYYSPATLRRDGKPMQPRPARV

SEQ ID NO: 43177 - protein, 310 aa, unidentified
MIAQDVIGVDIAKDWIDVFTLSSSGHARIATTTPALRAFARAAKGALVVLEASGGYERPVTEALARAGVAYARVNPRQAREFARASGRLAKTDRVDAEVLARMGRALELAPTPPEDPDRARLSDLVARRGDLTATITREKNRAGTTRDPWLKREIAALLKVLEAHLKAVETGIAALIDTRDRLATEARRLRSVPGIGPALAAVILARLPELGSLDHRRIASLAGLAPQACDSGIHRGKRRIWGGRADVRRALYLAGFIASRHDPTLKTFRQRLEAAGKPPKLAITACARKLLTILNAMLRDGQHYLKQPT

SEQ ID NO: 43178 - protein, 449 aa, unidentified
MGSEKLFVSIAGDEAAVFGTVTDEVYRLRDFLKQTGVTGVAMEATGVYWLYAYGVLEAAGLEVIVVNGRYVRNLPGRKTDMSDCQWLATLHAHGLLRGGFVPPAEIRRLQDYQRLRTDHISGAANQVQKMQQALERMNIKFHDVISDLTGVSGMKVIKAILAGERQPERLLELCDKQIQKKKSERVLESLHGVWAPEHLFALGQALSAWEFYQKLLAECDRQIEAVLKDLAGPPPVSPPSPPEGDAAKGKAPKPPGKNAPQIDDLHALLVQICGGRDATSLPGVADYLWLQLVAETGTDLSAWATEKHFVAWCGLAPGTKQSGKRKGSIKRQRNRAGRLFCAGARSLVQSVDKGLGGFVRRISRRKGGLVATKALARKLAGLYYRVLRYGLEYAERGLREYEQKYEESQRRLLAKLAAKHGFQLVSEQALALHAAITQAASPNPSQSHA

SEQ ID NO: 43179 - protein, 346 aa, unidentified
MEASVEQVSIIGLDIAKQVFQAHGADASGKVVFREKIRRAKLLEFFDSKPPCTVVMEACGGAHHWGREIAKLGHQVKLIAPKYVKPFVKRQKNDAADAEAICEAAMRPTMRFVSVKSETVQASALVFRTRDILVRQRTQLINAVRGHLTESGVVVAQGVAHFKKLVAQLEDPASALPEEVRSVLSLLVQTVMSLDEKISALDKEIARRAREDEVARRLMSIPGIGPITATAIAALAPPAETFRKGRDFAAWVGLTPLQKSSGGKQKLGATSKMGERTIRRLLIIGAATVVRHAAMRGAPPTSWLARMLARKPRMLVIVALANKMARIAWALLVKGEDYKAPVVAAA

SEQ ID NO: 43180 - protein, 346 aa, unidentified
MTMFVGLDVSLRQTAFCVVDDTGATVAEGSTLSDPDSLATKLAGWREQIALVGIEACPLSEWIHGGLVGAGFDVRCLETRHAQRFLSTRPNKTDRNDARGIAAMMRLGHYKAVHVKSRAAQFQRAILVGRGQLMSTMLQIENTIRGLMRVQGLKLGKVHRNRYAERVLELCRREPALLTAIEPLLDARSTMRAQMVRLDRALTRTIREDATCRLLMTVPGVGPITALAFKATIDDPTRFRSSKAVAAHLGLTPRIYQSGEIDRSGHISKCGDKVMRYLLTEAAVAMLLRSRKWSALKAWGTQLAKKVGMSKAIIAVARKLAIVMHAMWLSGEPFRFGVAEAAPNTP

SEQ ID NO: 43181 - protein, 406 aa, unidentified
MELTALHKRVIGLDVHQAQITACAIIEDADGTVRIEQRQFGGFKRDRRALADWAAALSPDEVVMESTGIYWKSPYAALEVVGIRAQVVNARHVKNVPGRKTDVGDAQWLATLARAGLLRGSFVPPAKLRELRLISRQRQKLVGQLASEKNRLHKVLTDGGVRLGVVVSDLHGQSARAMVKAIIDGQSPHEVLQLASRRLKASREEIFDALQGELTDSHRFVLDELMRHIEEIEARIARFDARLLDALTDERNALALLQTLPGVDLIGAAMLLVEIGTDMDVFGSADRLASWVGICPGNNESAGKRKSGRVRKGNPYVRRLLCEFAHAASRTQSVFQSKFQSLIVRRGHERAIVALAHKLLRTIFFMLNRGQHYRDPATDYEALSVQRNAPRWIKALTKFGFIPRPA

SEQ ID NO: 43182 - protein, 472 aa, unidentified
MRTIGIDLGISAGHKAVVANDQAQFITPVMGLRTDPADLERLMRRARAGTDENEALQVVMEPTGLSWVPVASYFIQRGVTVYLVSTQQVHDLRKFYSKHAKSDRISARVLVRWPWVNPEALQPLRMTPADYLSGQRWCKQQDELSEQISAIKNRVQAWERAFWPGLKAAVGNPLAPWMRRWREVCYDPWELQAIETEHLATLLADAGADPDEALELARGLKTVARRAVGLYGAPEGGVSPHVDYAALQDQVVRELRLLTRLEAEHQAVREQVQRLYRRMHPSRDLESLRGVGEDGAAVYFFFVAQVERFGLQKQFRSWSGLIPGSDQSGDTEKKGVRITKAGPDLVKKYAYINADVGRQWDPQLAAVYYDQMMHKGKHHCQAVCCCATHLLDRVRAVLRDGRPYQLRDVDGTPVTRQQARQIVLERYQVPDEVRRRRSHQARKHRRDRQAERKQKRRSRQVSERLTPQSHLS

SEQ ID NO: 43183 - protein, 408 aa, unidentified
MEVICPRCAGLDVHKQTVVACARIAGDGAPLQEVRTFATTTSGLLTLADWLEGHGITVVAMEATGVYWKPVWHVLEGHFELVLANAAHVKNVPGRKTDVNDAMWLADLLAHGLIRASFVPPVAVQELRTLTRTRKQFVRERTAHVQRIDKVLEDANLKLGTVLSDILGKGGRAVLQAVIDGHSEPEYLASCISTRVKASRAELLEALRGHVSTHQRFMLKLHLTHIDALDKAIADIEKEVGQGLDTFRQAAKLLSTMPGLSAVGSNVVIAEIGIDMTRFATPGHLLSWACMCPRNDESAGKRRSTRLRRGGKWLKTTMVQAAWAAVKVKGSYLQAQFHRLRARRGAKKAIIAVAASMLTAAWHMLRNGTEYRDLGAAHFDRADAHKTATRLVRRLQQIGYAVQLSPVE

SEQ ID NO: 43184 - protein, 319 aa, unidentified
METITHRAIIGIDVARDWLDIHSLPEGQSQRLPNTDEGHIRLAKQAQSIDALVCFEATGGQEWKLWGALDKAGVSTRQLPPAQIKAFAASRGTRAKTDRIDAELIARFMQFRPNAGRNLPVEKVRFLRALTSKRGQLVETRKRLLAQIKAHEKMGTADLFTAIDVELKTLLEKQIIALEKQIENTIASDDQLKKTVNIMRSVPGIGPVASAMLIAELPELGQITGRQAAALTGLAPIAQDSGAMRGKRVIGGGRRLLRHVLFQAALVASHHNPSLKIFADRLRKAGKPHKVIIVAVARKLVTIVNTLCKSRQNWNIENV

SEQ ID NO: 43185 - protein, 348 aa, unidentified
MRFYTKPHKHYCGIDLHARKMYLCILDSDGNVLLHRELACGPENFLRAIAPFREDLVVGVECMFAWYWIADLCGREGIDFVLGHALYMKAIHGGKAKTDKIDARKIAGMLRGGMFPLAYVYPPEMRATRDLLRRRNHLMRKRAELLAHIQNTISQYNLPELSVNLSAERNRKGVAELFPDPEVRKIVEVDLAMIDAYDDVLKCLEWDIEKTARRHDWHALLLLRSIHGVGQILALVMLYEIHDINRFETVQQFASYCRLVKCSHESAGKKKGTGGAKIGNAHLKWAFSEAAALFIRHNPPVKKLVENLAKKHGKGKALTILAHKLARAIYYMLKNNEPFDRERFLKAA

SEQ ID NO: 43186 - protein, 465 aa, unidentified
MKHAHRRHRRTPTPHSSLLERINPNAAGIDCGAEEHYVAVPPDREAAPVRSFMTFTTDLHRLADWLTACGITTVAMESTGVYWIPLYEILEARGLDVVLVNARQVKNVPGRKTDVMDCQWLQELHSVGLLRGSFRPTAAIAALRAYLRHRETLVQSAATHVQRMQKALLQMNLQLSTVISDITGVTGLRIVRDIVAGQTDPRALAQHRDARCQASEARIMAALTGHYRPEHVFVLQQNLELFDAYQRQLAACDAAIEAHVHTLATEAPAPAAPLPGPRTRKKPRDNEPRFDIRTPLHQLTGVDLTQIDAIGPYSALRLLAEIGTDMSRWPTEKHFTSWLTLAPHNKITGGRLLSSATLPSANRAAGILRMAAMSLSRTETALGAFYRRLALRVGKAKAITATARKLAILVYRTLKDGLVYRDPGAAAYDAHHRQRAIRRLRQRAAHLGLALVNRETGELIEGAVS

SEQ ID NO: 43187 - protein, 505 aa, unidentified
MAKPTTGHQPAASSPPGGQPAQAQAHRRAYSRRKARAQLKGDALRQREAAHVEALPVQHPHAAGIDIGSRSHWVCAGFTAEAASCLIREFPAHTAGLKAIAAFLREHQVNTVALESTGIYWVPLYELLQAEGFEVLLVDPSYSHQLRGRPKTDRRDCQWIYRLHSAGLLAAAFRPDEKTCQLRAYLRQRGNLVRQASKHVQHLQKALEQMNLKLTEVLSDITGKTGRAILRAILRGTRAPEKLARYREKRCKASEAEIAQALTGTYREEHLFELKLAYEAWQFTLGQVDKVDGQIALQLGRMKCDRALPPLRPKARPKRRANSPRFDVRAALYYVVGLDLTEIEGVSELTALTVISEIGPGVSRFATAKKFCSWLGLCPQWQKSGGRVKSSRTRRGVNRAAQALRLAAQSLHHSQGALGGFLRRMKGRLGTQAALTATAHKLARIVYLALKHGMAYVRRSQEEYEAQMKDKQLKALRRKARQLGLEVVEKPSVSGAPGVAEPVQG

SEQ ID NO: 43188 - protein, 414 aa, unidentified
MELLHERCAALDIGKKELKACVRAPSPKGKRSRRQEIRTYATTTNALLELRDWLVAEQVTLVVLEATGDYWRGAFYLLEDDLNVILVNAAHAKGLPGRKTDVCDASWLCQMGECGLLRASFVPPEPIRQLRDLTRYRTTLTTERSREAQRLEKELEDAGIKLSSVATDILGVSGREMLAALIDGERDAQVLAGMAKARMRPKIPQLVQALTGNFGEHHAFLCRLHLERIDQLTAAIGELSARIEEQMRPFSRQLERLATIPGVGQTVAEVIVAETGADMSRFRTAGNLASWAGVCPGHHESAGKRKSGKTRHGDRWLSGALGTAAMAAARTKDDTYLGARYRRLAPRLGKPKAIVAIEHSILTAVWHMLTDDVDYHDLGGDYFARLDPERAMRRIVRQANALGFTVRFDPIQAA

SEQ ID NO: 43189 - protein, 338 aa, unidentified
MPLYGGIDLHANNSVVVLLNEQDQVIYQRRLANHLPTILEPLALYQADITGVVVESTYNWYWLVDGLMDAGYRVHLANPAAMQQYSGLKYTDDYSDARWLAHVLRLGVLPEGYIYPKAERAVRDVLRKRSHLVRQQTANVLSLQNIIVRNTGVRLSAKRMHELTLEECERLLPEPDQVLAVTSSLAVLHCLGQQIKALEKLVHKRLQHTPAYEQLQTVDGIGTILAQTIVLETGDIRRFPTVGNYASYCRCVKSTKISNGKRKGQGNVKNGHPYLEWAYMEAAQFAIRFSPTVQRFYQRKQAKSHLMIARKAVAHKLARACYYMMRDLVPFNVHQAFG

SEQ ID NO: 43190 - protein, 344 aa, unidentified
MEYYVGLDVSLKSTHICVMDRDRQVVWRGSADTQPSMIAERLKKWKGHLAKVGLETGSMTPWLYHELKGLGFPVVCMDARRAADALKARPEKTDKADAQALAEMLASGWYSPVHVKTMESHRLKALLGAREQLVTVKRQLYGQVRGLLRPFGIKISARAGGKRFDEDVRSACNRHDALYIGVAALLDTLARVAVELAGLDKKVRQIVAASKPCWHLMSVPGVGPLTSLAFVATVEDPQRFGKSRSIGSYVGLTPKRYQSGDRDVTGAISKQGDGMLRHYLYEAAGCLLTTVTAPSALRSWGLRLAKRLGPKRARAAVARKLAVLLLGLWKREDHFRAATSGKAF

SEQ ID NO: 43191 - protein, 346 aa, unidentified
MKQITTIGLDLAKHVFQIHGADAEGSQVVNRKLRRAEVLRFFEKQPACLVGLEACGSSHYWAREIAALGHDVRMIPPAYVKPFVKRGKTDAADAEAISEAVTRKTMRFVPIKSAEQQAAAMVLKTRSLLVRQQTQAINALRAHLSELGIIAAIGTAKVAGLIEIVRDATDARLPKAARFALMTLADQIEALLAQIVKLEREIVAGAKRDEDMRRLATIPGVGPITAASIKALVPDPGGFKSGRHFAAWLGLTPRSHSSGGKERLGGISKMGNPELRSLLVLGASSVLRRVRGNDKAPKWLSALLTRRPYKVVAVALANKTARVIWALLTKGGTYRGMAPVNGVASA

SEQ ID NO: 43192 - protein, 546 aa, unidentified
MRLLHQRCAALDVHKKSITACIRQISAEGETWIEQRTFGTFTSDLSGLGQWLMQSHVIEVAMESTGVYWIPVWNVLEDKQYGLNLTLVNPAVVKAMPGSKTDAKDAARIAELHQYGLLRGSFIPPVPVRQLRDLTRRRTYLQQEMNRVTNRIEALLERANVKLSSVVSHIGGVSSLRMLYAISEGETDPWRLAGLAVSSLKAKQDQLARALKGNFTDHLRWQLGDLLDDLRQARRRVWDLENRIRTQIEPWADLVTRLRTIPGVDEIAAWVILSEIGPDMSQFPSAGQLANWVGMCPGNDESAGKRRSGRARKGNRHLRRILIQCGWAARNKKDCFLASLFQRISYRRGMKRAACAVAHRILIIIHNVLANGTVYRELGGGYHANKNAERTARRLTERLEGLGYRVSLEPVSPIPSREIPVAAVAAEDAEPASIAGTETAGEPGTAEPRKRGRPPGSKNKKPSAPRLYVTCRECAMREIPCIHTGPKAIAVKPAPTPKPRRTRPNPALAPALPSECPRCAAWGIPCIHARNKLHPKKDPSSDLSAT

SEQ ID NO: 43193 - protein, 371 aa, unidentified
MADYREAFIGIDVAKLKNAIAVAESGREGEVRFWGEVDASDTSMRRIIQRIAAKFDRVHFCYEAGPTGYGLHRLIRSLGHECVVVAPSLIPRKPGDRVKTNRRDALALARLLRAGELTAVWVPDEGHEAMRDLVRARAAAVETLRVHRQQISAFMLKHSRIYPRKKGWTMRYLRWLQEQQFDHPAHQIALQEMVEAVRVSKERVERLEKVIEEFVPTWSLAPVIRALQTLRGVDLIVAVTFATEVGDVSRFESPRQLMGYLGLVPGERSTGETVRRGGITKAGNGRVRHMLVESAWTYRHPPKVGARKLYLMEQAPSKVREIAWKAQSRLTSRYRMLATRGKRTTVVCTAIARELTGFMWAVAREAQAIKS

SEQ ID NO: 43194 - protein, 377 aa, unidentified
MKKEKNGKRAQETRLSMLRTPAVGLDLGEEFSVATMYSSLGEISERFNFSMDDEGYTLFSSRIPKEARIGYEASMMAYSVNRRLRTMGYQNITVAHPKELALIVRSKKKNDRADSEKIARLLFMDMLPESHLLTREEQILRDLLIQRVKLGVEITRTKNSITSYLKREDVYPTLPKTDSNFSGVRREAIRAVRFGDDRDLVLKIMMEKLTFYEERCTPLEERIMALVMDNDDVRLLMTIPGVDYYLASLLSSYVRDVNRFPTIDHLASFFGIIPESGDSANVKRRGRMSKDGPSIARWTLGIMTDTVMHWNPHLHHYYAHQKERTRSGKRAHILTMKKLLRMIYHVLKTREHWRWENEALTNKKLEDLEKGGGGGVA

SEQ ID NO: 43195 - protein, 383 aa, unidentified
MRRGGILIEANDSEGEAMKKHTMINQSLSADVSACTTVAVDLAKKVFQVAGEDALGQVKFEDRIKSREAFQVFLHKLPESVTVLVETGPGAQAWARLLQIQGNPVRILPAQLVAKHRCGPKNDHNDALAILRAGRDSKISAVPVKSPAALAMQALHRARQGYIRRRTAVGNQMRGLLLEHGVALAQGEMAISQLVPRILEDVTQPLPDLLRELIAELLGEWRQLGERVNVLTGRLETAAKESEIARRLMTVRGVGPIIATALLAKQTEPERFANARQFAAYFGLVPNQHSSGDKIRLGKMCKHGDAYLRSLTIQGAHAVLKQIRSDSEQPDDQRLQRWISRLGRKEAAVRLANRNLRILWVLLQNDQTYRRRPGNGPEVAMSH

SEQ ID NO: 43196 - protein, 617 aa, unidentified
MSTATPLDRIGIGIDTARYGHRVSFLRPDRQPAAKPMTVLESRAGYQALQERLQQLQQQHPQAQFHVRIDAAGQYAANLEHFLRGLPLPLTLSIGEPKRNKDYQKAHFPKRTTDDTESQAMARFAVVELPSATAPVSPAMIMLREVAGRLQAKVKQSTQASNRLHNLLARVFPELANLTEDITASWVLQLLDKYPTAQRIGQARLVTLQKIPYLAAELAEQLHLVAQQSVACLSGDVAETLVRDLVSQVRHTQRAENQMRRLLSDAYTALPASAHLQVVTVPGIGVATAAALIAQTVDIHRFATPDHFVGYFGVFPEENTSGVDKYGKPVPPGTMRMSPKGNDLVRSYLWNAARAAIVHNPAIGALYRRLKAKGKRGDVALGQCMRKLLHLVYGVWKTNRPFDDKHFAWETPTAAAKTAAAAAAAARAASPDNAPPNLGQDSSPAAAADMQAANAAASGPPAGSNETAVGHKRDLPAVEVVTTANPTVAPTPASVKPVPSADRAARPKLDFAFLRQQVTMEQVLRQLGLLDSLRGRGLQRRGPCPIHGQPNDTQPTFSAHLGKHIFQCFHADCRAQGNVLDLWAAVHKLPLYEAALHLAATFGLPRNREEEPVRGTR

SEQ ID NO: 43197 - protein, 371 aa, unidentified
MNESSKMIYVGLDVHKDAIAVAYAPEDRGAEVVSLGSVGPRQCDIDALIRKLQSKGATLVFVYEAGPCGYWLYRYLTRKGLSCHVVAPSLIPRKPGDRVKTDRRDAITLARLMRSGDLSSIYVPGIEDEALRDLSRGREAAMEDLKRSKRRLKSFLLRQDIRYEGRASWNAAHLRWLSEVVCPTPPQQIVFQEYVRAVTEQSERLQRLERELHEAVKGWRLYPVVEAIQALRGVELTGAVILMTELGDLTRFDTPRQLMSYLGLTPSEYSSGARRRQGGITKAGNTHARRALVEGAWAYRYPAKVSRHLQLRLEKLPPEVQAIGWKAQVRLCKRYRQLTARGKHVNQVVVAIAREMAAFAWAIARLVPRAA

SEQ ID NO: 43198 - protein, 367 aa, unidentified
MKQSSKVFVGMDVHKDSIDITLAEQGGEVRRFGEVGGDRTALLKAVRKLSSRGGELVFVYEAGPCGFWIQREITALGRVCWVVSPSLIPQRPGNHVKTDRRDSENLARLARAGELTPVHVPDVRDEAIRDLVRARDDAVIAQRRARQQLKALLLRNDIRYVGKTSWTSAHLRWLSELKLAQPAQQIAFQEYVDAITVATARIERFEQAMRDEVLTWRFAPAVAALQAMRGIQFVHAMTLVAELGDLTRFASPRQLMAYLGLVPSEDSSGQRRHQGSITKAGNAYARRALVEAAWAYRHPARLTRIIALRQDALPKQACDIAWKAQLRLCAKYRRLRARRVLETKIIVALARELSGFVWAIGQHVKPQ

SEQ ID NO: 43199 - protein, 343 aa, unidentified
MTKTPIAVLGIDLGKNSCSLAGLDAAGAVIIRRRMTREGTIKFVAALPACVVAMEACCGAHFLGRTFASQGHTVRLMSPEYVAPYVKAQKTDNRDAEAIAEAATRPTMRLVTLKSEAQLDLQVLHRARERLVAGRTRLINQLRAMLLERGVILPKRRAPLIKRLDELMAGELPISQRARQLLQDLRDEWMEQDRRIKAYDDELMALTREDGAARRLATIPGIGVVNATALLAAVGDASAFAKGRDLAAWLGLTPRQHSTGGKTKLLGISKRGNKYLRTQLIHGARAAMAHVAKKATPVGTWVRQLLTRAHPNVVVVALAAKLARIAWAVLRHGSNYDHRAATV

SEQ ID NO: 43200 - protein, 372 aa, unidentified
MKQNTTELENPRRRVVRKNKQRELTIGVDLGDKTSRYCVLDREGNVLFERSTATTKKGLAQAFASMGASRIAMEVGTHSPWVKRLLESWNHEVIVANAHRVRLITESTRKDDRLDARKLARLARVDPELLSPIRHRSEGAQAHLVMIRARAVLVEARTKLVNSARGVTKSFGERLASCDPDQMRVKCLVGLPSSLQSALQPLVTAVESLTRQIHEYDNKIAQIARSEYPETARLRQVTGVGELIALTYVLTLEDPQRFRRSRDVGGYLGLRPKRRDSGASRPQLRITKEGDVYLRMLLVQGAQYILGWHGVDTDLRRWGLKLAARGGKNAKKRAVIAVARKLAVLLHRLWVTGARYEPLRHSQIASSLQVAV

SEQ ID NO: 43201 - protein, 312 aa, unidentified
MTTQLEAGPETCTVIGGVDTHKNTHYAAAIDDHGRLLGHREFAANDGGYRALLTWMHSHGTVALIGVESTGSFGATLTRFLTAAGVDVVEVNRPNRLARRMDGKSDRLDAEQIARAVHGQTSTATPKAKSGVIEVIRTLRVTRASAVKARTSTFNTLWGIIIGAPSPLRDELIVLSKRTLVNRCLRLRPATTDLLSLLEDSDRLLMAGVKTALQDLALRWKALDEEIKILNHQLQALVQASAPDLVQLPGVGIEVAGQLLVTAGDNTGRIRSEAAFAKLCGVAPQPASSGRTSGRHRLNLDPPLIVADHPMT

SEQ ID NO: 43202 - protein, 277 aa, unidentified
MAKHTTICAGIDTGKRKLDIAIDGRAEQLQVNNTAHGHEKLIAWLRQHRVKRIGIEASGGYERAVVAALRRNRFVVVVFQPAQVRAYAAFHLQRAKNDKIDAALIASCTAAVKKIHAPPDPRLEPFADHLTMIDQISEDIARLKTRREPCRDPRIRQLWKEEIARLKKLEKTELKSLVAAIRQHRDLAQRLDLIYSIDGIGLRTAVAILVRMPEIGRITREQAAALAGLAPYDDDSGNLVGVRHIAGGRERLRGALYAAPSRRRSTGIRSSLRSTNG

SEQ ID NO: 43203 - protein, 344 aa, unidentified
MDHFAGLDVSVKDTSVCIVDDAGKIVREVKVASEPEALLAVLKSPAYCFKRIGLEVGPLSQWLFSALAEAEIPVICVETRHMQAVLKAQINKTDRNDARGIAQMMRVGLYRPVHVKTLRSQKLRMLLTHRKLLQSKAIAVDNDLRGTLRNFGLKVGMVGTVKFETRIRELVENLPDLAVLVEPLLVVRRVLREQFGILHRRLLAIVRDDEVCRRLMTVPGVGPVVALTYRATVDVPARFRKSKAVGAVFGLTCSKYQSGEIDRSGRISRCGDEMMRVMLYEAAQSMLRSKKWSWLKAWAMQIARRRGMKKAIVALARRLAVVMHRIWVDGTEFRWTRQQAAAAA

SEQ ID NO: 43204 - protein, 335 aa, unidentified
MDQDGSILDTGSYPNTAFDASHYARQTVEKYGECKAVVESTGNMCMKTYEAFESNGVEVKLANPVKTRAIAEARVKTDKLDSKILAHLLRADLIAECYVPSKDVRLARALLSHRVNITREQTRIKNRIHSLLDKYDLECEYDDIFGAHGMRWLHTLHLNGHDHEILQSLLRQLEFQQDEEAKANSTIAKDALHSQYVPIIMSMTGFDYYGASVLAAYIADISRFPSPSHLVSWVGLCPSVYQTGESLYMGRMKGGNRKVRWVMTEAANTAIRSDPRMRAYYERKLRRHHHNVAVTHVANKMLRIIWHMLRENRLYNERKERLYESKLKRMTHTAQ

SEQ ID NO: 43205 - protein, 374 aa, unidentified
MADYSEVFVGIDTSKLRNAVAIAEGGRNGEVRYLGEIANTEAATSKLVKKLAAQHRRLTFCYEAGPTGYGLHRLIKTLGHECVVVAPSLIPKKPGDRVKTNRRDALNLAKLLRAGELTAVWVPDARHEAMRDLVRAREAAVDDLKSKRQQVLSLLLRLGRHFTGKRTWTRAHMNWLVSQKLAHREQRIAFEEMLLAVRQANERVIRLERAIAAAVPDWSLAQVVKALMAVRGLDLISATIFLAEIGDLSRFASPRQLMAYLGLVPGEESTGDRVWRGGITKAGNHRARRILVECSWSYRHPPRVGKKKLAKVEAAPPAVQEIAWKAQARLTARYRALVRRGKRPTLVVTAIARELSGFIWAVSRAVGAPAAPAM

SEQ ID NO: 43206 - protein, 362 aa, unidentified
MNKYIGLDIDSNKTVCCIVQAGEKDKYRTISSTIPAMKAFITGQRADTSKVHLVFEISGQAGFIYDSLIDCADGITVANPSKMTWIYRTAKKNDRFDARKMAVLLSIGEIPSVYMPSRVVRQWRQMILHRKKIVQQVTQAKNRIRALLKSEGFGRPYDKGSWWKKSNRFWMGRLVRDGGDIGSFDLWRMQLGDLIEELCTLENQLRTVTEYLDKYLSQKAEADLLMSIPGVGPRTVEAVLAYTDNLKRFDNYKQYCGYFGLTPKLDESGSSRRLGHISKHGPSVVRWLLCESGWKVIRKSKVIREFYERVKGGQDGRKKIAIVAVCRKMLCIMRAMLRDNETFNEELVGKFCGRNKQVKDAA

SEQ ID NO: 43207 - protein, 458 aa, unidentified
MKCPKPLRFIGLDVHKKWIEVCALNARGRVLFRSRFPATPEQLQNFTRALRRTDWVALEATLNTWAIVALLERHAGRVVVSNPLQTKAIASAKIKTDKVDAAVLGHLLRCGYLPEVWRPDDQTRQWRQQVRFRDRFARRRTQLKNQIHSIFHQNLRLFEGSDLFGPGGRRWITKERATLPEHDRFELDLLLSELDHNDQHLQNLAGRLAGLGYNHPTVRLLMTIPGVDYLAALSLLAAIGDITRFPSAKHLASYFGLVSRVSQSGDHCYTGRITKRGRSHGRWIAIQSAQLLCRAEGPLRHFYLKIKKRKCHNVAVVAVARKLLTLVWHMLTKGEPYRYSVPRTTDAKFARLRLLATGEKKKSGVPVGTPRSANYGTGRSVKFAKSLNQVYAENRLPKVEELPRGEKTMLAQRGLRSWAIENLNAAKPVVRTQGTKTPKAHVGEDKEQIHFAGSRSAG

SEQ ID NO: 43208 - protein, 355 aa, unidentified
MGNLNFKGKNIYVGIDVHKRSWSIKILSDNANLRQEYFRDPSPEMLVRYLNIKYPQAKYKCAYEAGFCGFWIQEGLSSLGVETIVIHPADIPTTDKEKRFKDDKLDAIKIAKCLRAGQLTGIHVPSAQQRADRSFVRLRYKLASDIRKTMNRITGHLDFEGQVIIDPKKADKPFDRWPNRRITLLEKKAEEDCDYTLKFCLSDLRRQRQQMLLILRRLREMSTSDRYCKLFKLLTSVPGVSLLTAMVWITEVGDASRFRHEDQLYSYLGLVPGSRSSGDSERIGKITKRGNKRLRTALVQSAWVAIGIDSTMTLAYEDYRPRMGAQKAIIRVTKKLAAILRSVAIKQTPYTPKIG

SEQ ID NO: 43209 - protein, 415 aa, unidentified
MDVVHARCCGLDVHKRSVVACVLLSDPSGPPHREIRTFGTYTNELLGLADWLAEQGVTHIALESTGVYWKAVWNLMEDRFALLLVNPRHIKAVPGRKTDVLDAEWLAELLRYGLLKASFVPDRAQRELRELTRYRTSLTNERSAAVNRLQKTLEGANIKLASVASDVMGLSSRQMLAAVVHGTPTDASALADLAHGKLRDKLPQLEQALSGRVGPHQRFLLAEQLAHIDSLDASIERLDAEIAERLRPFDELIDRLDAIPGIGRVIAEVLLAEISTDLTRFPTANHLASWAGMCPGHNESAGKKRSGKTRKGSPWLRAALVQAAHAASHSKQSYLAAQYRRLTARRGTKKAAVAVGHSILVIFYHLLTHDCPYVDLGPTYFDQRDPRAAQRRLVHRLEALGYNVQLTPLAEAPAA

SEQ ID NO: 43210 - protein, 339 aa, unidentified
MELYAAFDLHGNNNFLAVIDSNGKRIFGKRLLNDRERILEVLRPYQKDLIGIVVESTYNWYWMVDALMEKGYPVHLANPSAIQQYGGLKHTDDEYDSFWLAELLRLGILPEGYIYPQEERPIRDLLRKRGHLVKLRTSLIISLQNIISRNCGIKLNVNEVKALKEDRVHPLLQDNEDLALAGGVSKEAIDFLTRQIRKIERVVEGRIELKGSYGYLLTLPGVGKILALTIMLETGPVSRFAKVGNYVSYCRKVSSRWSSNGKVKGGGNKKNGNRYLAWAFSEAAELARRFYPEPRAYYQRKMQKTNFMVAHSALAHKLARAAYYIMRDQVPFRPEKLFS

SEQ ID NO: 43211 - protein, 369 aa, unidentified
MDQHTDVFVGIDVAKSRNAIAIADSERGGEVRYFGEVDAAPDAMRRAVQRITAKHGRAHFCYEAGPTGYGLFRLITGMGYPCDVVAPSLIPRRPGDRVKTNRRDAVGLAKLLRAGELTPVWVPDEGHEAMRDLVRARSAAVQAQRVHRQQVSAFMLKHGRIYPRKKSWSMRYLRWLQEQRFEHPAHQIALQELVDAVRIAKERIDRIEAAIVEFLPSWSLAPVVRALQALRGIDLIVAVTFATEVGDVRRFDSPGQLMGYLGLVPSERSTGDTIRRGGITKAGNSRVRHMLVESAWTYRHPPRVGAKKLYLLEQTTPKVREIAWKAQSRLTGRYRTLSANGKKTTVVCTAVARELAGFMWAVAREVQTA

SEQ ID NO: 43212 - protein, 343 aa, unidentified
MKLTRVGVDLAKQLFQVHGVDRAERPVWCQRLKRGRWIMELERNVEPGCEIGMEACGGAHHWARLLQAKGYIVKLIAPQFVKPYVKSNKTDANDAQAICEAMSRPSMRYVAVKTLEQQDIQAVHRVRASLIAERTAKANQLRGLVYEYGLVAPREISSLRRAVPTWLEDATNGLSARFRALLAALYGDLRWLDQRVQELDREIAMIVRENEAVRRIQQLRGIGPLTASALVATVGDGRQFKNGRQLAVALGLTPRQHSSGGKEKLLGISKRGDKYLRTLLIHGARSALRTAPGKTDRLSRWVVALAERSHPNVAATALANKMARVAWAMLRHGTNYEPERMAA

SEQ ID NO: 43213 - protein, 318 aa, unidentified
MVSFVGIDVSSRTLDIAVRPQSLKINVTNDRAGFEVLEKSLRGLKVKRVLLEATGGYEREVLSFLQSAGYKVIRVNPRRARSFAESMNIKAKTDAIDAAVLAHFAEVIPDKPTLQVSPQRALLRELLQQRDRLVQQRDDDRRRLKQVQSEVVAHFLKSNLQHFRSQIRQIEHELKLHAEGLGDERIAQLVQVKGIGLVTAGKLVTLLPELGHVEAREIASLVGVAPFNHDSGTSVGKRSISGGRFGIRCALYMSCLVAVRQNPSLKAKYQALRERGKAAKVALMACMRVFIVRLNAMLRTGTPWQDVELPQCKSAPPA

SEQ ID NO: 43214 - protein, 398 aa, unidentified
MADPRIRVGVDVGSESHHVGIACPDGKILEEFDISHDREGFWEFFDRIERRRESLNLPVAVAMEGYNGHSRPLDREVQNKGYALYNVNNLKLARFKEVFPGAAKTDPLDTMKILELFHLKEQLPMAKDVLQLVPEVPEENQMLKRLSRRRRQLVDEKVRVENRLHSDLNAVCPGLSSITGSVDNLWFLNFLSARKDLRKLAGMRHDGLLSIPSVGKKYARVIQEWQRRAKFSAEVEYVGPMIISDALRLLELKAQIAGLEGAMEPLAERSELARLINSIPGFGRTSSAELAGEIGTMDRFDSEAGLALYLGMCPLDNQSGKFKGSKAPRQVNRRAKAAMMTTVAQHVRCVPQSKAYYDKKRGEGKRHNQAIRCMGRHLVRVIWSMIEQGRGYELQEEA

SEQ ID NO: 43215 - protein, 306 aa, unidentified
MEELIIKGCGLDVHQATVVACIQRQGYDKQIHTFGTTTEELESLKAWLKKEEITHIAMESTGVFWKPVFNVLEDEQWELLLVNARHIKNVPGRKTDVQDCEWICKLLRAGLLKGSFIPQEDIRQLRTITRHQKVIQHQIQNEKNRVHKLLQECNIKITQVLSDVFGVAGMKILNDLSKGITDANKLAKHMEGNKQLLHKKDQAIACLKGKFDHHYQVMLKVMLDTIAFYNKQIEALDIEVNMLLKPYQLEHELLQTIPGVKEKAANHIIAELSANMEAFPDEKHLSSWAGLCPGNNESAGKKKVHD

SEQ ID NO: 43216 - protein, 413 aa, unidentified
MSDSFRFFVGVDLGSTAHQGCVVDGAGQTLGQRSIAHSGADVAAWFDWLAQLTAGAAPAEIALASEMPHGALVEAALLRGYAVFAINPKQLDRFRDRFSAAGAKDDRRDARVAAQALRTDRYAFRRLTLGDPRLLRLRELARAEDALRKDLRRCSNQLWQLLQRYFPMLLQLAPAADEPWLWALLRLAPLPDQAARLRPTKLERLLQTHHIRRFSAAELRELLCQPPLTLAPGAAPALAEQVHLLLPRLELLHGQLRQLVQTIEQLIEELSTDENFSEHRDVQILRSLPGVGRVFTATVLSEASELLAQRDYRVLRAVAGVAPVTAQSGKTLLVSIRRACHGRLRHAVFHSAGVHAQRDPRARQLYAQLRARGHSHPRAVRGVADRFLALLFTLLKSGQSYDPQRRALPQPLS

SEQ ID NO: 43217 - protein, 417 aa, unidentified
MAESNDTPEPISAFVGIDWADAKHDIYLHPADGSTASHEVIDAKPEALHDWILKMRERFSAAGKIYVCLEQSKGALIHQLMQYDFFVLYPINPKTLARFREAFRPSGAKDDRSDADLLCELVRLHTHRLRPWKPDDEQTRKLNAFCQNRRQAVGSAVRLLQQVREQLKLYYPLALELELNTVLACDFLQRWPTLEELRQAKPQTIRKFFYAHNFRRGDKIEQFVQKLQKQTPVTSDRAIIEPAAMQVRLLAAQLRVILNSIPEFDQTIAEIFHSHPDAAIFESFPGAGPQLAPRLLTAFGTDRDRLESAEQMSVISGVAPIKIASGKSFATHKRWACPKFIRQSFHEFAGCSIKFCAWAKAFYQAQRDKNKGHHTAVRALAFKWMRILFACWKNRKPYDDALYTGALKKRGSAFASP

SEQ ID NO: 43218 - protein, 344 aa, unidentified
MDNHTQYSGFAGVDLAKKVMQIHFVTGDGEITDKQVKRAEFLDFFRNRTKCLIGMEACGASQDWARKLEAMGHEVHLMSPKAVKPFVSGQKNDYNDAIGIYKAMFNGVRRVPVKSTEIRDLQTLRRIRSQVTKDKVKEINHVRGLLAEYGIVMGKSLNAFNKDISSALESLKERGDVSPLVAEELQTTVESIKTKIERQKRLDREIEQLARGCKNYENFLKTPGVGPFTAAMLCVLLCEPAIFANGRQFAAYIGLAPRSRGSGGKNFIIGIPSKFNCDRESRAVFVECAQALARYKNKSPWVDGILRRKPKKVAVIAIANKLARQVWAMANKGESFKQMTILTA

SEQ ID NO: 43219 - protein, 344 aa, unidentified
MQIAILGIDLGKNSCSVVGLDDGGRVVVRRRMHRASVIRFAGSLTPCVVAMEACCGAHHLGRLLRTQGHEVRLMSPEYVRPYVKAQKNDNRDAEAIAEAATRPTMRFVELKAEEQLDMQTLHRVRDRLVGERTALLNQLRAVLLERGITVPQGRRKLEQHLDAMLGVPECSGVAPRMRSLLQDLRAEWRALDRRIEAFDEEFAVRARTDPDARRLATIPGIGVLNATALVAAIGNGETFARGRDLAAWLGLVPRQATTGGKPRLLGISKRGNKYLRKLLIHGARAAMPFLARSATALGAWLRGLLARAHPNTVVVALANKLARIVWAVLRHGREFERADVVAST

SEQ ID NO: 43220 - protein, 418 aa, unidentified
MTEDVEWFAGIDWASQTHQVCLVDAGGKIVGERGFAHGGAGLAELCSWLLTMTRAAPTAIAVAIEVPHGPIVETLLERGFQVYAINPKQLDRFRDRFTVAGAKDDRRDAHVLGDSLRTDRHCFRRLSAENATVIELREWSRMSEDLQQERNRLANRVREQLWRYYPQALAISDDLAADWFLQLWAAAPTPATARRLRESTVGGILKRHRIRRITAAEVLASLRQKPLTVAPGTAEAASAHIRTVAQRLTLVNRQIKQAHHRLDALSDRITENEGDSDAMGQKSEQRDVTILRSLPGVGRIVLATLLAEASEPLRRRDYRTLRTLSGVAPVTRRSGKYCIVVRRQACHMRLRSAVYHWARVATQHDQHSRHRYAELRKRGHSHGRALRSVGDRLLAVACAMLTRQTPFDPDQPLKQMAA

SEQ ID NO: 43221 - protein, 430 aa, unidentified
MKSNTQNAKIEAITEKTLVLGIDVGSETHYARAFDCRGIEYSKKPFKFSNTEAGFVTFKEWILDIKERHEKDKVVPGMEPTGHYWFNLGKFLQDNEMKPVLVNPHHVKKSKELDDNNPTKNDRKDPKVIAGLVREGRYMIPYLPDGIDADLRTASNIRFQLQAELTRIQNRISRWFNIYFPEYKTVYGKPDAKSGILILKAAPLPEDILTLGIDGVNQIWRDAKLRAVGKARAKTLIEAAEHSVGSKEGAVAARMEIRMLLEDYESRSIRLQEVMTLIEGLVKQIPMAEKLLEIKGVGIRTVSGFLAEVGDISRFNNPKELQKLAGLALVENSSGKHKGETTISRRGRKRLRYLLFEVAMSLVAKNPEFRELHNYYTTRRQNPLKKMQSLMAIAAKLIRVFYAMLTKGVDYDPKKMVSDIKRPAVYLQAA

SEQ ID NO: 43222 - protein, 394 aa, unidentified
MNYNTQNAKIASITEKTLIVGIDVGSETHYARAFNWRNYEYSKKPFAFSNDEAGFSSFKDWMDDIAEKHGMKVVIPGMEPTGHYWLNLGAYLQEQGMKPVHVNPHHVKKSKELDDNNPSKNDRKDPKTIAGLVNEGRFSYPYIPTGIYAEIRNLSNLRIQTQEEITRIKNRIARWFSIYFPEIKDVYRNPDAVSGLMVIKQAPLPCDIKELGVDGVNKIWRDARLKGAGIKRATTLVTAAEHSIGNTEAPRSARKEIRNLLNDYEIYKNRMDELMEEIKETLSEIPYIDKLMEINGIGIKTVSCVIAEVGDIGRFDNPKQVQKLAGYAIVADSSGKHNGASRISHRGRKRLRYALYEAAISVIGKNKEFKEIHSYYRTREKNPLKKMQIGRAHV

SEQ ID NO: 43223 - protein, 327 aa, unidentified
MLVIGIDVAKAKLDVCVLLDERKRAKVVANSNAGVIQLLAWLQQHWPEQPLSQMHAVLEGTGVYHESAACALFDVGVHVSIVNPAQVRDFAKGLGIRTKTDGVDSQVLARYGAWVQPAPWTPPPAHVRTLTALLARREAIAQDLRRERNRQEKALAAQSVALVRHSLETSIAFLLQQLKDIERQIDQHIDGHPDLKGDVRLLQSIPAVGDKVGTQMTSLLRSHCFTTAEQLAAYLGLVPVERQSGSSVCAKARLSKAGPATMRATLYMAAVVATRHNPHIKALYERLLAKGKSKMAAIGAAMRKLVHLCFGVWKHQCPYQADFVQRA

SEQ ID NO: 43224 - protein, 348 aa, unidentified
MNNVHYIGFDVHKKSISYCVKTAAGEIVEEGTIPAQRNVLRAWAAARRQPWRGALEATLFSGWIYDTLKAYSGGLEMAHPAKMKAISSGKKKSDTIDARTIADLLRCNLLPACYVAPARIRELRRLLRYRSLVVSEAVRMKNKMAGLLMETGAEYVKEKLHGKKYFATLLEELKEVPESVIDLLRLSRGALEMFEGTQRRLIQELLADAELRERVERLRSIPAVGEITALTWALEIGDPERFGSAGEAMSYCGLTAALKSSAGKQQRGPISKQRNHWLQTTLIEAAKLAPRWNPQLAALHARELERGHRNRATLAVARKLVSYLLAVDKSGLPFQVRSPSQEPTQKAA

SEQ ID NO: 43225 - protein, 449 aa, unidentified
MAEKMELDVINPRCAGIDIGSRSHFVAIGQELSDVREFGVYADDLTEICLWLKENGITSVAMESTGSYWQNLYVELSKHGFDLVLANGKFTKNAKGKKTDVKDSRWIQKLHALGLLTSSFLPDETTEQLRTYCRQRTNWLSMAAEASSKMQKYLKLLNFRLDVVVKDVCGLTGLTIIEDICKGNLDPNKLAEHRHYNCKKSKEEIAKALKGNNRKDYLFGLKQEYESYLFFQKKIADCDKQIDCFMRTQIGLNPSKKKLKTTDKKYKRINKNAPGIDLNQLAFQYFGGIDMMAIEGVSHSTILTLISEVGPDGFDKFQTAKHFTSWLRLAPNNKISGGKILSHRIPKGSNRLKIALRQSANAIGNLKDTHLSDFFRRVAFRKGRQAAVSATARKLAVIIWNMASKKTQYQPEKEYLFLDQKRQLKMVTRIRKQIAKFDFKPEQLGFATN

SEQ ID NO: 43226 - protein, 353 aa, unidentified
MSDLSEEREVILGVDTHLDVHVGVLIDVVGRVVATTSVPTTALGYEQLIEWVRGFGRLTRAGIEGTGTYGAALTRGVQEHGVQVVEINRPDRSRRRLRGKNDPTDAENAARAVLAGEANAIPKAQSGVVEAMRALSMARRSAVKAKTQAINQLRALLVTAPASIRATLWKVKPEHCVARCARLQSLGDTALLKALASTLRLLARRWMSLAKELHQLDAALEELTNRAGRRLLARFGVGPQTAATLLVTAGDNPDRLRSEAALAALYGASPLEASSGKTTRHRLNRGGDRAANNALWTIAMVRMRSDPRTRAYVARRTAEGLSTKEIQRCLKRYIVRELYPLILADLAESACPS

SEQ ID NO: 43227 - protein, 337 aa, unidentified
MEPTTIAIDLAKRVFQIHFVDTDGAIHSKVLKRVQMLPFFANRPAARIVMEACGSAHHWARQLTALGHEVRLIAAQFVRPFVKSNKNDVADAAAIWEASQRPGMRFVAVKSADQQAMLALHRMRQQLVRIRVMQVNQLRGLLYEFGVVLPQGRRPSIQAAQAAIATLTDQLPAMLIDSLRDQLSRLHLLDDQVQRIEQRIIEWRHGDEACRRISEIPGVGPLTATAAVSVIGQAKTFRSGREFAAYLGLVPRQNSSGGKVRLGGISKRGDVYLRTLLIHGARAVISSSKHLPAHMRDLQARRPTNVVAVALANKMARTIWALLAYGRTYQPATSLPS

SEQ ID NO: 43228 - protein, 402 aa, unidentified
MKVSGLDVHKDSIFCAIYDGKLYSEVKEYNSTTNSIRNLGLLLQGEGVNQVAMESTSIYWTPVWDILEEMGFDLVLVNPFLIKQMPGRKSDVKDAQWIAALLHKGLLRGSMVPCATIKELRIYTRKYVRFQQKSVQVLTEMDRIMVTANIRISSCMSRLDCKSVISVIEALIRGETDPNQLVKLVYGNTKNKQSGFLREALTGNIKEHHRQSLKWTKEMYDLYQKQIQECLMYMERICQKHYSQEMMLLQSLPGISKVSAMCIIAEIGVDMSAFENSGKITGWAGLRPRNDESAGKFKSKAITKGNKYLRTILVLVAWAASRTKGSYFKEKFNRLALRKSSKKAIIAIARKILVIIWNMLNDNKLYNPTLVHIYDPVKVERSIAYHQKEIEKASKLLPKNVV

SEQ ID NO: 43229 - protein, 390 aa, unidentified
MQALYPRPDEHAAVRTDLKAIFVSLELSRSTWIITSLAPGGGEKMSKHSVPSGDVAALLARLSQLQEKARARTGRIFPIIVIQEAGLDGFWIHRVLQQEGIESHVVDPASIATSRRRRRAKTDRIDGEAQVRALLAYKRGEPRVCAMVQAPTPQEEDRRRISRERETLTAERVRHVNRIKGLLFAQGIGDYEPLHRNRRERLEALITGDGRPLPECLKAQIRRELDRLELVIEQVKAVEAERDAVLARAQASPGVPAPAALLLALKGIGPEAAATLWSEGLFRTFSNRKQVAAYAGLAPTPWQSGSVHRDQGVSKAGNPRLRTIMIQIAWLWLRHQPQSALAVWFRERIKRTGGRLGKTMIVALARKLLVALWKYATAGVLIEGAILKPA

SEQ ID NO: 43230 - protein, 423 aa, unidentified
MSYRIAGIDVHKKMLAVVVADVEVHGEYQFERIRYGSNPEPLRLLAAWLIEHEVEELVMESTAQYWKPVWGALERYWKPSCQKREGAGPMSGTLHLAQARSNRGRRGRKKDFPDAERLVKRLVADELILSFVPDAEQRLWRTVTRRKYQLTRNKVRLQNQLEALLEEAHIKLSSLVSDLLGVSARRMLKAIADGGTDPAALAALADKKLRATQAQLCDALGACTELQPVYRRLLKMFLEELHLIEQQIGQLDQEMAALLSQHPESVQRLSEIPGLGVDSAQQIIAEVGATAATFPSGKHLSSWVGACPGDEESAEVSQSHRSPKGNRHMRRILNQAANAAVKAKGTIFEIVYRRLVTRLGHNQTIGAIAHRLCRLIWIILHQGVRYEERGPSVNTKSRRQRTSRMIRELRTLGYRVEPVGTPA

SEQ ID NO: 43231 - protein, 368 aa, unidentified
MKKPSTMRGPSSQVRKRRHSASTVGLDLGDRSSRYCVLNEHGDVVMERSLATTTKGLDQAFGSVARCRIALEVGTHSPWVGRHLAKLGHEVIVANARRVRLISESTRKDDKLDAKTLARLARIDPQLLSPIRHRSEQAQADLIMIRARAALVEARTALINSVRGLTKSYGERLPNCASYQVCEELAGSLSDPLQAALAPLLTEVESLTERIREYEQKLEELARQRYPEVGLLKQVQGVGTLIALTFVLTVEDPHRFRSSREAGCYAGLRPKRRESGQSRPQLGISKEGDPYLRKLLVQGAHCILGRFGQDSDLRRWGLKLAARGGKNAKKRALVAVARKLAVLLHKLWISGERYEPLRAGNQSQTAAA

SEQ ID NO: 43232 - protein, 414 aa, unidentified
MRRQPVRPIHERQAPFFVGVDVGKRTHYAAVVDVNGSPCLPKTLKFTNTREGYTQVQVAIAEATAQASPTEVTIGCEATGPYWLSLYEALTHAGYRVLVLNPLYVKARRGTTLRGTKTDPVDALLIATIIRQEDVPTSHIPEAAVQGLRELTRLRADLIAQIGDVKRRVIAVLDRTFPEFATCFRDVFGLTARAVLAEWTLPEQLAAVPTGELTTLLTRLSRGRFGAATAQAIHTAAQHSIGVRRGADALAFELRLLLRQVTYVESQVAELDQEITRRYGELDTYLSTIPGLGPATAPAIYAEIGDMGRFTDSDQLVALVGVDPQLHQSGETAGQTKMSKRGSPYLRRAIWHAALTASRLDPMFQAIYDRQRKRGKHHLVALSHVANKLTRVIYSVLKGQRAYVPDYAVGTSGH

SEQ ID NO: 43233 - protein, 369 aa, unidentified
MPHVTSIGLDVHARSVAAAAFNPFTGEVVHRDFGTDAAEIAEWALGFEEPRACYESGPTGFHMARELRALGLDCAVAAVSKMQRPAADARRKNDRRDAEFIARMLATHNIVEVPLPDAAVEAARDLDRALDDATAEYRRARQRLNMFLIRLGHVWDERNADGTRKGSWTRAHWRWISGIRLEGPQRDVLEYYVTAARCAESDRRQLEKKALALARTDRWRPAVEALSCIKGIDTLTAFRLAAEAGSFTRFRTAPAFASWCGLVPSERSSGETERRGGITKTGNRLARTALVESAWHYLTCTPRPKAPTPGADVPAAIRARADACTARLCRRREALAAAGKSSCKANAAVARELACWVWEIGRRAEGTLS

SEQ ID NO: 43234 - protein, 391 aa, unidentified
MIFIGIDIASSKHDCVITDQHGKVLEEPFTIKNDYQGFATLTQKIEKHIGNHQVCIGLESTGHYGNNLISHMVEREYLVYVVNPLLTSIARKSTSVRKTKTDKTDSKAICTFLRTHFSTLTPYTLKSYHIMKLKSLSRLRLNLVKQQSLFKQEFTRLVSITFPELSGFTTTIHSRTNYTLFTGIGLPHDISNTRIDRLTNVLNVASKGHFSLEKAKELKELARNSIGTRDDYYKIQFQTTINSIRHFNQQIKLIDHEIQMIMDEHFTYIMTIPGVKYTTGAAIISEIGDISSFKTADSLVAYAGLDPSVYESGAYSANDNKMSKRGSKYLRNAIWTAATIIIHNDPVFALFYSKKIKQGKHHNNALGHVSKKLTRVIFSLMKSPRSFITQY

SEQ ID NO: 43235 - protein, 339 aa, unidentified
MENGTYVGLDLSKTSTMATAVDPLGHRIRQKKLGVTDEELVRFLEEIPGPKLVVMESCNVWEHSYDAALSTGAEVLLANPFKVRLVSKATLKTDRVDSEKLALLARLNAIPEAYAPSPELRALRRLIRERIFYHAKWKGVASHTYAVLLQKGIPYRPEILTRVRLREELRTHGVPEVDRGLDALSKLEEISKPLDREIQRAFLDSKDAQLLATIPGVGKFTSLALVAFLSPIERFDSLDSVVKYCGLCPSVHQSGEKSYHGRLVWDCNTLLKWVLIEAQWNVRLRERKGDVARVGRRVARRGAANHGAVAAARKLARICVAILRRRTPYLPDSPGSSSR

SEQ ID NO: 43236 - protein, 343 aa, unidentified
MGEVSTIGLDIAKSVFQVHGVDDAGVVVMRKRIGRSKVLEFFAGLSPCLVGIEACPSAHYWSRELQALGHTVKLMPPSYVKAYLKRSKNDANDAAAICEAVTRPSMRFVPIKTQEQQTGLMLHRTRQLLVRQRTMLSNAIRGHMAEFGIISAKGRNGTAELLQIIGNVSDDRIPPVARFCLELLARQYLTLNAEVSSIDKRIHAWHRSCEQSRRLEQIPGIGPIVATALVAEIGDWRAFRSGRSLAAWIGLVPTQHSTGGKERLGSITKQGNRYLRWLLVAGAMAVIRYARAHGTKRPWLTRIIDRRPAKVAAVALANKIARMAWAIMVRGERYTEPKPLLAA

SEQ ID NO: 43237 - protein, 312 aa, unidentified
MDAIAVGIDVAKDRLDVCIRPSGESFVVDRSGAGIAALAERLKTLAPRIIAVEATGGFETVVAAGLASADLPVVVVNPAQVRAFAQALGKRAKTDPIDAAVIAHFVEATKAQPRPLPDEMTRLLADLVARRRQIVEMMAAEGQRERRLTDKRLRKSIARLRKAMEKELAELDGEIDDHVRGSPVWAAKEDLLASVPGIGSTIARTLIAELPELGTLDRRSIAALVGLAPWTRQSGQWRGKSFIGGGRISVRNVLFIAAMVASRHNPTLKLFRDRLIDAGKPKLVALIAVARKLLTILNAILRDKRPWQPKTA

SEQ ID NO: 43238 - protein, 396 aa, unidentified
MESPMSQHSRFDASRSLTALEQDSTIIAVIEMSQTKWLVAALVPGVERQPLKKLDAHEEALLKLLLRWRREAGQAGHNIKRIVVAFEAGRDGFWLARWLRARDVEAYVIHPTSIAVSREHRRAKTDRLDTELLMRVFLGWLRGEKRHCSMVAIPTIEEEDARRPNRERQSLVTEQTRIINQIKAIFTRFGIRAVRPTKRKLAEGLEDLRTAEGTPLPQNTLSELRRHLARLRFVRDQIRAVEQERLRKLAVAPAAEKESPDAMVRLIARVFGAGVETADMLVNEIFLRQWRDRKAVARYAGLTGSPDESGSRRRERGLARAGNVRVRSGMIQLAWRFVRFQKTSALVQWFAERTADGRASTRKTMIVALARKLLIALWRLVTRGEVPLGVVLRPAS

SEQ ID NO: 43239 - protein, 429 aa, unidentified
MIMGFTKPIEHFNPQRKKVITMNTLYVGIDVSSKSNVVYLMLPNGDKHSNFSVANSHEGSTQLVKRILSALTSHSLDTVLIGLEATSVYGDNLVYFLREDASLASFNRKIHVLNPKQVKKFHDTYNDLPKNDYVDSFVIADCLRFGRINKEVYLGDYRYKALQNLTRARFFAVQNLVKEKQRFMNVLFKKYSTMTQEKVFSDTFSTTALAVYDEFESAEALANMDLHELTDFIIEKGKNRFPDPDAVAKAIQKAACSSYRLPKTVNDSVNQVLSISITSMKALESQIKEFDKAIKSQMELLPNVLISISGIGPVYSAGIMAEIGDINRFNSQAALAKYAGLAWKQHQSGGFESEVTRLIPSGNRFLKYYLCEAAFSLVRCDKEYSDFYHLKYKEVNRCQHKRALALTARKFVRLVFRLLKDNRLYCPAK

SEQ ID NO: 43240 - protein, 373 aa, unidentified
MTDYDAYIGLDVHKDSISVAIADAGRSGEVRLFGAIPNEPDAISKLVKKLSSKHGRVEFVYEAGPFGYNVFRQIEALGFVCRVVAPSHTPVRPGNRQKNDTRDAVMLARLLRAGELTFVWAPDVVHEAMRDLVRARAVASHGARKARTSIQLFLLKHDLRYSAKSWTSRHRTWLRNRHFQHHAQQISFQSYLNRLEQAEARKKELEDQIAMISQTWSLARTVINLQAFKGIGLVIAATLVAEVGIFSRFDNPRKLMAYLGLVPGEHSSGGSVRSRGITKTGNSAVRALLFEAAWSYRVQAKVGNWMHKRRPDVPQAINAIAWKAQVRLSARYRKLVGSGKKSNVAITAVARELVGFLWDVARKTEVETTALAA

SEQ ID NO: 43241 - protein, 310 aa, unidentified
MENIIVGIDVSKDRLDVAVRPSGEVFAIERNPIGLEQLTLRLGALSPNLVALEATGGFETVVAAALAAARLPVVVVNPAQIRAFAKAVGQRAKTDPIDAGIIAHFAEATRPEPRPLPDEATQLLADLVGRRRQILEMMVAERQREKRVTVPHLRKSIVRLLKALERELTSVDTDINDAVRGSPAWREKEDLLASVPGVGPTIARTLIAELPELGQLSRRQVAALAGLAPFTRQSGQWRGRSFISGGRTSVRTALFMGAMVAKRHNPVLKVFFDRLVAAGKPKMVALIAVARKLLTMLNAILRDRRPWQTA

SEQ ID NO: 43242 - protein, 404 aa, unidentified
MEVVHERCCGVDVHKKTVVACVITPAGQQTRSFGTTTRELRALADWLAAEGVTHVAMESTGVFWKPVYNVLEGRGLTLLVVNAQHVKAVPGRKTDVKDAAWIAELLRHGLLRGSHIPDRAQREQQELVRYRTRLIQERAQVVQRIQKVLEGANIKLSAVVADVVGVSGRAMLDALVAGTADAEALAALARGRLQAKRAALREALEGEVGLAQRVLLDSHLRHLDFLDTEIRRLSEEIAERLRPFDDALDRLDTIPGVGRRAAERILAEIGADISRFPTAGHLASWAGLCPGNHQSAGKRLSGRTRHGNSWLKAALVEAAWGAVHTHDSYLAALYHRLAARRGAKRAIVAVAHAILVIIYHLLRHGTSYRELGSNYFDERDRQATVRRAVRRLERLGYQVTPEVA

SEQ ID NO: 43243 - protein, 419 aa, unidentified
MGRVVIGTDPHKRSATIEVRDEREVLLATGRFGMDRAGYRQLLGYVRQWPARVWAVEGANGAGRPLAARLLADGETVWDVPAKLAARVRVFDTGHGRKTDATDAHSIAMVALRTRGLRQLAADEDLAVLRLLADRRDELSHSRTRTLNRLHRLLAELVGGGAPRHLSVLQAKAMLATVRPRDAAGRTRRALAAELIGELEGLDGKLKALKRRLADAVTAAGSGLMDVYGIGPAGAARILADVGDVARFTDRNRFASWTGTAPIDASSGEQIRHRLSRAGNRRMNHVLYIAAVVQIRHDTPGRAYYRRKLTEGKTPLEALRCLRRRLSDVVYRQLVADAANANQDDQDEASPGGQRGATTTQPSAAGPTPNTGTSDKPQPGPAPATLPADQAGLEPPPASAATTTRRRDRGVNLQRWGSP

SEQ ID NO: 43244 - protein, 348 aa, unidentified
MQITIVGIDLAKNVFRLHGCDRQGRAVLRKQLTRGQLLAFVAQLPACTVAMEACASAHYWAGKIEQLGHRVRLISPRLVKPYVKANKNDANDAEAICEAAGRPSMRFVPVKTAAQLEVQALHRVRQQLVKSRTALINQVRGLLAEHGIVIPQGRAQLHRALPRILEDADHRLSGVMREILSEVGERLKYLEDRLHQYELRIERLFRQDQRCRRLAEVEGVGPLIATALVAAVGNAAEFRSGRQLAAYLGLVPRHRASGGRTIMQGISKRGDRYLRSLLIHGARAALWTSARRGDQRSAWATRLKVRRGSNVAAVALAHKNARVLWALLRSGEGYRVAPGCPRIAQAVG

SEQ ID NO: 43245 - protein, 371 aa, unidentified
MEESSKTLYVGLDVHKESIAVAYAPEDRGGEVVSLGPIGTRQCDIDKLIRKLQSKGAPLVFVYEAGPCGYWLYRYLTRQGLSCHVVAPSLIPRKPGDRVKTDRRDAVLPARLMRSGDLTAIYVPTVEDEAIRDLSRGREDAMRDLKATKYRLKAFLLRQDIRYEGRANWTAAHLRWLSEVVCPTPVQQIVFQEYVRAVTEQHERVQRLETELHEHVKTWRLYPVVEAIQALRGVQLTGAVILVAELGDLTRFDTPRQLMSYLGLTPSEYSSGERRRQGGITKAGNTHARRALVEGAWAYRYPAKVSRHLQLRLEKLPAEVQAIGWKAQVRLCKRYRQLIARGKHANQVVVAIAREMAAFAWAIARTVPLAP

SEQ ID NO: 43246 - protein, 399 aa, unidentified
MLILQADSLSLAQHVDCMMGLSCLRQDGDAGRHSGRGWVETTVAISNLPASRSRTRTGVGAFARMQSGVQTRETILPGSSMQDKIFIGVDVASQGLDIAVHGRPGAIRIANEAGAIEAWLAGLDPATVELVAFEPTGGYERPLAAALRAAGLRFVRVHPNEVAAFRQRRGRKAKTDPIDAALLADFAALELAQRGLAPLLAGDDMLRDLAVRRRQLVNALQAERCRAEHAANRVVKASFETVIGALRAALDAVEAEIEQHIAAAPKLTAAAALLRSLTGVGPVTVHTLLGELPELGQLDGKEIAALVGLAPRTRQSGKREQRATTGHGRPGVRRVLFNAARSAIRWNPAMRAFYTRLAETNRRPGKVALTAVMRKMLVTLNAIARSGQPWHGAAARNPA

SEQ ID NO: 43247 - protein, 435 aa, unidentified
MSPEKPVPSASSGQAPSATLTATSPATSTRGGRAGPTRFIGLDVHKHYLIAIGVDAELNQVLGPQRVQLRHLEKWMRKTLTLQDAVVLEMTTNAFQLYDDLLPHVHSVTLVHPPHVKLITRAQVMTDKIAASILARLHAVGLLPPVWVPPLEVRDHRALVAHRAKMVRLATQAKNRLHAVLHRYHLLPPEVGLFTPDAREWWLTLDVTPIQHARIQSDFDTLAFAQSQISRLEETLTVVAAQDKRVLLLVQLPGIGLITAMTLLAAIGDISRFPDAKHLVGYSGLGSRVHDSGLTRRTGGMTKAGRRDIRAAMVEAAHTASRTHPHWKAELARLEPRLGHNKAIVAIARKLLVAVWHVLAKGCADRFAEPDLIARKFLSYAETLGKANRPDGQTAVQYVRYHLDRLGLGAELTAIRRGSNKTISLPPSRLHLAGN

SEQ ID NO: 43248 - protein, 456 aa, unidentified
MRRLVGVDLGIASSHTVRVLDGEGRVVCRRRCEPTVDSLGRIEAAALAGTPAGTVLEVVMEPTGPAWLPVAVFFSARGHRVFRVSSAKAADLRRFLSRHAKSNGIDADTLARLPLVDPAGLHPLELPDRPAAAALDRRVRATDRLTMLAAKHKIRIKDLVRQLMPCSPLTGELGVADLAVLERWADPRALLAAGPARLTKVIGTASHGQQGADRAGQWREAAAAAVELYDGHPAVAFTDLAAEVGTEIRLLRLTQAELAAHARERETAYRYTDVSGLARSLPGIATIGGPALVASMGRPGRFPTGAAFKSFTGLTPKASETGNTDRKGQPMSKAGSSLLRTTLIRAADNARRQDPQLARIYHTQMVQRGADHLKALCVVAAALAERAWAVMIRQMPYVVCDVTGEPVTPEQAKRIITENYTVPDEVRRRRRSSKTARRAPAQTQRGRPLSKPPAAA

SEQ ID NO: 43249 - protein, 326 aa, unidentified
MEQAAAVVGIDVSKATLDVAVVQGGKKAEVRQYANDAAGVKALATWLKQRRAREAHVCLEATGTYGDAVALALYQAGYRVSVVNPARIKAYGQSQLKRNKTDRLDAALIADFCRTQQPELWTPPDPVWLELRAMARHLVDLKSMRQQEKNRLGVETSTKVQEVLEAHITFIDHQIEDLEQDIQRFIDQHPDLKRDRELLVSIPGLSDLSASLLLAEVPDLRAFGSARQLVAFAGLNPQQRTSGSSVRGQTPLSKMGSPTLRRVLYMPALAAQRFNPILAPWAAQLKARGKSKMETLGAVMRKLLVLAYGVLKSGQPFDPAFSTAAP

SEQ ID NO: 43250 - protein, 482 aa, unidentified
MAERKKSTFQRLQDGRLNRKQRKELAQRLAKDDPGLEIVHRDAAGIDIGNASHFVAVPADRDAEPVREFGSWTDALLRMAEWLKKCGIRTVVMQSTGVYWVAAHDVLEKAGFEVWLVNARGTKNLPGRKSDVQECQWLRKLHTYGLLRNSFRPPEQIRALRTVWRLRDRIVSDAGRTVQQMQKALTKMNVHLANAINDVSGVTGLRIIRAIVSGQRDPRQLAKLRDVRVRASEEEIVCSLEGNWQSDVLFELEQALETFDFHQRQLAACDAQLQRYMAALPDREGVPAAEPVAEPKEPAGKRRKAKSKRKAKNYPSFDLAVELARKTGVDLTTIDGINVLTAQTIFAELGADLSAFPSEAHFCSWLTLSPKRDVSGGKVIKHVSSPMQNRVALALRMAAQSLFNSNSYLGAKSRQLRARLGGLKAIKAMARCLACLVYRLLTKGQAWVDRGAAHFEEQRKCRDMAALKRRAAAMGLRLVPNA

SEQ ID NO: 43251 - protein, 316 aa, unidentified
MSISKSFIGVDVSKEHLDCFCRPTGTTFSCDNTPPGIAALVQWAEAQQPQLMVLEATGGLERPLVAALVIAQLPVVVVNPRQVRDFARAIGQLAKTDRIDAAVIAHFGEAVNPEARPWPDHLTQQMDALMTRRRQLVQMLAAERNHLVSAPVQVQNYVKEHIVQLEELIKKLDQDIDQMITRSPIWKTKENLLLSVKGVGPVLSRTLLAELPELGRLSRQEISKLVGVAPLNNDSGKHKGKRSCWGGRASVRGPLYMATLSATRCNPVIKEFYQRLLAKGKLKKVAIVACMRKMLTILNAIVKSNKPWDVSLAQRG

SEQ ID NO: 43252 - protein, 329 aa, unidentified
MAHIGIDVSKKKLDCMWVRDLEAGKVKPKVFTNNPRDFPTLLRWLERNTGESAGSLHVYLEATGIYHEPLAYWLHEQGVQVYVLNPAQVRYHAQGMGVRNKTDRKDSMMLARYGIERAPQPWQPEPPEIRELKRLLTRLEALGEDIQREENRLEKAHFSADRLAEESIDNVLKALREEECRLQQQIDDHFDSNDHLKRDRELLESIPGIGRVLSASLLVTLRGRVFVDARQAGAFHGVVPVHQQSGSSVRQPPRLNKAGPARLRKILYMAAIVATRHNPDIRAQYQRLLARGKAKKAAIGAAMRKLVHIAFGVLKSCTPYQPRVKQGCQ

SEQ ID NO: 43253 - protein, 369 aa, unidentified
MADRITYVGLDVHKESIVVAVASGGLRGEVREYGRIANTAAALDRLMRKLGGAGMALRFCYESGPCGYGIQRRLSAGGQECVVVAPSLIPKRAGDRVKTDRRDAASLAKLHRAGELTAVWVPDARHEAMRDLVRARLDAVHSLRRARQQLSGFLLRQGCHYGRPAWTKLHRRWLAGLKFDQAVHHIVLEDYIAAVEAAEARRDRLTAQIEAMLPDWALAPVVAALQTMRGMALVNAATLIAELGDLSRFTNPRQLMAYLGLVPSEHSSGASVKRGGITKAGNGAARRLLIEAAWSYRFPARLSRELLLRQENQPRSIRDIAWKGQVRLCARYRRLTRAAKPANVVTTAIARELSGFVWAIARHVTMPAG

SEQ ID NO: 43254 - protein, 411 aa, unidentified
MDVLIERCAGLDVHRDTVVATVRRPGPGGARRSETRTFTTMTGQLEALAEWLTAQDVSLVGMESTGIYWRPVYYVLEDSFPVWVINAEHLRNVPGRKTDVADSMWIAQLIEHGLVSPSFVPPRNVRLLRDVTRHGRRLTEERTRAIQRLEKVLQDAGIKLTSVASTILGKTGRAILAALLAGEEDPAVLAELAKGRLRPKIPALREALTHRFRLEHHGALIAQMLAHIDFLESAILETHQRTEVLLRPVADIVELVMTIPGVGRRTAEVLIAEVGLDMTVFPTAGHLASWAGICPGNNSSGGKHRPGRTRHGSMWLRIALTEAAQVAARGKNTYLAAHHAQIRGRRGTQKAIGATRHDILIAYYHIVRDRVRYQDLGPDWNDRRRSTEQQTRRLVRQLERLGVTVTINSGA

SEQ ID NO: 43255 - protein, 337 aa, unidentified
MKNASTIKVYKDCLAVGIDVSKADLAIVGITVKESYLSTVINQVKHIKSFMRRLKRCGFTGKILCESTGHYHLKLALVCHELGLELIVLNPLQSSKHSKAKIRKTKTDPQDALMLATMCITEPDLPKPAQLTPSKILIRLKMGQIASVEKQLQKMRQSLKQYEETYEGLGLPLSDLQQVLHEHCDSLKKIQKQLGKELEDLLSEALPDDDSFQQLCKIPGYSNIVSGFVGMLDRDVKSAHSWTAYVGLDVSVRQSGTWRGRGRLTKRGNAYIRKRLFQAAWGACLNYDYVRAYYDRLKAQGRKHVEAVCIIARKQLRIAYHIVINKVDFDPKIAFSD

SEQ ID NO: 43256 - protein, 347 aa, unidentified
MDHIGIDVHKRESQICIETEDGEVIEKRIRTERERFVAVFGERPRAQIVIEAMTESEWVARCLEELGHEVIVADPNYAAMYATRSRRVKTDRRDAVTLADACRLGAFRRSHRASDQQRHVRAELAVRDVLVRTRVKCVALVGALLRRHGIHVPSGNVDGFVSRVERQEIPEHVAREIAPLLTLIGTASAEVEAADARIAEIAAANPVIGRLRTVPGVGPITATAFVATLDTWERFSGPHQVEAYLGLVPSETSSGERQHKGRITKAGNSRARWLLVEAAWSIFRSRREETEPLRRWAQRVALRRGTKSGIVALARKLAGILFAMWRDGSTYERREGRAAPEAAATGA

SEQ ID NO: 43257 - protein, 505 aa, unidentified
MPWAASPDFSIFLPPGLSRGTTWHFDAVLDKADDSWTKFLLPIKETVMKNFYLGADVSKGYSDFMFLDAKKRRIEEDFQLDDTFDGHQKLYHILSALCDQHPDAQIYAAVESTGGYENNWFDALVKFQSNLPLKIARLNPCGVHNNSKAGLERNITDPISAENVAKYMIEHPENVTYQQQDPLASLRKQWSFIKMLLKQKTQLLNQLESNLYGANPEILAYCKNGVPKWVLSVLVRFPTAAKLAKAKKSSLVSIPYVTEQKAKELIQIAKKTVASANDQITAQIIKATVKQIQQLTKAIEAQEKILTETCSIPEVQLLKTFPGISDISAIGLILEIGSVQRFATAKKLSSFFGLHPIYKKSGDGSWGFHMSKKGRVVPRQILYMVAMVAVQCNPLIAEIYLKHTEKGMKKKAALGLCMHKICRIIYGMLKHNSAFDANIDRNNRKKSIKADTKKIRRDKRRRYQSFDAKAPISGRHNKKRKERKQSQSDNIAHNGIIKASVPVSV

SEQ ID NO: 43258 - protein, 355 aa, unidentified
MVIIGLDYHPSFQQIAFVDDETGEFGEKQLVHGNQEGESFYRELKKRGVRVRVGMEATGHAGWFEKLMTELGFELWIGDPAQIKAKRVRKQKNDREDARLLLQLLMENRFPRVWVASLENRDLRQLLWHRHRLVQMRTRIMNQLQAVAMNEGVRRKKGLWTKSGREQLEAFLLAPWATRRRKDLLELLDRLNPTIAELSTAIEQEAKKHPAVVRLMTHPGVGPLTGLAFVLIIGPPQRFRCGKQIGSYLGLIPCEDSSAGKQRLGHISKQGNSLMRFLLVEAAQIAARHDPNWRRKFLHLAMRRGRKIAKVAMARRLAVCLYWMLRKEWNYQQLLKFGSHAGQLETGHGVKEITA

SEQ ID NO: 43259 - protein, 272 aa, unidentified
MKDIYIGLDIHTDGFYGTMMDTQGKVIAEGRSNYNKEAVQNFFAGISSARMKIAIEACGIWRGVYKLLTEIGYEVVLANPLKTHQIAAKKKTDKVDSRILADLLRTGYLPEVYIPSEDVTKLRDIARHRARLVRVRSLLQCKIKAYLSRDGIKHPGGWSKESLEFLKNLDRRIANFVRIIGTINEEIKEVTREINEIARNRYLTKLLQTVPGIGEFSSLMILGEIGDIKRFDNPKSLVSYAGLCPGIYQSGNKSHDVINRACNKWLKWIVTN

SEQ ID NO: 43260 - protein, 329 aa, unidentified
MDPTTTTTTAQVFAGVDVSKDRLDVCLRWNAPESHEEGEAFVLAYDDSGIDALLSRLLEEPTVLVVLEATGGFERTVVGALATQGLPVVVLNPRQVRDFARATGRLAKTDRIDASILARFAEAVRPTPKPLPDREIRALQAIVARRRQLLGMLAAENNRLSSAAKPVAKRIKAHTRWLEKELSRTERDLEAAIESSHALGENEALLRSVPGVGPVLARTLLAGVPELGTLTHKRVAALVGVAPLNRDSGTLRGHRSVWGGRAEVRAALYMGALVAARRNPVVKEFYERLLAAGKPKKVALVACMRKLLSILNAVLKHRTPWRYPHYLPP

SEQ ID NO: 43261 - protein, 436 aa, unidentified
MKRRIEIINPMAGGVDVGSKNFYVDAGEEDIRIFSTYTEGCNQVRDYFLELKVKTVAMEATGVYWVNLYDILEQAGIEVYLVNGRDVKNLPGRKSDVKDCQWIRELHSYGLLRKSFIPQGDFKVIRSYIRLRQDHIRSSSTQILLMQKALTQMNIRLTEVINDITGVSGTKLLKAILQGERNPDELLKLCVKDLAVRKGVEIVKALEGNYKEEHLFALRQAFQTNEYYNQLVVECDKEIEKHLQKMTIESSPIPSTIKKRKPIRYHKPEIENLHEPLLKLTDGKNPIGIAGITDYSFLQIVSEVGVDMSNWKTEQHFTSWLKLAPMKASSGKMKKRVTIKRHNTAGQIFRNIASGILNSKHLALGSFGRRIRARRGSAVAIKAVGRKIATYYYRVMKHGEEFVEIGINKYEEYLKQRQLLFLEKTAIKHGKVLVDL

SEQ ID NO: 43262 - protein, 423 aa, unidentified
MKYALVRVLPEVPPGGVCAGIDWASADHAVCVVDLAGQVADRFAAAHDRAGIAGLIARLRGRGAAEVAIERGDGVLVDALLAAGLTVVVIGSRQVKNLRSRYGSSGAKDDRFDAFVLADTLRTDRARLRPLVPDSPATLALRAAVRARRDLVAHRVSACNQLRAHLAVAFPGAIGLFSELDSPVSLAFLAAFPGQQAAARLDEQALAAWLATIPRRGNTAPAGVLAARLAAAPRGAAGADAAQAAVTAELAAATAGLAGRVRALEAEIAAQLAAHPDQHIFTSLPRAGTLRAARLLAETGDCRARYPDPWSLAGLAGVAPVTRRSGTYISHEFRWNVNRQLRDAICDFADGSRHASPWAATVYAAARDRGKDHPHAVRITARAWVLIIWRCWQDGTSYDPAKHRALQDILTRQAAAGTPQPHR

SEQ ID NO: 43263 - protein, 343 aa, unidentified
MQAVTTIGLDIAKSVFQVHGIDAEGKVLIRRQLKRRYVLAFFQKLSPCLVGIEACATSHHWSRELKALGHNVRLMPPAYVKPYVKRQKNDATDAEAICEAVTRANMRFVETKTPEQQSCLMLHRTRQLFIRQQTSVINAIRAHLAEFGIVAPVGRKGVEHLLAIGTDGSDQRVPEVTQACLAALGAQLRMLKAQILEFDRRILAWHRSNETSRRLDAIPGIGPALATALVASVADAKAFRSGRNFSAWIGLVPKQHSSGGKDKLGSISKQGDRYLRSLFTAGALAVIRYAKIHGTQHRPWLTALLARKPTKVAAIALANKIARMAWALMAKGERYNEPVALGA

SEQ ID NO: 43264 - protein, 429 aa, unidentified
MEQTPQPIVKAEPEPEFAAFVAIDWADQKHYWSLQVVGQKGLQRGTLDNTPEAVEVWTMELHARFGGRPLAVALEQRRGALAVMLSKYAHLHLYPVHPTTLAKFREAWYPSRSKSDPSDADLLLEILTAHRSRLRRLDPDTVEMRLLQNLVENRRKLVDERTALSNRLTDVLKLYFPQILGWFTEVASVVVGDLLQQWPTLQDLQWVKPAKLEKFLRDHHCADIPERLTQIRQALPATHDRALLDSAPYQVVAWVGQMAVLRESIRQLEKRIAELAAQQPDWHIFQSLPGAGAALAPRLMVALGTQRDRYRSASELQSFSGIAPVKEASGNTQWVHFRWAAPKFLRQSFHEWAACSIAQSEWAAAYYQQQKARGKSHHVAVRALAFKWMRILYRCWKDRQPYREEMYLASLAKRGSTLVAALAQASQMN

SEQ ID NO: 43265 - protein, 332 aa, unidentified
MLPPNCGTATPYILRNTVGLDISKLTFDATMVGKTEHSAKFDNDSKGLNQFSDRLKSLGCQNLHICMEATGNYYEEVADYFAQYYSVYVVNPLKISKYAESRFKRTKTGKQDAKLIAQYCRSAKESELVKRQKPTDEQYRLSRMTAAYAQIKSECAAMKNRHHAAKDEEAAKAYAEIIKAMNEQLEVLKEKIKEQTEKPNCKEGVKRLETIPAIGRMTAAVLFHHLTSSKFETSNKFAAFAGLSPQQKESGTSVRGKGKLTKFGNRKLRAVLFMPAMVAYRIRAFPDFIKRLEEKKKPKKVIIAALMRKLAVIAYHVHKKGGDYDPSRYKSA

SEQ ID NO: 43266 - protein, 345 aa, unidentified
MKNTVAGVDLAKEVIQVCLCTNNKSRSNIEMTHREFLAWLFKSKSMSIIFEACGTSNYWKQRAIEAGHDARLISAKLVASIRQNQKTDKNDALAIVQASQLADIQFVKGKSVEQQQLQSMMRLRELAIKQKTASSNQIKALLLEFNIRASLKQGGLKGVVESLLEDAENGFSIEFKHALNAAWGLHLELLDSIRVYDRCLEATIDEHDDCKRLLKLEGVGTLNAINLYIALGCADLGVFNKGKDASACIGLTPLQHSSGGVTKLGHIKKNAKSSTLRSQLITGAMAVVNQMVKRTAVTKKEAWVQGLVARRGKKCAAVALANKTVRTAYVMLTEGTEYKAGLVAV

SEQ ID NO: 43267 - protein, 399 aa, unidentified
MVLEVYRSPSPYPCILPEGGEKTQTRQRRGRSNALEVNKPVGERDRRAAAKPAGNPNSRRGREGEPELRKAGGRPGRKWVKVMNQYTELFVGIDVAKRTLEVALSSGESWRVNNDAAGVARLAQELAARAPALVVLEASGGYEREVWLALIEAGVPTARVNPRDTHHFAQAHRQLAKTDRLDARGLVLFAAQIRPQPDAAPGAADEQLRELVMRRQQLTAMLTAERNRLQQAHSAANRRGIQTVIRFLERQRQAIAEAIEKHLRANASLHEVSELLQTVTGVRAVVAGTVLALLPELGRLSGRQAAALVGVAPYDRKSGDWDGRSHIFGGRTEVRCALYMATLSAVRWDPYLRAFYQRLIKRGKEKKVALTACIRKLVVMLNAMVKTRTPWSPPCPNLE

SEQ ID NO: 43268 - protein, 343 aa, unidentified
MHIASVGIDLGKTTFHLVALDEHGKVVIRKKFSRTQLLAYAANLPHSLIGMEACSGAHFLGTVLRDQGHDVRLIPAQFVKPFVKSNKNDFRDAEAIAEAVTRDNMRFVPIKTDDQLDLQALHRVRDRLVQRRTGLINQIRGFLLERGITFAKGRTKLRDHMPAILEDAEQNLTPRLRNLLDQLWQEWKHLQADIEAVSEQIERICAEDAACQRLRQIPGVGPLVATATVAAIGNGAAFHKGREFAAWLGLVPRQYSTGDKAKLGSISKRGNRYLRRLFVHGARAVLLRVKYDTGGFGRWVHQLEGRTARNKVIVAIANKLARIAWAVLSKGVDYRHAPVCQQV

SEQ ID NO: 43269 - protein, 407 aa, unidentified
MTTPTPAVYIGLDVGKSDHHAVALTTAGERVYDKALPNEETRLRAILDDLAAAHGPVLLVVDQPATIGALPVAVAQSCEDVEVAYLPGLAMRRIADLHPGSAKTDARDAAIIAEAARTMPHTLRAIRVDDEQIAELAMLAGADDDLAAQITASSNRLRGLLTQIHPALERVLGPRITHPAVADLLGRYPTPGKLKTAGPGHVRARLRKHAPRLANTLTEEIFEALAQQTVVVAGTEAAATVVPILAEQLAGLLQQRARLATQVEAVVEAHPLHPVLISMPGIGVRTAARILTEVVGKDFADAGHLASYAGIAPVTRRSGTSIRGEHAPRGGNKRLKRALFLSAFASLHHGPSRAYYDRKRAQGKRHNQALIALARRRTDVLYAMLRDGTLYEDPTTPPASSSVALAA

SEQ ID NO: 43270 - protein, 343 aa, unidentified
MQTISTIGLDIAKSVFQVHGVDANGLVVIRRQLKRRYVLAFFEKLPTCLIGIEACASSHHWSRQLQALGHTVRLMPPAYVKPYVKRQKNDMADAEAICEAVTRANMRFVPTKTPEQQSGLMLHRTRHLFIRQQTSVINAIRAHLAEFGVIAPVGRKGMEELLRVIADPGDKRVPDVVRACLTALGSQLLSLKKQILDFDRMILAWHRSNQTSKRLNCIPGVGPLLATALVASVADPKAFRSGRNFSAWIGLVPKQHSSGGRDKLGSISKQGDRYLRSLFVAGALAVIRYAKIHGTKHRPWVTALLTRRPTKVAAIALANKLARMAWAMMASGERYNYPAALKV

SEQ ID NO: 43271 - protein, 345 aa, unidentified
MANDAVTAVDIAKNVFEVAVSIQPGRVKDRARLPRGRFLEYFANCPQTTVVMEACGTAHHWARELQKLGHRVLLLPARLVAPYRKGNKTDRADAKALLEAYRNEEIHPVPIKTVHQHALVSVHRVRSKCVQQRTATINTIRGLLRELGHFIPVGAKHVVPATHTYIGDPDSDCPHVLQELLLGMCEEIGLYEASIRRCEGHLERLGKEIPMVAQLRSIPGIGLLTATALLASVGEAHRFPTARHFASYLGLTPKENSSGGKRRLGRISKRGNPYLRHLLIHGARSLMRAATTKRNPDRLRSWALAKAASRGPHKSAVAVANKMARIAWAVWTRDGEYRPQPVAAA

SEQ ID NO: 43272 - protein, 368 aa, unidentified
MKMNAIKAAPAASGIALKNEKSAKAKRILIGTDVHLRGYQAARKVDNGVIGVVENFRSEEALLLHVEKQCERAEQVVVVYEAGPLGYTLYRKLTARGVLCYVCAPDSSEQKRKRRKNNKIDARNLTSKLFNYLNGDEGALQLARVPTEAQEQLRLASREHDQMVEERKRLGAKGNALLLTQGFGSWSNWWRPKAWAQLSSLVPEWLLERLKIWVDVLKMLDEKICLAKVALARGCSGPRPKGVGALSQIQLQSEVLDWSLYTNRRKIACLAGMVPSEWSTGDTERRGSITKVGVPAIRRIIVEMVWRIVLFQPQYKPVQKWQKVLQGTNPALKKKAVVAIGRQLIVDLWRLQTGRVTAQELNLVMVGA

SEQ ID NO: 43273 - protein, 328 aa, unidentified
MAKGITICAGIDTGKYKLDIALEGASEQLQVDNTLADHNVLADWLRRHRVKRVGIEASGGYEQAVVAALRRRRFVVVVFQPAQVRAYAKFRLQRAKNDKIDAALIAACTAAVKTIHAPPDPRLAPFAEQLTMIDQIGEDIARLKNRLETCRDPRIWQTWSEEIARLTKRRNSELKALVAAIRQHRDLAERLALIESVDGIGLPTAVAIVVRLPEIGRITREQAAALAGLAPYDDDSGEYVGIRHIAGGRERLRRALYSAALPASMRWNPQLIALYRRLIAAGKEHKRALIACARKLLIFANTVVARGTPWGRTAPVLPTTSHAQLAVA

SEQ ID NO: 43274 - protein, 349 aa, unidentified
MDEYISFDSHKRYTLAERESVADGRVRQDRIEHRRGAICAYLANCHPGGAVAVEATGNWYWIVDEIEEAGKRALLVHPGKAKLMMGMINKTDKLDVHGLNRLQRNQTLPTVWVPPGELRDLRELTRTRMVLSRQRTRLKNRLGATLSKYGLEVEGFTDSFGAGARRLWPGLLARLPRHTRFCAEVLLEELDRVGHQIARFELCLGEVIDMTESMRLLLTLPGVGPILSPVIVLEVGDVSRFCDAEHLASYCGTTPRVHSSGGKTRYGNLRSDVNHYLKWAFVEAANSTVLRYHRHPDRHVSQLYRRLKARRGHPKAIGAVARHLAEATWHVLTRQEAYHDPGLGQTRKA

SEQ ID NO: 43275 - protein, 389 aa, unidentified
MVAVLGARRSVVVQPHEVPHTADGFAELAARLHALDGEDRIVMEHTGRYYESFAMSMYRAGFFVSAVNPLAIKGYQEGISVRKVKTDKADALKIAQFAIDKWEILPHYTPMDTIRYDLKTLHRQFQLSSKTKTALNNNLIALLEQSYPGANRYFDSPVRPDGSQKWVDFIDTYWHVDCVRKLSLNAFIDHYQKWCKRRKYNFSRSKAVEIYEASKELVSILPKDDLTKLIIKQAVEQLNTASQTVEQLRAMMNEAASKLPEYPVVMAMKGVGKSLGPQLMAEIGDVSRFTHKGAITAFAGVDPGVNESGSYEQKSVPASKRGSSTLRKTLFQVMDVLIKTKPQDDPVYLFMDKKRAQGKPYYVYMTAGANKFLRIYYGRVKEYLSSLPE

SEQ ID NO: 43276 - protein, 341 aa, unidentified
MNVTTIGIDLAKTVFSIHGTNQHGKVVVRKRLNRPKLLAFFAQLPPCLIGMEACSGAHYWARELTKLGHDARIIAPRFVAPYRKSSKNDDNDAEAICEAVSRPNMRFVPIKTQDQQAALCLHRIRRGLIKERTAQINQIRGLLAEFGLIIPQGRYHARHRIPEILEDAENGLPMLARRLLNNINQRILQLDEEILTYDREIESMARRDERAKRLMAIPGIGPQTATAILASAPDPRQFKSGRHFAAWLGLVPRQYSTGGKPRLGRITKRGDKYLRTLLIHGTRAVIAKLADKNDRLSGWARELVERRGYKRAAVALAAKNARIIWALLMNQTEFKTQPVEG

SEQ ID NO: 43277 - protein, 316 aa, unidentified
MAYRSALGIDVSGERLDWHRLPEETSGNHPNSASGIAELVKAVTAEGVDIVVVEATGGLQRDIALALSMAGVAVAVLNPRQVRDFARAAGQLAKTDAIDARMLALFGLRMQPEPRQLPDPVALDLADKLARRGQLVEMRAAEKNRLTRARRTVQKSINKHIRFLDQAIEALEQELDDGMRGSPLWVEKAKLLEAVKGVGPQTVRRLLIDLQELGKLSRHAIAKLVGVAPLNCDSGKRRGQRHIWGGRAPVRAALYMAATSARRFNPTLKAFYERLIAAGKPFKVAITAVMRKLLTILNAMLRDMAPWDPEKASARA

SEQ ID NO: 43278 - protein, 407 aa, unidentified
MIFAGVDWAEAHHDVHVQDEQGRRLAGGRLPDGIEGIARFHEMVAAHAGDAGEVVIGIETDRGLFAGALVAAGYQVFAVNPLSVSRYRDRHSVSGAKSDPADAKVLADLVRTDRHNHRRVIPDTDLAEAVKVLARAHQSMIWNRRRQLNQLRSALREFYPAALAAFDDLASADAIEVLKVAPEPRLGAALSKTQIGAALRRGGRTRRIDQWTAQIQAALRAPQLQPPPVIAAAMGAAVAAQASVTGEMSRQIAVLEQQLAADFEQHPDAEVVRSLPGLGTILSARVLGEFGDVPDRYADAKSRRNYAGTSPVTRASGTRRVVLARHVRNRRLADAIYLWAFSALSISPGARVFYDQRRAAGDTHHQALRALGNHLVGFLHGCLTKHTVYDEQTAWAHRPRPELKTAA

SEQ ID NO: 43279 - protein, 375 aa, unidentified
MKDSQKFIGLDVSKDIISVGIAEEGRGEPRFHGNIQNTPESIRKLFKKLGAPENLLVCYEAGSCGYSIYRQLLSMDIECIVVAPTLIPKRAGDRVKTDRRDALRLAQLLRAGELTSVWVPDETHEALRDLIRARFDTREDLQRVRQRLVHFLLRHEIRPPQGVKNWTVKYRTWLNSLTFDKPSLRIVFQEYYHSIYEVEERMKRIEAQIHEEAIASEHAPVIQALQTLRGIAEVTAVTLVAEVGQFSRFSNPRHLMSYAGLVPKEYSSGSNRWQGSITKVGNSHIRRALVECSWSYRHRPSLKGELLKRQANQPIEAQRIAWKAQHRLNLKYNRITSRGKTGKFAVVAVARELIGFIWAIGCSIEDSQINQTKVA

SEQ ID NO: 43280 - protein, 384 aa, unidentified
MTTASASVTVIGGVDTHKHTHYAAAVDDQGRLLGHREFPANDGGYQRLLGWMRSHGQIAAIGVESTGSFGATLTRALSKAGERIVEVNRPNRVARHMDGKSDRLDAEQIARAVLGQTSTATPKTKSGMVEVIRTLRVTRTSAVKARTQAFNTLWGVMIGAPSPLRDELVVLTKRTLVNRCLRLRPDTEDFLVLAGDPDRLLLAGVKTALRNLARRWKALDAEIKALNHQIEGLVRVTAPALVELHGVGVEIAGQFLATAGDNTDRIRNEAAFAKLCGVAPQPASSGRSSGRHRLSRGGDRAANSALYIITIVRMRHHQPTRNYVQRRTIEGLSKREIIRCLKRYIAREIYAALPKPSSPSPTVLAIPEPTTPSVRSSKQLLPLR

SEQ ID NO: 43281 - protein, 369 aa, unidentified
MQDSIFIGLDVHKATIAVAIARGERGGEVRHWGTIPNRADHVRKFAEKLGGDGRQLYFCYEAGPCGYGLHRQLTEIGHDCMVVAPSLIPVKAGDRVKTDRRDAVMLAKLHRAGELTAVRVPDAAHEAMRDLIRARATAVRVTGKARQHLQGFLLRHGRIYPGKKGWTKAYRRWLTTVRFTHPAQQIVLQDYIHAVTDAEARIERLTKQIADLLPAWSLAPVVEAVQAMRGVAFIVAVTVVAEVGDFNRFDNPRQLMAYLGLTPSEHFSGASVRRGGITKAGSGLARRVLIEGAWSYRMQARVSRKLLDRVESLPQVVRDIAWKGQLRMCQRYRHLMATGKPKVVATTAIAREMAGFIWAIARTVTPARA

SEQ ID NO: 43282 - protein, 444 aa, unidentified
MHYQKVLKMPESIPYLSVGFDVGADFTWMSIMLPNGILIGKPFKIIHSDPQSRELAISKIKEAQEMYSLESRCFLESTGIYHIPLLCFPRDKGFDCAVINPIITKNSTNMNVRKLHNDKFDSKKAAKVGLDASLKASIVPDDAIIDLRNLVRDYYYFKDLQSAIVLKLHAELKVSFPAYLNVFSKVTTQTSLKLLEAYPLAADMLAAPKDELVEIIRSTARFGETYALARYDAICTAAKDAAVFGRALPSNALRIRLYIKMYREYQAHLDSILEELHQAVGKLEGTPDYDRISFIQTLHGVGFLSAVVLIAEMGSFDLFSSPKKLYAYFGLDPGVNDSGKFHGDRVHMSKRGSSLARRILHMVAINNLKVDKATKTPVNPVIYDYYTRKCASKKKSVAVGAVMHKICNIIFAMLRDNKPFELITPEEHRERYAAEHPESVNPAA

SEQ ID NO: 43283 - protein, 410 aa, unidentified
MAGAATGVIIGVDPHKGSHTAVALDGQENVLGQLRVRAAPGQVDQLRRWAAPWPQRTWAVEGARGLGHLLTQQLVGAGESVVDVQPKLAARVRLLDTGQINKNDPNDARSVAVAALRATAPPAVAIEGGTAVLKLWARRYRDLGRLRTQVMCRLHAVLCDLVPGGFSREISAGQAIDVLHRLTVHGPVADARLELAHDLVTDLRRIDAQRREVKRRLTRQVAASTTTVTEIYGVGPIIAATVLGYVGDIARFPSRDHFAAYNGTAPIEASSGNRKIHRLSRRGNRQLNHALHMAAVTQIRNRGTAGRAYYDRKRAEGMTGKCALRALKRKISDAIYHRLVSDTRQQMRSKTKDPGGQPGNDSASSAAGSHPEPPALRKSHSRVAANPTTRRPAPQPAKPARPTKIVPHAS

SEQ ID NO: 43284 - protein, 351 aa, unidentified
MAMLADLVELVIGVDTHKHTHTAAVVTAATGAVIAQATVSATPAGYRQLLALADQQPGQRVWAIEGTGGYGAGLTRFLHAHAEQVVELDRPKRAARRHGAKSDPLDATRAAREALGRDQLAQPRAAGHRAALQARLTTRRSAVQATTDAQRQLHALVVAAPDVLRGRLGGLTTRQLVTACGRLRQRAAWDAETAATAASLRALARRIQVLDAEIADHTQAITTLVRAWRPELLTPCGVGPIVAAIVLCAWSHPGRCGSDAAFAMLAGAAPIPASSGQTVRVRLNRSGDRHLNQALHLIVLTRLRYDPATRAYAQRRRAQGKTNREIRRCLVRYVARQLYRLLEANPRFDPT

SEQ ID NO: 43285 - protein, 363 aa, unidentified
MFTERTSVGLDVHARSVAAAAIDGVTGELFQTKLTPSYGHIRAWVQGLPGPVAVAYEAGPTGFGLHRDLTAAGIRCEVVAPSKLQKPAGDRVKTDAKDAIHLARLLRLDEITSVSIPTVDQEAARDLVRAREDCRGDLMRARHRLSKLLLRHGIVYDGGDAWTGRHDVWLGHEALPQLTSKATRLTFDADYEAVLATKARRDRLDASIEQMAAESEFTPMARRLGCLRGISTLTGFGLAVEIGDWHRFTGNTIGSFVGLMPSKCSSGTSRVQGSITKTGNTHVRRLLVEAAWHHRPRYRVGKTMRDRWDLAPAAARIRGDEGNRRLHHRWVRFIERRKRNTVANVAIARELAGWCWSLATMED

SEQ ID NO: 43286 - protein, 331 aa, unidentified
MDHCAIDLGGRKSQVCVRSPDGRLLFEGPYDTHSLPEFLRLLPRSRVIVETAAEAFRVADAAKEAGHEVRVVPATLVRSLGVGARKTKTDRRDARTLSEVSCRIDLPSVHIPSTRSREWKAICGMHDALITARTKLINNLRGWLRGQGLRIGKGKAETFAERMMKFKPLPDYVTSQAEALAALTKKIRESDKRIESLAKDELCQRLMTVPGIGPSSAVRFMAAIDEISRFESAHKVESYLGLVPGESSSSERQQRLSITKAGSSSVRWVLGQAAWSLQVRCQDRAARPLQLWAAEIARRRGPRIATVALARKLAGILYALWRDGTKYEQRQ

SEQ ID NO: 43287 - protein, 482 aa, unidentified
MKKQNIYRNQSQEILSLFESAGERNKAMCIPMDYAKKDHVVMFCNGNGDILRKPFSVKNSLEGKNYLVDQVKKSCQHRGIKLQHVFFGGEDCGSYADNFISALRSDSWVVAGVNACDAKKHRDNKQASTDILDLLGICKMLLSCKGNCSPAQTGIYWNLRMLVRQRRKLVQMATGVKRRIHFLVDQIFPGFLDEKKSGIFPFSKGSLALMGNRFSVHQIRQRSRSTLSRLLARNLVHHADHCAEHLQKYTSQVLQPPAKYIATLQLALQQQVKLYICLQENIQQLEKEIAEHLAQTPGAFLTSIRGIGIVLAAGVCAEIGDPDKQKSLSQIVSYAGIVPRIKQTGGVQGKTQVKKVGKRCNRILKDYVVRSGYHIGINGPEELKLDHKRRGAQGQHADFGMSRRYLRMAMCLMRTSQTYLPKNLRDTRIPMEERAQYYVLTWSTLRDKWKKKGALEFAFDKDRLLGQWRNVVQDLYGIELEL

SEQ ID NO: 43288 - protein, 402 aa, unidentified
MSKVLYVGLDVHKDSIVVATAIAGDKPAETYGKIGGTLDALDKMIKKLTKPDLEVRFVYEAGPCGYVIYRHLTKREYHCKVIAPSLIPTKASDRVKTDRRDAQQLARLFRAGELTAIYVPDEEDEAVRDLVRARDRAMMDQCKARLRLKAFLLRLGHRYLGKGHWSDAHLRYLSSLKFAHAGQQIAYQEYLEAVTVATERLARLGKAMEAALPSWKREPVVRALMSLRGMAVITGMTLVAEAGDMTRFDSPSQLMSYFGLTPSEYSSGEKRHQGGITKAGNGACRRALVEAAHHYRVAPRVTPAIQKRQEGQSREVRAIALKAQQRLNGRFRLLTGRRKKSVVIIAALARELCGFVWAIACQVSAPEQLQAQAPARLAAAPGKAARGNKRVYVLDSRKNYKN

SEQ ID NO: 43289 - protein, 453 aa, unidentified
MNQRNRSVNLKPGKSRPALTITHPNAAGIDIGSASHFVAVPPDRDDELVREFPSFTVDLNALADWLKVCNVDTVAMKSTGVYWIPLFELLESRGFTVLLVNARHVKNVSGRKSDVLDCQWLQQLMTYGLLSGAFRPADEVCALRSLWHQRGMLLKAQGRQVQHMQKALTQMNIQLTNVISDVVGETGQKILRAIVAGERDGQVLAAMKNVRIRASVDEIAKSLQGNWRAEHLFALKQALAAFDFIGTQLAECDREIEQQLQSLQVHDGEPAKGKKRGRARNAPKFDLRTQLFRMCGVDLTRIDGIDVTTALAVISETGSDMSRFPTVGHFTSWLGLCPGTKITGGKVMSGKTKRVANRAAQALRLAAAALRSSQSALGAYFRRLCARMDKPKAVTAAAHKLARLIYTMLTKGEEYTDQGLDYYEERYREWVLRQLSQRAEKLGMKLIATEQPA

SEQ ID NO: 43290 - protein, 363 aa, unidentified
MSESRTVTVGLDVHARSIRLAAIRGDELLEERTLPYDEEAVERVLRGWPRVRCCYEAGPTGFGLYRHLVERGFECEVVAPGLVPTRPGERVKTDSRDARKLARLLAGGLLQPIHVPSRELEAARDLVRAREAARLDRMRDRHRLSKFCLRHGRLLPGSSWTVTRRTWLSEQRFAFAAEQLTFDTYLHAVDLVDLRIAALERSIREAAEEDSWRQLVARLRCLRGIDTLSALGLVTEIGDFSRFRTAEEFMAFVGLVPSEHSSGERRRQGSITKAGNAHVRRLLVEAAWHARRRPRVGYELHRRQRGQDAVVVERAWRCQQRLHSRWQRMAGRGKPSQKIVVACARELAGFIWAIATEQPLRSA

SEQ ID NO: 43291 - protein, 348 aa, unidentified
MEHVGIDVHKNQSQICIITSDGELIEKRISTERGRFETALSSHSGARILIEASTESEWVARCLEELGHDVIVADPNYAPMYGQRTRRIKTDRRDARALAEACRNGTYRPAHRTSDERRRLRAQLAVRESLVRTRTRYISLIRSLLRREGLRVRSGSADAFLERLAEVDLLDHVRREIKPLLAVMGPLGKQIARVDRQVADLASEDREVRTLCTAPGVGPVTAISFVATLDRAERFRGAHQVEAYLGLVPSEKSSGERQFKGGITKCGNTRTRWLLVEAAWILLVRAKSAKAQPLQAWAQRIAARRGRRVAVVALARRLAGILYAMMRDGTEFDGVRLAPSTDRRSATA

SEQ ID NO: 43292 - protein, 396 aa, unidentified
MISIGIDVSKRKSTVAIINVMGEILHTPFDIDPSQNGIQNLLHLIKDYPKEQVRFIMEATGIYHLGLVNELQKQGYFVHVANPLLIKKYFDAEIRKGKTDRKDALKLSRYGTEKWWLLQEHSKADQIYQDLQFLSREYNSFMANKIKLKVQLSNLIERSFPGLEKILKGHYFGLLLDFYELYPCASVVREVSEKRFLNQFIRMAIKKGHRKGAQIAQKVYRLAHECVTFEPSHKVAGLSVKHCVSLLRSTEQATDSIITQMDELAKELPEYEIVKRMKGVGDKLAPRLIAEIGDVRRFKNSKSLIAYAGIDAPPYQSGQFEGTNRHISKRGSRSLRKCGYEVMMAIKSSKPKEDNAVYEYMLKKEAEGKNKKLVKIAGLNKFLRIYYARVMEVYQA

SEQ ID NO: 43293 - protein, 319 aa, unidentified
MAKTICGVDVSSLSLEARVGPDGPSASFSNTADGIAELAAFCQQQGVELVAVEATGGYERQPFALLWARGLPVAVLNPRAVRRFAEGMGLLEKTDGIDAGVIAWFAAVKRIVPCVPASAEQQRLKALVTRLRQLTELQTAQRNQRLLVTEPAVLAGFEQLLVVVARQIRTLEAAIAKLIAADPLWQQLDQAFRSIKGVADRTVARLMAEMPEIGTLSNKAVSKLAGLAPLARDSGKHQGKRSVRGGRREVRAILFVVAGVVRRYDLDFAAFHQRLSAGGKPKKVIRIALAHKLLVRLNAKAREVRQRSASLEACTVAVG

SEQ ID NO: 43294 - protein, 413 aa, unidentified
MSIAPSTAAARVTAGADWAKDDHAVCVVGDQGGALERFTVRHDAAGLRQMAARLLHAGALQTGIERSDGPVADTLLQAGLTVFVIPPGQVKNLRSRYGPAGNKDDRFDAYVLAGVVRTDARRLRPMERDSEQATALRSTVRARRDLAGHRVAAASQLRARLQIVFLAAATLFAGIDPAITLAFLSRFTTQEQADWLSPLRLAAWLKSVAYSGKTDPAVLHARLLAAPRGHAGQHARVHGGTTLALVAVLRALNAQIKALAASIADQMDARPDAVIFTSLPRSGTIRAARLLAEIGDARGRFPTRDSLTCLAGVAPSTRQSGKVKSVTFRWGADKQLRDALCDFAGDSRRASPWAADLYDKAIARGCDHPHAVRVLARAWAHVIWRCWQDYVPYDPAAHNSLQALLKQQQPIAA

SEQ ID NO: 43295 - protein, 347 aa, unidentified
MSMSMIGLDTAKSVFQIHGVNETGKAEIKRKLRRSELIPFFEKQESCSVVMEACGAAHHWARVLTGLGHTVKLIAAEAVKPFVKKGKKNDAADAAAICAAASRPDAKFVPAKTVQQQGILALHAARSLLVKQQTMLANAIRGLATEFGITAPKGIRKLDELMTLVEKEESIPKQAKQAITGLHDYCNDLSEGIATFEAEIVSHARSDENARRLATIPGIGPITASLIAATVVDISLFKTARQFAAWLGLVPRQNSTGGKTRLGRITKAGNREIRRLLVLGATSMVCRADGWTSAVGTWLRTILERRPVRLVTVALANKMARIAWAVMTRKEVYRPTGGVAVAAQATA

SEQ ID NO: 43296 - protein, 314 aa, unidentified
MTSSIMICAGIDIGKSSLDVALGAGGETIHLANTVAGRRELAGWLTRRGVIRVGLEASGGYERAVCELLRNAGFEVALLQPRQVRAFAHYKLRRAKNDRIDALLIAEVTASLEEVREGRDPRLATFDEHLRLVEQLEHDRARMKTRREAYHDKRLIRMIDAEIARLERKVEAELALLSANIARHADLARRLALIKSVEGLGHRTSIALLILLPELGIADREQIASLAGLAPFDHDSGSFAGLRRIMGGRSRVRRALYAAALPASFQWNIACKAMYKRLRERGKPHKQALIACARKRLIFANTVVARGAEWVPAR

SEQ ID NO: 43297 - protein, 346 aa, unidentified
MKHCAGLDVSVKETAICIVDETGKIVREAKVTTEPEAVVALLNDAGLGYARVGLEAGPMSQWMVTGLLEAGLPVVCVETRHMKAVLKAQQVNKSDRNDARGIAQMMRVGLYKAVHVKTLASQQERMLLTSRKLLRDKLQDMENELRGTLRNFGLRVGVVSPGHFEVRVRELVVGHPTLGAIVAPLLAVRRVLREQFAVLHKMVLDQVRSDRLCRRLMTAPGVGPVVALTFRATVDQPQRFAHSKGVGAHFGLTPRRFQSGETDYDGRISKCGDAMMRTALYEAAQVLLTRTQKWSWLKAWGMQLARRRGGKKAIVALARRLAVILHRMWIDATEFRWRKEVNTAAA

SEQ ID NO: 43298 - protein, 401 aa, unidentified
MNSVGIDVSKGKSMVAVVRPMKTVVAKPFEVHHTIGGLSRLADYIKGLDGDTRVIMENTGRYYEPMAQKLYEAGIFVSAVNPLLIRGYGNNSLRKVKTDKADSLKIARYGLDNWSELRQYTGMDLIRYQLKYVYREFCLYVKIRTSLKNNLISILDQTFPGVNEFFSSPARQDGTQKWVDFALAFWHAECVRRLSRSAFTEKYRRWCKKHKYNFNAAKAGEIHEKSKGLVPMLPQNDVTKMLVQESIRQFNVVSKSVELFRGKMNELASQLPEYSVVKAMYGVGDSLGPQLMAEIGDVRRFAHRGSLAAFAGVDPGPKQSGMYDAKSTKATKRGSPQLRRILFLIMTILLQKAPPDNPVYRFLDKKRSEGKPYLVYMTAGANKFLRIYYGKVKEYLDSMEK

SEQ ID NO: 43299 - protein, 377 aa, unidentified
MLTTQQETLTEVGVVLGVDTHLDVHVTVALDELGRHLDEISIPASTRGYDTLVEWGEKFGPIICAGVEGTSSYGAGLARHLSRVGIKVMEVERPKRHQGSSRRPGRNGKSDRLDAEAAARAVLAGEVAGEPKSGDGRVEMIRALRTARRSAVKARSQATNQLKSLLVTAPDELRDRLRRLSTKELVTAAIRFRPGALPETPEEATKFALRSVARRYRSLSEEITELDIQLKRLVAEVAPDLPTLLGVGTDHSATLLVVAGDNAERLGSEASFANLCGVAPIEASSGKVVRHRLNRGGNRDANRALHLICVVRMKYDQRTKHYVARRTAEGKSKREIIRCLKRYVAREIYRVLVSGDSPSPPTAPSPIESRPKVVTTI

SEQ ID NO: 43300 - protein, 392 aa, unidentified
MRKIGLDLGARHIAYCEVSDDGKVVDRVSVKSFEELRSCLGPDTEPATVAFEACREAWVVYDTLAGWGHDPRMLDTTRIRQLGVGQHGRKTDSIDAEMIAVAVAENRIKEAHVLSPERRQLRAHLSVRAALVETRAQYITTIRGLARAAGVLLPTCAPSSFVSKIEEWTLDGATRALVAPLLATLKTLETELEPVEKTLSEIAEKDPAMQLCATVPGVGLIVAATFVSVVDEAKRFHNAHAVGAYLGLVPAESTTGGPNKRRLGSITKQGNRVARAMLIQAAWTIYRLRDENDPLKRWVTHVAKTRNKHVAVVGLARKLSGVLWAIWRDGAVYDPKQHAEKAARGVEVAAGRQLDRAKALQRSATKLRRPLKAKTKVSALTTPRKTSKRSAM

SEQ ID NO: 43301 - protein, 407 aa, unidentified
MEVLYPRCAGLDVHARSVTACVRIARDATITYDQYVASTTTSGLLALDAWLTAHGCTHVAMEATGVYWRPVWHVLEDHFTLVLANAMHIRNVPGRKSDTNDARWIADLLAHGLIRSSFIPPAPIQALRDLTRTRRQLGREVARHIQRVQKTLEDTNIKLTRVLTDIMGMSGRAILAAIVAGETDPDRLAALTRGRLKASRAELREALHGRVTEHHRFVIQLHLTQIDGLEGAIAAIDARIGDALGPVHAAVRLLATMPGLSETTARSLVAEIGTDMTRFPSAGHLVSWAGLCPRQDQSAGTTRSTRTRQSAPWLKPMLVNAAWSATRKTDSYLRAQFLRLKSRRGPKKAILAVASSMLTAAYIMLRDGVEYHDLGPHHFEQRDKERMTKRLLERLRILGVTVQVTAA

SEQ ID NO: 43302 - protein, 347 aa, unidentified
MLIIGCDFHPGFQQVAIFDNRTGEIREKRLQHRAEAEQFYRGLAGQEVLVGMEACGHYPWFEGLLQELGMELWFGDAAKVRASVVRKQKTDRRDAEHLLDLLRENRFPRIWVPSLEVRDVRQLLVHRHKQVQARTRTKNQLQAMALSHGVQKKRKLWTKAGRAELEQLPLLAYAAQRRKKLLEALDELDVEISELDRRVAEEARERPEAVRLMTHPGVGSVTALAMVLTLGPAERFGSGKQVGSYFGLIPSEESSGGKQRLGKISKQGSSFLRFLLVEAGQTAARYDPQLKRFYRRLAVRKNRSVAKVAVARKLATRLYLMLREQWTYAQLSQAVMQVSPSHSVAGE

SEQ ID NO: 43303 - protein, 349 aa, unidentified
MTTQRLSYVGQSVYVGVDVHKDTYAVTCVCNKQIVKTATAKADPAGLTASLSQWFPGARLYTAYEAGFSAFVLHRALTKAGIMNIVVNPASIAVAANDKVKTDRRDSKKLALDLSDGRLQGIYVPTEDEELARLLPRTRAQIVEHRATIARQIKAKLHQFGLIAPASRRLISNRYWREIDAWPLPPDLRVSLTFLAEQWRFATRQLIEMRRLLREQAKAHPAIEQVYRSVPGIGEVVARTFATELGDMTRFANERALFSYTGLTPSEYSSGPSVRRGHISRQGSSRVRHVLIDTAWRALPRDAVLKEIFDRIAATRGKKRAIVAIARRLTGRIRACFRQGTTYAVGTYA

SEQ ID NO: 43304 - protein, 431 aa, unidentified
MKNRTDLRLEEITEGTLVVGVDIAKHEQWARFVDYRGVEIGKALKFKNNLQGFESIVAKICEICKLKTLKYPIEQVVIGMEPTGHYWKPLANYLIKAGYRVVGVNPYHTKKAKELDDNSPTKSDKKDAITIARLVKEGRYFDPYLPEGIYSELRGLANTRTSAKKRLSAIKNTITAILDEYFPEIYGVFKKTLTGKASRQVLKSCPFPTFILELGEVGILAEIRKAVKKTVGMKKVRHLIDAARESIGVRYGLEASRMRLKMLLEELELIERHLCDIEQAMESALYKTGYAEQLIGIKGIGVVTAAVFLGEVGDPLRFQNARQIANYAGYNLTEDSSGQSKSGTCISKRGRKQLRSILYQMAFTMVGKNAEMKELYQYLTKRKNNPLKKKQALVVVSKKIITVIYSMLKKRESYKPELVLGAVRKELMKAA

SEQ ID NO: 43305 - protein, 424 aa, unidentified
MKVTYQTCCGVDVHKSFLVATIVKTTGGIEPSYQKKRFSTFNNSILEFKQWLINNNCHDVCMESTGKYWIPVFNLLEDQINVTIANPKWVKAVKGNKDDTKDSKWIGDLFRLGLVKGSYIPCKKVRILREYTRYRYKLVSCRSSEKNRYQNALTVCNVALDSVVSDIFGKSSTSIIDYLLEQSGTTINHEEIASKLLRRLKSKEDAVIESVEGYQMTDAQKYRMRLVRAHMDYITAEINDVDKMIENMISSNPDFENAIQFLCTIPGVKRDSAITIISEIGTDMSQFSSSKRLCCWAGLTPGSNESAGKKKSVRITRAGVYLKPALVQCAHAAVKSDKSPYYKKKYESLVKRRGKKRSIIAIARMILTAIYQMLSTGEQWNPSDLYKIDMPVALVEKQKAKAIKQAKKLLQREGLLPPDEPLAS

SEQ ID NO: 43306 - protein, 377 aa, unidentified
MLRIIKIGMDVHSKTYSLCALEPKIGEEDHLLASTEVQADPKYILLFIESLKIKLGSDNDYDIVCGYEAGCLGYSLYNRLTAAGVKCVILAPTTMLTPQGKRVKTDARDARMIAQCLGNGGYRAVYIPTDEDDAVKEYIRMRDDQQDNLIRTKQQINAFCLRHGHHYPDGKWTIKHISWLRKLDLPGVLREVLDEYMSAYDELTAKIERQDKRICEFAEQPKYNEKAKRLVCFLGIKTHTALSLIVETGDFTRFAKGNTYGAFLGLAPGENSSGEKVHRTGISKAGNSHLRCLLVEAAHGICKGRVGQKSKALRARQEGNPAEVIAYADKANARMRSKYYRLTRNGKKHSVATAAIARELACYVWGMMTDNITLTTV

SEQ ID NO: 43307 - protein, 340 aa, unidentified
MAIVAGFDVHRRQITFDALDTETGEVRRGRIDATPAAVTAWVRRFEGAVEVAVEACTGWLFVCDALVAAGAVAHLAEPVETRALRGRKRRAKTDREDARWLRELLADGRLPEAWIPPEHVRQWRSRARLRHTLIDERTQWFQRIRATLFHHGISGSPEKLRTREGRAFLDALDVPADASERIEIALAMIDAIEVQIAPLERELRQLARRQTGCRALMGLYGMGELTALVTLCELGDVGRLSASRKAVRMAGIDIGVHRSDRRARAGKLTRQGSPQLRWALYEAALSACRPSSPDHADYLALKARGLSHTRASLTIARKLARRSYHVLRELGPAALEPTTT

SEQ ID NO: 43308 - protein, 451 aa, unidentified
MPKTIVRFVGLDVHKRVVEACIVDAAGKVLRRERFALNRLTLERFATKILRRTDQVALEATTNCWAVADALRPHVARVLVSNPMATKAIALAKVKTDKVDAHVLAQLLRCDFLPEVWQPDEATRRLRELTGRRSSLVGMRTAMRNRIHSVLAMRLIETPTKLFTPAGREWLAGVELDEQGRLLVDLDLRQMDRVQKEIDALDEELARRAYASDAVKLLMTLPGVDVATALALLAAWGDPTRFPDADHAAAYLGLVPSTKQSADRCYHGPITKRGNSQARWMLIEAAQHLDKHPGPLGHFFRRLARKKNRNVAVTACARKLAAIAWQMLIAGEPYRYAIPRSTETKLLRLRVKASGERRKGGSPKGTKCTAKLPGGSRTIRSLPEVCRSEGLPAPRALSPGEQRTVRHAECEAHVARIAEPQVVPRRSGRSGKAAADHPVKTSSTRKGKTFR

SEQ ID NO: 43309 - protein, 356 aa, unidentified
MSKTNPVKIIIGVDTHKDIHVAVAINGIGAHLGTLTIPVSPKGYQNLETWARAFGSIHAFGIEGTGSYGAGLARFLQAKGHTVVEVNRPNRQLRHQNGKSDPLDAESAARAVLGGQANARPKSADSSVEMIRHLKVARDTAVKSRTQAMVTLKTIIINAPAALRQALDRIIGKMALIRHLAALRPGPILSVTASAKGALRAIARRWLTLDAEIRAHDADLEALTASCVPAMLEAHGISTGTAAEMLILVGDNPERIRSEAAFAKLCGVCPIPASSGKTNRHRLNRGGNRQANAALYRVVIVRMRNHQPTLDYVKKRKADGKGKMEIIRCLKRFVAREIFGYLCGAQRSVPSISKAT

SEQ ID NO: 43310 - protein, 338 aa, unidentified
MNYVGIDHHRQYSHLTVMDQTGQVLRSGRVANLRSEIERFLEGLEAMEAVIETGRSSYTMVDVIEEMGVAVKIAHPNEVKAIARAKIKTDKRDSEVLAHLLRMNMIPEVYRRSAENRQSQRVLRQRAFYVSAMTALKNRVYAFLAQQKEAVRETVARETNIFSVKGQKALLELDLARGEKRLLEALLKTSRHLETRIEESTALVGKLYEESREAQLIRTIPGFGKYLAVLVAVEIADLNRFSDAAHLHAYAGVIPSTHSSGDRTHHGKIVRAGNRWLRWAAVEAVWPAIRADFDLRCFYERLAHGKGANKAKVATARRLLTIIYKVWKEGRNYIAYPR

SEQ ID NO: 43311 - protein, 378 aa, unidentified
MTITTDGMVVPPFDNRCAKMRILKILTEVMMLLRTLAAIIGMDIAKNVFQLHIVNPETGEIERRRLKRTKVAEFFANRAPSIVAMEACGGAHHWARLLLGMGHSVKLLPAKHVRAFVLRDKTDALDAQAIYVAAQQSHIREVPIKSEQQQSCLSLHRIRTQLMKMRVMQTNAVRGLLYEFGVVLPQGHKRLLACIQSELARAQLELGLPDELVISLQEQLRRIDFLQKDIDALDARLASMARQNHQMQAAVSIPGIGSLTATAVLSTVADLSTFRNARQFAAWLGLTPRQVGTGGRTQQLGISKRGDSYLRYLLISGARSVAIRSTRTKWMTKLFERRHFNVGIVALANKIARTLWAVVVKSKPFDRAKWNVEMPIAA

SEQ ID NO: 43312 - protein, 343 aa, unidentified
MKKLRPDPDALLRLLLRWRDQGIKAGGPIKRIVLAFEAGRDGFWLARWLRARGIEAYAIHPASIPVSREHRRAKTDRLDTGLLMRAVLGWLRGEPKHCNMVAISTIAEEDARRPTRERETLVRDQTRSVNRIKATLIRFGIRTFKAKLRQATKHLEQLRSPEGEPLPPNTMAELRRDLARLQLIRGQIGEIERARLERLKRAPRQGTHPMIRMLARIMGLGIETADMLVHEVLSRKLRDQRAVARYGGLTGSPDESGSKRRERGLARAGNARVRRGMIQLAWRWLMFQSKSTLTKWYRARTAGAKPGLRKAMIVALARKLLIALWRYVTIGEVPAGAVLRSGT

SEQ ID NO: 43313 - protein, 413 aa, unidentified
MTRMSFGWYVGIDWATQAHYVILLDAERRVLGERSVPHTGRDLAELAGWLTEVCGGEVDRVAVAIEVPRGTVVETLLERGFSVFAINPKQLDRFRDRYTVAGAKDDRRDAFVLAASLATDQPAFRPLRLDDPLVIRLRELSRLEAELHQEEARLTNRLRDLLHRIYPQVLRLSPAADEPWVWELLELAPTPADARRLTRPALSKLLRAHRIRRLAADAVLAHLQAPPLWVAPGTVEAVSEHIGLLVPRVRLVHEQRAHCLHRIESVLETMAGDAPGQRGEHRDVEILRSLPGVGRLVAATMLAEASQLLAQRDYHALRAQGGIAPVTRQSGTRARVDMRYHCNHRLRNALYHWGRVSAQCDLLSRRHYEALRRRGHSHGRAIRGLTDRLLLILMAMLRSQTSYDATRRRAHAA

SEQ ID NO: 43314 - protein, 324 aa, unidentified
MAHYAAFDVSDKETAIHGLDEHGKLVWKGKRPSEPEALAAALRQHAPELVRVGLETGRLTPWLFHALKGLGVPVVCLDARHARAATALQRNKTDARDAETLAQLVRTGWFREARVKSWAAHAVRHLVGARAQLVGMATDLSNQIRSLLRTFGLRITGRAGGTFERKVREQITGSPEVAAVAEPLLAAWRAMRDQIAALDRKLIEAARSNATCRLLMTCPGVGVVVATSFAAAVAAPDHFRCSRAVGAYLGLTPRRHQSGESDHSAGVSKRGDKLLRSYLFEAAACLLIRVQRPSALKAWGVGLVQRLGFKRAAVAVARKLSVTC

SEQ ID NO: 43315 - protein, 502 aa, unidentified
MKYVLKKKPSICGEPQSSLHKIADTEKNLEQFVAFGVGLDIHKNSIATCVSGQLSSGEILEYKEHTFRNNYPGVNELCGFLRKFIAKATVLMECTGVYHVAVYQTLTERFTSRNRCIIAMNPLLVHRKIADLGTKTDRADARTLSILALYGKLLRPSYVGTSEFFATRDLMRSYHKAQSRCTQFKNRLHRNLHLANQKFSFDFSTNWGITFLEHYISQDWSLGECYEDLLKNLEAEGKGKVLKKQAEEVAINASVTLTSLQRTLIQMDLIQLLQNQQACSLYIQQAEQEIIRNPELSQQYQRLSIIPGFSSITVLTVLTEIGDYTRFKNYSAFSKFCGVVPTIEDSGEHKSRGHVNRFTNKHLRKVLTQAAGVVIGRPNRQTDIGAYAFKQFKLRRLPFKKAMMKVAWKYSRIIYSVLSENREYNPCCESIQRKRSQLARKMAKKGSILESCRTRAVRQDISNILVKYSELLNRTSRYHLVNGFHRLIRKSQYLDGQTEVEN

SEQ ID NO: 43316 - protein, 346 aa, unidentified
MDHYAGIDVSLECSSVCVVDASGKIVREAKVASEPEALISWFRSLGSELARIGLEAGPLSQWLYAAMKKAGLAVELLETRHVRDAFKAMPVKSDRNDARNIAQLMRLGWFRPVHCKSMSAQETRAMLTARKLIQTKLQDLENSLRGILRGFGLKVGKTTKRSFATRINELVAGHPALEMIATATLAVHAVLLREFNGLEKRVRAMSLLDAKARLLMSTPAVGPIISLTYASAIDDPTRFTSSKRAGPLFGLTPKKYQSGETDYSGRISKNGDAAVREALYEAAHIILTKPIKGCAQLKSWAMRIARRAGMSKAKVALARKLAVIMLRMLKDNVPFNPAAKAIAAMT

SEQ ID NO: 43317 - protein, 410 aa, unidentified
MELLHRRCCGLDVHKETVVACLRLVSDGKVTTEVRTFQTTTADLLRLSEWLAANECTHVAMAATGVYWKPVWHILDDGEFALVLANAAHVKNVPGRKTDVNDAMWLAELLAHGLIRASFVPDAQTQEMRNLLRTRKQLVREQSSHVLRVQKTLEDANIKLDSVLTDLMGKSGRAIIEALIAGETNPVKLAGLADRRVKGSPEEFREALRGRVTKHHRFLLRLHLNQIDALDAAMATLDAQVEANLGPFRTAVELIGSIPGIKNLGAHVIVSEIGIDMSRFPSAAHLISWACICPRNDESAGKRRSNRLRKGAAWLKTTLVQCAWAAVKKKNSYLQAQFYRIKVRRGPKKAIMAVAASILTAIYHMLKDGTMYQDLGCNHFDRRSTDQQKNRLVKRLTDLGCAVEIKPLAA

SEQ ID NO: 43318 - protein, 366 aa, unidentified
MQKLYIGVDFHARQQTICYLKTETGELVISELKHEDKEQVRAFYQQFQEPVIVGLEASGYSPWFETMLEQLGGEVWLGHATEIRRRARWRQKNDRRDAELIWDLMVHHEFPRLHRPAVQSREVLRMLRYRQKLIKMRTMLKNSLQAIALQAGLAKGKQLFTAVGQEQFQAAEMSAALQWQREHWFALLQPLNQQLLETMVWFKAQSKDDVGSQRLRTHPGIGLLTSLCLVHTLQPISRFRNQRKVVAYAGFDPVERSSAERQHFLGISKAGSRMLRYLLVEAVHTAVRYDEDLKRFYKRLAERRGRPKAKVAAARKLLIRAYIMMRDEIDYAEFRRRAVADRLACRGQRPSNVPEVLIGQPTSPGA

SEQ ID NO: 43319 - protein, 351 aa, unidentified
MKTNTPLNPETQARICQLKLGVDWHVEQFRVVRMCDGQSPQPAQRFTPASFLAFVEKQRALADQIIVVYEAGPGGFHLHRQLSALGVTVYVVHPHKLDPQHKGVVTDKTDARELTLNLDRYLRGNLRAMSVVRVPTEAEEQRRALSRQREQLRRERQRLAAQGRSLGLTQGLRLRGEWWAQPLALPEWLRPRLEVWRKLIAAVEEQLDALTKQVEALAPKIRPKGLGPLTLGMLIAELCDWSRFKNRKQIGSYTGLCGGVSSSGQSHCDLSITKAGNARVRWTLIELAWRMVLYQPQSKAVQRWQHILLNPKAAARQKKRALVALARQLAVDLWRWQTGKITPEQLGWVMV

SEQ ID NO: 43320 - protein, 348 aa, unidentified
MLIIGCDYHPGFQQIAFVDQETGECGERRLSHREEAEQFYRALLGQKVRVGMEASGHARWFERLLNELQFELWIGDAAEIRSKRVRKQKTDRQDAQLLLRLLIEDRFPRIWVPDAENRDLRQLLWHRHRLVQMRTRVMNQLHVVALNEGLRRKKALWRAAGRQELESIALAPWASRRRQDLLDLLDRLTPKIQQLTAALEEEVVKRPVTRRLTTHPGVGPLTALAFELVIGTPERFHCGKQIASYVGLVPTEESSGDRRRLGHISKQGNVLLRFLLVEAAQVTVRSQPEWRNKFFHLAMRRGRKIAKVAMARKLAVHLYWMWRQGHDYGQLQKLGSHAGEPGNPDGGQ

SEQ ID NO: 43321 - protein, 414 aa, unidentified
MLKIVYRICCGMDVHKSFVVACIASTNDQGVTTYKSKRFSTFTGDLRRCAAWLSENNCKDVCMESTGKYWIPIYNILEPTCNIVLAHPKYVKAIRGKKTDKRDAKWIADIFKHDLVAGSFIPPADIRQLRDLVRYRCKLTNFTTGEKNRAQNCLTVSNIKLDDVFSDVFGKTASAITTRILENPAEKITDVSGFRTKGMKATNEQVLAAVDGEMCEEQAEKLRIIRSHMDSLELCKLNLESLILSTAEKYLPQLNLVMTAPGIQSFAAIGIISEIGVDMSVFPTSKHLCSWAGLTPQNNESAGKKKTTRISRAGAYIKPLLVQCALCAIRAKRFPEVRSRYLALKKRRGHKKAIIAIARMLLTAIYNMLKKNEPYNPELYRKGDRPPAHREVSVEEAIFILQRQGYLVTAPTTA

SEQ ID NO: 43322 - protein, 449 aa, unidentified
MSDRSGVSRGDRNRNARLSRLREAVPLHNAIAAIDLADSKQMVVVTDHESRVLARRTFRRRAWELGAALDWAAERAIAAGFAGVTVAVEPTGHRWRVVGQLAADRGMPFVCVQPLMSSWARRAEDLTFDKTDDKDAVLIARLTAQLRCYLPEPADETWAQLRHLGMRRARLIAEQVAQVQQMRDLLECAWPAVLDSARQPFKSTTWHAALLVALDRAVGGDLSRVTRLGRKRFDAAVRRQVARWDAVNPWQKIIDGVFAACASPAGVIALRRGALERVGLLLADWRDTRARLAYTEQRMIAVLEELGLTGLATSITGLSAVGAAAILAETGDPRRFTTGRALVKHAGLAPRQKTSGTYTGRTRTTGQGRPGLRLAAWRGVWGALKSNPVYAARFAHLTSREHNKLTTGQAHAVLAAALLRQLHAVITTGQRWDPAIAAGGTMSQPLIAA

SEQ ID NO: 43323 - protein, 391 aa, unidentified
MSMYFVGIDISKYKHDCCIISAADQQIVSKFTVKNDKDGFEHLLTTLNSLSNPEDIKIGFESTAHYALNLELFLENAHHNFMEVNPVLIKEYKKSTTLRRTKTDSVDCESIARWLITVEYKPHSKGFYHAYSLKSLTRLRDRLIRQRSFYLVKITNVLDHTFPEFKPFFNERLSKTALYLLENYGSAEKMARMNSASYDKLRCISRGKFSIQQFLRLKELASNTVGVNNSIFDLELNTLLTLYKSLSDEINTLETEIIKLIEEVHPHYMSIPGIGPISAAVIYAEYGDISNFSNPGQMLAFAGIEPGINDSGTESHGGRMVKHGSSQLRYVLLNACLPLIRFDLTFATYYEKKRAEGKKHRVAITHVAKKLIRVIYALERQDVDFNAQKLR

SEQ ID NO: 43324 - protein, 313 aa, unidentified
MSNETCVGIDVSKEKLDVAVGSSGDVWQVTNDEAGHGELRARLAAAGARLVVLEASGGYEAIVAGVLWEAGFQVAVVNPRQVRDFARGMGKLAKTDQIDARVLALFGEKVPLEIRAPVDAEAKELQGMVLRRRQLVEMLTMEKNRRGLVAAGRARKSLDKHVAWLEEAVRRANDDIDQTVRKSPLWREQEDLLRSFKGIGPVSARTILVELPELGRLNRKKIAALVGVAPFNCDSGKFRGKRMIAGGRSHVRTVLYMAAVTAARSNPVIRALYQRLLAAGKAKKVALIACLRKLLTILSAMMRDNARFAPRGA

SEQ ID NO: 43325 - protein, 319 aa, unidentified
MSSNREIFAGIDVCKPYLDLAFWNDNRSWRFDNDEPGIESLIDLLTEHTVDLVVVEATGGFEKQAALAIGSSPLPVAIVSPRRVKAFARANGRLAKTDRLDAHNLAHFAQVVQPPVRPLPSAAREHLSGLTARRRQVNRMITAEKNRLRNAHPEVQGHLMEHLKWLQKDLKQLDDEIKALVQEDAEFKHKAELLCSVPSIGIVTATTLLADCPELGTLDRKKIAALIGVAPMNKDSGRKIGRRRIVGGRAHIRATLYMAALSASRTNPVLRPFYQRLVNNGKEKKVALTACMRKLLTMLNAMMRDNKSWNPAIPAQIQA

SEQ ID NO: 43326 - protein, 352 aa, unidentified
MAGVMIGIDPHKASHTAVAVSGAEEHLGQLRVRACAAQAERLLEWAAAWPERTWAVEGAGGLGHLLAQQLLSAGERVLDVQPKLGARVRLLATGNVNKNDPNDARSVAVAALRSPGVREARPDDHAAVLKVWSKRRRDLASTRTQVVCRLHAVLCELVPGGVAKKIIAAHAARLLDAITPPDAVAAARWELAAALVEDLRRIDAQLRETRKKLDAAVRASGTGLTTLFGAGPVTAAVIIGEVRDVSRFKNSDRFAAYNGTAPVEVASGGRRVHRLSRRGNRRVNHAIHMIAVTQVRQKHSEGRAYYDKKLAEGKTRKEALRALKRQVSDAVFTRLRTDAQRAQAQARDPGGQ

SEQ ID NO: 43327 - protein, 423 aa, unidentified
MTAVTIGVDPHKLSNTIVVIDASERVLAQHRFDNDRAGYQQLKATARRYKERTWAIEGAQGVGLGLAQRLVAEGEPVIDVPAKLATRIRALGGGSGRKTDNADAYAVAVAGLRAGDLKHVTPNDTTTVLRLLTDRRQDLVEQRIATVNRLHDVLQQLIPGGAKPRLTATAAKTLLASVRPRDEVGKARKLIALEYVIELTAIDARLKAMKARISEVMAANPTSLLEIRGVGVLLAAKVLAEVGDVRRFPSKHHFASYTGTAPIDASSGDNNRHRLNRGGNRRLNHVLHIVAICQIRYPGEGQDYYRRKRATGKTPLEAMRCLKRRLSDVVYRHLVADQAVKSPGGQSGASVQSSAVDPIPTVDTSEQPLSGLTADHTPAVKARLDTEGTRSRTEPTSVRVMQESVRQARRFERCPSRSPAGRE

SEQ ID NO: 43328 - protein, 371 aa, unidentified
MYIVGIDIGKNHHEASIVSPEGKQIGRSLRFATTHKGADSLMSFIFKNIGNSPCVFGMEATGHYWYPIYSFLKAKGYTIYVINPIQSDSLRKMYIRQTKNDSIDSFLIAEVIRFGQFGTTSMADENILAMRQLCRYRDSVISSRTEIKLRIGTIMEQIFPEYEKQFSSLWVSTSMGILEKYLTPENIENAPIDELFEIIKDKSHNRLTRAKAISIKEAAADTFGIKIAQDAFSFQLKQLIDRMNFLDKQIEALDCQILEYYEKFDCYLHTIPGIGMIAAATILAEIGDINRFKSSSALVAFAGIDPTVRQSGEFSSTHNHMSKRGSPYLRHAIFLAATARSFHNSPLNAYYKKKRDQGKHHLTATGAVARL

SEQ ID NO: 43329 - protein, 399 aa, unidentified
MNYVGWDWASRSHDVTVVDDAGAVVDRWAFGHTEQGLLMALQRLRRHGQPADLPVIIERTSGLVVDRLLAAGHPVAPVHPTSFHAARPRWGASGAKSDPGDSYKLADYLRTDGHRLRRLDPLDPGLRELQALVRLRDDQVRTRTATINQLAAVLDAHWPGPKCLFRSLASPIALAFLTDYPTPHAAARLGEARMAAFCRRHAYRGGKSPAELLTRLRTAPAAPLTLPPETIAAMVSTHVHLLRGLQRAIADIEQVIDAKVDAHPRAQLLAALPGVGRINLAQLLAEVGPILDRVDTAEQAAAECGAAPVTKASGKTSGVYFRWAANTRARKAMTSFAHNARMQSPWAARLYAEARARGKRNPHATRIVARAWLRVIWACWHNGTPYDPDAHQAAQRHTA

SEQ ID NO: 43330 - protein, 327 aa, unidentified
MDVHKRTIALCAYNARTGVILDERGLPHDLPKVTKYLRKVQDRHGQVRSCYEASSCGFGLQRALQARGISCEVIAPSSIPRRPGERVKTDRRDAKKLATLYAAGLLTIVCIPDEEQEAIRSLLRCRGDLAETITRTKQRILAFLQARGLQYPGKTNWTKTFHTWIGALPMAEIDQITLQTYLHQLDQLTQEVRRIEGDLAAQAERAPYQAPVKVLMAFRGIGLVTALTLVFELGDPGRFAHPRQLMAYLGLVPSEHSSGNHTQRGGLTKTGNVHVRNAVISAAWKYANPPRRSRVLRQRQEAVSAEVISVAWKAQRRLYKRFHKLSQ

SEQ ID NO: 43331 - protein, 466 aa, unidentified
MPHVGISIFCPARNGATHQYVKGVATINAATISFGTKSKKTRRHSATKLTNATKINHRFLNLFTCYTINACGMRAHEVEPKAQCNASPCLHLILIEPSPQPSGCPLSWKATKHYKGEDSMNFYHSTHRHYCGIDLHARSLYVCIIDQQGEVLLHREIKARPEPLLGMLEPFRDDLVVGVECMHCWYWISDLCEEHAIHFILGHALYMKAIHGGKTKNDRIDSFKIAMLMRGGNFPLAYLYPKEMRATRDLLRRRTRIVRHGAMLKAHAVNTLGQYNLPPSKANLNNPGGRSQLTAAFTDPDVQRNIDLDLAIVDCYQHELKKLEWHLEQQAKQHDPASLNVLKTIPGVGRILALTILYEVGDIQRFESVQKFASYARLVKCKAESAGKVYGTQGNKIGNAHLKWAFSEAAVLFIRNNDKAKRYVEKLQKRMNKPKALSALAHKMGRAVYFMLKDKRVFDEQRFLRG

SEQ ID NO: 43332 - protein, 395 aa, unidentified
MQSLFVGVDVSKDYFCASGLDVQGNEIFSLTAAADKTGFAAMIGAITGHCNGLDEVMVAMESTGCYHLNLLSFLTSHHIKTVVVNPLLIANYGKLSLRKTKTDKKDALVIAHFLLSHRDTISQCSVSQSHQDLRDVAREREFTGKMIAGMKNDIKRMLQSTFPELEKLVNVFSDTMLHFLKRFPSARLIANAGKDDLQQAFVHTDRRMRLAVRPEKIRETALTSVATNSPAKELLLPGKIETLLFLQQRLDELTTLMVRLCKTMAEEDLKIITSIDGINTKTAAPFIAELGDWSNYQSYKKLIAFAGIDPSIHQSGKFQGGSRLSKRGNRHLRRIIWLMTFCAIRMEGPFKSYFLRRKSEGLPFKKALFATAHKLVRVIFAMLQKRTYFMADQIA

SEQ ID NO: 43333 - protein, 413 aa, unidentified
MIVGIDVGSEKHYFRAFHWRGIELTRKPVAFSNSMEGFNSFYNTIVELMQKSEFEEALVGIEPTGHYWFDLGQFMGEKNIKFVMVNPHHVHKTKELDDNSPSKNDRKDPRVIAGLVRDGRYFYSYMPTGVYAELRNASNRRFVLVEEQTRAKNRLQKWVAVYFPEYKGIYTHIDAKGGLLVLKQAPTLEEIVRLGVEGIIKIWKDAKLRGNGHKKAMLILNAAMKSIGLKAGLTEARMEIQDLIEDYELQTKRLERVNDLIKELCQQVRYADKLLEIKGIGITTVAGFIAEVGDITRFDSTKELQKLAGLELVADSSGKHNGKTKISKRGRKRLRYLLFEAAISVVGKNEEFKEIHRYYTTREKNPLKKMQSLITVAYKLIRVFHVILTKGISYDASKMLKDIRHPGEQLKAA

SEQ ID NO: 43334 - protein, 377 aa, unidentified
MRKNIRFIGLDVHGETIAVGVAEPGGEVRSLGVVPNRPESVRKLVKKLGPASSLRACYEAGPCGYVLYWQLTQMGVHCDVVAPTLVPIKSGERVKTDRRDALKLARSYRSGDLTPVWVPDRDHEALRDLVRAREAAKKDQLRARHRLQKLLLRRGLRPPEKMKSWTMQHLAWIRSLHLQPPALEATLLDYLSEVDHAGERIKRLERALDQAIAAAPPAIRAVIDGLQALRGIARISAATIVAEVGMLSRFPRPKQLMGYTGAVSREHSSGDRIRRGAITKTGNAHLRRILVEAAWSYRYRPAVGRQLRARQAKQSAEVKEISWKAQHRLHYRYARLAGRGKPKQQVVTAVARELAGFIWAVGVQIEKQLAIGDVRTA

SEQ ID NO: 43335 - protein, 382 aa, unidentified
MQSIDNVNPTIHLAIELSASSWLIAARVPGSEKPYLHRIDGGNTAALLALISSLRARVARRLDAAIEVICCFEAGRDGFWLHRLLTAHGITNYVLEPTSILINRRARRAKTDRLDAIGMLRVLAAYLRGDRQSCSMVRVPTPEEEDAKRIHRERENLVQERLRIENRIEALLFTQGIRKRPSLRSWERDLANLRTGDGREMPRHLRAELNRLRRRLVTILELIREVEAERDKLVVTTLQDRTSRKIVALCRIRGLGENFAAVLTREVFYRSFGNRRQIASYVGITPMPYQSGGMDRDRRISRAGNPRARTTMIQLAWLWLRYQPGSELAEWFRKRVGTLAGRTRRIAIVALARKLLIALWRYVETGVVPAGVEIRTETVVAA

SEQ ID NO: 43336 - protein, 343 aa, unidentified
MDKMDHAGIEVSSEELLVALRRDGQMLPLKSFPNTESGHQALAAYLVRKERRVRVCMESTGVYGLDLALHLQQQAGIEVMVANPRAVRHFAQALMQRSKTDPLDAVMLLEFAARMEFQPWQPPSMTVLHLCAMARRLEAITDLCVAEKNRLHAASAAQALPGVIRQDLKRSIAFHERAAERLTRQARKLITPDPLLQERFEALDSVPGIAQTSAIPILAELAMLSPDLDVRQWVASAGIDPREYSSGRSVHKKVRISKTGNRHLRRALYMPALVAVRHDPYLRAFYEHLLAKGKFKMQALVAVMRKLLHAIFGMFKHHQLYDGSKLVQLPAAARTAQTSTEAA

SEQ ID NO: 43337 - protein, 387 aa, unidentified
MIYVGIDIAKQTHYAAIINSDGEVLVKPFAFSNDHSGFQKLLKHLDSYSKEELYIGMESTAHYAENLTSFLFTRGFQVCIINPIQTSSLRKSNIRKTKTDSVDTYLIIKALTLNHYHLYSERDYNSLQLKNLCRFRQKLMKARTKVKIQLVTYVDLLFPELQYFFKSGIHGKACYTLLKEQPNPDRIAKMHLTRLTNLLSKSSHGHFKQSKAVHLKELASQSVGIKNDTLSLQILQSIKQIEMYTEQLAEVDQSIHEIMDKMDSVIKTIPGVGAINGAMIIGEIGDISRFDKPCQLLAYAGLDPSVYQSGNFTAARTRMSKRGSKLLRYALINAAWQTTLVNKTFKEYYDLKVSQGRRHYNALGHVAHKLVRVIHKMMSSNVEFNLA

SEQ ID NO: 43338 - protein, 447 aa, unidentified
MLMEKKKTLRRADFNLIRSNAAGIDIASEVHYVAVPEDRDVQCVRKFGSFTEDIHLMARWLKQCNIDTIAMESTGIYWVQPYLILEEYGFNVCLVNARHVKNVSGRKSDVQDCQWIQQLHSYGLLNPSFQPENLIRELRAYMRHRKHLTQSTANQVLHMQKAFELMNIKLHDVISDITGKSGSQMIQAILKGEQDAIKLAQLANGRIIATQEQIAKSLTGVWREEYLFELKHAFELYQYLGTLIADCDVQIKKVMSRLAIEGHNKNIERHKRPTKNSFHFDGTMHLVQILGIDLTKIYGINELTATEIISETGTNMAKWPTEKHFVSWLNLAPNNRASGGKMLKPRKSNKKNKAGQAFMLAAATLKNSEHWLGHFYRRIKARSGAAIAIKATARKIALIFYKMLKNGIEFNPIPIETYNQYFKERRMKSLEKQALAFGYKIVPESVS

SEQ ID NO: 43339 - protein, 342 aa, unidentified
MKDRIVIAADIAKNVFECVKFKNDRQVGKVKRYKRDQFSALLRSQEKFTLVMETCSGAQHWTRLAKQHGHEVVLIPPKVVSPYRHGQKTDANDAMAIYEASRRHQLKASVQKTVEQQGLSALESVRSHYQDRKKSLGNAIRGHLAEFGIVMPKGYKSLRSQMPLILEDAENGVPMSARLAINEYWEDWQRANKKVLKLEKEKLKELNNFKAAKELLKMEGVGPVITSGLICVLGDGSAFNRGKDAAAFIGTSPKQHSSGGKEIIVGISKTTGHKKLRAALIQGARSVILRLKAKSEPSSEKERWLAQLIERQGENRAAVALANKNVRIAWALIAHNRQYIAA

SEQ ID NO: 43340 - protein, 339 aa, unidentified
MEIKLIGVDTSKHVFALHGVDAAGQPVLRRELRRAQLEPFFAKLAPCEVALEACGGSHDWARRLAKLGHRVRLIPPQYVKPFVKRGKNDRADAAAIAEAAQRPGMASVPVKSAETQAQAMLLKTRDLLVRQRTQTINALRGHAAEFGVVVPQGTGKVAALLAAVAADPDVPAAAQAMLALLGRQIAHLDAEIDALETQLLALHKANPLSRLLAGVPGIGPITALSLALLTEPGQFRSGRHFASFLGLTPKQNSTAGKTRLGRISKAGNARLRTLLVIGATTVIQHARPGSRSASPWLLSLLARNKSKKLAAVALANKMARIVWAMMTRGEAYRQPPVSA

SEQ ID NO: 43341 - protein, 416 aa, unidentified
MSRTPSASSEEGATIKYVCGIDIGSQSCAGCICRPDKSVVLKSIMFANARDGWQTWEEKLNRLDVPPSQILIGMEATSRYGENLYHELEQRGYVRRLLHPGQTHHFHQQRGLRAKTDRLDAMTIARVLLSGEARIGYVPSEQVAVYRELVRLHTQLSDTAAGYQNEIQALVVVLFPEFTQVFADPCLPTALTVLKAFPSAQALTEAGVEPLFQLLRAQPAAHYGRPTAQKLIAFAQQSGSSGRAIAGRSVSLRILCDQLEHTRTNLARLDTEIEQLLSTDSGVKGLQQVPEFGMKTLAVLRAELGDVQRFARTDEVIAYGGMDIEIKESGLWKGKAKLSKRGSGLLRRVLYMTALRCIHRKDSAFGVYYQRLVERGLKKGSALMAVMRKLLAVAAHLLMHEGEEYDPSKVCGSSAG

SEQ ID NO: 43342 - protein, 424 aa, unidentified
MKVTYPTCCGVDVHKSFLVATIIKSNGGIEPSYQKKRFSTFNNSILDFKSWLLENECHDVCMESTGKYWVPVFNLLEDQINVTIANPKWVKAVKGNKDDTKDSKWIGDLFRLGLVKGSYIPCKSIRILREYTRYRYKLVSCRSSEKNRYQNALTVCNVALDSVVSDIFGKSSSSIIDYLLEQSGTTINHEEIASKLLKRLKSKEDVVIESIEGYQMTDAQKYRMRLVRAHIDYITAEINDVDKQIESLISSVPDYVKAIRFLTTIPGVKHDSAITIISEIGIDMSQFCNSKRLCCWAGLTPGNNESAGKKKSVRITRAGIYLKPALVQCAHAAVKSDKSPYYKKKYESLVKRRGKKRAIIAIARMILTAIYQMLSTGEVWNPSDLYKIDMPAPLVEKQKAKAIKQAKKLLQKEGLLPPDEPLAS

SEQ ID NO: 43343 - protein, 417 aa, unidentified
MTRRPDTLVSPDGRPGPEQRRDLIGARRRWRDPSQYRPFSAAPRVEVTATSKGAWDVTTISAERPDTEVAVILGVDTHLDFHAAVAVDHLGRRLGEASVPTTVKGYERLLCWAEGFGPVRCAGVEGTSSYGAGLARHLRAREIEVLEVERPKHRRRSSRSNVEKSDPSDAERAARAVLSGEASGVPKSGDGRVEMIRALRAARRSAIKARTQAGNQLQGLRVTAPEELRNRLCGLSTKELVSVAARFRLGDGPRNVPTATKFALRSVARRYEVLSAEIAELEAHLDRLVAQVAPELLSLPGIGTENAATLLIVAGDNPQRLRSEASFASLCGVAPIEASSGKVVRHRLNRGGNRQANRALYMICLARMRRDRRTQEYLARRTAEGKSKREIIRCLKRYVAREAYRVLIHSISGSSAA

SEQ ID NO: 43344 - protein, 415 aa, unidentified
MALKIVYKICCGIDVHKTFVVACIASTNDKGVTSYESHRFSTYTSGLKTLLQWLIDRNCKDVCMESTGKYWIPVYNILEKGCSIVLAHPKYVKAIRGKKTDKKDAKWIADLFKHNLVAGSFMPPSDIRQLRDLMRYRFKLTCFKSSEKNRLQNCLTVSNIQLGNVVSDTFGKSAQAILDKILENPADTSFDLEPLVFKSLKKKLPELRDAIDGYITPEQAGKLKVIKTHYEDLESRKAELEELILALAAPYQQELTILQTAPGISSPFTAIGIISEIGTNMEAFPSAKHLCSWAGLTPTNNESAGKKKSVRVSKAGCYIKPLLVQCANAVVKSTKHPEMRNRYLRLKKRRGHKKAIIAIARMLLTALYHMLKNGENYNAELYQKSDLLPVDREITVEQALMIARNQGYKIKSATA

SEQ ID NO: 43345 - protein, 350 aa, unidentified
MVVVGADVHKRSHTFVAVDEAGRKLGEITVKAVAEGHDKAVRWAQERFGPELVWAIEDCRHLSARLEIDLLDAGQRVVRVPPKLMAEQRRTARTRGKSDPIDALAVARAAVREPDLPVASHDEASRELKLLVDHREDLVRQRTSTVNRFRWHLHRIDPTLDPAPKSLNIAKTRARLRAVLADVAGIDARLARELLEDIEALSRRADALEKEITVLVGQQAPQLLELPGCGVLTAAKIVGETAGIDRFAHEAKYAMHAGVAPIPVWSGRTHGRVRMSKSGNRQLNAALHRIAITQVRLGGMGRAYYDKRLTAGDTRTEALRCLKRRLARVVFNTLKNDHSTAAAPAYAAAA

SEQ ID NO: 43346 - protein, 457 aa, unidentified
MRKKGKRTSGIEEAHPFAGMSKVNPNAAGVDVGAVEIVVCAAGDETTQIVKAFGNYTVDLQAIGKWLKEHNVKTVAMESTGVYWIPLFEELERQGFECLLISSRSLRRVPGRKSDIIDAQWIQTLHNYGLLESSFRPQGELIALRTLLRHRGQLLEHRSPHIQHMQKALLQMNVQLSQALSDVMGDTGQAIIRAIVEGERDPHKLAAFRDRNCKKSEEEIGKALTGTWREEHLFIIKQSLEMYDFYTKQIEVCDAEIDRMYALTRPDWKADDLPPLPAKKRNSHSKNAPQNTEDIRKHLKRISGVDISVVDGFGVSLAQIVLMEIGTDTSKFPDEKHFCSWLGLAPKHEISGAKVLKNKTLKTKNRAGQAFRMAAQSVKRSDCVFGALYRRLRSRLGPPKATVATAHAIARVVYRMLKYQVEYEPLSVNEYEKKYKEQQIKYMTKKAAKLGFQLVPA

SEQ ID NO: 43347 - protein, 442 aa, unidentified
MPHATSSAPLEPDWAAFVGLDWGDEKHYWKLRDAHSQQSQEGVLQNTPEALDAWAAELNVRFGGRPIAVCLEQSRGAVVYQLSKYPHLILYPVHPTTSARFREAFYPSGAKSDPQDGDVLLDLVEHHRDRLRRLDPDTPETRLLQMLVEQRRAWVDEKTRHSNRLTGWLKIYFPQVLDWIDDIDSPLGCDLLDRWPTLEELQKSHPGTLHTFFVQHNCRSEKRMQERIQAIYQATPAIRDTAMLEAGPAIVKQIVAVIRTLRANIDVLDKRIASLVSTHPERALFEALPGVGPALLPRLIVAFGTKRERYTCADQLEAYSGIAPVTQQSGKSKWVHFRWACPKFLRQTLHEFAAHSIAKSVWARAFYDMQIAKGKGHHAAVRSLAFKWIRVLFACWKNHTPYDEQTYLRALQNNGSRLSQILATQLTWKTVGGFQKLCSENA

SEQ ID NO: 43348 - protein, 320 aa, unidentified
MEQKPTYIGIDVAKAQVDVAVHPTGMRWQAPSTEEGVQELISRVEALQPTLVLLEASGGLEIPLVAALANAHLPVVVVNPHQVRDFAKATGRLAKTDSLDAQVLAHFAEAVRPEPRPLPDTEARALAALLARRHQLISMLVAEKNRLGKALPSVRSRIQTHITWLERELEDTDDDLQTMLRQSPVWCEKENLLRSVPGVGPQLALSLLAYLPELGTLDRKRIAALVGVAPFNRDSGPFRGRRKVWGGRVRVRTALYMATLVASRHNPVIRAFYQRLLAAGKPKKVALTACMRKLPTILNAILKNSTPWQAAIPQITGPCS

SEQ ID NO: 43349 - protein, 290 aa, unidentified
MSQVVIGMDPHKRTATIEVMAGDEAVVGRGRYATDAAGYAAMLAEARRWPRRMWAIEGCQGIGRHIANRLLADGEHVVDVPPKLSARTRVFATGQGRKTDATDAHSVALAASRMQGLRPAVDDQQLAVLRILADRRRSLGEDHTRMICQLHRLLLELIPGGAKKALPAAQAKALLARVRPRDAAGKARRRVAAELISDLERIHQRKKAANKELNELLKASTTTLTTLHGIGPSGAARLLVEVADVTRFPDKAHFASWNGTAPIDASSGDQVRHRLSRAGNLCRPETGSRR

SEQ ID NO: 43350 - protein, 338 aa, unidentified
MALYCGMDLHSTNTWVFIGDERDQSLFSRRLPNCLTSILEVLEPHREGLANIAVESTFNWYWLVDGLMDHGYRVQLVNTCAVKQYDGLKFTDDRHDARWLAHLQRLGLLPTGYIYPQEDRPIRDLLRRRTKLVQQRTSNYLGLKNILARNTGEMPSRKAIQELEPERVREILGREDLSLSVEVTLAVIETINEQIARLEKLAVERANPRNEFRILKTIPGVGKILGLGIMYETGEIGRFPSAGNYASYCRCVPAKRTSNFKVKGKGNRKNGNPYLSWAFSEVAHFARRFQPQAQRFYDRKAARTKPIIASRALAHKLAKAVYFMLRDQVPYDVGLLFR

SEQ ID NO: 43351 - protein, 334 aa, unidentified
MSKNEGSIQSDEGSTMQDIKVLGIDLAKNVFQLHGTNAKGKCVLRRRLSREKLVAFVSNLSPCLIGIEACASAHYWGRSFEQMGHTVKMMAPQFVKPYIKSNKNDSNDARGIAEAVTRPDMKFVALQKIEQQDILLLHRARELVIKQRTAQVNQIRGLLSEYGIIISQGITNVEMLLKILEDHENKLTSTSKGIFLRLYEQFNIYDEQVSVYDRELEHLAKQNIKCREIMKIDGIGPITATAAIATIGDANLFKNGREVSAWLGLVPRQHSSGNKIRLSGISKRGDCYVRKLLVHGARAVVNVCDKKTDSKNWFCCKKINWNKKIALNVYYYQL

SEQ ID NO: 43352 - protein, 320 aa, unidentified
MMAQNDLVVAGIDVAKDKVDVCVRSLSLKRTFASTAEGRREFTSWLRRRKVGKAVMEASGGYERDWAKALRNAKIEVRIVDPKRVRSFAQSAGRLAKNDTIDAEMIAWFAETFDEARGQAYDATREQLHQMVNARQAMKDMQTKLESQGEHALPATVQRMHARIMKTIAVELVKIEAAISAMVQATPHFTELAEIIESVPGIGRTTSAALIAAMPELGQANNKIVAALLGVAPYDDDSGRRRGERHIKGGRRRTRNVFYMACLGAATQHNPVLKAFYDRLVAKGKQKKVALVACMRKLISILNIMIERRQKWDASRYAVS

SEQ ID NO: 43353 - protein, 341 aa, unidentified
MGQASTIGLDIAKWVFQAHGADATGRVVFRKRLVRAKVLEFFAGQPPCLVALEACGGAHYWARELGKLGHTVRLIPPAYVKPFVKRQKNDVADAEAICEAAQRPGMRFVPVKDEAQQANTVVFRARDLLVRQRTQCINALRGHLAEYGHVVPQGPAHVDSLVALVEDPKSSVPESARGILQVLIRMLNALEEQLTELDGEIARRAKADPVARRLMTIPGIGPIAATAITALVPAPEGFRAGRDFAAWLGLTPLQKSTGGKHKLGAISKRGERTIRRLLILGASAVVRWATRRGAAAGSWLARMLARKPRMLVTTALANKMARIVWALLVKGGTYRAPAVAA

SEQ ID NO: 43354 - protein, 343 aa, unidentified
MTHPPQLILGIDTHKDVHVAVVLDWLGRYLAAASFGTTDAANSELVAWTQSYGQVTTAGVEGTGSYGYRLAQHLTDQGINVVEVNRPDRARRRRKGKNDPVDAEAAARAVLAGDAHAVPKDRNGTVGELRALVVARRSAIKARTQATNQLRALLVDGDDELRSRLGPLHKAHLARACAQLVPSAGLRLALGSLGCRWLALNDEITNLDAAITGMVRRTAPRLLERHSVGVQTAAQLLITAGDNPDRLHSEAAFAAMCGASPVQASSGKTIRHRLNRGGDRAANSALWTIANNRLMHDPCSRSYAAKRTAMGNSRKEILRCVKRALARELYPLILDALARPPLP

SEQ ID NO: 43355 - protein, 307 aa, unidentified
MQAAGIDVGKANLDLAVDGESGVVRFANSRAGIGKLVKRLEAIGANRIVVEATGGYEEPLLEACCDAGLWIARVNPRQARDFARATGELAKTDAIDARLLALMARMFGDHLRRHVAPPAWQRELRDWLRRRGQVVVLIQAQKQQAAMAPAAVRKLATRTVAALGRELVAIEREMKAMIQEHASPALRSSKGLGPMFQATMLALLPELGHLNRREIAKLTGVAPMNRDSGQGQGKRRIRGGRAPVRVALYMATLSAVRGDPHMKAHYQQLRARGKLGKVALVACMRKLLGIVNAKRRDELRTEGLALS

SEQ ID NO: 43356 - protein, 371 aa, unidentified
MGNNIHTKFVGMDVHQKSISIAIADDGPDGEVRLYGTIKNTAEAIDKVIRKLVSTGTELHFVYEAGPCGFALYRHLTGNGFCCIVAAPSMIPKKSGVRIKNDNRDAISLARLHRAGEITPIYVPDREDEAMRDLTRARNDARIAARKAKQRLHSFLLRNECIYNGKTKWTKSHFNWLAQLTMKHPAQQVAFQEYIDAVNECSERITRLDEQILKAAEEWRWAPTVKALQALRGVSLLTAVNMVAEIGDFNRFQKPKELMAYLGLVPSEHSSGNRIRRGGITKTGNSHARRLCVESAWSYRYQARITQLLLKRHEGLPKDILQIAWKAQLRLCTRYRRLRARGKAIQVVVVAIARELVAFMWDIARRIPAVA

SEQ ID NO: 43357 - protein, 313 aa, unidentified
MIITLRCVGIDVSKHHLDIFDEGIGVSERVANAPHAITELVARWRCDALVVFEATGVYDLELREALCAADIRFARINPARARDFARASGQLAKTDPIDARMLAAFARAMQPATEQVSTPARNALARLAKRRDQLVLMRAQEKNRRSEAGDRAMVERICRLIEVLDREVTEIEADISALIKAEPEISHDAQLMRSLPGVGPVACMQLIAQMPELGHVGPKQAAALAGLAPFNVDSGAYRGKRKIRGGRKRVRNALYMAALNAVRRADRFKVFYAKLRKAGKPAKLALIAVARKLLTILNAIMRDRKAYMPAQQT

SEQ ID NO: 43358 - protein, 370 aa, unidentified
MRIIGCDLHARQQTLAMLDTTMGEVVNLTLMHEGDKVREFYSELPRPALVGIEATGSMQWFLNLMEELGIECRVGHPAQIRAAEPRKQKHDRRDADLILKLLAENRFPAIWLPSKELLDLRALLLHRHQWVRMRVRMQNGLQAIALANGLRRGPALWSDDGQAKIAFLPLLPHAAYRRSALQAMYKNMQSEIENLTRRVAEQAGNRCGARLLMTHPGVGPVTALATEVFLGDPQRFTDSKTLASYVGIIPREYSSGEHQRLGGVTKQGSPLLRFLWGEAGAHAARRDPELKRFYRRKLVQKGLGKARVAVARKLGIRLWIMLRDEIDYQEFCRRGQIQQKTVRPVVGMPETGNGAKSHRPSDEATRLPES

SEQ ID NO: 43359 - protein, 349 aa, unidentified
MMIIGCDFHPGYQQIAMLNKETGELCEKTLSHERKEEVRCFYGALPKPVRVGIEASGQSRWFESLLSALGHEVWIGDAGKIRASCNRKQKTDRRDAELLLKLLVEDRFPRIWVPTAEERDARQLLLHRHKLVRMRTQVMNQLQALALNQGLQRKRKLWSVQGREQLEELALLPWAQRRRTELLEMFDRLHATIGELDRAVEQEAQARPSARRLMTHPGVGPITSLAFVLTLGPVQRFGRGKKVASYFGLIPTEHSSGARAQRLGHISKQGNAFLRGLLVEAAQSAVRHEPEMHRAYERLAQRKSRALAKVAMARKLAVRLYWMLRLNLDYAQWLQGSHAGPPESFCGRN

SEQ ID NO: 43360 - protein, 367 aa, unidentified
MKKISTVVAKQGRNNSQQELTIGLDLGDHNSWYCVLDEAGRIQLEQRVRTTAKALQEVFGTMPRSRVALEIGTHSPWISRLLKQLGHEVIVANARKVRLIGESRKKDDRLDAQTLARLARIDPELLYPVKHRSAQAQADLMMIRARAGLVRARTSLVNTARGLAKSYGERLRGCNVRDMDPEKAENLSPELQRALEPLLATIEELSERIVEYNDRIEALAQTSYPQVDLLKQIKGVGTLIALTFLLTLEDPHRFGKSRDVGGYLGLQPGRRNSGESEPQLRISKEGDPYLRTLLVQGAQHILGPFGIDCDLRRWGLKLAERGGGNAKKRAIIATARKLAVLLHHLWVSGEVYEPLHNSRRLTVAAAA

SEQ ID NO: 43361 - protein, 345 aa, unidentified
MKIIGCDFHPSFQQIAICDLETGEVQERKLSHADGQAERFYRELGEPALIGIEATGNSQWFLDLVQRLGHEIRVGDAAKIRASYVRRQSTDKRDAGHILTLLLEKRFPQLWRPSAAMRDQRQLLRHRDKLVEIRTKVKNSLQHLAMNRGMQKKSRLWTRLGMEQFQQLAMPGWAGVRREDLLHLLKQLTRQIEQLDQAVQQAAEQHPQAQLLMTQPGVGPVTALAFVLTIGEITRFAGSKQLTSYLGLVPSEHSSGSKRRLGAITKQGNCFLRKLLVEAAQTAVRRDEDFRKEYQHRCHHRPKAVAKVAAARKLAVRLYWMLRSNVGYPEIAHIESNPRVPLGDI

SEQ ID NO: 43362 - protein, 414 aa, unidentified
MKQQEVSAWIGLDWADKKHSIHLQVRDGKREHRMLEQKPDVIHEWVAELRQRFQGQRIAIAIEQRKGAVVHALMMYDFIVLYPINPKALARYREAFRTSGAKDDPSDSELLLDLVSKHADKLRAWVPDTVEARKLQLLCEQRRKIVNHRVALTNRITSLLKQYFPQALDWVGDVASIQACDFLANWPTLSAVQRARKETLRKFYRQHNCRKTSVIDERISKISNAVPLTNDAAIIEPLSLSVQIYAGQLRSLIRAVQQFDKQIVETFAQHPDHDVFDSFPGAGQVCAPRLAAAFGTDRSRWQSAVEIQSHSGIAPVTERSGDSKWIHHRLACPKFMKQTFHEFSDQSIRFSKWARAHYDELRSRGKDHHAALRALAYKWIRILFRCWKDRKPYSEEKYLAALRRRGSPLTEKIA

SEQ ID NO: 43363 - protein, 405 aa, unidentified
MDVVNSHCCGLDVHKKSITACAITPKGKEIKTFGTMTHDLFQLVDWIKTKRCSQVAMESTGVYWKPIYNLLELEEIQPMVVNAAHIKAVPGRKTDVKDAEWIAKLLRHGLLQHSYVPNREQRELRELVRYRRSLVEERAREISRIQKVLEGANIKLSSVASDIMGVSGRAMIEAIINGISDPEVLSSLAKRSLKKKKDQLERALVGSVGPHQKMMLKTQLSHIDFIDQQIELLSVEVQQRMQPYEADIELLDTIPGIGRGHAEQLLAEIGIGMKIADQFPSAPHMCSWAGMVPGNNESAGKKKSGKTRKGNKKLRSALVEAAHSAAKTKNTYLSSQYQRLAARIGKKRAAVAVGHTIAYHILNKRVPYIELGADYFDKRKKEIVIKQSIKRLENLGCKVSIEAIA

SEQ ID NO: 43364 - protein, 390 aa, unidentified
MPQANDLSRSLTALDENSTLIAVIEMSQARWLVSAIVPGVERRPSKKLETSEELLLALLHRWRAEAVKAGRSINRIAVAFEAGRDGFWLARWLRARGVEAHVIHATSIAVSREHRRAKTDRLDAALLQRAFLGWLRGERGHCSMVTIPSFEEEDAKRPSRERESLVGERTRIGNRIKATLARLGIRGFKPAVRRAAERLALLRTAEGMPLPPNTLAELNRDLTRLRFVSDQIAEIEAARLERLRKEPDRHCHPMILLLARVIGIGIETADMLVQEVLSRKLRDRRAVARYGGLTGSPAESGARRREKGLARAGNARVRRGMLQLAWRFLMFQKDSALAQWYRARTTDARGATRKTMIVALARKLLVALWRLVTTGEVPHGVVLRPATTAA

SEQ ID NO: 43365 - protein, 371 aa, unidentified
MKNYSKYVGLDVHKETIAVSVAEANGGEVRYLGEIPNTPEAVAKLARQLKKDGATPSFCYEAGPCGYGIHRQLQELGLDCQVVAPSLIPRKPGDRVKTDRRDSLSLARLHRVGELTAVWVPDGAQEALRDLTRAHEDMKSLERKTKQRLQALLLRHRKKYGGKVNWTQAHYHWLETVKFDQPVQQIVFQEYVDSIQGLAKRVKALDDQLETSAAESVFWPVIEGLMALRGINLLAASTIVAEIGDMKRFAGAPELMGYLGVVPSEHSSGPTQSRGGITKTGNGHVRRVLVEAAWTYRFPARKTRHLQKKAQRAPEVVQEIAWKAQKRLCGRYRLLEGKGKPKQKVCTAIARELSGFVWAISQALPGPGAKA

SEQ ID NO: 43366 - protein, 408 aa, unidentified
MKLFVGIDVSSKKLDVCFLDSEDTRLKEETLSNDLNGANQIKETILTYNGQFHYEKIVVGMESTSVYSFHPSTLLDNDKDLQRIGAEVVVQNPKAIHRFKGMFDEDKTDRIDAFRIADFLRFGRYNKTVIKEEKYVALQRLTRSRYQVIQQLTECKQHFLENLYYKCNTLSNDIDTSIFGAAMMELFADSLSLDDIAHMELEELALFLHKKGKGRFSDPEKLAKNIKKAIRDSYRLGKVVQESVDMVLATYARLVQTLKKQIKELEKGIEALFVILPEAQCLKSVPGIGSVYAAGIIAEIGQIERFETQAQLAKYAGLYWKRSQSGDFESERTPRVKTGNQYLRYYLVEAANSVQRNEPVYHEFYLKKYKEVPKYKHKRALVMTARKLVRLVDVLLRNHQIYTSERSV

SEQ ID NO: 43367 - protein, 334 aa, unidentified
MEKITTVGIDLAKSVFSLHGVDGAGHVVFKRSVRRDQLVEVVAGLSPCLIGMEACSGAHDWGRRFQEYGHTVRLMAPKFVAPYRKSGKNDGNDAEAICEAVTRPNMRFVPVKSIEQQALLAMHRVRQGFVVERTATINRLRGLLTEFGVVLPLRSVTVRRQAAAAAENLPELARRAISDLLEQLRLLDERIGGYDREIEAQAKLCEPAQRLMKIRGIGPTTALAIVATVGNAREFKNGRQFAAWIGLTPSQYTTGGKPRLGHISKRGDAYLRNLLVQGARSVLNSAGMHQDRMSRWILELQPRRGYYRTLVAIANKNARIAWALLAKNETLRAV

SEQ ID NO: 43368 - protein, 349 aa, unidentified
MVVLGVDAHKRTHTVVAVDQLGRKLGERTTGTTSQDHLGLLRWAEKFGQQRLWAVEDCRHLSRRLERDLLGAGERIVRVPTKLMAHARDAARSYGKSDPIDALAVARAALREPQLPAAQLAGPARQVRLLVDHRDNLVAERTRAINRLRWHLHELDPSWQPPARTLWRPKHLQAIGDRLAGVDGTVARLARGLVERCRQLSIEIAAIDKELEVLVGPLAPALLELCGCATITAAKIVGETADVRRFRSRHAYARHNGTAPLPVWSGNRVRHRLSRAGNRQLNAAIHRVAITQAHYHRDARAFLERRRAAGDTKAESLRALKRRLSDVIYRALLLDAELNPAPPTVLDAA

SEQ ID NO: 43369 - protein, 374 aa, unidentified
MRDDSEAFVAFDTAKLRNAVAIAEGGRSGEVRFLGEIDNTPDATTRLMKKLAGKYERLTFCYEAGPTGYGLYRQITALGHACVVVAPSLIPKRAGDRVKTNRRDAISLAAQLRADELTAVWVPDARHEAMRDLTRARGSAVEDLRSKRQQVSGFLLRLGRHYPGKKTWSQGHMAWLASQKLEHAEQRIAFEEMVLAVRQAEERIARLEAAIRAAVPDWSLAEVVEALMAMRGIDMVAATTFLAEIGDLSRFRTPRELMGYLGLVPSEHSTGETIKRGPITKTGNRRARRILVECAWSYRHPPRIGVEKQKKVAAAPPAVRAIAWKAQHRLYGRYRALARRGKLKTVIVTAIARELAGFIWAVNRATASAGVAAR

SEQ ID NO: 43370 - protein, 458 aa, unidentified
MAHRKKKIPAQLVEDEDYQLRHEKVAGIDIAKDKGDVCTRLPAAREGGRRRSRVEENVPARARDILELGARLLADGVELVVMESTSDYWRIWYYLLESLGLAVALVNSSHARQLAGRPKTDRLDAQWLARLAEMGLLRPSFVPPPEIRALRDLARTRLQLVRDRTREWQRLEKLLEGALVKLSAELSSLAKVKSARVILEALAGGERDPKSLAGLALGSLRGRRGDLEAALEGMMPRGHHARLIRIHLDHITFLDRSVAAVEDDIAASLEEIPAARGIDAAGVASPDPGPGAAVLPADARLAEIPGVTLDLARAIIAETGLDMSAFPTPGHLVSWAGLAPVTRQSGPRQRKPAKGQGNGYLKGYCTQAANGAGGTATFLGERLARLSRHLGGARARCAVARSILVIIWHLLNDPEARYTDLGPDWHARKTDRDKKIRGHLRGLQALGIDTSSLTATAA

SEQ ID NO: 43371 - protein, 406 aa, unidentified
MFYLGIDVALNTHRLVMLDASGERVSNGISFQNNTADFEKVLVKLKELSINPDNSIAGLEATGNNWENLYCFLTGNKFKTILLNPHQTNKFREALRKKAKTDDIDAFVIAGLLRSNEFASSYVPEDKIQTLRELTKLRYEFIKDHKNYQRQVLALLNLIFPEYRKTALKNPFTIASTAILKAFSTAKHLSSAKPKHIEKIVRSIKGNNFNVKDIENLISIAKTSVYSGRCQESRALTLNILLTQVENFGKSIQQLEEQVNQILSPESSDDVNSFPGSNLLTIPGVGPKTLAAILSCVGESGQAFSDGVKLIGHIGFFPQIYESGETRRANKLSNKGPAYLRHALYMASVACVKHNLQLRGLYHTKISQGKKPKQALICVAKKLAHLCLSMLHSGQEYNPARVFSYV

SEQ ID NO: 43372 - protein, 374 aa, unidentified
MLKTTFIGLDVHAKTVTAAALNADTGEIDQATMPADNPTVISWIKAHGDDTAVTYEAGPTGYGLARDLTDQGITCTVAAPSKLLRAPGDRVKTDQRDALGLARMLSLGEITAVRVPPIGQEGLRDVSRARQRAVLDLTHARQRINAMILRHGLRYPKDTKWTQVHHDWLARQRLEPAASQQALSAELETETLLMAHVRRLDATIADLVAEAEETPIIDALMCFRGISITTGFGLAVEIGDWTRFTGATIGSYLGLTPSEHSSGQSRSQGAITKAGNTYARKLLIEAAWSHARPYSRPGARLLRQFDKVDAATRVRAIEGNQRLHRVWANFDARKKRRVKANTAVARELAGWCWSVAAPLQMNVTGPEGQEAQMG

SEQ ID NO: 43373 - protein, 351 aa, unidentified
MTELKLIAMDTSKHVFSLHGVNERGEVVLRRELRRQQLDAFFRKLPPTEIVLEACGSSHHWGRTLAALGHRVRLIAPQYVKPFVKRGKNDRIDAEAISEAALRPNMRFVPVKSVEAQADAMILSVRELLVKQHTQLVNALRGHASEFGVIAAKGTGHVEGLLERIAADPAVPAPAQAMFVELGERIDELRTRLAELDRRLAALHKACPWAGLQPDPRANPLSRQLAEVPGIGPIGALTLALTVDASQFHSGRHFAAWLGLTPRQNSTGGKTRLGGISRQGNERLRQLLVLGATSVVRLTKPDYRHASAWLLALLQRRPRKLAAVALANKMARVVWAMMTSGEAYRPQPAAG

SEQ ID NO: 43374 - protein, 373 aa, unidentified
MRFIGIDLHTNRFTCCYRDERSSVENPKDRTIETFAIDAQGLDSFYRTLTSDTYVLVEATITTFSFVRLFKDRVKEAIIANTYELKQVSLARCNTDKIDADKLCRILKAQVLSGEQLVSPVTIPPEEIQGLRGLFTTYRLFRKQNAQLKNRIHSLLKEHLYGFTQEEIFDKKSREKIRAVAPGKELNFQVNLLLNRLERDEADVEVLKDQILVKAEPFMAQIEILTSMKGISVFIAIAIIADIIDVSRFRNSKAFTSYLRSAPRVSNSNTSVHIRGINKKGRKLSSTLLTQSLNHVLDSSHKLRRWYEELCEHKKPGLVRTGLRRRVLAEIYQMLKKGEYHYGVDPKKHEAKMAQYRRFLKKQKNVAVLKKIA

SEQ ID NO: 43375 - protein, 347 aa, unidentified
MKKFIRIGIDLGKRYFQVHALLGEDGRAVTRKLRRDSFLAFFAEAGPCVIGMEACGSAHYWGRELRAMGHDVRLIPPIYVKPYVKRGKNDAVDAAAVCEAVSRPDMRFVPIKSAENQASLMLHKTRELLVKQRTMSVNALRGHLAEFGVVAAKGIGHAGELLEKAKNDATLPEIAKATVKIFVQQLEAISAAIVALDKEIAAVHAQSEISKLLAGVPGVGKIVATAIVASVPDPSVFKSARDFSAWLGLTPRQNSSGGKEKLGAITKQGNRYLRKLLTLGATSLLRVAGKRNGVLRDWLVALLARKPARLATVALANKLARIIWAMMTTGEAFRTQIMARTKEPSMA

SEQ ID NO: 43376 - protein, 449 aa, unidentified
MKILAIDLGKFNFVCCFYNAKNRRAKFLTTPTTREHLNVIFEDCGADLVVMEACGPSGWINDLAQASGLTTLVCSTNEEAWRWANVKRKTDKDDALKLARMAAMGELKGVHTPSAEHREFRSLVKYRKTLDGRINKTKNTIRAWFVNHGIEIDKGDKAWHTGRERINSFRKPIKDCAPDELWRGQLDIELTILDSLSEQLDTIVKRLEAIGKHDKRIKRLRTIPGVGPRTAEILVACIDDPDRFENGRQVSAYFGLVPRQYQSGETDRNGRITKRGNPLARTILVECAWASLRYNPWAKGIYERICGKQKTRKKKAGIALARKIAVIAWAMLRDEKDWNPKRMIEVTESYGKMPEKLKESLTNMKPKENSDQRKARLRREARQAKAATAPRTSKTIASKAQHPPVSTASTKATGTAKQKTPKRKAKQAKASRPLSRSKPKRAGKLVSRD

SEQ ID NO: 43377 - protein, 337 aa, unidentified
MQILYERCAAVDVGKDEVAVAVRLPGEESDGRQTVKRTFTTFYGVLRHAAQWLAGLGVTQVAMEATGVYSMPVYHALVEHGGFERVLVCNAGHVRNLPGRKTDLSDAQWLVQLLECGLLRGSFIPPVQVKAARDVLRYRRKLVESRTSELSRLGNVLQDAGIKIDSVASSLTTQSARAMVEALIDGERRPGVLADLAKGRMRSKIADLARAVEGRFDEHHALMCGLHLTHLDQLEEMIATLDAQVEEMMQPFRAERDLLSTIPGIALLAAASIISEIGTDLLPYFPTDAHLASWAGLCPARSTGGWSGGSVGSAVPSRNRKRSSRSRTSCWSSSGMC

SEQ ID NO: 43378 - protein, 374 aa, unidentified
MRDYSEAFVAFDTSKSRNAVAIAEGGRRGEVRFIGEIENSAAATAKLVRKLAGSHGRLTFCYEAGPTGYGLYRQIVSLGHDCIVVAPSLIPQKPGDRVKTNRRDAVGLAKLLRAGELTPVWVPDPRHEAMRDLARGRGAAVEDLRRKRQQVSAFLLRQGLHYAGKKAWSKAHMSWLVSQKLEYPEQRIAFEEMLLAVRQAQERIERLEEAIRVAVPGWSLAEVVTGLMALRGLDLISATAFLAEIGDLSRFRTPRELMAYLGLVPSEHSTGDKVKRGPITKAGNRRARRTLVECSWSYQHPPRIGKKKQEKVAAAPPAVREIAWKAQCRLNGRYRMLIRKGKLKTVAVTAIARELAAFIWAINREIATARAAAI

SEQ ID NO: 43379 - protein, 348 aa, unidentified
MSKISQYVGLDVSLKETSICVIDEAGKIVWRGRTDTTPEAIASAVKQHAPNAVRIGLESGQLSTWLFHELKAVGLPVICVDARHAKAALSLKVSKTDANDALGLAQIMRVGWYREVSVKGLDCQAVRTLLVVRAQLVSQVTTLKNCVRGVLKTFGLVLPKGLRSQFPGRVRAAIDGHPVLGAIIEPTLLVLEATRAQLIVYDRAIIQRARSDDTARQLMSAPGVGTVVALAYMTGVEDPARFKRSSSVAAYFGMTPRRYQSGEVDRAGHISKCGDGMVRGLLFEAAKVLLSRSARPSALKTWGEALGKRIGPKKATMAVARKLAVILHRMWITGTTLQWNAEAASLAA

SEQ ID NO: 43380 - protein, 368 aa, unidentified
MSNGSTERQRMTAGLDLGDKYSYLCLLDTGSGEIVEEGRVRTTPEALKRRFETERPLRIAIEVGTHSPWVSRLLEECNHEVLVANTRKIRLIYGSKRKTDKLDAQKLARLVRLDPQLLYPIKHRGEDSQAHLAIIRSREILLRSRTQLINHVRGTVKAFGSRLPKCSTRSFHHKAGSEVPAELEEALEPIMETIASLTERIEDYDRRIEQLAAEHYPETELLRQVRGVGALTALSFVLTLEDPQRFESSRSVGAYLGLVPGKDQSGEQDPGQRISAEGDQMLRRLLVGSAQHILGPFGTDSDLRRHGEKIASYGGKRAKKRAVVAVARKLAVLLHRLWVTGEAYEPLRNSEEERQPERSPTQGKEEVA

SEQ ID NO: 43381 - protein, 419 aa, unidentified
MGRLKIVYPVCCGMDVHRDFLIACIAATNAQGVTEYQSRRFSTYTGSLRELRDWLLANDCKDVCMESTGKYWFPVHNILEESCHVVVSHPKFVKAIKGKKTDKKDAQWIADLFKHDLVRGSFIPPKDIRRYRLCHYWVKLSSYMTGEKNRAQNCLTVSNFKLDDVFSNVFGKSASAITTQLLEHPGEQFDVAPFVDGRCKTPIAQIQEAVDGIFTYEQAEKLKIIRGHMDSLERHKAELESLILEIAQNYLPQIELLLTVPGIHDAFTAIRILAEIGADMTVFDTSKHLCSWAGLTPQNAESAGKKKTTRIGKSGAYLKPLLIQVALAASRGEKHPEIYGKKQALQKRRGKKKAIVAIARRLLTAIYHILSKNEPYNPAAYIQEDKNPMARQISQEKAFEMLARMGFIVSNPSPLSSSG

SEQ ID NO: 43382 - protein, 416 aa, unidentified
MEVIVSRCAGLDVHKNTVMACVRVPGPNGGRTSTVRQFRTFTAGLRQLRDWLVAEQVSQVVMEATGVYWKPVWHVLDATAGLELMLVNAHAVKNMPGRKTDVADAVWLAELGECGLLRPSFVPPPVIAQLRDLTRYRKKLIEERARETQRIQKLLEDAGIKLDSVVSDILGVSARQMLEALIAGVRDVAALAELARTRMRPKIPQLRQALEGRFGAHHALMLRMHLEHVDQLSVSIDRLDSEVDRVIRPFSSALQRLITIPGVGRRTAEVIIAETGADMRRFRTAGHLASWAGMCPGNHESGGKRRSGRARKGNAALRAALCEAAWAASHARSGYLPAQYRHLLRTFGKKGQTRAVFAVGHSILVIAWHLMAHDRDYADLGGDHFTRATDAEARQRYLVRQLEALGHKVTLEPAAA

SEQ ID NO: 43383 - protein, 364 aa, unidentified
MKVTFQTCCGVDVHKSFLVATIIKTTGGIEPSYQKRRFSTFNNSILEFKKWLLENECLYVCMESTGKYWIPVFNLLEDEINVTIANPKWVKAVKGNKDDTKDSKWIGDLFRLGLVRGSYIPCKKIRILREFTRYRYKLVSCRSSEKNRYHNVLTVCNVALDSVVSDVFGKSSTSIIDYLLEQSGTSIDHEVIASKLLKRLKAKEDAVIESIEGYQMTDSQKYRMHLVRAHMDYITAAINDVDSEIESLISSDPDCQNAAELLCTIPGVKHDSAITIISEIGIDMSQFCTSKRLCCWAGLTPGSNESAGKKKSVRITRAGVYLKPALVQCAHAAVKSTNLLTTKRNMNLLLNAVERKEPSLQSQE

SEQ ID NO: 43384 - protein, 462 aa, unidentified
MSINKKRKMSKVSKLPSEFEQININAAGIDIGAQSHFVAVPQGRDPQGRDVRHFGTFTTDLYALADWLKQCGIDTVAMESTGIYWIALFEILEQRGFEVRLVNPRSIKHAPGRKSDVVDCQWIQQLHAYGLLTSAFRPKQDIRVLRAYHRQRTMLVKHAATHIQHMQKALEQMNLKLTNVISDITGVTGMKIIRSILAGERDPQKLAGHRHARCKKSAQEIQKSLHGNWRDEHLFALQQAVELYDFYQAQIQACDKKIQAQLCRFEDCSGTDELPPPPSGKRHRGTKKLSFEAREHLYRMAGVDLTQVVGLDTPTVLTLLSEVGLDMSRWPTAKHFASWLGLCPGSKISGGKSYSSKSKPSANRAAHAFRMAAYSLHRSPSAIGAFLRRKKAQLGAPKAITATAHKIARIFYTMMKTRTEYKDLGADYYQHRYKERMLRNLKRKAKAFGLTIIDQNQMVMEN

SEQ ID NO: 43385 - protein, 363 aa, unidentified
MFTERTSVGLDVHARSVAAAAIDSVTGELRQARLTPSHEHIRSWIGELPGPVAVAYEAGPTGFGLSRVLNDCGVRCVVAAPSKLQRPSGDRVKTDAKDAIHLARLLRLDEVTAVVVPSVEQEAARDLVRAREDARGDLMRARHRLSKLLLRQGFVYSGGKAWTEKHDLWLRRIGRVELVSPATRMTFESDYETVLSVKARRDRLDAAIATMAADSEFTATVRRLGCLRGVGTLTGFALAVEIGDWDRFTGKTIGSFVGLVPSEYSSGASRAQGEITKTGNSHVRRLLVEAAWHHRPRYVAGKTIRDRWELAPPAARIRGDEGNRRLHGRWVRFNERKKRSVIANVGIARELAGWCWSLAVIGD

SEQ ID NO: 43386 - protein, 368 aa, unidentified
MSDIIRIGVDTSKSVFQLHGVDAAERPVLCKKLRRRDFLSFFAQLPPTRVGLEACGGSHYWARELTALEHEPKLLPAQHVRPYVRRNKNDKQDADAVCEAMSRPRMSFVRIKSAEEQAAQMLMTTRQRLIDHRTQLINTIRGHAAEFGLTAAKGPAHVEPLLARVAKDVTVPALAKELFAIHGQEYDRLKIELREIEAKLKVWHRGNEMSRRLAEVDAIGPIGGCLLAIKAADPRAFRCARDFAAWIGLTPKDHSTAGKMRLGVITRAGDEALRRTLVVGATSVIKQVRNGKTHPSPWLRDLVARKPPKLAAVALANKVARIAWKLMVSGERYDAARAGIVSPTARIAPCSRRQGRCAPPAAVACGQP

SEQ ID NO: 43387 - protein, 424 aa, unidentified
MYVLSDKPFTAYIGIDWADSKHDACLQAAGSEQREFTCFLHQVDRIEAWAHSMYQRFGGPIAVVLELSKGPIVYALQKYEFFVLFPVNPSTLAKYREALTPSRAKDDPTDAELALDLLMRHPERFKALQPQSVEMRTLVSLVEQRRGLVNDRIRITNRLRNALKQYYPQTLEWFDHIDTLIFCDFISRWPTLLQVKRARRSTLERFFHAHNMRFAHVLEARLRSIKDATALTLDEAVVTPHRLQALVLVDQLRVTLQAIQRFDDEIAALASKHADYPLFSALPGAGPHLAPRLLVAFGEQRERFRNAAELQKYSGIAPVTERSGKKHWVHWRWQCPTFLRQTFVEWAAQTINKSFWAGAFYSQQRAKGCSHQAALRALAFKWIRILYRCWVTRTPYNEAEYLRALERRESPLLQQFATQNNLTE

SEQ ID NO: 43388 - protein, 326 aa, unidentified
MEHELHYIGIDTAKEKLDVDVLRPDGRHRTKKFANTTKGHDELVSWLKGHKIDHAHICIEATGTYMEPVAECLYDAGYIVSVINPALGKAFAQSEGLRNKTDTVDARMLAEFCRQKRPAAWEAPHPLERALRALVVRHQALTDMHTQELNRTETAREVQRPSIDAHLLWLEAELKRLEKQIKDLTDDDPDMKHRRKLLESIPGIGEKTSAVLLAYIGLKDRFAHARQFAAFAGLTPRRYESGSSVRGASRMSKAGHVSLRRALYMPAMVATSKTEWGRAFRDRLAANGKKGKVILGAMMRRLAQVAYGVLKSGVPFDASRHNPVAA

SEQ ID NO: 43389 - protein, 354 aa, unidentified
MSQQLSTTIAVIGVDIGKNSFHIVGLDQRGAIVLRQKWSRGQVESRFANMPPCLIGMEACVGAHHLSRKLKGLGHDARLMPAKYVRPYSKGQKNDFRDAEAIAEAVQRPTMKFVATKTADQLDLQALHRVRERLVSQRTGIINQIRAFLLERGIAVRQGQRFLRAELPRILAAPPDVLSPRMVHVIEDLAGDWRRLDERIEGLSGEIEAIARRDAGCERLMSVPGIGPIISSAMVAAIGNGDAFPKGRDFAAWLGLVPKQISTGDRTILGKISKRGNRYLRVLFVQAAWVVLIRPKSWERYGLKPWIEAAKKRLHHNVLAIALANKLARIAWAVLNKERNFECNSMDKMASRPA

SEQ ID NO: 43390 - protein, 416 aa, unidentified
MNAVGIDVSSRKSTVAVLRPLGEVVCLPFDVTHDIAGLASLVEKLKALDGETRVVMEHTGRYYEAVEKALHEAGLFVCAVNPLLIKEYGANSLRRVKTDKADAVKIARYALDNWADLRDFTPMDAIRYDLKTLNRQFQLASKQRTASANNLIALLEQSFPGIRKCFDSPVRSDGTQKWVDFAHSFWHVDCVRKQPFAAFCERYRKWCKRHAYLFKLSNAEEVYALAKRAVVLTPKAKVVKVLVQEAANQLSSISRSVEGYRAEMDRLAAMLPEYPVVMAMYGVGKSYGPQLMAEIGDVRRFERKQALVAFAGIDPMPNQSGDKNVRSNKSSKRGSPYLRKTLFNVIRTYLQCAPQDEPVFQFLNRKRAEGKPFYVYMLAAANKFLRRYYAKLRDYFASLDTLQPVAPIPTILKATL

SEQ ID NO: 43391 - protein, 390 aa, unidentified
MVYVGIDIAKFTHYAAVMDGDGVVHHKPFPFDNSLSGFNLLLAKLAPFGKTNLVVGLESTSHYGNNLIDFLFKHEFNVAMINPIKTAALRKGNIRNVKTDSIDAMLVIKSLIVDGYRLLTPNDLKYQNLKTLTATRHNIVKQRSRAKVQLHALVDQVFPELHNFFTSGINIACAKALLKRFPLPSDVLRASTATLTKLLRSASYGRYKDAEAAELKALAAKSIGHNDPTLALEIKLLVEQIELYDRQVDDTETAIADIMQSVNSPMLSVPGLGTVNSAIILGHIGDVFKFPSDEKLLAFAGITPIIRQSGQFKARITRMSKRGSPLLRYGLINAAHNVVKYVPVFKAYYDKKIAQGKSHYNALGHVAAKLVRLIYVLLTRNITFDPKLSA

SEQ ID NO: 43392 - protein, 413 aa, unidentified
MSVTQTAVPARPVTVGIDWAKDNHAVCVVDADGEPVQRLVIQHSKSGIGRLLGLLERHRVAGVGIERPDGPLVAALLGAGVELFVVAPSQVKSLRRRYGSAGNKDDRFDAYVLADTVRTDRRRLVALRPDGSATVTLRTLVRARADLVNHRVALGNQLRAHLDTVLPGAVGLFCELDSPISRAFLTAHPTQDAVNALTLDVFTAWLAGQGYRQKKPAVLLQRLTGAPAGVTGPAGVALAGVTAAYLTALTALVEQIAVLETQIADALAAHPDGRIFTSLPRAGTVRAARLLAEIGDARGRYPTAAALAGLAGVTPSTRESGQVRVVAFRWAVDKQLRGAVCDFAADSRRASPWAADLYAKARARGHRHPHAVRILARAWLGVIWKCWTTATPYDPTRHGALQALLNQHQTDAA

SEQ ID NO: 43393 - protein, 418 aa, unidentified
MAGEPHLDTDDIAVGIDLGSREHAVVVLDTAGRRLTRFRVPHSNEGFAELLQRTAPARFGRSTGRAVFAFEATGHFWEAVAHYLAEHGHRYVLVNPLATFRVREARQMGRDKRDATDAEQIADLLRTGVVTKTQLEAPPYVELRRTWGEFDRLRRERARLKTLLKHQLYAVFPEFVRVWKDLFAPGPLAVLRLGLTPGEIAVLTPAEFTHRVTMARDGRRLWKPKLVQVHRWAQRTVAPPQGMTATVREITRAVVRVDLLGQQLAALEGELRAQLTAFPEAQFLATIPGVGWATVAGLIAQIGSITKYRHGRQLIKLAGLNPGRRESGTLAGRTMMTRRGRADLRTIVYMATLSGLQHNPRLRAHFDRLRQRPHRPLATMPAYGACMTKFLLYAFAVMKHRVPFDPTHPGRLPRKEAA

SEQ ID NO: 43394 - protein, 485 aa, unidentified
MAKAGKKKKHIKGDRLYRFKEKLKGLRGEEIMGVAVDVSKSFHKVILFDFDGNVLRGPFLIDILQEGYNTLKGEINRIREMIGARKVFIVLEPTSIYHENIARHLKIDFGEVYFVNPSQVSSNRAQDLLRGLKTDDIDLGAMAELLIAGKGYEYNLEGGIYLELKEEAFWRERKLKIQTQLKNQIRIRVDKLYPGLSCQEFGNDPLVKDLWDDRIALALLAVALTGQGILSSTSTSLMERFKEAGHPIGEKEVERIKEYFTRMLLPEEGVARIELKLLRRDLRLLKALEEEIKGVEEGMVEKVKETWGKRLIGKVKGLSGVLIASYVGCIGRIERFRLAPQIFKKSGLASKVAQSGPIERKGRIRRDGSKVLRTVLYKMAKAVSLHNPYFSLYHDHLKEKKGKPEKKALIALANKLNRVLFALQRDDVAFSPPPSKIDYLERLFRERKREKREKRLKRNLERMERQRKGLIHGPKLLALKATGLG

SEQ ID NO: 43395 - protein, 368 aa, unidentified
MGERITFVGLDVHKSSISIALADAGRDEDVRFYGKIGGDMESLLKAIRKLQSSGATLRFAYEAGPCGYEIYRTLTKLSFECIVVAPSLIPKKSGDRIKNDRRDALSLARLHRSGELKAVYVPTEEDEAMRDLTRTREDAIKALRVARQVLLAFLLRHGHRYSGESHWSKTHLAWIAGIKMPHTAQQIALQEYVHAMQEGAARVDRLTKQIQELLLTWKHLPMVKALMALRGVSLIVAVTTVSEVGDLTRFDSPKQFMAYLGLVPSQHSSGTTVKFGSITKTGNSHVRKVLTEAAQAYSHPARETKALLDRLEGLPQEVRDTAWKAQVRLCARFRRLLARGKNRNSVVTATARELAGFMWAIACAMLPA

SEQ ID NO: 43396 - protein, 319 aa, unidentified
MNNSCEAIWVGIDVSKAQLDVAVGEAGEFWSAGNDREGIAKTVEHLVRLNPQGVVVESTGGLERQILTGLLMAGVPVTLVNPHRIREFAKSIGWLAKTDKLDAHLLARFGQAVKPNPTRLPSEAEQQLSALIARRRQLIDMRTAETNRLGSAPASMLPGIQEHLSWLNDKITELDEQIEQSIQNHPDFKAKDEILQSAPGIGPVTSAILIADLPELGQHDRKVVAALVGVAPFNNDSGFRKGKRRVKGGRSSVRTVLYMATISATRYNPTIKSFYDHLLKMGKLKKVAIVACMRKLLTILNAMLRDSLPWKPASAIIQP

SEQ ID NO: 43397 - protein, 355 aa, unidentified
MIASYDYHIGVDYHKSYSHLVVQDSAGKTLRSGRVKNDRQSLGGFLERYRQNSHAVVEATRNWMVIYDWLDDICDDVVLAHPLKVKAIADAKIKTDKIDATVLAHLLRADLVPEAWAPSERARELRVALRERMFYVRLRTMTKNRIVTVFDRYPEQTAQLKKLGDLFGKAGRVQLAQVKVSEIDRIQIDRGLAFIGDINGRIRQSEATIRAMTKANANVRLLKTIPGIGEFFARLIDAEIDDISRFRNPKKLAAYAGLVPSTYSSGGKTYHGKIIKQGNKWLRWAFVEAVTPAIVTDAQLRAQYEHLKFRGVNKARVAVARKLLTIAFQILRDQRAYEPRDPSIMEGASTISRLS

SEQ ID NO: 43398 - protein, 334 aa, unidentified
MQNVALIGIDLGKHSFHVHCQDKSGNALLRKKFTRTKLIEFLAGCSSATVVMEACAGAHFMARRIADLGHVAKLISPQFVRPFVKSNKNDFVDAEAICEAASRPSMRFVQPRTESQQAMRALHRVRESLVRDKVKTTNQMHAFLLEFGISMPKGIAVIKRLSTVLAENDLPPYLTQLLIRLHEHYQYLMVQITELESALGQELSRDETGQHLMTIPGVGPITASVLSSQLGDGKQYGCSRDFAASTGLVPRQYSTGGKNTLLGISKRGDKNLRRLLVQCARVFIQRIDYQSGKLADWVRSQLARKHSCVVCCALANKLARIAWAITTQKTVFEK

SEQ ID NO: 43399 - protein, 421 aa, unidentified
MAQPVWAGVDAGKADHYCMVINDDAQRLLSQRVANDEAALLELIAAVTTLADGGEVTWAIDLNAGGAALLIALLIAAGQRLLYIPGRTVHHAAGSYRGEGKTDAKDAAIIADQARMRHDLQPLRAGDDIAVELRILTSRRSDLVADRTRAINRMRAQLLEYFPALERAFDYNKSRAALILLTGYQTPDALRSAGGARVAAFLRKRKARNADTVAATALQAANAQHSIVPGQQLAATVVARLAKEVMALDTEIGDTDAMIEERFRRHRHAEIILSMPGFGVILGAEFLAATGGDMAAFASADRLAGVAGLAPVPRDSGRISGNLKRPDATTGACCAPATCRPWSASAPTPPRAPTTTENAPKENATPKPSSPWPAAASTSCGPCCATTLSTTPQPLPRRLDNVIENLLREHSPVCDAPGWCS

SEQ ID NO: 43400 - protein, 405 aa, unidentified
MSPRSSSYFAGIDWASQAHAACVIDSAGAVQLRIEVEHSKEGIERLIRQLKSFAGMRIAIERPSGVLVDALVEAGLEIVPIHPNVLKASRARYHGAGKSDPGDAYMLADLLRTDGHRFRALEPQGDDIRALRALVRTRDDLVDQRVALANQLRSLLESFWPGAAEIFADVDSPIALAFISRYPTPQSAAHLGEKRLASFLAQHSYCGRRSPATLIERLKSAATGCSGELEAEAKGELVRSLASVLERLVAELAKLTARIEHTVAELADGRIVMSFPRSGRVCAAQILAELGSVRERFPSEAQLAAEAGVSPVTYASGKHRSVVFRFACNHRLRRAITCLADNSRHGNPWAAHVYHRARSRGCDHPHAIRILARAWVRVLWRAWFTKTPYQPHLHRGAAALQTTTG

SEQ ID NO: 43401 - protein, 425 aa, unidentified
MKKIDYLSTLFVGIDIGSRLNVISALNFEQEFLIRMASIPNSQYGAEQMELMIAEVLQQHHEFRSIIIGLESTGFYGVHIANYLSTCQMLAPFSTKVYCLNPKEVAKYKESFNSLDKNDGIDSFVIADFARVGRINTQPWRGAQYLALQRLTRHRLHITECIAREKTYMLNNIFLKFSEFAMLDNDEHPFSNKYGATAEAVLTDYLSTEAIVNASVDELIAFISSKSRGRIHDPEQATYLLQKAANDSYRLDKCLYEPLTVSIGCSFNCINAFEKELKAIDDAILRTVKGLNPTEYQVLNSVPGIGKVYASGILAEIGTIKCFKNNDALAKYCGIVRKENQSGNFEAEDTPMNKAGNRYLRYYMIEAAGSVIRHCPEYKAFYDKKFAEVRTHQHKRALALTSRKLIRMLFGLLDKSQLYSVEKSR

SEQ ID NO: 43402 - protein, 356 aa, unidentified
MCPIVSEEYELVIGVDTHAATHTFAVVAGSTGAVLDHAVFPTNPAGLERAKGWIARRCGDARTLVVIEGTGSFGAIVTERLMAAGRTVVEAARMPAGDRRGKGKSDELDAVRIARAVLGLSLDDLRIPRSLTGDRSRVAMRVLVVAREAMTGERTRAVNALTALVRTIDLGVDARTSLSAAQVTAIAAWRTRTEDTSTRTCRQEAVRLAQRIRTLDGDLASNRASITKLIEQDTPQLLELTGVGAIVAATVLVAWSHPGRVRSEAALASLAGTCPIPASSGNTVRHRLNRGGDRRLNRALTTIVIVRMRIDPTTRAYVARRRAEGRTTMEIMRSLKRYITRQLFRTLATAHPIPVT

SEQ ID NO: 43403 - protein, 384 aa, unidentified
MTVYAGLDLHATNTYVAMIDQENKVLYKQRHKNELPAILAALDPFKEDLKGVVVESTFNWYWLVDGLMHQGYRVHLANPSAIKQYEGLKQIDDRRSSLWLANLLRLGILPSGYIYPKEERPTRDLLRKRLQLVRHRTSHILSVKNILARNLGLRMPSADVKKLTDAESKRLFSDKEMQAAVLSSIGLVRHLGDDITKIERMILKKVKIQKEFAKLMTIPGIGIIIALTIMLEVGDIRRFPTVGDYSSYCRCVKSVRTSAGKVIGHGNRKNGNKYLSWAYVEAAQAARRFHETVRSYYEKKMAKTNKIVAVKALSHKLTRASYYVMRDQVDYDPARLFGQEAREGGAVNQEHSRPVTKHLSDSLSQHHTKKEVRRHESGGRRIRP

SEQ ID NO: 43404 - protein, 480 aa, unidentified
MNVKARRTKKQVNVENQAIKLLSKEELIRKIEVIKKELRSYTWRDLETNGKFAKNDKLSFITDDMLIAGCDIGSETHYIRAIDVRGRELSNGAFEFSNTSEGFANAKAWVLALAAKNDKKQIVLGLEPTGHYWFALAAWMISNGISVVQVNPYAVKQSKEIEDNSQLKDDRKDPKLIANLVKDGNYGMPYLPEKVYADMRRLSMFRDQLTEDRIRNINRLHRELKIYFPEYMDAFGKIDGAFTLEVLKVSAIPSDITALGAEGIKNIWHNVKLRGRGYSRANEIVSYAEKSVGLTDGTDAGREAVKWYAEQILKLDGQLAVIESTLHEKCREIPYAENILEIKGVGENILAGILAEMGDISRFDDVKEIQKLSGMGLVACSSGKHKGQTKISHRGRKRLRYWLFQAAKSAVSHADEFKQLHEYYTTRTNNPLKKMQSLVVIACKILRVIYTILKTGTTYDPQKLLKDIKRPAASQAPMAA

SEQ ID NO: 43405 - protein, 332 aa, unidentified
MFVGMDVHRNRTQVCVLDRKGNEVRNRNVANDRQALRKELAGLRRGTPVAFEAAYGTGWIAELLGDLGFEPHLAHPAGCRAIADAKLKNDRVDARTLANLLRTGYLAEAWLAPKEVREQRLLLRERARLVRIRTSAKNRIRAQIADEGVPAPNHGLWTKDGAAFLDALDLSPMHRWVVSDCQVLIEVLQSRITLLEAEIRRQAKPDKRVDALMAIPGIGLLSAMTLVAEIGDVTRFATSRKLCAWAGIIPSMRNSDRTLHHGHITRAGPAAVRHVLSEAAQTAIRKEPYHSAYLATKRRRGTGIALIRVARKLLTESFHALWALEDEQRQCS

SEQ ID NO: 43406 - protein, 370 aa, unidentified
MLNTTTFVGLDVHARSIKAVALDVMTGETKSATFAYDAAAVAEWVGSLDPAAKCVYESGVTGFDLQKKLTALGVDCVVGAVSKMIKPSADRKRKNDRNDAGFLARMLSVGNVVEVWVPDGECEAARDLVRALDDARDDLKRCKQRLSKFLLRHGLVFSETTPSGQRRGNWTAAHWAWINAISFKEGADNEVLAYYIDAVRQKLEDKKRLEALVKNEASKARWRKRVDSIRCLKGIDTMSAADLVFEADEFSRFKNARSFGAWLGLTPSEHSSGESVRQGGITKAGNKHLRRVLVESAWHYLNATARSKDLVKGQIPDPAARRHAAKDVRRLVKRREGMLERGVHKNKANVATARELAAWVWAVGCIVESA

SEQ ID NO: 43407 - protein, 344 aa, unidentified
MSGFYEGKQIVGMDLHRRRSVLVRMTETGETLETVRISNDPEYLRQVMVRAGEAPEVVLEATYGWYWAADTLAELGATVHLAHPLGVKMFSYRRVKNDQRDAADLADLLRMGRLPEAWIAPPATRELRGWVRHRAKLVGLRSGIKNQVHAVLAGAGVQVLMSDLFGPGGQQLLAATTLAVESRSRVDSLLRVITALDFEIDTFARLVTGRLRTDPGYRAIQAIPGVGPLLGAVFVAEIGDIGRFARPQQLASWSGLTPKHHESDTTVHRGRITKQGSTLVRWAAVEAVQRVGAQTRLGQIRDRIGERRGRHIGVVAAARELITLVFYGLRDHHIRCLPIRTQAT

SEQ ID NO: 43408 - protein, 414 aa, unidentified
MEQKMIYVGIDWADDHHDILITDDSAKTLDQFRIDHTCDGFALLHSHLANHQTSPGLVLIAIETSRGLLVHELLQKGYTVYAINPKAVNRYKDRHVLSKAKSDALDALSLGHLLRTDRHLFQPIKPLPEDYRLLDRLCSDLRKVVDEKSRVTNQVISCLKEFYPKALETFSLNSQIFIDFLKAFPDHGTLSACTKKTFLAFLKEHRYPYPTKAEELWKIIQSPTLQPDKVIARSGKLRLGMLLDQLENLKEHITHYEQEIRAILDNLPETNPIKSLPGVGERLAPELVATLGPNSKDGHHRFQAAEEIAKLSGCVPVVRESGKWRNVSLRYACVKSLRRTFHDWAFASINYSSWARAFYDYHKEKNQSHCTILRNLGKKWIKILFAVWSKGTSYDEALHIQNLKAKNVPWAMAL

SEQ ID NO: 43409 - protein, 400 aa, unidentified
MENIYVGIDVSKKKFDACIKNDQNVVQMKARTYDQSKDGMERFIKDLKEISNQNNVLIGLEASGIYHRNLMHYLLKHNFGVREFNPLEISALRKGRIRKTKTDKIDAEVIADAVRWDVKTNTERYLTDEEYLKMKEMSSIYNRVVSKITDLKIELHLALSSLCPGYDSLFRNILSSTSVEILKRSMKQTRLFQISEKEIRKILDKNYSNDTDTTKLARDIKDTFNSSTCPDYAKEALVTDVKFILMQYHTLKKQKQQIEKKIKRSVNKINPESLSIPGVGEITCSIILGSLGNVKRFRDGKAITGYAGLDPIVTQSGKSVNRTGHISKRGNKYLRTALINAALVGIRSNPVLRDRYHHLRDKGKSHLVALVACARKLLLIIYSVEKNGKRFYVPSYIQDQ

SEQ ID NO: 43410 - protein, 345 aa, unidentified
MKITTVGIDLAKDVFQVHGVDAHGKAVLRKQLKRKDVVSFFANLEPCLIGMEACGSSHYWARKLAALGHTVRLMAPQFVKPYVKTNKSDRNDAEAICEAVARPNMRFVPVKTGEQQAVLSVHRARQGFVKARTAQANQIRGLLAEFGIVIAKGMGHIAKRLPEILEDGENGVPGMMRELLQRLGENLKEMDKQVGELERQIKLWHRENEQSRKLEAIAGIGPITASAYVASVGDAKSFKNARQVAAWLGMVPRHEGSGGKVKPGRISKRGDVYLRTLLIHGARSVIRQFERKPDQAEGWLKELLARRHKNVAAVALAAKNARIAWALLAHERSYQGDYVASRAAA

SEQ ID NO: 43411 - protein, 400 aa, unidentified
MIDTGDIDVFLGLDVGKGEHHATAVTLAGKKAFDKRLPNTEPKLRELFARLQAKHGTVLVVVDQPASIGALPLAVARDMGCPVAYLPGLTMRRIADLYPGEAKTDAKDAFIIADAARAMPHTLRAIDGEDETIAELEMIVGFDDDLACEATRVANRLHGLLTQIHPSLERVLGPRLQHPAVLTLLERFGSPAQIRKAGRRHLLTLLRPKAPRMAERLVEDIFAALDEQTVTVPGTEAAALIVPSLASSLTTVLDQRKLLAARIEELLGSHPLSKVLTSMPGVGVRTGARILIEVGDGSTFPTAGHLAAYAGLAPATRNSGSSIRGEQPSRRGNKQLKRAFFLSAFAALGDPASRAYYDKKIAQGKHHTQALLCLARRRADVLFAMLRDGTFYEPQPAAAS

SEQ ID NO: 43412 - protein, 413 aa, unidentified
MISLSNSLLVGIDVSLKDNKVRILHPDGTSLAKFVVLNSVPGANTLSKKVTQIAEKNNFDSITIGLESTSVYGDPLVYFLKQDTSVNRFNTKIHVLNPTQVNKFKAMYPDLPKTDDIDAWIIAEHLRFGRINKEVYMDERYKALQKLTRARFHTVQNLAREKNWFLNNLFLKFSSFAQEKIFSDTFGATSSSVIEEFFSVDELSYMPIEELVEFINKKGKGRFDNPDEIAAAVQKAARSSYRLPKTVTHSVNQVLAVSFSAIKAYKEQLKIFDKAIEEQIKLIPNPLTSIKGIGPVYSAGIIAEIGDIHRFKDHAALAKFAGISWTKHQSGNFTASNTKLIKFGNRYLRYYFMEATNKVRLHDHELKRFYELKYSQTPKTAHKRALALTARKFVRLVYALLHSNRLYIPPKGD

SEQ ID NO: 43413 - protein, 325 aa, unidentified
MQKSKIQLILYCGIDVSGDTLDICFQTSDGELISQKITNDASGYKQLWQLTGLNYQFIMESTGVYQLPLCFFLEDKKARYSVINALQIKRYIQMKLERNKSDKKDAFHICMYGVENKPECYEMPVPLYFECRALNNAIETITTEITSFKNKIHSLSKLEIDSKVIMSGYKKILRDLQAELKKFEVVLYKKLSAWQPDLVKQVGSVVGIGKRATAILIVTTQGFRHTANYKQLISYAGLSPKEYSSGSSIRGKVRICKQGGSLLRHTLYMCALNAKSTNAACKALFDRLVAKGKNKKLAIIAVANKLLKQVFGVVKNGTLFDRGYL

SEQ ID NO: 43414 - protein, 419 aa, unidentified
MSQFSTNQTKKQDGTGTLHVGIDLALEKNVCVVTKENGEKIDYFSFPQDRGGYDYFLKRVKMISQKQAESRLIVAMEPSNYFWKLMARELEENGITYHLVNAYTVKKHREGNQLDRSKDDRRDAVQIAELSRNGHYTETRLQKGRYEEIKQYAVAYHQLSRAIRREQHILWGLVGQVFPEYFQIFKNLNGETSRAILLSNACAAEIRKIKEDDFLAEVKAAYLGKRLSVTKVQQVYQLAATSIGILEGLQAVQLSIQIHLSNIQRFQMQLNQVTDAMTNCLASLPEAEYLLSVKSLGVVSIALFLAEIGDPKRYKSASQWVKLAGIQPTPNSSGKKQYGRTPISRQGRPHLRTMLYFSCLRMIQYDSHFAQLYSNLQRRPKNPLTKMQALGVLMNKLLHILWALIHQHTMYNPAFAQSI

SEQ ID NO: 43415 - protein, 324 aa, unidentified
MNISVIGLDLAKRIFHLIGLDQNGKQRLKKKLRRAQMLPYFANLEPCLVAMEACASSHYWARELTRLGHHVKLLPAQHVKPFVRGNKNDYNDALAIAEASRVPQMREVTVKTVEQQSIQALHRLRRSAVGDRTALCNQVRGLLAEFGIILNQGVATLRKAIPDLLEDAENGLHPLFRDALFLKYQQLCQLDELVKNLSDAIQKEANVHPEMKLLQSIPGYGPILSSTFYSVIGDGKGFRKGRDVSASIGVVPRQHSTGGKNTLLGISKKGDKYLRSLMVHGARSLIKHAHKKEDALSCWVTALIERRGKNKATVALANKLTRIG

SEQ ID NO: 43416 - protein, 391 aa, unidentified
MTKPKTKTVNDFSRCLDPLDMDATLIAVIEMSQSSWLVAGIVPGVERQPLKKLAIDEHALLGLLNRWRAEAEKQGHRITRIAVAFEAGHDGFWLARWLTAREVEAHVIHASSVAVTREHRRAKTDRLDTELLKRGFLGWLRGERGHCKMVAVPTLAEEDAKRPSRERETLVGEASRLITRVKSAFVRLGIRGFNPKLKAAAARLEALRTPEGEPIPPNTLAALKRDLERHQIVKKQIRELEQTRLENLAQAPAKGSNVMVLLLARVIGIGVETADMLVREVLSRTMRDRRAVARYAGLTGSPDESGAKRREKGLARSGNARVRHGMIQLAWRFLLFQKDSALAQWYRQRTANAPSTRKPLIVALARKLLIGLWRFARDGVVPEGVRLRPAA

SEQ ID NO: 43417 - protein, 392 aa, unidentified
MALYVGIDVSKDKFDACGIGDGGKKVFSCTSTMDRNGFEKLVLHLKGKNHALLLGLESTACYHIALFSYLTAKGYRVVISNPLLISNFVKLQLRKTKTDKKDALTIAQFLMLKREALEEHPSCSADMMELRDLARRRERLTDQVTKLKGNMKRILSVTFPELEHLTGVFAKSILQLLVRFPSAEALRNANVDEVASIVVPRSWGRKSRAWVETLMATASSSIGVSGPAKELVLKQDAAQLLYIEEQIKEVTKLLMSLCTERMNKDIEILTSLQGIGASTALQFLIEMGGDIRLYKNDKKLIAAAGLDPSTYQSGTYEGKSRISKRGNRHLRRVIWLMAKNTIFSNDLFRSYFYKRRREGLPYKMAVLATAHKLIRVIFSMLVHQTYFKEGGK

SEQ ID NO: 43418 - protein, 398 aa, unidentified
MRFAGIDIGGECHAVAVVNDNGVLLVRSTLFGEEAVGYQRLRELLGDPNDCLVAMEATGHYWRNLFAFLVGHGFKVALLNPLRTRRFAEEELERTKTDSVDALGIARFAAQKRPAPTPVSDEVTGELRELVRLRTRYVEQLSDRMRQLHRAVDLGFPEFTGHLRLNTLLATAILARYPTARSFARVSIRKLARLAYDGRHHVGEVLARTLIEGAKVSVGSHHSEPYQLQVKYTCADIELLRGRVKQLEQDIERKLQDHEVGKLLTTIDGIGARTAACLIAELGDPSRFRDVAVLASYVGVVPRLRQSGKRAFSGAQGLPLGNARLRHRLWMPTLVAVRRNPWLRAHYDRLLAASKRPKVALVACMRKLLGAIYSVARNRRPFVLHLATAGHEQRVTAG

SEQ ID NO: 43419 - protein, 409 aa, unidentified
MHVVYARCCGLDVQKKSITACVLLRDTTGQGRQELRRFETMTRDLLELADWLQSQQVTHVAMESTGVYWKPGWNILEGQFAVVLVNAQHSKAVPGRKTDLKDCQWIAELLQHGLLRGSFVPPTPIRQLRDLTRMRASLRQDHTAIANRMQKIVEDANIKLASVASDWLGVSGWAIRAQLRAGEADAEKLAALARGRLRAKLPAMELALEGRMTEHHRWMLRLLYEQLEFLAGQMATLDSKIQDQLNEYREAIALCTTIPGIEEVAAANLIAEIGVNMAQFPSAQHLASWAGICPGNHESAGKRLSGKPRKGSTWLRRSLCQAAWAASHTKGTYLAARKGKKRAIVAVAHTLLVSLYHMLKTKQTYRELGADFLDRRHAAQVKRYLLKRLERLGVVVTIQSMESTAVLPT

SEQ ID NO: 43420 - protein, 436 aa, unidentified
MDTRIIGIDLAVKAVHTAAIYDPASHTFLTKRMRFRSRPQEIERVLTKARQGLSGEVRIVAILEATNMSWFEVGQYLHRQGVEVYRVNGRRTKALRRVDAPHARSDKLDGMTLAKLYGVSRDKLVRWTPPGGEMLALQRIARELQRIVGQQTATQQRLQELTQWTWGGWDKLVPAAYREWVMRNYYDPWTATGLGAAWLELRLQEDIPQAKTDWIPAWLQRAEERKQLYSDATVAGFTYLSEFIQRELDELERLAQQRHSLLQNNFLPLYRQLFPNDVLVSLRGVGERSAAIYHGFIITVHRFPNSKRFVQWTGMAPRSSQSGTAQSKHMRLSKQGPNLIKATLYQNAQVGRSWDIQLAQIYYDQMVNHGKHHTQAVCAVASHLASRIFALLRDQRPYELRDLQGRPVSPEQARAYILEHLQVPEEIRKQRKRRQS

SEQ ID NO: 43421 - protein, 374 aa, unidentified
MKSFSTFIGMDVHKETIAVATAGKHGTPRYYGEIANTAEAITKLVKKVVPSRSKAVFCFEAGPCGYGVYRQIMDMGYRCDVVALSLIPKKAGDRVKTDRRDAISLVRLLRANELTAVWVPDEQQEAMRDLTRMREDMKNMERQARQRLSGFLLRNKKVYAGDSKWTQAHFRWMEEARFESPIQQIVLQEYVDVVKHLQGRVTAVEQEIMKALDGWSLRLVVEALMALRGVSIVTAMTIVAEIGDISRFESPRQLMAYLGLVPSEDSSGNRQKRGGITKTGNGHVRRLLVEASWSYRLPARKTAHLQRKAEKTSEAVQAIAWKAQKRLCRRYWHLMQKGKLKVQACTAVARELTGFIWAIGHEIMGKSNTPVTVV

SEQ ID NO: 43422 - protein, 320 aa, unidentified
MQDIEQWIGIDVCKRWLDVHLRPENKSFRVSNDVQGINEIMPHLNPIVGVGRIILESTGGYERQAALALSKLGYPVVVINARQGRNFAKAANQLAKTDRVDAAILAWFGEAMKPPIRSFASDAQAEIQGLVTRRRQLVDILTAEQNRLSGLRGSAQQDVEAHLDWLRERIKQVDEQINTQIQESQSWQVKQTRLKSVPGVGNVVGATLLALLPELGELSTQKISTLVGVAPLNRDSGQMQGKRTIYGGRAAVRQMLYMATLVAVRHNPVIKAFYDRLLQKGKVKKVALVACMHKLLTILNAMIKNGTDWQLPQLCDPQLT

SEQ ID NO: 43423 - protein, 342 aa, unidentified
MKNCNVLGIDLAKHIIQVCVISKQGELVSNKAMSPDRFREVLATSSPSIVAMEGCGACHYWGRLAEQYGHDVRVISPKRVKAFLQGQKTDANDALAIAVAAIQCGMVFSRLKTVDQQTLQTVETSRKLLDKELVSLGNHLRAFVYEYGIIVKRGRKSLNQIMLRVLDDIESGLPHCLKASLRVLWDRYKSTELQISELEKTRSGLVKQLDPCKRLLALEGVGDVCAAKLYASLGDGKAFKNGRDASVYIGLTPKQHSSGGKTFMMGINKGGGDKELRAALYQGALSVISTLPVEPKTVKQAWLIALVHRAGIKRACIALANKTVRTAWALLSSGQNYKSVPI

SEQ ID NO: 43424 - protein, 426 aa, unidentified
MRVLYDRVAAIDVHKDMVKVAIRVPGAKRGTRKTDVLEFRTFYGVLQEMARELRRRGVTHVVMEASGVYTDPVYYALRELDFTEVMVINPAHAKALKGHKTDAKDAVRLLDLYECGLLSGSYMPDADLREVRDLARYRMKTVQARTSEIQRLQKALETAGIKLGSVVSDITGASATAMIEALISGERRGAVMAGLAQSRLRTAGKMADLSMALAGRFTDHHALMCRLHLDQIKLFDDAVAGLDARIAPKVARHAREAELLKTLPGFGDVVVAGWLGAIGPVPHQHFATASRLASWATLCPGNYMSAKKSKGGRTGNGGAYIKPLLIQAAWAAVRVPGRLQARFRRLVRKFGGPRSKGAQKRAITAIAHTLLKIAYSVLKTGTPYADLGADFYTRRESPDARQDYLMRQLQKLNPGCVITITPAEAA

SEQ ID NO: 43425 - protein, 345 aa, unidentified
MPIVGGLDIHRKQITFDYLDTATGEVKRGQIAPADRKHVRAWLARFAGRGEVAFALEGCTGWRYIAEELAAAGIAAHLGEPADTAALRGRKRHAKTDKTDARHLRTLLGEGRLPECWIPPGHILEYRALLETYHDLRAEHTAWVQRIHAVFFHQGAPRLGEGALRTEQGLAGLRAAAAAHLSPAGQLQVATALDMLAAVEARLGPLRRQLRDAARHLVGAKVLAARLYGAGPITALALTCWLGGAGRFSSSRKAVRFTGLDVTVHSSDRKGPPGRLSRQGPPVLRWAVYEAGMTHARISAPDHGYYAAVKDRKNGKRAALSEARKIVRQACHILAELGDDALTAA

SEQ ID NO: 43426 - protein, 408 aa, unidentified
MNPLFVGIDVSSKNNVAYLMKPDGSKHSSFSVQNNLGGAKLLSERIVSALSSMRLSDVVIGLEATSIYGDNLVYALREDGGLGRFRRKIHVLNPKQVKKFKEAYPDLPKNDWVDAFVIADHLRFGRIAKEVYMDDYRYRALRTLTRARFDVIQNLTREKQRFANYLFLKCSGMAQDKGIQNTSATTIALMERFETVDNLANADLDDLTAFDAETGRGRFADPESTAKAVQAAARGSYRLPKTVNDTVNQAMSVSIASMRALKEQVKVLDKAIEQQFEIIPNTLTSIPGIGKVYSAGIIAEIGDIHRFNSQASVAKFAGLVWTQHQSGEFEAEHSQMIKSGNRYLRYYLLEAANSVRRCDSEFRRYYDLKFKEVNKYQHKRALALTARKLVRLVFRLLKDNRLYIPPEG

SEQ ID NO: 43427 - protein, 461 aa, unidentified
MNRKEKSKAAASGMALVHPNAAAIDIGATMHMAAVGADRASNPVRCFGTFTGDLHRLADWFAECGVTTIVMESTSVYWIPIYELLEERGFEVFLVNARDAKHVPGRKTDVSDAQWLQRLHSHGLLRASFRPKGEIIELRAYLRQRERLLDTAASQIQHMQKAMTEMNLQLHHVVSDVTGLTGMRILRAIVAGERNPAVLASMRDRRCHSSTEVIEKALTGHYRPEHLFVLEQALALYDVYQQKVSACDVQIESVLNRLSSVRGHKDVRADGSGPPRRKSRQSNGLAFDVGEALHCLLGKDLTRIDGIGPYLALKLVSECGDDLSAWPSAKHFTSWLCLAPSNKISGGKVLSSRTRRSGSRAASLLRLAAVAIGRTETALGAFYRRLSARVGKAKAITATARKIAVLFYNALRHGMDYVDPGASYYETRYRERVLKNLRRRAKAFGFALQPANTLTTERVVS

SEQ ID NO: 43428 - protein, 340 aa, unidentified
MASMQIGVDLAKSVFEVAVSAVPGRVSERRRLSRAALTSFFATRPPAEVLLEACGSAHHWGRELQRLGHRVALLHPRDVARYRTGNKTDRTDAKALLEAGRNEQVRPVPVKSVEQQAVVALHRLRQGYLQTRTARINAVRGHLREFGCVVPVGAQHLVPRAYEALATGAVPALLRPALETVLEEIRALEAQAEAIRTELTRLAAQMPDAQLLLSVPGIGVLTATALVACVGDCHRFRCGRDLAAYLGLTPREASSGPVRRLGPITKRGNTYVRMLLIHGARAALRAGTVSHAPDDLRTWACALAERKGHNIAAVALANKLARVAWRVWRDQRPFERRDAR

SEQ ID NO: 43429 - protein, 343 aa, unidentified
MGASIGVDSHKGSLAAAAVDELGRVFGIKEFPNDPAGHRALLEWARHYGKPRAIGVEGSGSYGAGLCRTLSSAGEQVREVPATLTFKERRRKGSQGKSDAVDAVAIARIMARGEDLPSPTRTQALADLKLLSDYRDQLVHTRTQLANRVHQDLVVLHPGYERRVPNLVGAKHLAKAASLVRGDTSIRAELARRRIGDLRRLSREIAETKVQMTDVLTESGTTLTGLPGIGPLIAARILGEVGDVGRVRSQAAFAMMTGTAPFVASSGMTFRHRLNRGGNRKLNFALHYMALARYRTDEQTKAYIERRRAEGKTFKESMRCLKRHLSNVVYRQMIVDWRALEAA

SEQ ID NO: 43430 - protein, 328 aa, unidentified
MTMIPTQQAFNHIVAFEVSKEMLVVHTLPADEQCTIPNKPQTVRRLLKAEVKRNRKERLGAVLIVCEATGGYERHVLDVAIDLGVPVHRAHGTRVRFFARYRGLLAKTDPIDARLLAHYGLKTDEVRLYVPPAPETVALRALHARRSEIQEMMIAETCRLDHARHKSVVTSLKAHIAELKAAFAAIEAEIAQLLRECETLKKKIELMRTVIGIGPVSAMVLLAYLPDIGRLTKGQVAQLAGLAPINDDSGKKRGTRHVEAGRTAIRRALYMAAVVAMKRNPILKAFADRLRSRGYPFKYVATAVMRKLVVILNAVLRDGQPWKGAKTT

SEQ ID NO: 43431 - protein, 337 aa, unidentified
MVYGAIDLHMRYSQIRIVDAEGRVLQEQRVPTSRERLVGVFSAHGPMRILLETGTESEWVAQALEAAGHAVIIADPNYAPMYGEIRRKVKTDRRDVAALGEANRRGWYRATHRVSSAQRALRQRLRSRRQLVQMRSGTIALIRSLLRQDGYRLPACSSERVPGRLAALEVPGPLRETIAPLARMVETLTTEIAEVDGWLAAQATADPIVERLQSVPGVGPVVALTFRAFVDDVGRFAHAGQVSAAIGLVPREDSSAERRHRGHITKAGPRELRSLLVQAAWACWRSRASGTLRAWVERLASRRGKRIAVVALARRLSRILFALWRDQSVFAAATVAA

SEQ ID NO: 43432 - protein, 331 aa, unidentified
MTIFIGIDIAKDKFDVCLVREGREPEPATFDNNQSGFKQFDNFLKKRRAQQGHACMEATGVYYEELAHFLHTKKYLISVINPLQISAYAKSQLRRNKTDKVDAAMIADFCRTQNPSLWNPPDPSWYELRALVRHLQDLEEDRQRQRNRLGAIKSAARPTRTVIKNLQKQIDFLTQQIDDIKKHIQDHINQHPDLKEQRDLLDSIKGIAQLTAAKLLAEYGDMRQYDDVRQVVAFAGLNPRQHQSGSSVRGKTRISKIGQSAIRAALYMPAMSAIRTNPLIQPFVQRLRQRGLSNMEIIVAVMRKLLHLAFGILKSGQPFDPNYLEKRAANA

SEQ ID NO: 43433 - protein, 351 aa, unidentified
MDKITRVGIDLAKRQVQVHAVAGDERVLVARSMSRERFAQWLAQLPAGCVVAMEAASGAHYWARHMLALGLQPLLIAPHFVTPYRMEGKGGKNDAADAAAICEAASRPKMRFVAPKSTQQQGILAVHRLREGYKEERTACTNRIRGILSEFGLVVAQSFEQLRAALPLLLEDAANELTGDVRLGLQRAVAHWHELDEQIAWCDERIAAHARSDAQAREAMKIRGIGVTGASAIVASVGDFRQFERAAQFGAWIGLVPRQHSSGGKAQLGRITKRGDDYLRTLLIQGARSAVANAPRHDDAVSRWIVQLLARVGWQKTLIAVANKNARMLWAVLARGRSFDPNYVPQRALAA

SEQ ID NO: 43434 - protein, 407 aa, unidentified
MTITCGIDWAEAHHDVAVMDSDGKVLGRAKIDTGVAGFSELLSLLVEHTDDLVSVPVAIETDKNLIVVALQSAGLTVFAINPRAVARYRERHGQAGKKSDPGDAAVLADVLRTDAHHHRALPMITDGGQAVKVLARQHQEAIWSLHQTTSRLRSVLLEFYPQALQAFPNLKHKAALTILAAASTPELGTNMTARKVVTLLHRCGRRNDPGLVEQIVTDLHTPALRQPAAVEAALGITVVGLLAIITAMHQAVEHLEIALAAEFDQHPLALILQSAPGLGPVLAARVLAEVGDDDTRFRTANGLRAFAGTAPVTRASGRSRKVSARRVRNKRLADACHWWAFAALTKSPGARAHYDRRRAAGDHHNAALRNLANKLIARMWWCLHNGQVWDESAAWNHTDIPTCQVAA

SEQ ID NO: 43435 - protein, 320 aa, unidentified
MGTEKAYVGIDVSKETLDVAVHATDRRWRFANSDKGITETVACLEEMCPTLVVLEATGGMECPLAAALAVAGIPLVVTNPRQVRDFARATGRLAKTDAIDARVLAHFAAAVHPESRRLPDSQEQELKAILARRRQLIEMLTAERNRLHSARSKAVKVNIKAHIDWLEKEMTHIDHDLEQSIRQSPIWREKDDLLKSVPGVGPVLSTTILADLPELGLLNRRQIAALVGVAPFNRDSGHMRGQRTVWGGRAVVRSALYMATLVATRHNPIIRDFYRHLLSQGKPKKLALTACMRKLLTILNAMVKHQTPWHYPVSGTLQTP

SEQ ID NO: 43436 - protein, 440 aa, unidentified
MAKRKMSTFERLRKGQLNRAERRELGRQVAGSDPGLRIVHENAGGIDVGNKSHFVAVPADRDGQPVREFGCWTEALREMAAWLQSCRIDTVAVQATGVYWIPLYDILEQQGIRVLLVNAQHTKNVPGRKTDVQECQWLMKLHTYGLVRDSFRLPADIEPVRTIWRLRDRHVKEAGESVQHMQKALAKMNIQLANVISDISGVSGQAILSAILMGERNPYELADLADYRIKASREEVARSLEGNWRTDVLFELQQAMDSHRFAHQQMQECDKELCRYLKNLPTRQLDATTSSEGGEMSAAQKRKKAKKPRGNEPRMDIKMELQRVCGVDLTSLDGISVMSAMTVLAEVGTDMSQFADEDHFASWMGLTPSKDITGGKVVKNSKKKVKRIGWRTHCACRPPRCCTATLTWERVTAICAGSCPPLFPRPKRWPVIWQCRSIVC

SEQ ID NO: 43437 - protein, 368 aa, unidentified
MTIVVGVDAHKRSHTLVAVDAVGVKLGEKTVPSTTAGHWRALTFVHARFGTDAVWGVEDCRPLTARLERDLLAAGQRVTRVPPHLMSRARASSRTPGKSDPIDALAVARAVLREPDLPVAFHDQASLELKMLVDRREDLVGQRVATINRLLWRVHELDPAQIKPINWHRKKTRQTMGSWLATPTGLLAELARDELADINRLSDAIDELGDRIADRVRAVAPTLLALPGCAELSAAKIVSETACVERFKSEAAFARHIGLAPVPHWSGPVNVQLKPTRRGNRQLSTAIHRIAVVQIRMDCAGRRYFQRRLAEGDTRPRALRALKRRLSRVVFQSLRADRELRTQAWPIVGGDPAAPPTAASRPKHLISP

SEQ ID NO: 43438 - protein, 347 aa, unidentified
MRFYTKQHKFYCGIDLHAKKMYVCVLDSTGEIVLHRNINTEREIFLAVIEPFRENVVVAVECMFTWYWIADLCAKEAIPFVLGHALYMKAIHGGKAKNDKIDSHKIAVLLKGGMIPMAYTYPAKMRATRDLLRRRNHLMRKRAELYAHIQNTRSQYNLADSFGRIAKPQNREGVAERFEDPAVQNMIATDFAVITAYDPIIAKMERDIISMANHHDPVAYALLKSIPGIGRILGLVILYEIETIKRFPSVQDFVSYCRLVKSIKESNGKRYGSSGKKIGNAHLKWAFSEAAVLFLKGNEPAKRYLNKLTAKHGKGKALSILAHKLGRAAYFMLKNKEPFDQKKFLGL

SEQ ID NO: 43439 - protein, 350 aa, unidentified
MKYYAGIDASLGSCSVTVVDGSGKIFREGKVVSEPVALIAWFLALGVALERIGLEAGPLSQWLYAALREAGLAIELIETRHVRAALATMSVKTDRKDARGIAELMRVGWFRPVHCKSLAAQEVRAILTSRKLVQKKLHDVAMHLRGILRNFGLKVGRATQSSFAGRIRELVAGHATLEEIATALLSVHEALLREFGKLEKRVRAMARADKLVRRFMTAPGIGPINGLTYASAIDDPLRFASSKKVGAHFGMTPRKYQSGETDINGRISKVGDASVRTALYEAAHIILTHPVKGSALKSWGMRLAKRAGMKKAKVAVARKLAVILHRMWVDGTDFDFSRGAAPAQPAKAAA

SEQ ID NO: 43440 - protein, 417 aa, unidentified
MKRQQFEIVAGIDVHRDVVVVTLRKHRRGGTDEVETRRFETFRDSLDSMALWLIEEGAEVVGLESTGVYWHPVVRALQETAPKVAIQLLNPLEVKSRAGRKTDRNDSIRISELVMYGCVTPSFVPSLQQNELRKLTRHRTRATADGVRYKNRIIKELESSGVKLASVVSDCLGKSGRAMIEALLGGGKTTEQIAQLARGKLREKIPLLIRAVDGAFTPSTAIVLRQLLGCYDAVQAQLAAIDGEIRTLMQAYEADSNLACTIPGIDEVAAAAAIAETGADMSLFPSARHLAAWTGLSPGSEESGGKAKKAPTRKGNKFIRTVLVQCAWSAVRTKACVWRTTFKRLVARLGPRKAIVAIARRMLLAYYHILRDRRPYAPPAELPLPEPIRQKIVRSLSNRLKSLGFDVSLKPAAPAVS

SEQ ID NO: 43441 - protein, 340 aa, unidentified
MEKELKFFLGMDVSKLWVDIAVMRVEDHQRQPVVHERFDNNASGMNGMDKWLRSLKVAFDAGSLLVIENTGVYHRLVWQYCSARKLPIHIGNAAHIKWSMGITRGKNDKVDSQRLCLYAARHADGLKATPELDPVFLRLKDLYTSRSRLRAQLNSIKVYLGELKGSSGTEAHAAMAAAHQAAVDGLAESLKAVEKQIAGIIKGDSSIKTNYDFLLTVPGIGPLTALYLICCTNNFIADPSGKELASYAGVAPFGHQSGTSIKGRDKVHQMANKEMKMLLHMGAVSAITNYDEFKDYYERKIKEGKNRLSVLNAIRNKILLRAVSVVKNQKNYVDNYKKTA

SEQ ID NO: 43442 - protein, 318 aa, unidentified
MHLKATMALGIDVCKRWLDVFHSVSKQARRFENSTRGIKELLAWLSKQPAVDVIVMESTGGYERCVFKALNARDVPVARVNPRRVREFARAAGILAKTDRLDAVVLARYAIAVELQLAPAEEPAREELQQWLQRRAQLLQMRTADLNRRALATSSMRQMIDRTLRHLTVQIRHIDQRIAELIRAQVCWGERLALLDGLKGLGPITRAWLMASLPELGVLNRRQIAALVGVAPFAADSGAYRGQRHICGGRAPVRSAVYLAALSAARFDPKFKAFYQSLLARGKAKKVALVACMRKLLTVINAIFRTNTPYRGSRPQPA

SEQ ID NO: 43443 - protein, 355 aa, unidentified
MSMLAEQYEFVIGGDPDRDTVDLAVVDSATGVLRAHLADRADGAGYARMLAWADSHAPGRRVWALEGTGSFAAGLAVFLAEAGEDVVEIGGVKRQRGAKNDQIDAARAARQALAREHQTKVRAHGLREALRMILTTRQAILVSRTKAINELKGLIVATPEQLRSDLRGCSLARQLDRIEAMRTQPEGAVEHRMAVLTLQSIAARVRFLSAQVDELDPELMTLLKQHPAGPALLAEPGVGPVVAAQLLVSWSHRGRVRSEAAFAALSGTAPLEASSGQRTRHRLNRGGDRDLNRALHTVAITRMRCHPETRAYHAKRTAQGKTHRDIRRCLKRALARRLYRRIQAATHQQQIPAAA

SEQ ID NO: 43444 - protein, 340 aa, unidentified
MIDVLGIDLGKNLCSLVGLDDAGRVAFSKTIRRNRTMTEVEKLRPRVVAMEACCGAHFFSKPMSELGCEVRLMSPEYVKPYVKAMKNDLRDAEGIAEAATRPTMRFVTPKSMDQLDMQTLHRVRERLVAERTRLINQMRAILFERNITVPQGACRFANDLPGILSDDANGLSSRIRKLLQDLHDERLELEKRIASYNQEFEQASRSDAACARLRTVPGIGALTATAMVAAVGDASAMAKGRDLSAWIGLVPKQKSTGGKSRLGRITKRGNSYLRKMLIHGARSICNHFRDHDTPLANWIRSLKERMPFNKVYVAIANKLARIAWAVLRGNRDFDMKVLAR

SEQ ID NO: 43445 - protein, 416 aa, unidentified
MSRVVDIVRPVCCGIDVHKSFLVACIATTDERNHTTHQIRRFSTFKGDLKRLADWLLVNNCKDICMESTGKYWIPIFNVLEKTCNVCLTHPKYVKAIKGKKTDKKDAKWISELFKCDLVRSSFIPPPLTRHLRELCRYYAKLTYMNSSEKNRGQNCLTVCNIKLDDVFSDVYGTSATRILDKLIELGHSDFDVAPLLHKRCKATPEQVKEAIDGELSPAQSHKLKLVRQHMQHLENLQGNLESFVTALAAPYQPQINLLMTVPGIGCQFTAIRILAEIGIDMSVFETAKQLTSWAGLTPQNNESANKKKTTRIARAGAFLKPLLVQCTLAAVSSSKYPWLKEKYQSLKKRRGHKKAVIAIARKLLAAVWNMFAKREPYNHELHQKSDPPPINRLLTAEQGLALLRKHGFQIIETLA

SEQ ID NO: 43446 - protein, 348 aa, unidentified
MTVYIGVDFHARQQTISYLTTEDGEIKRLQLDHAQPEEVRRFYAQFAGQRVGVGFESSGRAAWFEELLEEVGCEIWIGHATAIRLFARRRQKNDRRDADLILDLLVRGDFPRIHRYSAESRAVLQQLRYRQRLVKLRTMLLNSLVFMAASRGVVLRSQLKTKRGLERLRQIDLPPALREQRDELCQLLLELKPKIDKVESSLAAKAEADLRVRRLRTQYGIGPLTGLCLAHTLEHPERFANPRKVTAYVGFDPVEDSSGERRRIGSISKQGSRLLRFLLVEAGQIAVRRDPELARVYQRVLVRRGHAKAKVAIGRRLLVRAFIMLRDEIDYAEFQRRGVAARSSRGIA

SEQ ID NO: 43447 - protein, 346 aa, unidentified
MLADEVDYVVGVDTHRDQHVLAIVAAATGAVIAQRSLPTNARGYAEAVRFAEACAPGARIWAVEGAGHYGAGLARFLSARGEPVHESGHSNRAERRLRGKDDSLDATGAARSALASKQPALPRSGERQEALRLLLLTRRSAVDVRRVALVQLRSVIVTAPEGLRAELRRLPVGELLRRCSRFRRSSSRTPDQLATILVLRSLAQRIQAATQEAAELEREILAHVRALAPNLLSEPGVGPIVAAQLIVTWSHHDRVSSEACFARLAGVAPLPASSGLTTRHRLSRGGDRQLNRALHTVVVHRRQHDRQLATTSPAASPKAKQPATPSAYSSATSPATSTDYFNNKSR

SEQ ID NO: 43448 - protein, 337 aa, unidentified
MEYFAGLDVSMAETHVCVVTRNGTVIHDAKVPSTPADIAAELAQVPPCRRIVFETGRMAPMLYHGLNKLGLPVICIESRQAYMALKLLTTHKTDRNDARGLAHLARTGFFKPVHVKSLPAHAVRSLIIARKKLVGQRVTLENQIRGLAVVFGVRLPRALNPAFVRQALRASDGVPGLSAAMRGLVAARTAVLAAIVAIDGDIRRMVRASDACRRLMSIPGVGQLTALAFTAAVDDPGRFRRSRDIGAYLGLVPRRYQSGEVDYTGSISKCGDRRVRTLLYEAANVMLTRYKGPLKLKDWAFAIAKRSSMRKARVALARRLAIIMHAMLRHGTEFKPA

SEQ ID NO: 43449 - protein, 364 aa, unidentified
MNKCHLNTELSSLEGTRSEFNRSKAVIKLGIDVHQDFYVVVEQMEGTNPKPAQRFQKQVFLHWAAKLSKSGSKVHAVYEACGFGFGLQRQLTAQGIHCYVVCPQKLDERNKRVKTDGLDAKALCLKLDRFVQGNREALALVRVPTEAEEQKRAIHRQREQLVKARKGLEAQGRSLLVNHGMEPASNWWKGRTFAQLQVPEWMKELLSNSQPILLALEEKIRALTAQLQAAAISKQPRGLGLLSSVVIDREIGSWTRFKNRRQVGSYTGLCPGEYSSGNTRVQSCVTKHGNPRLRAALVETAWRLVRFQPNYKPVLKWRKILAKGALATGAARKKAIVAVARQLAVDLWRIRTGRVAIETLGLIN

SEQ ID NO: 43450 - protein, 326 aa, unidentified
MSSFDVSFLSESGSVRHLSGVKNTVHGISKFLLSLPSSAVLCAEHTGVYGDLLLRLCTLNRTCLCFVPGYQIKHSLGLQRGKSDPLDACRIREYAERFYDLLRPCFYPGEEMSELQELYRTRSLLVDSRKRLDTLNIGDNCKSSVSLAADHARRAVLAELNTQISGLDHEIEALIQNSSEFSRNYQILTSIVGVGPVTSCELIIKTENFRKLDTAKKCAAYAGIAPYPKESGKMKCGHKISPMGDKQLKTLLFLCARSAKEHNKEIRLYFLKKHKVEKKHFFVAMNNIANKLLRLIYSLIHKQQTYDRDYIQRDPRCVVISDTHKC

SEQ ID NO: 43451 - protein, 344 aa, unidentified
MEVGTVTRRCIGLDVHRDFAQVAIWEDGLVRQAGQIAATPEALRVFADSLAPSDEIALEATGNTHAIVRLLEGRVARVVVSNPQKTRAIAEAKVKTDKVDAEILAQLLAADYLPGVWVADEDTQARRRQVARRAHIVRQRTRLKNQVQAILHRNLVPRCPAADLFGIKGRRWLAEQDLPADERHAAEALLRQLDLHAEELGLIDSQLARIALACQDTRRLMTIPGVDVTVAMSITAAVGEFSRFSSPNKLVRYVGLNPRVKQSGGQPASHGRIAKQGRAHARGMLVEAAWVAVKTPGPLRAFFERVRARRGMQIAVVATARKLAVLCWHMITRGEWSSPALMDI

SEQ ID NO: 43452 - protein, 329 aa, unidentified
MGFRFFLGIDVAKAKLDCLLLDSVTDRRRSKVVPNTAEGWVALVNWLAKQGAARDDVHAILEPTGTYHEGVLFSLAQDGIAVSLINPAQLRRFAEGLGVRTKTDASDSAVLARFGAMLAPETWQPAPLKARELRALLARRDAVAQDLQRERNRAEQLGVDTPERVRQSLREAISFLDDELRALQKAIDQHIDDDPGLKRIWELLDSIPGVGQRVADHFTALLAGRDFTCAEQLAAYIGLVPTEWQSGSSIKGRPRMSKAGSASLRQLLYMPAVVATRRNPHVQALYNRLLNKGKAKMSALGAAMHMLARLCFGVVRSGQPYRADWLVKT

SEQ ID NO: 43453 - protein, 317 aa, unidentified
MKRLARTVAGIDVSKHGADACVIAKGAASTMRYSCMEALARDLARRGVELAVLEPTGGYERPVMAALEAASIAYAVVNARHIRHFARAAGMLAKTDRLDARMLAEYARRMTPECRTGRNARRQHLCALVRRRRQLVDIRKAELTRRQQAAFEDVVEDIEACIAFHNQRIKAVEAAIAKLVEGDPQLAGDEKLLRSMPGIGPVSAAALLAELPELGQLTRRKIAALVGLAPYACDSGAFRGRRAISGGRAELRNTLHMGVIAAIRRNNPIRNAYRRLRDNGKPHKLATTAVLRKMIVQLNAMLRDQKPYTFSVQQHSC

SEQ ID NO: 43454 - protein, 338 aa, unidentified
MKVHILGIDLAKNVFQLHGVDRKGRAVLARRVRREQLLKVLGELEPCLIGIEASTGAFYWQRQFEKLGHAVKIMAPQYVKPFVRRQKNDTNDAEAICTAVQQRNMRFVPKKTLEQQDIQALHRARQRLVNHRTALISQMRGLLLDRGIAIAVSARRARLLIPRILAAPDDELTPLMREIISSLYAFMVQIDERIKTFDRKITAIFKASDVCQRIAKIKGIGPKTATAMIAAIGDGSDFKNGRHLSAWLGLVPRQHSSGDRKVMMGISKRGSQHLRTLLVHGARAVVRTAVRKTDSRSMWVNELRQRRGYNRATVAVANKNARVIWAVLTSGEPYRAAA

SEQ ID NO: 43455 - protein, 347 aa, unidentified
MVLIGCDFHPAWQQVSWVDTETGETAESKVVHAPGEAEKFYRRFAAPALIGMEATGNCQWFVEMVEKLGHEVWIGDAAKILASEVRQQKNDRRDAALLLRLLLEGRFPRVWMPSSQVRDMRQLMIHRHKLVGLRTRVKNELQHLAMNQGVQKKGRLWSEAGQKLLRELPLRPWAGRRREDLLSLMAMLDQQVEQLDGAVEEAARQNPQARLLMSQPGVGPVTSLAFVLTLGDVSRFPRGKQVASYLGLIPREYSSGGHQRLGPISKQGNGFLRMLLVEAAQSVVRCDPQFRKQYLHRCHKKPRGVAKVAAARMAVRLYWMLRTQTAYPEVVRIESSPRVALVVRHGG

SEQ ID NO: 43456 - protein, 413 aa, unidentified
MDVLHPRCCGLDVHKNSISACILVQVAGRVQKHQRRFGAMTQDLQELANWLRQFEVTQLAMESSGVYWKPVWNILEGEFTVVLANAQHIKNVPGRKTDQKDAEWIAQLLQHGLLRPSYVLCEVIRDLRDLTRMRASLSQEASRISSRVQKVLEDANVKLSSVATNTLGKSGRAMLEEIIAGQNDPEYLASLALGHLRAKTPQLKLALEGKIRPHHRFLLRRLLDQLRFVEHEIELLEERLEDIGRERPELSQAVARWDTIPGIDRVAGWTLLAEVGHNMAQFPTAEQLASWASLCPGNHESAGKRLGGATRKGSPWLRRMACQCAWAAARTKNTYLSAQFRRLAARRGIKRAIIAVAHSLVIIGYYLQQNQRNYEDLGGDYFDRIDSDGLKRYFIRRLEKLGHKVTLAPIKAA

SEQ ID NO: 43457 - protein, 372 aa, unidentified
MTEAYDGRQVVGMDLHRRRSVLVRMTEDGRKLGTVRITNSPAALRAEIAKAGEHPRVVLEATYGWYWAADVLEEAGAEVHLAHPLGVKAYSYRRVKNDQRDAADLADLLRMGRLPEAWIAPPEIRELREITRYRHKLVKARTSVKDQVHGVLAKLGIRHKLVKARTSVKDQVHGVLAKLGIPVTCTDIFGAWGNTWLDGLDLPQPYAGKVASLRQLAGALTGEITLLDKVTADLLAGHEGYAAIQALPGIGPVLAAVIVAEIGDIRRFPGPGQLGSWAGLTPRHYESDTKVIRGHVTKQGSRVLRWAVTEAIQRQPAGSRPRQVKDAIIARRGKEAKNIAKVAAARELLTLVFYGLRDGRVRRLDKPRQETA

SEQ ID NO: 43458 - protein, 351 aa, unidentified
MIVLGADTHKRSHTIAGVGATTGELVGERTVQVGRAGFAALLAWARELDGERVWAIEDCRHVSGSLERFLIARGERVLRIPTNLMAETRKSARQRGKSDGIDAINVARAALREGLATFPTAHLDGPELDLRLLVDHRERLVNHRVELNNTLQWHLHDLWPELELPGGALFSRKWSTRIARRLTRAEQTMRVRIARDELRRLRELTDTIKKLARDITQLVEQIAPQLLAEPGFGPLIAAKLIGEIAGAQRFATDAKLARAAGAAPIPASSGNTRRQRLDRGGNRQINAALHRVIVTRARCHQPTRDYIERRRQEGKTTREAIRCLKRYLARQVWNLLRAPTPAMALTTPSIS

SEQ ID NO: 43459 - protein, 385 aa, unidentified
MSQFSGCPQAAINYDSTIIGALELSNKKWVVAVQLPGVSRHSRHVLDASGDGLVSFVERLKAKCAASGRKITRVILTHEAGRDGFWLARFLARRGIEVHVIQPSSLPVDRRARRAKTDIIDVEMLLRTLMAWLRGEPRVCSMVPIPSEADEEARRAHREREDLTGERRSIVNKIDAILATLGVKGYKALRRDRREQLNCARQPDGDPIPARAKARIERLLDRLDLVLRLIEGVEAERDAVLKKDAPADEAEGMIRSLTELRSIGPDFATLLVREAFVRPFRNRRALGGYVGLGGTPFSSGGSEREQGIGKDGNRRVRAAMVELAWMWLRWQPDSALSVWFRARVGAMGGRIKKIMIVALARKLLVALWRYVKDGVIPEGAKMKAA

SEQ ID NO: 43460 - protein, 412 aa, unidentified
MQDILTCAMGLDVHRDIIVACLVKGAVDAEPEAETRTFSTLIPEMQKLRDWVIESECRNIAMESTGIYWQPIYEMLESCFDGEISILVVNARHMKNVPGRKTDMKDAQWIATLLRAGLLKGSFIPDKAFRELRHLTRYRKSVVHDITAQKNRIDKFLQSSGFRFTAFLSDTFGASGRNIIRHLIEHGSIDREALDKCLKTKTRNRIDEMLVALNGSLSEHQRRFLNMVFRHLEDLEAHKHTVEDEITEEVLKHTDALNLLCSIPGIDVTAAAAIIAEIGTDMSSFPDSQHICSWAGLSPGNNESAGKRKSVHINKGNPYLKSMLCEVAWIMASHRKLYLSGWYWKVKQRKGAKRATIALARKILSIIYTMLKTGTPYNEECFEQRRLRCERKRANRLVNELQKLGYVVVAPD

SEQ ID NO: 43461 - protein, 324 aa, unidentified
MIDGMLGIDVSKNTLDVSLSSCNKVRARSFPNSSDGWRHLLDWLINQKVRRVHACLESTGRYSLGVACVLYEIGHIVSIVNPAQIRDFARTKLGRNKTDGVDASHIREYCELFKPQPWAPPSEAHRRLGELQTIRAGVVAGLTEWNNRKNSGMVDAAALSLADATISHFTSQLEAVDEAIAKTIDNDSELRCKRDLLLSISGVGETLAGVVLTELPSPDVLRSSAEVVAYAGLNPRRHQSGTSIDRVTRISKIGNAVLRAALYMPAMSAMRYNPAIVALVTRLRSRGRLKPMQIVVAAMRKLLVLCFGVLKTGKRFDPALAMGC

SEQ ID NO: 43462 - protein, 458 aa, unidentified
MAKRKKRKQGKLDRTLPTLKPNGAGIDMGATEVVAAVPADRDSESVRTFPTFTQDLNALADWLQQCGIDTVVMESTGVYWIPLFQILEARGIEVYLVNAQHVRHVPGRKSDVLDCQWLQYLHSVGLLKASFRPEQDVCAIRSLLRHREGLVQMASVHVQHMQKALDQMNLQIHHVISDITGVTGLAITDAIISGQRDAQELAKLRDRRIKAPFEIVAKSLVGDYRAEHVFTLKQSQTAYRYYQQLIADCDREIQERIETFQRTSAGPSAPAESSNPSSGGTDSSFNLGSHLKRIYGTDLTAIPGFECLRIRTIFSEIGVDLSSQFPSSENFCSWLNLSPKDGTSAGRRIRAPRIKNNNRAANAFRLAAQSLHNSRSYLGDFYRSQRARFGAPIAIKNTAHKLARIFYHLVTSRTAYDETVFAKLEAKNQKRRLRKLQSFAQRMGYSLVPAHVPSLQVP

SEQ ID NO: 43463 - protein, 366 aa, unidentified
MTRYVGLDAHSKRCVYVIQDEQGRAVGEGSVPTTPVGLHLLRARYALPAGTRVALESGTMAFFVARLLTRLELDPLVVDAHEVRMKALRPNQKSDRRDALELCEGLRRDSYRSIVHVPPEPIERLRETLGRRRHLVRVKTMQRNAVKRLLRATGLGSLGRSLGTQRAWDRLLEGVAIDPSLHAFCSAHRAVWRCADEQIAALEDSLRVQGEPLQRDLDRLQTVPGVGPIVALTVVAVFSDVRRFPSAKHAASYAGLVASTFDSGERIQHGRITRRGSNELRAMLCEAAHHAGHPDHPLNPYFSSLCVRRGYKMAVVAVAHRLCRILYAMLRHGTDFDVHRLGIEPGHFEHTIVRHYRRKSRTALPA

SEQ ID NO: 43464 - protein, 412 aa, unidentified
MEGETVIAGVDTHKDVHVLCLLDGLGRKIWSGGFRADPEGYDRLAEAIGDPGSCAVVGVEGTASYGAGLTRRLVELGYNVVEVLRPKRDKARPGEGKSDPLDAERAARKAASGRGCSVPKSQDGWVEAVRQLYVARRLAVATSTSCVACAKSMLTTAPGALRERFRGRERPKDLMPLLARRRKAGDALEESVLASLRSVAAVWKEARSQVESCDARIRALLEANAPALLGVEGCGTTTAAALVVAAGDNPGRLKGEAAFSMLCGASPIPASSGKTERHRLNRGGNRQANWALYEIAIKRMAYDERTKRYVAKRTSEGKSRREAIRCLKRYIAREVYRVLMDPNPDGAAPEGPELAKMRKAMRVTQKQAAAELGLSAAALGHLERGKRRSTKLERRYYELLCELKGALPQTAS

SEQ ID NO: 43465 - protein, 363 aa, unidentified
MIIIGADYHPGFQQIAFVDTETGDCGEQRLQHREEAEKFYRNLAAQGTKVRVGMEASGHARWFERLLAELNIELWIGDAAEIRTKRVRKRKTDREDARLLLRLMLEDRFPQIWVASWENRDLRQLLWHRHRMVQARTRLMNQLQAVALNEGLRCKKKLWREHGREQLESFRLAPWASRRREDLLKLLDQLNPTIAELTQAIEQEAEKCPAARRLMTHPGVGALTALAFVLIIGRAERFQCGKQIASYLGLVPLEDSSGERRRLGHITKQGNALLRFLLVEAAQVTVRTIPQWRSKYFHLAMRRGRKIAKVAMARKLAVRLFWMMRQEWNYEQVQKFGSHVGQPVHRHGVQENTEKLTGASRSS

SEQ ID NO: 43466 - protein, 364 aa, unidentified
MDDPRQTREQVTLGVDTHAEVHGAAALDERGRLLGTCTIPTTAAGFTELVRWTSQYGELSRVGMEGTGSYGAGLARWLRARDVVVIEVDRPDRRTRRRRGKSDSVDAEAAARAVLAGTATAQPKAGTGAMEMVRTLRVARQSALKARTQAANELHALVVTAPDAMRAELRRLKIPQLVATAAAFRRSAELTTPTAATKLALKSIATRYQHLAAEIEALDKHLDQLVAVAAPALVAIKGVGTDIASTLLTIAGDNPERLASEGAFAHLVGVAPIEASSGKITRYRLNRGGDRQGNRALYLLAVGRMGWDPATKAYVARRTAEGRTKPEIIRCLKGYIARELYPVLLVMTPEARPGRSPKSSLQTA

SEQ ID NO: 43467 - protein, 370 aa, unidentified
MLDTTTFVGLDVHARSIKAVSLDVMTGEVRAATFGYDAGAVAEWVRSVDPGARCVYESGVTGFDLQKRLSGLGVDCVVGAVSKMIKPSADRRRKNDRNDAEFLARMLSVGNVVEVWVPDDECEAARDLTRALEDARDDLSRSKQRLSKFLLRHGLVFDERTPTGRRKGNWTRAHWSWIESIRFAEGADNDVLAYYVDAVRRAAEEKARLEGLVEAEARKPRWRRRVDSLRCLKGVDTASAADLVFEAGEFSRFRNARSFAAWVGLTPSEHSSGESDRRGAITKAGNKHLRKTLVEAAWHYLTCSGRPKDLARGQAPDRGARRHAAKGVRRLVERREALLARGVHGNKANVATARELACWVWAVGLMAEEA

SEQ ID NO: 43468 - protein, 364 aa, unidentified
MLYTGIDLHRRSIVMCTVNAEGSVVARTKINTDPDAVVAYFRQWTEPQRAVVECTSNWYWLCDLLRSLDIAVVLAHAKYLKAISYAKVKTDAIDAHTLAQLLRMGFIPEAHQLPPEYRAMRDLLRQRMVMEHKRTTLMLHMTSMLAKFNIIQFPVSPATSGFADFIGSCAIPEQYRITLLMYHQQCQLVTDHENQLEAYFKRQLRPTPTLQLLVSIPGIGDITGAIIAMETGNIHRFADAKHYFSYCRLAPGAKDSGGRHTHRSGSKDGNQYLKYAFTEAAIKAIMHYPEIRQFAARLERRSNPTIARTVVAKELARIVYYVLTRQQPFQTFKGMKVTKRHDWPRTCKPVRITGLPTSQDVPTA

SEQ ID NO: 43469 - protein, 284 aa, unidentified
MAKNVFQAHGADAAGAIVFRKQLRRDKVLAFFAGQPACLVAMEACAGAHHWAREIGKLGHTVRLIPPSYVKPFVKRQKNDAADAEAICEAAQRPTMRFVAVKSEEEQASAAVFRARDLLVRQRTQTINALRGHLTEYGLVVAQGPSHIAKLMEKVKDPEGDLPEAAHLALTMLVDTLRSLEERIKHLDAEIARRAREDEDVRRLATIPGVGPITATALIALAPCAATFRKGRDFAAWLGLTPLQRSTGGKQKRCNIEDGRAYLASPAYHRSERCRASCSSARRS

SEQ ID NO: 43470 - protein, 392 aa, unidentified
MTYFIGIGLAKYKHDCFIMDENGEAIRDSFSFNNDKEGFNTLLNVLNSLDSNQEKRIGFESTGHYGSNLKIFLERNGYSFMEFNPLLVHRHFKSETLRRTKNDKVDARKISSYLYTREYKPNPNSSYHLNCLKSLTRTREALIKDRTRHIIHMINVLDKMFPEFKLQFGNQGLNAASAMYLLENYGSPSKMSNMTRASYDKMKSELRRTISYAKFLRIKELAKNTIGNEDEILVFELNTYLELFKELDKKILKVEDKITKEFSIMKCHIASIKGIGIITAAGILAEIESIDRFDNPGQLCAFAGIEPSENQSGTHDGGGKMVKHGSPHLRNYLMQSAGYMLIHNPVLYEYYLKKRNEGKCHTVALSHVAKRLTRIIFYLEKNDTDFNIDKMR

SEQ ID NO: 43471 - protein, 348 aa, unidentified
MDATTVAIDLAKDVFEVAIGNRGGQVLHRHRFTRARLQRFLEGQAAGTEVLMEACGTAHHWGRLCQRLQLVPVLLPVQYVRAYVRRNKSDRTDAAALLEARRCGEIAPVPVKTPEQQAWQGLHRIRQQWQKTRTARINGLRGLLREYGIVVGLGARRLHAHVPAIVTTEEAPVPGPLLAALQTLLEEIRELERRIKALDATLVAHLATDDVGQRLQTIPGVGPITASALLASVPHIHQFRRGRQFASWLGLTPREAASGHRVWRGRITKRGDVYLRTLLIHGARSVIRHAHAHARQAHVALTARQRWVLALVSRRGVNKAATAFANHQARVIWAVWRSEQPYRCVATP

SEQ ID NO: 43472 - protein, 489 aa, unidentified
MKRAKKTSNTKTRSSSRKRLKALQIVHPNAAGIDVGASSHYVAVRPDAVPAGKPAVRFFGTFTVDLDALVEWLKKCAVDTVAMEATGVYWKPVFEKIEAAGIEAILVNARHVKHVPGRKTDVKDCQWLQQLHSYGLLEGSFCPTQDICRLRTLVRHRANLVSDAAQAVLHMQKALTQMNVQLHHVINDLCGETGLRIVRAILNGQRDPEQLVKLRDCQITRSTPKEMEQALQGDWKEELLFVLRQSLKAFEFCHEQMDECDLEIEALLKRIPKATPVAKPEQAPAKDPLAAQDPKPKRPQSRKRNEPEQDLGPELARICGTDLTKAHGLRILSVLVIISEIGIDMNRWRSAKAFCSWLGLCPNNKISGGRILSSRTRQVVNRASTALRMAASGVAHTETWLGSFYRRMRARLGPAGATTATARKIATVVYHLLKNQEPFVDRDLELYEKRVYQNKLARLRKQAHTLGYKLVELTQDQDVTTTATCELSE

SEQ ID NO: 43473 - protein, 325 aa, unidentified
MEAKKLCCGIDVSHTTLDVCYQNNLGELFHLRVGNNNKGFATILEHTGSDYHFVMEATGVYYIRLAFYLHQQNCKLSVVNALSIKRYIQMHLERNKSDKKDASWICRYAIEQCPLYWEMPDSAYFESKQLYNTIREYAEQIKRFNNQLHSLRLLPQPSKDTIKSLEKVNKQLEKEIAILEVKLQAMLEQWQPAQLKSISSIKGIGKRATAMLIVFTQGFKYTKNHRQLISFAGLSPTEYSSGSSIQGKPRIYKRGGKNLRDVLYMCSMNAIKTNTACKTLYERLRSNGKTGKQALIAVCNKLLKQVFAVVKNNSLYQPNYRSAKP

SEQ ID NO: 43474 - protein, 424 aa, unidentified
MKKNAYRTVAVNLVDAQKLAEVFRGKKLVIAADAAKWDFVAALMAEDRSVALTIHWRAPNQTRLFVRLVAALAAIAQVEFAVESTGTYADPLRFLLAEIGVPIFRVSAKHSHDAAEVFDGVPSSHDAKSAAIIGWLHLQGRSQRWTSKGEADRDLAAATDRMAFFDAQFHHCCNLLEAKLARHFPELTEALGLGSATMLALLKSYPAPFDISQNAAQADALMQQVGKQLLTAGKRVTVLQAANASTGLPMTAGEKAQIQELAAEADRQRAAASQARKRVKKLAQEREEIRRMGEVVGCVTAAVLFAETGDPENYESAKAYVKALGLNLKERSSGSHKGRLKITKRGSGRARQYLYLAVLRLIQGDPFFKAWYERKVARDGGKTKRKGIVALMRKLAAGLWAAAKAGRFDSSKLFDSRRLSSKTA

SEQ ID NO: 43475 - protein, 404 aa, unidentified
MSVHVAPVTSSTIVVAVDVGKTSAMLSVTDGARKRVLGPVEFSMTRSGLVATVHRVEAVVVASAQVKVGVEAAGHYHRPVLDYGWPTGWEVLELNPAHVAEQRRVVGRRRIKTDAIDLEAITDLLLAGRGQLITEREVLIGELSAWAGQRSRRVATRSATKNQLLAQLDRAFPGLTLALPDVLGTKIGRLITAEFADPARLCALGVSRLIRFAAARDIQLRRALAERLVTAAREALPTRDGVVARRVLAADLGLLADLDTQIETAERELAALLPASPYATLTSVPGWGVVRVSNYAAALGDPDRWPGPRQIYRASGLSPMQYESAGKRRDGTISREGSVALRRALIDLGLGLWLTEPTAKAYAAELRSRGKPGGIIGCALAHRATRIAFAMVRDHTSYDPSRWA

SEQ ID NO: 43476 - protein, 405 aa, unidentified
MSASALSGETDAERTPPPTPPSVDEESSGYDRRFERKLTRVCSTPAPLSLVNGGQIMQIPFALLNIGADVAKDTIVVACSEGGFPVREIANQRAAVLTFLKSLPAGCRIGVESTGTYHELFAEAAHQLGFLVFVLNPKDTRHYAQAVGLRGKTDRVDAALIARMIAHEHTKLHPWTPPTAQQREIDRLIKRRATLIGLREAVEMSLHELGGFADELKALRSRFNQLIARLDLRAKALVEASPERKQNFARLCTISGVGPVVGTALVNTLERVPVKSADAFVAFTGLDPRPDDSGQHRGKRRLSKRGPAELRRLLYLAALSAVKTKPWRSLYEHYRAKGLSSTAALVILARRIARTAWSIYTYKTEFDPARLTRSLTRTIESSERIEPLLHALSNRVECQVIEGRF

SEQ ID NO: 43477 - protein, 339 aa, unidentified
MKLTPVGVDIAKNVIQVHWVDPDTGEIVNKAIKRGRFLEYFVNRSPCLVGMEACGGSQHWARCLIRMGHDVKLMPAKFVKAFNIGNKNDAADARAIWLAVQQPIKAVAIKTEAQQAVLGLHRMRQQLVKFRTMQMNSLRGLLTEYGEVMAKSRAALDKGTPDILARLAQRLPTMLIDSLREQWNGLTKLDEQIAGIERRLRDWMKHDQACKAIAEIPGVGLLTATAAVATMGDPASFRSGREFAAWLGLVPAQTGSGGKVQLLGISKRGDTYLRTLLVHGARSVLLHAKERGTWIEQIGKRRPKNVVIVALANKMARTIWAMLAHGRPYQKEYHSTRVA

SEQ ID NO: 43478 - protein, 371 aa, unidentified
MKSIIYIGMDVHKKTYSLCALLKETGEIIGETKIPADVSLIIKFIENAKKSVDSDDVQIKTGYEAGCLGYSLYWQLAAKGIECDILAPSTMHRSAKNKVVKNDRRDAKNIAANLANGTYKSVYVPTDEDVEIKEYIRMMHDFKIELKKVKQHINAFLLRFGHHYPGKSKWIPAHIKWLKELELSDMYREILDEYLSQLEILTEKIERFKYRLEELSQKETYNEKIGQLRCIKGIDTTAAMTMHAETSDFDRFPTANAFASYCGLTPGEDSSGDSYHRLGITKQGNSMIRTTLVEAAQTLVRGTIGKKGKKVKSKQKDQDVKVIDYADKAVIRLQKKYHRMIFRGVKRNIAITAVARELACFVWGIETGHIS

SEQ ID NO: 43479 - protein, 523 aa, unidentified
MVAKRSSKKSKSRPAEFLQKPRGVIQPRVQKVGPEHFGIISVDCAKARSKWMLCDFYGKVLIPPTEVAHNRRELDAMIAQVRAALVTHDLRDCLVAVERTGRYHHVVKNAFAKADFDTRTVHPYATKQFRQPASPDVKTDDADLGAIHRVAANGFALSEPTPTSAWRELQLAVRHRRDLVRKSSALACQIREHLDAALPGYATCFDKLWESNVAMPLIRQFGSAQAICAQGVAGMAQFLRERQIRFQQRTLNTVLAWAQSAAAPDLAADYHRQIGLAYVDDHQRKSQEILVLERDLAHRLAQTPYVLLMSTPGVNVVTAAEFAGEMGPIENYANPRTITGRAGLFPSRYQSDRVDHADGPLVRRGNRALRAAILLIADNLIKCNGHFGALATRWRLLGKDPRDTHVKVAMRFCRIAYHMVAGRQVFHHPCLRTRSYILEKLIAFHVEHETPCKDYLQDINYAINQIPQKEHAAEAKPLADRLQEAQDRGRKGPQPLSEIIAIVLARLGLGAIQSTPSGDPDLT

SEQ ID NO: 43480 - protein, 343 aa, unidentified
MKLSRVGVDLAKNVYQLHGVDRSGKTILKRRLKRHQWFKVLLDKTEPDCVIGMEACAGAHHWGRELQARGYTVKLIPPQFVKPYVKSNKSDAKDAEAICEAMSRPNMRFVTVKRVEQQDIQATHRIRAELMTQRTAKANQIRGLVAEYGLVAPKHLSSLRAAIPCWLEDAENGLTGDFRALLQGVWADLLLLDDRVGEMDQKIKLLADNNEVCVRLQQLRGIGPMTSTAMIATMGDARQYPKSRQMAAAIGITPKQHSSGDKHRLLGISKRGDVYLRTLMIHGARAVVARAKHKDDRLSRWVTNIANKKHPNVAAVALANKTARMAWAMLRNETDYDPDFALR

SEQ ID NO: 43481 - protein, 460 aa, unidentified
MARRKKSRNQAVPAPALPQSLEQVNLHAAGIDCGATEHYVAVSDDRDPQPVRKFGTFTADLLALVQWLLQCGITTVALESTGVYWIPLYELLVTHGIECLVVDPRRLKNVPGRKTDWLDCQWIQKLHTFGLLRGSFRPDDEICVLRSYMRQRDTLVRYAAQHIQHMQKALEQMNLKLTEVISDITGVTGLRIIDAILAGERDPETLAALRHEKCQNDEATIALALEGNWREEHLFALRQAVELYRFYHQKISELDRQIETYLQRLPDKSGGEIIERSRPRSRSRNEPAFNVPQYVLQLSGVDLTTLDGFRCGYNMLDLLSEIGTDMSAWPDEKHFASWLGLCPGIKKTGGRWLSGARPKNACRAARIFRLAAYALSRAKCALGAFFRRLKARLGSPKAITATAHKLARILYRMLKYGKPYVDQGMEYYEQKYRQRVLKNLKRRAAELGFELVAVAAAAAN

SEQ ID NO: 43482 - protein, 375 aa, unidentified
MSNHSEAFVAFDTSKLRNAVAIADSGRTGEIRFLGEIENSATGTAKLARKLAGKYERLTFCYEAGPTGYELYRQIKSLGQECIVVAPSLIPRKPGDRVKTNRRDAVSLARLLRAGELTAVWVPDRHHEAMRDLTRARDTAVDDLRSKRQQISAFLLRKGLHYCAGKKTWSQAHLNWLMSQKFEYPEHRLVFEEMMMAMRQAQERLERLEQAIRAAVADWSLADLVTALMAMRGIDLISAATFLAEIGDLSRFQSPCELMAYLGLVPSEDSTGDCVKRGPITKAGNRRARRMLVECAWSYQHPPRVGKDKQEKIAAAPRAVREIAWKAQSRLNRRYRALIRRGKLKTVAITAVAREFAGFIWAVARAATAARATAK

SEQ ID NO: 43483 - protein, 359 aa, unidentified
MVDTTSTSRITGGVDTHKDTHTAAALDATGRAIGNATFAASAAGYAELLLWLRRFGPLDRVGIEGTGSYGSGLAAHLRREGVHVIEVNRPNRQARRRHGKSDPADAEAAARATLSENAIGIPKSQDGAVEVIRILRLERRSAIHARTQAANQLHAIVSTAPEPLRAALRELSFAALVQRARRLRKVVPLDAVSATEHVLRGLAGRWEQLDREVGILDKHLERLVKKSAPDLIALRGVGIDVAGALLVAAGDNPERLANEASFASLCGVSPVDASSGRQHRHRLNRGGNRDANRALWVVALVRMRCDPRTRLYVARRTSEGLSKPEILRCLKRYIAREVFKILRASAAANDAVKTPAAAA

SEQ ID NO: 43484 - protein, 340 aa, unidentified
MKEVSTIGIDIAKSVFQVHGINQAGDVVIRRKLRRGEVGEFFKRLPVCLIGIEACASGHYWARTLVNMGHDVKLMPAAYVKPYVKRQKNDAADAEAICEAVQRPTMRFVPVKSEEQQGVLMLHRARELLVRQKTMLINALRAHLAELGIVARLGVMGVRDLVALVEETDQCEVPEIVRRALLPLCDQLRHVQEKIGEMNRQILEWHRSNALSQRLETIPGIGPVTASAIAATITDVSSFHSGRQLAAWIGLVPRQSSSGGKERLGRITRQGNPYLRRLLVIGATAVLRFSRKSKTASTQWAAGLLERKPAKVAAVALANKMARIAWALMTKEISFRTVTG

SEQ ID NO: 43485 - protein, 335 aa, unidentified
MVKENFIYVGIDLHKETHTAVMIDCYNQKLGEITFPNRPAAFPKLVTKVKKCNTDGKEVVYGLENAYGYGRALAVWLIDKGYLVKDVNTAISHRQAKHRGAMYRKSDSDDAKAIALATLNMLDKLPDACPNDAYWSLGQLVHRRDNIMKQRTRLVNQLHEQLCIVYPSYKQFFNDISRPTALYFWEHYPSRKYLKGKSVEDLRAELVPVSHNKCSTKTCEKILDAVASDKVKNNAYQDARDMVTLSIVSDLQHYDSQLTEVDKMLEQMYKMLGCTLTTIPGVNVITAVKILAEIGDIKRFANANKLAQFAGIAPLHLSSSGKGKDVATKQGNRRL

SEQ ID NO: 43486 - protein, 390 aa, unidentified
MLKIVYPNCCGIDVHKTFIVAVIAITDNHGITSYHRKRFSTFTNGLLQLRDWLEYYSCFDVCMESTGKYWIPVFNILEEHTNICLAHPKYVKAIRGKKTDKKDAQWIADLFKHDLVASSFIPPLKIRQLRDLFRYQNCLTWPNLQIASVVSDVFGKSAQKIIRSILDNPDEKPNIEQLVHKRMMDKVQDLEIATQGDLTSEQAEKIRVIKAHYDALAICKEDLEQMIRELGREYQEQVKLIQNVPGFKDELSALRIISEIGADMSVFESAGKLCSWAGLVPTNNESAGKKYSTRISKGGRYLKPFLVQIANAVVKSDKHPEFRNKYLRRGHRKAIIAICRKLLVAIYQVLLKKENYNPILQGLTEIRNPDKTMSVQDAIRFAQQHGFNVS

SEQ ID NO: 43487 - protein, 343 aa, unidentified
MQTVSTIGLDIAKSVFQVHGVDAGGQVVIRRQLKRRYVLAFFQKLSPCLIGIEACASSHHWSRELQALGHTVRLMPPAYVKPYVKRQKNDATDAEAICEAVTRANMRFVPTKTPEQQSGLVLHRTRHLFIRQQTSVINAIRAHLAEFGIVAPVGRRGVEELLNVVADPNDKRVPEIARACLAAFGAQLRRIKEQILEFDRLITAWHRSNEMSMRLDEAPGVGPVLATAVVATVADPKVFRSGRNFSAWIGLVPKQHSSGGKDRLGSISKQGDRYLRSLLMIGALAVIRYAKIHGTRHRPWLTALLARRPTKVAAIALANKIARMAWAMMAKGERYKEPVALAA

SEQ ID NO: 43488 - protein, 281 aa, unidentified
MEKSITPIGTPVGIDVHKRRCKVVELDQGEIKVQKSIANTREEWLEMLTELPPDAEIGLEVSTAGYFAMSVLEEAGWRERAHWVHTAGIDSNRRQKNDRLDAERLARKLAAHHLDPLPEAWFPPPEIRALRLRARARCWLALLRTQGKNHLQSLLQMHGLLAPGSDPFGAAGQKWLAQQTLPLPLTESLPQIQRLLKLLEEEIAISEKYLQAVEAQFPELALLRTIPGIGTILAPVIWSEIGTIERFRSAKALANNTGLVASYYDSGDVQVSGPITRQGSR

SEQ ID NO: 43489 - protein, 313 aa, unidentified
MPSPMDFGVDVAKDTLQIASAQSPTELSLSNRRSSISAWLAKLPRGSGLAMEATGRHHLLLAELAHAAGMIVYVLNPCDLRHYARAVGLRGKTDRVDARLIARYLLREQAELHPYVPPTPVQREIDQLLRRRATLVNTKTRLQLSLRGMASYAADLRHVLKRLEALIAKFDQRLRQLATHQADAQRRVESTLGIGPLLGVALTNTFERVPLHNGDAAVAFVGFDPRAKDSGQCKGRRRLSKRGPAELRRLLFNGARSASKTKLWHPLYERYRNRGLSATEATVILARKLLRIAFSIYRHGTTFDPARLRSCLT

SEQ ID NO: 43490 - protein, 393 aa, unidentified
MQRDTKEVLAELVGKLKEKLDPKKVGATSAGEKHQRGELRPNLDRLTVGVDLGDPESHYCILGLEGETLAEGQLRTTEEDFAAFFQGLNAARVVEEVGTHSAWVQEVISGCGHEVLVANPRLMDGSKRRKRKNDRIDANKLARLGRVDPESLYPIQHRSREVRQDLVMLRARDALVAARTEIINTTRGLVKSMGTRLPKCSSRSFAQKGEEAVAVEMREALLPLVRLAATLSADIKEYDKKIEELGREKYGHTALLRQVKGVGPITALAFVLTLESRQRFVKSRDVGPYLGLVPKQEDSGESQPQLGISKAGDTMVRKLLVGSAQYILGPFGPDTDLRRYGLRLCERGGKNAKKRAAVAVARKLAVLLHRLWVSGEVYEPLHNAISAPIAAAA

SEQ ID NO: 43491 - protein, 347 aa, unidentified
MGKIAYIALDIHTRSCTLGAMNAAGRFLGNQQFATSEKELVKALEMVKAREKHLVIEEGPLTRWAAQVTRAHVERVVTCDSRENALIYKSSSKRDTLDTEKLCRLLRLGELKQVYQPESDHRAIFKAAARHYIDLRHQLIAIKQKIKAVFRYWGVINCFGARLYSVKGREGYLQQIPHGVVRQQLLRLYELMDSHVQAKESAQAELKALSRRYPEIREFKKISGIGALSACLFDAFIQTPHRFDTKRQLQRYCRLGVTERSSDGKPLGYQRLDRSGIGELKAISYRSFVASMRGDNEVKRFYQQSLARTHNKVHARLNTQRKVLSVMYGLWKKGGPYRSDLFWDPSA

SEQ ID NO: 43492 - protein, 365 aa, unidentified
MWQTDEPWVLRDRAEAWVVTPPSKQNPNSCLGQPSPYLQGRVKKRRRRRKGKDSYIGIDVAKAHLDLAVHLEGDPWRVSNDEAGVSAVERHLRELGPALVVLEPTGGLELPLTAALAAAGLPVAVVNPRQVRDFAKATGRLAKTDRLDALVLAHFAHGVRPAPRPLPDAQTRELAALLARRQQLVQMLTAEKNRLATTRPPVRQRVQAHIKWLEQELRAVDGDLSSTIQESPLWRAKDDLLQGVKGIGPVTSITLLADLPELGTLDRRQIAALAGVAPLNRDSGLFRGRRKIWGGRARVRAALYMAASIAQRFNPVIKDFHQRLLKAGKEKKVARTACMRKLLTILNAMIRDQRPWNPGLARQYS

SEQ ID NO: 43493 - protein, 343 aa, unidentified
MQAVTTIGLDIAKSVFQVHGIDAEGQVVIRQQLRRSRVLGFFKKLSPCLVGVEACASSHHWSRELQALGHTVRLMPPAYVKPYLKRQKNDAADAEAICEAVQRPSMRFVPTKTPDQQACLMLHRTRHLLIRQQTAVINAIRAHFAEFGIVAPVGRNGVKELLDVVAKSDDGRLPMIARQCLEALGDQLQSLKAQILKFDQCINAWHRSNETSRRLDDLPGVGPALATALVASVPDPKAFRSGRDFSAWIGLVPKQNSSGGKERLGNITKQGDRYLRSLFCAGALAVIRYAKIHGSKYRPWLAKLLERRPTKVAAIALANKIARMAWAMMAKGESYREPVALAR

SEQ ID NO: 43494 - protein, 366 aa, unidentified
MKKISTVQVFGKEVFKEQKLTIGVDLGDRWSFYCVLDEAGKVILEQRVGTTPEAMKQTFGKIPRSLVALETGTHSPWVSRLLTELGHQVIVAHAQKVQLITKSNRKDDRHDARTLARLARIDPELLGPVRHRSAKAQIHLTVIRARAELVSARTALVNAARGLVKSFGERLPKCGTYQVSRELAEGLSVELRDVLQPLLKEIESLNERIQEYDERMEKIAKEVYPEVSLLQQVKGVGTQIALTYVLTIEDPYRFAKSREVGCFLGLKPGRRNSGESEPQKKISKEGDRYLRTMMVQGAHYILGPFGEDSDLRRWGRKLSERGGANAKKRAVVAVARKLAVLLHRLWVSGEVYEPLRNSQKAMRAVA

SEQ ID NO: 43495 - protein, 361 aa, unidentified
MVVGVDVHKYCHTAVAMNPWGQVKSSLDFSNDTLDDCVDWLNRLGQKENIIVALEDANGYGVHIVEKLSKHNFPLRYVPAILTERDRRRSTQRDKSDYLDAKRVGKVILTKYEETLPAKESIADEKELNIARAMNLLLSERRDLVKQKTIVKNQLHALLHQYYGDHYQNSFKKPFSRKGLAFYLGDLSQARPEPSAKRIVKQGVLRRIGRLKLLEKQIVEIDGELEKTSRHHRPVQVLQKSIHGCGMLTACSIIAEIYTIRRFGAKAQLAKYAGVAPTARESGSKNKVYTNPFGNRLLNKALHVIALSQIAVRGDDKGKVYYQKKLSEGKTKLWALRCLKRQMCNRVFQTLKQAEIQKEDA

SEQ ID NO: 43496 - protein, 352 aa, unidentified
MKKHTRTTDWQQEPGVVIGMDLGDKESQLCVLGADNEIRQEVRVRMTTPAVQAWFAAVRTRAMVVMEAGSHSPWVSRLLEGMGHAVIVADPRRLRLISASDKKNDVEDARMLARVAAAMPELLKVVKHRSGEAQQDLTVIRARARLVEARTKLWCSLRGLAKSLGRRLPRRVTGETIRELMILEPLWKALEDVSQRIQEYDRQIAALEKKYPMVARLQQISGVGPLISLTFVLTLDDHLRFHKSRQVGSYLGLRPKQRDSGESQPQLRITKAGDRYLRSLLIQGAQYILGKFGPDTDLKRWGLKLAARGGKNAKKRAVVAVARKLAVLLHRLWCDGSEYEPLRQSQAAMAGQ

SEQ ID NO: 43497 - protein, 412 aa, unidentified
MLFVGDDWAEDHHDIEIVDDAGRVLARKRLPEGLKGVTRLHALIAEHLPEDLIDLDVGDAAAEVKVGIETDRGSWVAALVSAGYEVFPINPMSVARYRERHSTSGAKSDAADAHLLAEIVRLDRAHHRPVAGDSDEGEAIKLTARTHQSLIWDRTRHVLRLRSTLREYFPAALQAFSDLDAPDALELLGRAPDPDQATRLSIAVITTALKRARRRNVEDRAQQLWALLRAQELRQPPVLQTAYAAVVASEVAVITALNIQIDRLGAVMADHFGRHRDAEIYASLPGLGVILAARILGEFGDDPHRYPAAKARKNYAGTSPITRASGTKKVVLARYARNRRLGDALQQWAFCSLRGSPGATAYYQQLRNRKIGHQAALRQLANRLVGILHGCLKTQTAYDEHTAWAHILNAAA

SEQ ID NO: 43498 - protein, 348 aa, unidentified
MRFYTEQHQHYCGIDLHARTLYLCILDAGGNVLLHKNLPCDRARFLEAIKPFREDLVVASECIFNWYWLADLCAEHDIPFVLGHALYMRAIHGAKAKNDRIDAFKTVSLLRGGLLPMAYVYPAQMRSTRDLLRRRTHFVRKRGQLMAHIQNTFHQYNLPRPPGRLVYKYQRAPIPDAFLDPILKKSVETDLALCDTYDELIRDLEKTVHRQARAHDPQTLLRLNTVPGIGEILALTLLYEIHDIARFESVQRFASYARLVKCEKSSAGKRLGTSGHKIGSVHLKWAFSEAAVSVIRHLPQSKRLHDRLKRKYGKGKALSILAHKLGRTVYFMLKRNQAFDADRFLANA

SEQ ID NO: 43499 - protein, 395 aa, unidentified
MSKTCGIDWSERHHDVAIVDHQARVVGRGRVSDDAAGFTRLLELLAEHRDGEDGPVEIAIESDKGLFVAGLVAAGFTVFAINPRAVARYRERYGQAGGKSDPGDAGVLANILRTDRHVHRPLPADSDLVRAVKACARQHQEAVWARQQAMSRLRSLLRDYYPQALQAFPNLAHRAAANVLRAVPTPQAAQRLTPARVVALLKKAGRRNDPGLAEAISTTLRAPALRQPAPVEHALGVAAVGLIDVITAMSDAIAALEAELATVFDEHQQAAIITSQPGLGPVLGARVLGELGDDPHRFTDTAGLRSFAGTAPITRASGRSRVVTSRRICNRRLGDACHWWAFAAITKSPGARAHYDHRRAAGDTHNAALRNLANKLLAKLWHCLQTGTLYNEATA

SEQ ID NO: 43500 - protein, 429 aa, unidentified
MSSNENSNQNPPPAAQAVPAPEAWIGLDWGNQKHAFALQDRSGQSERGFLEHSPENLHQWLRQIGQRYGGRPVALAIEASRGAVIHALLNYAWLTIYPVNPITSARYRVAFTPSGAKDDQPDADVLLELVRDHAAKLRPLEVQDPHTVKLTELVQVRRDIVDRRTQTLNQTTSLLKTYYPQALELAGELNTDMALDFLSRWPDLISLKAAKPATIKRFYYQHNVRSTELVQERLEFIQKAEALTTETCRVSVAVLQVRHLVDQLRAFRKHISLFDKEIHNAFREHPEAALYRDLPGAGPQLAPRLCAAFGTLRSTYPDPASLQKNAGVAPVRVKSGNQLWTHWRWQAPKFLRQTFVEWAGQTVVHCPWATHYYERMKNKGKKHAAILRALAFKWIRILWKCWKDRKPYDEAAYLKQLSHRKSPNAIPAT

SEQ ID NO: 43501 - protein, 328 aa, unidentified
MDVSKLHLDVALLDQDGKVLEEVQVPNKGSSVRKLLSTWHKSRRCRVGTVVCLEPTGPYSFEAIKTLLDMSVPVWLAHPADIKNSIGMTRGKSDQVDALRIAQYAMRFRDKMQLLDESFLRLQELKDLLAMRDEFVRDRAKYRVQQGDRLRAMDKRAKSCFKRCSDKMITLLDRSILEVEKQIKDFLASDPQLSTLRDLAMSVTGIGPVLSATLLVVTRGFTRFDGPRQLNSYAGFAPYPYSSGTSIRGRTGVSPKANKPLKALFHMAAINAVRVPGDLQDYYLRKLAQGKPKMSVLNAVRSKIVHHLWAVIKSGIPYTPFKADLQMP

SEQ ID NO: 43502 - protein, 343 aa, unidentified
MDHFAGLDVSVKETSICIVDDTGRIVREVKVASEPEALLQVLANPIYRFKRIGLEAGPLSQWLFSALAEAGLPVICVETRHMRAVLQAQTNKTDRNDARGMAQMMRAGLYRPVHVKTLRSQKLRMLLTHRKLLQSKAIAIDNDLRGTLRNFGLKVGIVGTAKFEARIKELVEKLPDLAVLVEPLLMVRRVLREQFSILHRRLLAIVRDDEVCRRLMTVPGVGPVVALTYRATVDVPARFRNSKAVGAVFGLTPSKYQSGEINRTGAISKCGDEMMRVMLYEAAQIMLVRLAKWSWLKAWAMKIARHRGMKKAIVALARRLAVIMHRIWVDGTEFRWTREAAVA

SEQ ID NO: 43503 - protein, 414 aa, unidentified
MPFRIFVGLDWGDREHQVCSLVEGKPQQRRFEHSGKGLGALLSWLMELCGREPSTVAIAIETPHGVLVDALLEHGFAVFAINPKQLDRFRDRFSVAGAKDDRRDALVLASSLRTDPQAFRRLDPEDPVILQLREFTRAYRSLERDHRRLCNQLRDQLNRFFPQVLQLSNAADEPWVWALLERFPSPEKVRHAHQSSVERILGEHRISRIAAAEALQILKAPPLPVTEGVVEAATAHIDMLLPRLRLVHEQRRHCEASMARLVRKVAEAEDARPGPKHEHRDVEILLSQPGVGGIVAATVLAEAYQPLVQRNYHVLRACGGVAPVTRQSGNTRTVSMRYACNHRLRQAFHWWGHSASQSDPRDKALYTAHRDKGQSHARAVRAVMDRRLNVLMACLESGRLYKRDHAQQKGLDRT

SEQ ID NO: 43504 - protein, 349 aa, unidentified
MDITTAAADLAKNLITVCAQDASGRTVERRDLRRDAFLAWLRRLPPGCVVGMEACSAAHYWAREMAAMGLIPRIMAAEFVQPFRKSRAGKNDRNDAEAIAIAVREANMRFVPVKSVEQQARLARHRVREGWKEERTALGNRIRGLLAEFGVVIPKSQAALGRALAEALHDERLPEAARELVRESREHLEVLGHRIAHCDHAIGLACKGDPATTRLRELCGVGPTVADAAVATIGDARVFRNGRQFAAWLGITPRQFSSGGVTRLGGITRRGDVYLRTLLIQGARSALKSARHQAPERASRLQQWIVQLHARVGYQKTLVAIANKNARVIWALLARDETYNPEAWKAYQH

SEQ ID NO: 43505 - protein, 327 aa, unidentified
MSKMFWIGVDLGEKFFDAAVVGEETRSVAWAKLPCKTFAHTEAGMRQFVSWARALMARDTADGICLEATGRMAWQWTEMVADALGPVAMVNPRCSRNYGRALNIADKNDRVDACILAFYGIDRRPVAHRLPTKAQQELRDLTHAYQEVQTQYRAWKSRLRQKDLPSIVRKEYSGFLKKLEKTLAQLDAAIHQFLEKHKAFKEDAELMQTIPGVGEKTARTLLAEFGDLRQYSRSQIVALAGLYPREFRSGTSVYKKPRITKTGNARVRAALYMAALNARTCCPPMVAFADRLQKKGLRPKQILVAISRKLLLIARTMLTNQETFKCA

SEQ ID NO: 43506 - protein, 421 aa, unidentified
MSNFAAFLGIDWADTKHDLCLITATTQQKEFRTLKHTPEALQDFFLDLRRRFAGQPIAVAVEQSRGPLIFALLKYEFLTLYPIHPTTLARYREAFSPSGAKDDPTDAEYAAELLLHHRDRLTAWEPDDPATRTLQFLVGQRRRLVGDRTRISNRLTALLKNYFPQVLDWFPDLRTTLVCDFLTQWPTLDAVQQAVPATLEKFFRSHHAARQGLLERRLQAIKDSQPLVTDAAVLNASVVLLKALLAQMRVTLNAINEFDCEIERLCQGHADYPLFAALPGSGTVFAARLLAALGTQRTRFATAQDLACFSGVAPVIERSGQSCWTRWRYFCPKFLRQSFVEFAGESVKHSAWAKAHYASQRAKGKAHAAAVRSLAFKWIRIIWKCWQTNTPYDESVYLACLKKRNSPLMKLIEAQTAAAQT

SEQ ID NO: 43507 - protein, 420 aa, unidentified
MSKQNVELAAFIGLDWADQTHVVTLQEAGGDRRRENFTLDQTPEALQTWIHQVRIRFGGRPVAIAVEQVRGALIYALMHVEFLHIYPVNPQTLAKMRQAFYPSGAKDDPRDADLLLEVLLTHRQHLRVWVPDDVLTRSIQLLTEGRRHLVDERTALTNQLTAALKTYFPQALDWFGDMHTARACAFLHRWPSLQQLKRATSSSIRKFYQSQGYRGHDKLEQLLGNIKQAQPLTEDGAVLLASTMMVQALVTQIPSLTESIERHDQQIASLFAQHDDSTLFGSFPGAGPALSPRLLAAFGSDRNRFEFAAEMQQLSGIAPVTEKSGKSCWIHWRLACSKFLRQTFHEFAGQSILGSVWARAYYDHQRQRGKSHHAAVRALAFKWIRIIFRCWKNRTLYDETLYCKSLQLRGSSLAVALTTK

SEQ ID NO: 43508 - protein, 356 aa, unidentified
MGNLNRLDFSGQQIYVGMDVHKNSWSVSIFTEHLEHKTFSQPPEVNVLVNYLKRNFPGAVYHAVYEAGFSGFWTHDSLIEQGVNCMVVNPADVPTKDKERATKTDRVDCRKLARNLRSGEIKGIYVPPRTKVEDRQLLRTRQGMVTKQTRCKNQIKALLYFYGIQIPEELAQSRWSNKFINWLEEIRMNRASGDLALAAHLEELKHIRLLIAKLNRGIRALAKSDEYRKNVQLLKTVPGISLVTAMTLLTELYDINRFKNLDKLSSYVGLIPNTDSSGEKEQTTGITNRRNPQLRCLLIESAWVAVRKDPALLMAFNRLSKITAKNKAIVKIARKLLNRIRYVLKNQKEYVPAIVQ

SEQ ID NO: 43509 - protein, 350 aa, unidentified
MLIIGCDYHPGFQQIALVDSETGELSERRLIHREEAERFYGELKRQSLKVRVGMEASGHSRWFERLLRDLEFELWIGDAAEIRTKRVRKQKTDRQDAQLLLRLMMEERFPQVWVPDAANRDLRQLLWHRHRLVQMRTRVMNQLHVVALNEGLRRKKALWRPAGRKELESIALAPWASRRRQDLLDLLDQLTPKIQELTRALEEEVEKRPVARRLRTHPGVGPLTALAFELVIGTPERFHCGKQIASYVGLVPSEESSGDRRRLGHISKQGSALLRFLLVEAAQVTVRSQPEWRSKFFHLAMRRGRKIAKVATARKLAVHLYWMWRQGLDYGQLHKLGSHAGEPGHLDGGK

SEQ ID NO: 43510 - protein, 390 aa, unidentified
MSHAPQKASKRSEKLAAGRPTADRLRSGAHNTVAERDRRRPRRPNPNSRLNVQAKAMDSSHPQGREATMQHESSSQSVAGIDVSKSKLDCFIDVIDKSFSVVNDPSGIARLIEQFRAANVRLVLIEATGRYHRRCAAELLDGGIEVAVVNPQRAREFARSMGKLEKTDHIDARILADFARAGKDHRRLVKPSAQQTQIDDLVSRRRALVQMRVAEKNRLHDDLPKLARNQGNKLLRLIEQQIEDLDRAIAKLIESDDDWQNKSDIISSVPGVGQSSAHQLIADLPELGKLNRQQIAKLVGVAPLNCDSGQHRGKRRIAGGRGPVRTTLYMAAFNAIHYCDRFRGYAARLKQAGKPFKVIMTACMRKLLITLNQMIKTNTAFNASLTASIA

SEQ ID NO: 43511 - protein, 456 aa, unidentified
MTKGKKKQKWIQVREDMPPINRNAGGIDVGATAMWVSVPPDRDAEPVQQYGAFTRDLYAMADWLKRCGIETVAMESTGVYWIPVFQVLEERGIDVLLVNARYAKNVSGRKTDMLDCQWLRTLHTYGLLAGSFQPSAEIGVLRSYLRQRQMLIDSAATHIQHMQKALTQMNLQLAHVLSDVTGTTGMRIIRDILKGERDPKRLAGLRDVRTKSDEETIAKALEGNYRPEHVFALKQAVELFDVYQQKISDCDQQIAGYLRTLESKINIQAQPLKPAREKKKKRRNAPGFDCRHEAYRISGVDLTQIDSISESAALTILSEIGADMSPWKTEKHFASWLTVCPNNKITGGKIFQRQTRKSANRVRELLCICAQSLINSKSALGAFCRRMCSRLGPQKGIVATAHKLALLIYRLLKFGKDYVDIGEEAYERQYKERVVKNLARKAKQFGFQLVLSPATP

SEQ ID NO: 43512 - protein, 345 aa, unidentified
MELHTIGIDLGKTVFHLVGLNLRGEVVVRKKFSRAQLLRFTANVHVKLIGMEACGGAHFLGRALREQGHEVRLIPAQYVKPYVKTNKSDYIDAEAIAEAVARPTMRFVPIKTDDQLDLQSLHRVRERWVMRRTAVINQIRGLLLERGITLRKGRCYVGAALPGILEDADAKLSGALRMLLAQLKLELDHLDLRIDEADALIKKTVRENEACQRLVAIPGIGPVTATALIAAIGNGAAFHKGREFAAWMGVVPREHSTGGQQKLLGISKRGNSYLRRLFVQGARAVLQQRTKQSSGLSAWLAQLTSRAHRNVAAVALANKLARIAWAVLAKNEPYRPPVLADVAAA

SEQ ID NO: 43513 - protein, 411 aa, unidentified
MEENKVNDYSSSSGYQWYCTPVGIRTSEISKAKHKDGVKRFVGVDLSKQNCWACIMDLQGKVILHEKFSLRSAKRDKLYEMLQPGDLVLMEASTGTFNIARAMNRKSGVVACVINPHTTHINETKKKTDREDSLFLARLILRTPIAELQLVSIPSDREMANRDVVSHYRKLDDVHKQMVNRLHALFFDKGFPEAGKMNNLHSKLGRAAAIESCFGTDRAYAFPKRIAKDLSKELSLLEELQESGEKQFARIVKQDDRTATLLGSIPGVGLKTIATFIAFVGDVDRFCNAKQLAAYCGLVPRVYQSGQKDAARKITKEGQAALREYLIESVFAMTKTQFDFPLKRKFNELRLRMGGRKAAVAIARKMVVMMYSMLKNGTLFTVEDEQERQEVAAYHARKHLPELRPLSRQER

SEQ ID NO: 43514 - protein, 337 aa, unidentified
MKDFYFIGIDVSKKHLDCCLLFNSSVVRQDVISNHQKSIENYLSILCSEENIDIEQIVICAEYTGLYIYPLVIACQNNSYKLWLEDPTQIKYSSGLQRGKNDAIDAKRIALYASRYIDRIKIYKKPSVGIESIKLLSAELNMLCVDKAKYQAQISDQKEYMPNDMYKIKSKRLTLLIKELDKAINEIENEIENIVKNDVLLSRQMELLLSIEGVGKKTSLKMILETQAFTKFTDSRKFCCHAGVAPFSYVSGSSQHSKNKVSQRANKSIKTLLHLAALSAIQKKNSELRVYYERKIADGKNKMSVLNAIRAKLIYRIFAVIKNDQLYDLNHISQYTN

SEQ ID NO: 43515 - protein, 399 aa, unidentified
MIYVGIDVAKTTHYAAAADSDGVVLVEPFAFDNDAPGFAKFISKIASFPKEQLIIGLESTGIYSENLICFLFDSGYKLAVINPIQTATLRKTNIRKTKTDKVDTLLIIKSLMVNSYRLYTEQDTQSLKLKFLCRFRQSLKKSKARLKIQLSGYVNLLFPELLSFFKSGIHISTCYTLLKRCSSPAEIAALRLDSLSRLLSNASRGRFSRSTAEALKSLAKSSVGVKNPYISIQIAQTIQQIELLEQQIDEIENVIKDTICELDSVIMSIPGIGAIDGAMILGEIGNIDRFASPAKLLAYAGLDPTVCQSGKFKARSTKMSKRGSKILRFALINSAWQLTLKNDTFFNYYQLKLSQGLSHYGALGHVAHKLVRVIFTLLKHNVLFDPTRLVKSYFSLDFS

SEQ ID NO: 43516 - protein, 399 aa, unidentified
MFIVGIDIAKKSHQAVIIDEEGNQRSKNFRFANSLEGFNLLLNNMEEIDSDHSNFEIGMEATGHYWINLYTRLIDKGFKIHVINPLQSDALRNLYLRKTKTDSVDSKLIANVIRFGQYTETRLTDDKLLTVRELSRQRFYLVDMNSDLKRKVVVIMDKIFPEFQGIFSDMFGKTSCAILKKCPSSKEVLEIDFDEFAAIIKKSSRSKFNIAKAKEIKLAARDSFSALIDPAPLSFLVKQMVEQIELLENQIQNLEHEISEIFMQLDSKITQIPGIGPVLGAVILSEIGDINRFSSSKKLVAFAGIDPSIKQSGEFVSSENHMSKRGSPYVRRALWIASFVNLNHNKEIIKLYGKKTSNGKGHYKTMGFLCHKLLNVVYAVLKNNADYIPYAWTESKACS

SEQ ID NO: 43517 - protein, 338 aa, unidentified
MEHQRQYVGIDLHRRRSVIVRITEHGEVLETVRVVNDPLQLALAMAEAGDNPEVALEATYGWYWAADLLQAEGAHVHLVHPLGLHWDSRRVKNDVLDATELARRLSRGDLPEAWIAPPELRELRELVRYRAKLVALRISAKAQVHAVMAKLGILPTLADMFGPGGQKLLDEMAFEGAYAIRIASLRDLLEIYGRELTMIEHAVARRLRGHVGYRAVQAISGIGPVMAAIFVAEIGDVSRFHSAGHLCSWAGLTPTHRESDIKVTRGHITKQGSNLVRWAAIEAVAYYHGGAPIAPTYARVAARRGAMIARVAAARKLLCLVYYGLRDGEIRCLAKAAA

SEQ ID NO: 43518 - protein, 346 aa, unidentified
MKRTTIGLDLAKRIFQVHSVDPDTGEISRQTLKRSQVLRYFANHAASVVAMEACGSSQYWARELVKLGHEVRLISGQFVRPFVKTNKTDAADAEAIWEAAQRPGMRFVALKSEEQQAVLGLHRIREQHVGMRSALVNQLHGLMAEFGIALSQGWREMLRQAGELLAEECGVPELLRGALREQIEQIRALSEQIKTLERQISSWQRRAEDCQRIGEIPGVGLLTATAAVAMIGDARSFRSGREFAAFVGLVPRQSGTGGKIRLLGISKRGDRYLRTLLIHGARAVLRWQSRPGGALDPWLKSLLSRRARNVVIVALANKMARMIWALLAHGRTYQRGYGGPIAATVA

SEQ ID NO: 43519 - protein, 344 aa, unidentified
MSEVITIGLDIAKHVFHVYGADERGRSMFSKRISRGKLLDFFAAQPSCKVALEACGGAHHWARQLTQLGHEVRLIPPAYVKPFVKRQKNDAIDAEAICEAAQRPSMRFVAVKSEEQQAAGLLFRTRDLLVRQRTQLINAIRGHLTEYGWIAPKGPSHVARLADLIEEEEMASSLPEATLAMFRLMLDLLAGLNGKIADLDKEIARRARQDEVSRRLMTVPGIGPISATAIAALAPPVETFAKGRDFAAWLGLTPLQRSTGGKQKLGATSKMGERTLRRLLIIGSSAVVQQASKRGAPKGSWLEQMLARKPRMLVTVALANKMARIVWALLIKRENYRAPVAAKA

SEQ ID NO: 43520 - protein, 331 aa, unidentified
MIFVGIDIAKLNHFASAISSDGEIIIEPFKFTNDADGFYMLLSKLSNFGKDNIIFGLESTAHYGDNLVRYLVASSYNVCVINPLQTSSLRKNNIRKTKTDKVDTYIIAKTLMMQDFYRFITLYDLDIMNLKTLGRFRQKTIKQRTRLKIQLTAYVDEVFPELQYFFKSGLHQKAVYAILKEAPTPKAIASMHMTHLSHTLEVASHGHFKKDKAKELRVLAQNSVGACDSSLSIQVTYSIAQIELLDSQLDKIESEMTEIMQYIDSVIMTIPGIGYINGGMILGEIGNIHRFSKPCQLLAFAGLDPSVYQSGNFCAKKTRMSKRGLMCFVML

SEQ ID NO: 43521 - protein, 343 aa, unidentified
MKRYVGMDVSLKETSICVVDGKGEIVSEGTVTSEPAVIAAFIKTKAAGAKRIGLETGPTTTWLWHELRALGLPVICIDARHAKAALSMQINKSDRNDAVGLARIMQAGWYKEVQVKSLPCHEIRAVLNSRAQLVKIKRDIENQIRGLLKNLGLRIGKAGGKVFHRRAEELVGEHRLLQEAVRPLLGVREIVRREIASLTRKLLALARDNDESRRLMTVPGVGPINALAFCAAIDEPARFRRSRSVGAYLGLTPRRHASGEVDWTGRISKCGDAMVRTYLFEAAGVLLTRVPHWCRLKAWGLRLVKRIGFKKARVAVARKLAVILHRMWRDGTDFIWSSKEAAA

SEQ ID NO: 43522 - protein, 348 aa, unidentified
MSKHSVQAGDIAGLLRRFAQLKEKARARTGRDFPIIVIQEAGLDGFWIHRVLQSEGIESHVVDAASILTSRRRRRAKTDRIDGETLVRTLMAFKRGEPRVCSMARAPTPLEEDRRRVCRERRTLVGERVQHVNRIKGLLFAQGVFGYEPLRKGRRERLEDLQTGDGRPLPVHLKAQIIRELDRLEVLLEQLKAVEAERDALLKPETDEAASPAAMLAGLKGIGPQTAAILWSEGLFRHFDNRRQVAAYAGLAPTPWQSGTIDHEQGVSKAGNPRLRTTMVELAWLWLRNQPTSALSLWFHERVRLLGGRMRKTTIVALARKLLIALWRYTTAGVVIEGAVMKPAPATI

SEQ ID NO: 43523 - protein, 358 aa, unidentified
MNHRTWKLGNVKSAPVSEADVMTVGLDVHKATVHAALRSSGQEIATWVMPMDNKTVVASLKRFAPALKKVVYEAGPTGYGLARALKKAGLPAEVIAPGKVPQEPNPDSKSDRLDCRKLAEYAEKGSLKPIAIPTEQEEADRQVVRLRDQLVGKQRRVKQQIKSFLLQQSLAEPAGLAHWSAEGLAALKAMRLRHQLQLSLAVLIEELEHLTAMRKRVERHQAWLMKQRRHRKGARLLQTHPGVGVVTATAFRLEVYQPERFDNAEQLTKYLGLAPRVRQSGARRREGPLIKAGRGSLRALLIEASWRWIRDDAAAAKTYRRIVRNTGSGQKAVVAMARRMAVHLWCMMCRGVEYRSAA

SEQ ID NO: 43524 - protein, 371 aa, unidentified
MSELPAETRPARLKVEASPRPPGARKPETELGAVSTTAVPHPDSRSGPSPHLQGRVMDEQRTVFVGIDVSKDRLDVHLRPSGEAFFVSREGKGMDDLVIRLQGLSVALVVLEATGGFEATVAAALAGVGLPLCVVNPRQIRDFARAMGRLAKTDTLDAEVIALFAERVRPQARPLREPERVHLAELVGRRRQVIEMIGMETNRGRQAIAKPLARRLARHVAYLQKELDAIDHDIGEAIKHSPAWREAEALLKSVPCIGDVTARTLLAELPELGTVSRHQVAALVGVAPINRDSGLMRGRRAIAGGRTSVRAVLYMAALTAIRRRSPFRAFYDQLTARGRPKKVALVAMMRKLLTILNAILRDHTPWRPLNA

SEQ ID NO: 43525 - protein, 408 aa, unidentified
MNPLFVGIDVSSKNNVAYLMKPDGSKHSSFSVQNNLGGAKLLSEKIVSALHSMQLNDVVIGLEATSIYGDSLVYALREDGSLGRFQRKIHVLNPKQVRKFKEAYPDLPKNDWVDAFVIADHLRFGRIAKEVYMDDYRYQALRTLTRARFDIIQNLTREKQRFANYLFFKCSGIAQDKDIQNTSATTIALMEHFETVDDLANADLDELTAFISEAGRGRFVDPDATAKAVQAAARGSYRLPKTVNDTVNQAMSVSIASMRALKEQVKVLDKAIEQHLEIIPNTLTSIPGIGKVYSAGIIAEIGDIHRFNAQASVAKFAGLVWHRNQSGDFEAEHSQMIKSGNRYLRYYLLEAANSVRRCDSEFRRYYDLKFKEVNKYQHKRALALTARKLVRLVFRLLKDNRLYIPPEG

SEQ ID NO: 43526 - protein, 422 aa, unidentified
MNYKQNEKINQVKESTLVIGIDIGSTTQYARAFDWRGIELGKVFTFSNSREGFEAFKAWMQHLQDKYRKSDVIAGIEPTGHYWFDLGAYLEDEGILLVMVNPYAVKQTKELDDNSQSKNDRKDPKVIAKLVTEGRYSAPYTPDGVYADLRIMVANRKRLIREMTQIKNRFARWFAIYFPEYTDVFGDYEAQSSMLLLKKVCTPEAIVELGAEKINQIWRDAKLRAVGMKRATTLCETAKRSIGLKKGSSAARYEMKLLLEDYEYKKAQLDAVMEEIEKLCRKIPESEQMLAIKGIGVITVAGFLAEVGDVRRFESPRQIQKLAGLSLRENSSGKHKGQTTISKRGRSKLRAVLFNAAIPLIAKNPEFKSLHEYYTTRANNPLKKKQSVIAISCKLIRVFYAILAKGVTYDAQKLISGIHRQP

SEQ ID NO: 43527 - protein, 488 aa, unidentified
MSFELEEVSAGQALVPPFRLNFVRPRRPFKPVRRSAELQFHNAQVPGPRSHGVYHMTRYVGIDLHKHLIVGHVLDAAGTKVDTFRYESVDAATLEHIGRNRLRPEDEVVLEATTNCWAVVRALEPFVARVAVSNPMATKAIAKAKVKTDKVDAAVLAHLLRLGYLPEVWQPDLATRGLREWTIRRSRIVGQRTTAINRLRSTLAQRLLHCPYDMSSPVARDWIAGQTVDEDTRWLLESDLRLMDSVQAELDAMDQLLAQRGYVDPRVKLLMTLPGISQHSAQSLLAAIGDITRFRDADSLASYLGLVPSTRQSANHCYHGPITKQGRSHTRWMLIQAAQSVRLHPGPLGHFFRRLKRRKPYNVAVVAVAHKLVLLAWHVLTKQEPYRYALPQATENKLRRLRIQATGLKRPTGSAPGTKKSPAKLPGGSQRIKPLAEVYANEQVPAARPAPAGELRRLDELELTDFADSLQHEHIVPRRRRNSAASSG

SEQ ID NO: 43528 - protein, 343 aa, unidentified
MVYVGIDLHRKSSQLCALDEHGEQLLSRRVVNEPEALLAALAQLPERPAVALEAAFGWEWLADLLESEGIELHLAHPLRTRAIAAARVKTDAVDARTLAELLRGRLLPEAYVAPRELRQQRQLLRQRICLTQLRTSLKNRVHALLAREGIQRRQASLFGPAGRAFLAGLPLRPPERARLEQLLRLIAVFDTEIAALAAEIEARAQSDPRVSVLTSLPGIGRYTALLVIAELGDVGRFASAAKLCSYAGLVPRVRASGGRVRLGAISHQGSPYLRWALVEAAQQASRRPGPLRRRYERIARRRGRNVAKVALARQLLTLCYYGLRDGEIRCLARASSAWDMAAA

SEQ ID NO: 43529 - protein, 419 aa, unidentified
MPFKIFRKNCCGLDVHKTWIYACIGITDPNGRTEYKQTRFSAFTKGLQELSVWLGKYDCKEVCMESAGKFWIPVFNVLEKNCQVTLAHPKYTKPQKGNKTDRKDAKWICDLFMCDMIKPSFIPPPDIRQLRDLMRYRMKLTNMLTSEKNRALNCLTVSNLKLDDVFSDVFGKSSRSIIAYILEHPGEKFDVAPFIDRRCKHPLDEIQAAVNGAVSREQAAKLRECLQHIDEIGAHRENIEREIFRLAEPYAYQLSLIQTAPGLSGNPMTAIAILSEIGADMSVFPSAKHLVSWAGCCPRNDQSNGKVKSTRISRAGSYLKPILVQIANAVIKSNKYPECKERYRRLKARRGHKKAIIAICRMLLTAIWNILSKLEPYSADGYLADKLTEHSVIITKAQGLELLRQRGYIFKDDLVAESS

SEQ ID NO: 43530 - protein, 400 aa, unidentified
MIFCGIDIGKNEHGFAIVTYGDNNLEKPIIIKNNLEGFNEILKLIVKHENNNSKVVIGIESTGHYWKTVACFFEKQGYRVDVFNPIISAKREQQSVRGSKSDKSSAVAIAKVVRDDDYSTCHLGTDQTERLKSLLRQRDRIVDGSKKAKIAIINYWDLTFPEIQKRLTPDQLCSVSGVNFIKKFACAQEIGSAHLTSLKNILHRLTSIDVEELRSAAKKSTGLNTTAYHDAVLSEVRMLEVFNAEIKKLEKMIKEQDDEETILLKSIPGIGLVTASTFKAEIGDIKEFDQKDKSKPLCYRILAYAGAEPRIRQSGKYTGKIKMSKRGNKHLRTALFLAADNARKNSDYFKAIYTKQKKKGKHHYVALSHVMRKLVIIALAVIKTGEPFDEKKLNLELAIT

SEQ ID NO: 43531 - protein, 346 aa, unidentified
MEYVALDVHKNYTWARVENSQGARLYESRLAHAHGTIKNFVNRWSGRSPVAVETVGNWYWVVDEIEAGGGTPQLVNARLAKLMMGNVNKSDKLDCQGMNRLQRTGTLPTVWIPSSSVRDGRELARTRMVLSRQRTQLKNRIHATLGKYGYTVKGASDAFGKKGREIIEELLLKLPPHTQQALRLILDELDHVTDNLKAIEGHMIEIFSPCPQTQWLKSLPGVADILAVVIWTEIGTIERFNRAEQLASYCGLVSRENSSGGKIRLGPVRRDVNVYLKWAFVEAANSALLNAGRCGYGHISRLYERIKPRRGHGKAKVAVARHLAEASFWMLKKGEPYREPMPSTQR

SEQ ID NO: 43532 - protein, 364 aa, unidentified
MKEEKRRYVGIDLGKRDYTMAIIGRNGRMSIHKGTTTEKGRAALYRLLEKDDKVALEAGKLAFGIAREILQRVGSEVRVLNSAKLPVIWSEPTKTDKEDAMKLAHLVEERRDEKLPIVPLPSEREMERREVISGYQREVRGRTRVVNTPHSLFWKQGQTQIVRKDLATVAKAREAVKILTGLIREDAEWQLRHLELHEKRLGELRDRIKAGAKGDENMKRLQGIAGVGAIVAYAFVAHVGDGSRFGSGAQVSNFPGFVPKLDYSGSIRRHGPISKRGNGYLRGLLVQAVLAMVRSSRGGALKDRYIYLTRERGNNKRKTMVTIGRRMAELMYSIMRSKTDYEVRAWKKPVGKTAGLVEQARISA

SEQ ID NO: 43533 - protein, 420 aa, unidentified
MEPDKVDYAAWIGIDWGSEQHAVCLQAADSSRLEHSTLEQKPESLHPWFLNLLARFGGRKVAVAIEQSKGAVVNFLLGLDFVHIFRVHPTSLKNYRKALYPSGAKDDPTDAELVVQFARLHQDKIRPWVPDEVDSRLLLRLVECRRKTVNKRVRLTNELTQLLKEYFPQALQWAGELDRVMACDFLLKWPTLQKLQKSKPDAVRQFYKDHGCRNHELIDSRIEEIRSAPPLTTDKAIVEPSVMMTKTIVLQLRTLMEAVAGFDERIKAVYQKLPDAEIFSSFPGAGPVLGPRLQAAMGADRNRFDDSGEVAEYSGIAPVTESSGKKKWVHRRLACSRFVKQSFHEFAGQSIVYCAWARAFYESKKAGGMQHHAALRALAYKWIRIIFRCWKDHAQYSEQKHMASLKRRHPAWLAFLPAAA

SEQ ID NO: 43534 - protein, 312 aa, unidentified
MTKIICGVDVSKRRLDAHVAPSGAFGSFDNDAAGIAALAEFCRHHAVQLVAMEATGGYERQPFLLLWAAGIACGLTNPRSVRRYAEAMGTLEKTDRLDACVIARFAIAKELKPTSPPTAAQQRLNALVARLRQVTEDLTVNKQRRSSAISAEMVASLDEVIGLLKRQARSLEGEIASMIDDDPLWSQLDAALRTTKGVANRTVARLFAELPEIGIYSNKAVVKLAGLAPLANDSGARTGQRHIRGGRAGIRSILFLVADIARRFDQSLAEFHRRLTAAGKKKMVVRIALARKLLVRLNAKAREARACYALAT

SEQ ID NO: 43535 - protein, 394 aa, unidentified
MSLCVGIDVSKEKFDACGIGEGGKKMFSVSCPMDRSGFDTLVVQLPTDKTSFLLGMESTACYHMPLFSYLTTHGYQVVISNPLLIAQYANRSLRKTKTDKRDALTIAQFLMQEKESLSVETCSPLIGELRDLARRREKLTDQVTALKSDMKRILSVTFPELEHLTGVFTKSTLRLLADFPSAHALRQANYSAIAAIVIPRSRGRKSHASVHALMTAAASSVGVTSPAKEMILKQEACLLLEVEEQIRETTKLLMSLRNERIRDDTEILCSMRGIGENTAVNFLVEMGGAIGIYKNDKKLIAAAGLDPSTYQSGKYAGRSKISKRGNRHLRRVIWLMTTRTITNNAIFRAYFFKRRTEGLPYKKAVLATAHKLIRVMYSMLTHRTCFVEGGINYS

SEQ ID NO: 43536 - protein, 429 aa, unidentified
MNSTQNKKIEQVKETTMIVGIDVGSEKHYFRAFNWRGIELTRKPVAFSNSMEGFNSFYNTIVELMQKSELEEALVGIEPTGHYWFDFGQFMGEKNIKFVMVNPHHVHKTKDLDDNSPSKNDRKDPRVIAGLVKNGRYFYSYMPTGVYAKLRNASNRRFVLVEEQTRAKNRLQKWIAVYFPEYKGIYTHIDAKGGMLVLKKAPTPEEIVRLGVEGIIKIWKDAKLRGNGHKKAMLILAAAMRSIGLKAGLTEARMEIQDLIEDYELQTKRLERVNDLIKGLCQQVRYADKLLEIKGIEITTVAGFIAEVGDITRFDITKELQKLAGLELVADSSGKHNGKTKISKRGRKRLRYLLFEAAISVVGKNEEFKEIHRYYTTREKNPLKKMQSLIVVACKLIRVFHAILTKGIRYDASKMLKDIRHPGEQLKAA

SEQ ID NO: 43537 - protein, 322 aa, unidentified
MQYIGIDVSKATFVVAYSSDKGGGIRTFNNTTAGIRQFIGTLPKDGSIHCVMEATGNYSALLLYMLNVAGITVSMENPLKVKNFAKAMLSTVKTDKSDARLITLYGEKMNPRPFKVQGEAILRLRQKRTVIRQLTKQITAMSNLRGSLACLPVPDKGATHTVDETIKFLEKRRDRLQSELTDLVEVEFSRQLALLTTIKGIGITLATALIITTGGFTYFQNAKQVSRYLGICPTYEQSGTSVNIRGHINRNGDAYTRGLLYIAAWPASRFNAQCKETYTRLRQNGKSGKLAMIAVANKLVRQAFAVVAHDKEYVDGFVSNRP

SEQ ID NO: 43538 - protein, 363 aa, unidentified
MSDGICFAGLDVHARATAAAAVKLGSGEVFRARLSGGPAATIDWLRSLPGPVRAVYEAGPTGFGLARAARAAGLEVIVCAPGAIPRQPGDRVKTDARDALKLARLHAAGQLRAVVVPAPELEALRDLVRAREDLRGDLMAARHRISKLLLRRGLVWAGPGTTWNDGHLRWLGRISLGDPLADVVLGEYLACHEVLLARRDRLDALIAEQATHRPWAQTVARLRCLRGVDTLTAVGLIAEIGDITAFAHPKQLASYLGLVPSEQSSGERRRQGAITKAGSTHARRLLIEAAWHYRRRPAISLKLRRRQANQPPAAIDAAWRAQLRLHRRWAHLDAARAKKRTTVAVAVARELACFVWEIAHQPD

SEQ ID NO: 43539 - protein, 339 aa, unidentified
MELYAGMDLHARNTYVGIMDSNYTRIFKKRVANDLGLIVNTLEPFREDLRGIVVESTYNWYWLVDGLMDAGHGCVHLANPSAIKQYEGLKYTDDRHDAFFLAHLLALGILPEGYIYPKEERPVRDLLRKRSFLVKQRTEHIHSLQSMIERHTAQRLNGNEVKKLYLPDLERIFEEHYVVLSARANNATITFLTEQIQQIEKAVKEKVKLKESFKLLLTVPGIGEILALTIMLEVGDIHRFPTVGDFASYARSVPTDRLSNGKSKGKGNRKNGNRYLGWALVEACHFARRFYPKFRSYYQRKAATTNPFVATKAICNKLARICYYVMRDQVRFREEALFC

SEQ ID NO: 43540 - protein, 343 aa, unidentified
MERYVGLDVSLKLTSICVVNQTGAVVREGVVDSDPEAIASFVRSNAPRVVRIGLETGPTATWLWTELKRLGLPVICIDARHAKAVLKMQINKSDRNDAAGIARIMQTGWFKEVRVKDLESHSVRALLASRALLVKIKRDLENQIRGLLKNLGLVIGRAKFNVFAVRAEELIENRPELIAAVGPLLAARKAIERQVGDLDRKVHKLARHDLQVRRFMTVPGVGPITALCFKATIDDPTRFKRSRSVGAYIGLTTRRHASGEVDWSGRISKCGDRMLRMYLFEAAGVLLTRVPKWSALKSWGTRLAKRNGLRKAKVAVARKLAVIMHRMWIDETEFNWSTKKAAV

SEQ ID NO: 43541 - protein, 457 aa, unidentified
MKHYFLGGDVSKGYSDFVILDNRKQRVEENFQLDDTIAGHSLLYDRLLIFFEKHPDAELCAALESTGGYENNWYKTLSKFQGSLNVKTARLNPAGVCKNNEAGLKRIITDKISAQGVAEYLIAHPEKVIYQQQDYWASLRKQWSFIKMLTKQSTQLFNQLESLLYSANPEIMKYCQEGTPGWVMNLLQQYPTAAKLGKARAISVARIPYISTSRAKELVAGAKTSIASATDAITGQLICATVGQIQHLQKTIKAQTKILVEECTLPEVELLKTFTGIGDYSAIGLMLEIQAVERFSTVKRLASFFGLHPVYKISGDGIGAVRMSKKGRKEPRAILFMVAMSAITSNALIRDLYQQHVAKGMEKMAAIGLCMHKILRITYGMLKNNTPFNPEKDLENRARTSAQPQKEKKDKSRRYQDFDAHAPISRRQRKKREERQLSKNAVSVECGISTPVPQFSS

SEQ ID NO: 43542 - protein, 408 aa, unidentified
MEVVHPRCAGLDVHQKTVVACARVVEGRTFRQEVQTFATTTAGLLQLSDWLSSHGCTHVVMESTGIYWKPVWYVLEGSFELVLANAGHVRNVPGRKTDVNDAMWLADLLAHGLIQGSFVPPTPIQEARDLTRTRTQLSREIAQHTQRIQKTLEQANIKLTEVLTHVLGATGRAILEALIAGQTDPDGLVELRRGKLKASKDELRDALDGRVRDHHRFLLRLHLDQIDALEKAVQTVERRLEVVLSPFRSQLDRLMSIPGVSRATAFILLAEIGADMSHFPSSAHLVSWAGLCPRSDQSAGKHRSTRLRAGDTWLKTALVQSAWAASRKKESYLRAQYYRLKARRGGKKAVVAVAASMLTAAYYILLRDVRYRDLGPTFPDRQHKDATARRLIARLRNLGLQVEIKSAA

SEQ ID NO: 43543 - protein, 319 aa, unidentified
MNALTDPVILGVDVSKEWLDIHRQGDAEVTRIDNTRIAIDAYLKPYRGAAMAVEATNRFHELMVERARRQGLTVYLVSGYELKHYAVSIRRRMRNDPIDAQLLSRFLARERDQLTPHNPKSAQLNRIWQLLKRRALLVKQNEQRRQSFAAVSDLRSIERSLARHYQRALTQIDRQLHTLSRELDFTADLARLRAIPGIGNLTAYALLVAYRSGRFVHRDPFIAYLGLDVRAKDSGKHVGQRKLTKHGDGEYRRLLHCAAMACRHHPHYQQRFQALLNRGLAKTAALVVLARDLARLAFTLLHRQLDFDPNRLSRPCVET

SEQ ID NO: 43544 - protein, 336 aa, unidentified
MPMYQLGIDVSKNTLDLCLLREGIKGRIKTRKLKNTADAAKVVAEWLKKQSCELGEVHIIMEATGVYHEPLAYGLHFAGARISLANSHRTREFARGMNILTKNDKVDAWMLACYGSLKEPEAWTPPPESVRYLRALLRRRDALVADSTREKNRLEKSVFTDSPDAVRASIENMLQELSNEIEHLDVLIQEHIKTHPELNQDFRLLTSIKSVGYLLGLNMLAILKSHSFESAEQAAAFLGVVPVERRSGTSVKGKPKLSKIGPPEIRTKLYLAALCGLRFNPVMKQMYTKLCQRGKSKMCAIGALMRKLVHWCYGVLKTQLPFDAEYNQQSYYKTIF

SEQ ID NO: 43545 - protein, 326 aa, unidentified
MDVLGIDLAKLSFDATLLLQTGSSQYASFPNTPEGFLQLHAWLRAHNVTELHACMEATNIYWQALASWLHAQGYSVSVVNPARIKGYAMATMQRNKTDKLDSAIIASFCAKHQPTLWQPASPEQQRLRALTRHRDDLLQTQLQQQNRLRDATDELVKASLESLLTAIASQLESVQEQITQQLRVQESFQTNLALLTSIVGIGAVTAAKLLSEFADLAQYESAKAAAADAGLTPSHYESGTSVRRRSKLSKMGKVGIRAALYWPAITAMRRCPAIKAFAQRLAARGKPKMVIIGAVMRKLVHICYGVLKHQTPYDPAKAFGHITPAT

SEQ ID NO: 43546 - protein, 361 aa, unidentified
MKKPSQHLIAEVPRSVAKVRMTIGIDLGDVWSHYCTLNEDGEVVDRGRFRTTPSGVEKWFTDVPRARVAMETGTHSIWVSEQLREMGHEVIVANVRELRAISHSNRKSDTVDAEKIARYARVDPEILRPVSHRTVAQQEALTLIRARNLIIRLRTAAVNSVRGLAKPCGYRLPASSTLCFAKRCMAVLPPGLARALGPVLEQIAAMTVKIQQYDRTIKQLTETEYPETQALLQVYGVGQLTALTYVLTLGGKERFKRSRDVGCYLGLRPRRSQSGDRDPQLGITKAGNIYLRSLLVECANHVLGPHGRDSTLRQWGLNLASRGGKQSHNRAIVAVARKLAVLLHRIWITQEPYIPFYALAA

SEQ ID NO: 43547 - protein, 331 aa, unidentified
MKISNVIGIDVSKLTIDVVIHGNQKHGQFENSGKGFREMCKWALKNSLSPKGETMYVFEHTGLYSYQLAIYLDGQGLPFNIVPGLEIKRSLGISRGKDDKVDASKIARYGYRLRDEMEPYELPSEDLEKLKRLLSLRNRLVKQNAGYKASLNEWKRVLAQNGDKVLFGVQEKMIKYLGKQINAVEKEMGTIVKRNDKLKKQYDLITSIKSVGPQTALFMIVYTAGFTKFKAWRKFASYCGTAPFPHSSGTSIIGKDKVSHLANKKIKSLLDQCAKIALLYNTEMKLYYNRRIEEGKNKKSTRNIIRNKLLARIFAVVQSGKPYVETMKFAA

SEQ ID NO: 43548 - protein, 348 aa, unidentified
MKKNITIGMDLGDQSHVVVVLDKNGDEIEMRTISNNEFSLVEFFSQYPKATVAIEAGTHSPWISRLLKEIGCKVYVGNPRKLRIIWDCNDKSDKRDARILAMVCRVEPRLMWPVKHREKQAYADLGIIKARDALVQNRVRLINHVRSVTKTCGYRIPKCSTPSFSKQAPDHIPPELKESLAPLLLTIDLLTQQVKELDRQINKLCLKYPETKLLLQVPGVGPVTALAFVLTIDDPRRFRKSRQVGAFLGLTPRRDQSGKCDKQLRISKAGNTYLRSLLVGCGQYIIGPFGPESDLRKYGVSIVVRGGKNAKKRAAVAVARKLTVLLHRLWVSNQSYNPFYKNAAQVVA

SEQ ID NO: 43549 - protein, 424 aa, unidentified
MKVTYPTCCGVDVHKSFLVATIIKTTSGIEPSYQKKRFSTFNNSILDFKSWLLENECHDVCMESTGKYQVPVFNLLEDQINVTIANPKWVKAVKGNKDDTKDSKWIGDLFRLGLVKGSYIPCKSIRILREYTRYRYKLVSCRSSEKNRYQNALTVCNVALDSVVSDIFGKSSSSIIDYLLEQSGTTINHEEIASKLLKRLKSKEDAVIESIEGYQMTDARKYRMRLVRAHMDYITAEINDVDKQIESLISFVPDYVKAIRFLTTIPGVKHDSAITIISEIGIDMSQFCNSKRLCCWAGLTPGNNESAGKKKSVRITRAGVYLKPALVQCAHAAVKSDKSPYYKTKYESLVKRRGKKRAIIAIARMILTAIYRMLSTGEVWNPSDLYKIDMPAPLVEKQKAKAIKQAKKLLQKEGLLPPDEPLAS

SEQ ID NO: 43550 - protein, 345 aa, unidentified
MESTTIGLDIAKRVFQAHGADATGKAVLRRKLQRAEVLAFFASLPPCLVGIEACSTAHHWAREIRALGHEVRLMPASYVKPYVKRGKTDAADAEAICEAVTRPSMRFVPIKTAEQQAVLMLHRTRDLLVRQRTMLVNALRGHMAELGIIAPQGISRVGDLVAALLGEDETQLPKLARSALRGLASELEALGERVKEVEGAILVWHKDNEASRRLATIPGIGPITASAIVATVTDPTQFHSARQFAAWIGLVPKQNSSGGKERQGSISKQGDRYLRRLLVLGATAVIRHAWTKVTAETAWLRGVLDRRPVRLASVAQANKTARIVWALLARGESYRAPAAAQAAAA

SEQ ID NO: 43551 - protein, 401 aa, unidentified
MWYAGVDWADSHHDVVVITETSRQVASRRVAHTAEGLAELIAFLQAIAPLDQIACIIETSQGLLISTMLEAGCTIYPVNPKTIDRRRAASGAKTDTIDAYLLAKTGRSDLPDLRKLTPDSPIIQELKALTRDQDSLVQSQTRVVNQLTACLKAYYPVALQLFSKLQQRSTLIFLQTYPTLEAAQQASVAEITRILKEAGHPTARQSALKIQEALHQPQLHADAITTRTKSRLMMALVAQLLPLIEQISSYDKEITALFLTHEDRELFSSLPGAGKRLAPRLLAEWGSDRTRYGGSTSVQALAGTAPVAFQSGNYAKAHKRYACLKPLRNTLHQFAWQSTKQETWALLYYKRKRVEGKSHSMAVRSLANVWVRIIDAMWFEHKGYETATFEAAQHHHASRAA

SEQ ID NO: 43552 - protein, 331 aa, unidentified
MVDDKRYVGIDVAKARLDVALGLNGERFAVANDERGISALLKRLEPTDLVIIEATGGLEVPVASTLATAGIAVAVVNPRQVRDFARATGQLAKTDALDAQVLVRFGAAVKPQVRALPDAQARALEALVNRRRQLVEMLTAEKNRRANSPKVIHKSIDEHIHWLEKRLAGFDDELTALVRATPIWRERDELLRSVPGVGPVLATTLLAYLPELGALNRKQIAALAGLAPFNRDSGSLRGSRCIWGGRAQVRRVLYMAVVSAVRSNPVIKNFYAQLRARGKYPKSALTACMRKLLVILNAMLHNNTYWHATALTSSTSALYPLGGAVSEHGCC

SEQ ID NO: 43553 - protein, 347 aa, unidentified
MKNTKYYIGLDVHKERTSYCVRDKLGTILIEAEAASLYSELEHRLKPYLAASMIGLEASISYYTLYQNFLRKSYRIKVANTIQLRQLIAKNDKLDAQRLSEMLRLGTFPESYIPEEKIQHLRSLIQMRHALMQEKVRCNNRIQAFLDRNGTVMPPCKAFSKKWKHALMQHLGSGNVSTELRYEYNHYVYLEKTNEQADQEIIGYTKTYWNQEYQLLRSITGFGILLPCYIIAFVHPIERFLSNRKLRRYAGVIPVSKESGDTTSKGRIPKTTSKALLRWALVQAANTIGKTNKNQYASKDDHTSILHFSLHLDLRVYQPETIIFPLSRADPVIAFSQVLKYSINKSR

SEQ ID NO: 43554 - protein, 378 aa, unidentified
MNRIIKIGMDVHTTNYTLCIFEPSFEHDGTVHCITQVKPEVKNIIHVIETFKKKHENEELNIVCGYETGCLGYSLYHELKEKGIECVILAPTTLKTEKGRRKLKNDYRDAKMIAECLAYGGYSAVHVPTELDNSVKEFIRMRDDIKENLKSIKQQIIAFLTRNGKQFEGKSFWTRKHIDWINAVSFSESLLQDTLKEYMIEYNHLCNRVETLDKQIEEISLKEEYVEKVQQLQCLIGIKTHTALSLIVETSDFNRFKKGNMYSAYLGLIPGDDSSGGKENKLGITKAGNSHLRRLLVEAAQGYTRGKVGFKSKDLKSRQEKCSSEVVAYADRANERLRRKYYRMTLRGKKYNVAKTAIARELACFVWGIMTDHIDLCS

SEQ ID NO: 43555 - protein, 373 aa, unidentified
MRDHSEAFVAFDTSKLRNAVAIAEAGRTGEVRFLGEIDNTPAATAKLVAKLAGQYGRLSFCYEAGPTGYGLYRQITQLGHDCMVVAPSLIPKKAGDRVKTNRRDALALVTQFRAGELTAVWVPDPHHEAMRDLTRARQAAVEDLRRKRQHISSLLLRLGLHYAGKTTWTKTYMKWLMSQKLAHAEQRIAFEEMLLAVRQAEERIARLEAAIRAAVPDWSLCEVVDALMAMRGIDMISATGFLAEIGDLSRFRTPRELMAYLGLVPSEHSTGDRVRRGAITKAGNGRARRIVVECSWAYRHPPRVGKNKQDKVAAAPRPVREIAWKAQHRLYGRYRALTGKGKLKAVAVTAMARELCGFIWAINREIANPRAAM

SEQ ID NO: 43556 - protein, 353 aa, unidentified
MGDQSLRSEVILGVDTHLEVHVGVVISNTGKLLGTLAVPTDKTGYFKLLSWAGSLGSLCRAGVEGTGTYGAGLARLLRDHDIDVYEVNRPDRAKRRRQGKSDPTDAEAAARAVLSGDATAVPKTQTGAAEAMRAVSVARRSAVKAKTQAINQLRALLVSAPQEIRERLWKANPSECVAGCARLRPLGSTPLLQALTATLRLLAKRWLMLAEELKELDGNLESLTSQHAKRLRQQFGVGPQTAAVLMAVAGDNPERLRNEAALAALCGASPLQASSGKTSRHRLNRGGDRSANNALWTIAMVRMRSDPRTRAYVKRRTADGMSNKEIHRCLKRYIVRALYPLILADLADSARLS

SEQ ID NO: 43557 - protein, 476 aa, unidentified
MQAVHWLHIPLGRFVLFKEQNARRARRAAEPPDTMTMKNPLDLPILNPHAAGIDVGSEKFFVSVGGQEPKVFLTVTEQLEELCRYFEAQGVRTVAMEATGVYWINLYGTLEAAGFEVVVVNGAHCRNFPGRKTDMKDCQWLAVLHAHGLLTSGFVPPADIRQLRDYLRLREDLVSMAAQHVQHMQKALDRLNVKLHVVISDITGVSGMKIIQAILAGQREPEQLLGLCDEQILKTKRAAVLASLHGLWRKEHLFALELALDSYQAYQKQIAKCDERIAEVIEKMRGGKTPPLELGPAKELRHNAMVIEGLQRSMAQIYGKDLTKLPCLNQSTVTMLLAEVGADMSRWKDWRHFGSWMALAPSHAQSGRHRRRVKRYLNPAGRILCRAVQCMAVGKHTWLASFYRRIRAKRGAKVAIKATAYKLAKLIYLVLTQGWEYVEQGIAKYPERMQQQQLKALQKLARKLDCVILPKQMATN

SEQ ID NO: 43558 - protein, 411 aa, unidentified
MLYVGFDWADDHHDICVMTEAEQPVATFRIEHSSEGFTQFQTKLAAAQPDPGQILIALETKHGLIVDELLRAGYQVYAINPKAVNRYKDRHVLTGAKSDQLDARAMADLLRTDRHRFQPLTLSPDDYRWLERLCSDVRKMVDEKTRVVNQLTACLKEYYPQAVRLVSKVESQITLAFLTAFPDPQTLLATSQADVVAFFKQHHYCRPDRVPAFFEQVHRPALHADPVVVIAARLRLRGLVEQLSVQMASLRRHEQEIQTILDRILAAQPWIDSLPGLGARLTPEVIVTLGPADAPTPPFDSPQSLAEFSGCVPVTRSSGKRKSVSIRRVCDRGLRRTFRDWAFASLLFSRWARAFYDYAAAHGQHQPTILRNLAFKWIKILIPLWRSGQPYNEDLHIQSLKRHQVPWAAAL

SEQ ID NO: 43559 - protein, 372 aa, unidentified
MKTNTTKTSPTPSVVSTSSAAVGSGFTLGLDLGDRQHHVCVIDVAGNIVREASLPNTRPALAQLLVDFPQATVALEAGTHSPWISRYLTDFGATVLVANPRKLHAISRNERKCDRRDAQMLARLARVDAALLHPIKHGSAQAQHDLLGLKLRDALVRNRVSLINAIRFTLKSLGHPVRNPSSESFHKTVLADIPADCRPVVQPLLTVLAQVTEQIKAMERDLVRRSKKDYPVTQRLQQIAGVGPLTALCFVLKIGDPERFSRGRDVGAYLGLCPRRDQSGGTDKQLRITKCGDGLMRRLLVSAAHYVLGPFGPACALREHGQRLTGTGSAREKKRAVVAVARKLAVLLLSLWKHGTDYEPRVAPPKVVLTPA

SEQ ID NO: 43560 - protein, 405 aa, unidentified
MSDIKQHESVEVFVGLDVGKEAHHAVALDRKGKRLLDSALPNDESKLRALIGKLKQHGQILLVVDQPATVGALPVAVAQAEGVWIAYLPGLAMRRIADLHAGESKTDARDAYIIAEAARSMPHTLRSMRLADNEVAELTMLCGFDEDLAGQITQTSNRIRGLLTQIHPALERAIGPHLDHAAMLDLLERYPSPAQLAALSEKQLANRLVKLAPRMGKTWAAEIVQALSEQTVVVLGTQAATIVLPRLAQQLAALRAQREEVAKEVERLVLAHPLHPVLTSMPGVGVRTAARLLIDVASRAFTSAAHLAAYAGLAPVTRRSGSSIRGELPSRRGNKPLKRAMFLSAFAALRDPISRAYYTRKISQGKRHNQALIALARRRCDVLFAMLRDGTFYCPPQPEKSLTTT

SEQ ID NO: 43561 - protein, 402 aa, unidentified
MNAVGIDVSKGKSMVAIMRPFGEIVSTPFEIKHTASDIHSLVELINSVEGESRIVMEHTGRYYEVLAHQLSEANLFVSAINPKLIKDFDNDSLRKVKSDKADSVKIARYALDKWQNLKQYNVMDELRNQLKTMNRQFGFYMKHKTAMKNNLIGILDQTYPGVNTYFDSPARSDGSQKWVDFASTYWHVDCVRKMSLNAFIDHYQNWCKRKKYNFSQSKAEEIYGKAKELVPVLPKDAITKLIIKQAVDQLNSASTTVESLRTLMNETASKLPEYPVVMAMKGVGTSLGPQLMAEIGDVSRFTHKSAITAFAGVDPGVNESGSYEQKSVPTSKRGSSDLRKTLFQVMDVLIKTHPQDDPVYQFLDKKRAQGKPYYVYMTAGANKFLRIYYGRVKEYLSSLPES

SEQ ID NO: 43562 - protein, 339 aa, unidentified
MKYTPVGVDIAKHLIQVHFINEHTGEVVDKQLRSRDFLTFFSNREPCLIGMEACGGSQHWARELTKLGHKVRLLQARFVKAFVMGNKNDVMDARAIWMAVQQPGKEIAVKTEEQQSVLVLHRTRRQLVKFRTAQINSLHGTLLEFGESIHKGRAAMEREFPEALERMKERLPPYLITVLEDQYNRLSELDSLIDDIEKQLTSVARLNETCKRLLDIPGIGPLIATAAVATMGEASAFKSGREFAAYVGLVPKQTGSGGKIRLLGISKRGDTYLRTLFIHGARAAALLTREPDPWITELKKRRPASVAIVAMANKLARTVWAIAAHGRKYDKNHVSIRPY

SEQ ID NO: 43563 - protein, 448 aa, unidentified
MGKSKTKNEKVKRISQLTVINPKAAGIDVSDKEMMVAYPINSEQVEIRAFGCFTQDLHSLAKCLKAHGISSVAMESTGVYWVALFLLLQELGFEVFLVNSKHVKNVTGRKDDESDAEWIQKLHSCGLLKASFQPDNMTRTLRSIVRHRKTLVRSASDYINRMQKALELMNIKLHTVISDIDGKTGLRMIEAIIEGERNPEILADLRDSRIKASREEIIKSLEGYWTEEHLFELEQCYRLYSIHRQMIDECDKEINKLLIEQIASKNDGVLPELQKSRRKVSSKHKVPFDLTAHLKEILGVDVTEVFGISELSALTIMSEVGVDMLKWKNEHHFTSWLGVAPNTKISGGKVISSRIMKKKHHAGQAFRMAANSLYHSKSPLGDYYRRIKSKAGAGKAVVATARKLAIIYYKMVSNKEGFNPKALEEYQFRYKEKKINQLKKKIALLEAA

SEQ ID NO: 43564 - protein, 315 aa, unidentified
MSKIVVIAGIDVSKDKLDIHVLPSNQTFVVGRDRRGLASLVRRLRKAGVEQVALEASGDYERIVIETLEADGFVVQLLNPARVRAFAEAIGMLAKTDPIDARLIALYCQHFPDTGLTRRPEQARKLGEFLNMRAMLLKLAGEIRNSLEHVREPGLKALADTLSADIAAKLKDVDDRIAKVIAGDDATMRKACIIRSFTGAGPVLTSGLLARVPELGGVTRHAAARLCRAAPTDRQSGRTRHRSSIEGGRDQVRPVLHMAALAAIRSNPIIKAFAHRLSAAGKPKPLVIAACARKMVVILNAMLRDNTEWKYAKAA

SEQ ID NO: 43565 - protein, 364 aa, unidentified
MKNCITWVGMDDSANKINIAIFQGQESSPREEIVVTNDSTGLGRLAKKLKAFPGEVRCVYEAGDNGYHLHRFLKKHGISCDIAAPSLTPRRAGKRVKTDRIDAKKLATLYRAGELTSIAIPEKEQESLRDLVRAREDALEDQQRARHRLARFLMRRGIRYGAGKNWSLGHVQWVKNLRLEDARDQMVLDEYRLTLDERNDRLNRLQQSIEELATQEPYQKRVRYLMSLKGIKALSAMTIIAEALDLRRFTDAPAFMAAIGVVPSEDSSGDTENRGRITKTGNSHIRRVIIESSWHYEHATSAGKALKKRREGLPADIIEIARRCDCRLHQKFRRLTNRGKDRRKTAVAVSRELAGFIWAIGQVA

SEQ ID NO: 43566 - protein, 373 aa, unidentified
MPRYSTAFGMDVHLRSTTVCALDAETGEAVTRRFRGNPWGEVAEWMSGFPGPSLAAYESGYLGFAPQRELSGLGVDCVVAAVSKAPRSAADLSSKNDRNDAARMAKAILSHDISPVWVPSPEIEGLRDLAAAHDAATARLAAAKQRLLAFLARRGYAYGGTTPAGNPRRYWTYGFLRWLDGIHPADDGGIRALAALRNEVEAADETREALLAEYRAAVAAGPLSAEVEALQSIKGCGFALAAAFASEVGDFSRFRSGRQVTSYFGLAPKQRSSADSVRLGGISGAGNALVRKLAVEGSWCYAQAGHQPKLMPKGSGVPLEIRMHGRKGSERLLRRREEMLARGMPQAKANAATAAELVRWLWALGAMCREATE

SEQ ID NO: 43567 - protein, 326 aa, unidentified
MEHELHYIGIDTAKEKLDVDVLRPDGRHRTKKFANTTKGHDELVSWLKGHKIDHAHICIEATGTYMEPVAECLYDAGYIVSVINPALGKAFAQSEGLRNKTDTVDARMLAEFCRQKRPAAWEAPHPLERALRALVVRHQALTDMHTQELNRTETAREVQRPSIDAHLLWLEAELKRLEKQIKDLTDDDPDMKHRRKLLESIPGIGEKTSAVLLAYIGLRDRFAHARQFAAFAGLTPRRYESGSSVRGASRMSKAGHVSLRRALYMPAMVATSKTEWGRAFRDRLAANGKKGKVILGAMMRKLAQVAYGVLKSGVPFDASRHNPVAA

SEQ ID NO: 43568 - protein, 330 aa, unidentified
MNSNCLSTDPAATKLSVLGLDVAKKSVQAELRKSGNKVRFGFANNAKGFAQLARLLKQHNAAKVWAGLEATGPYSHALALWLHAQGHRVSLLNPRRVKEYARSAGNRNKSDLLDAALISDFVCAHQPAAWRPPTPEVAQLQALVRRREELSLMLQAEKNRLEGIAPNVRCSLQRIIATLSAEKARLEKLILGQIRSHQQLLCDHQLLCTIKGIGSLTAAILLAEMARPGQVERARQAAAHAGLTPRREQSGTSVRRNRGLGKEGNRYLRKALYMPALVAIKYNAPLRHFASRLRADGKPKMSIVCAVMRKLIHIAFGVLKHQTPFNPSLA

SEQ ID NO: 43569 - protein, 353 aa, unidentified
MNKVALNREEAEKKSFAANRSGRQKLIEFLKRRSQMAGGAKVVIAYEASGNGFNLCDELKEAGFECHVLAPTKIERSAKQKRNKNDDRDAERLLDIVRSHYLAGTKLPSVWVPDRQTRDDREPVRGRQDLSQKQTVVKTQLQMLLKRHGMEKPEGIGQSWNKPYRQWLKALSEDPHQGWGMKKVLASLLRQLEFLEKEIEQLNETMEQLADRPRWKPIVQAMKKEKGVGLMTAMKYATDIGDFSRFRRGRQVGAFYGLTPSSNESGENNDRKGHITREGSPTGRQVLCQSAWSRVRHDEHEREVYRRLVLKNPKKKKIALVACMRRLAVRLWHVGFQAQLQVKATPVEKGISF

SEQ ID NO: 43570 - protein, 345 aa, unidentified
MQPMYYIGLDVHKRRISYCVKDSSGKIHTEGSIAATRLDLDHWMKKLPQPWSAAMEATMFTGWIYDHLKPHAATLKVAHPLMLRAIAAAKKKNDRIDAGKICDCLRCDFLPESYMASTAIRERRRTLRYRSLVVRQMVQMKIKISALLMEAGVSYNKQRLHKAGYFRELLATNPDIDEGLCSLLRVCRETVVRLAKTESALVRSLERDSLLVERVERLMSIPAVGPITALTWALEVGDVQRFSSTKKAISYCGLCGAERSSGNTVQRTPLSKQRNKHLQTTLIEAAKLAPRYSPELAMLYDKEKQKGNANRATLAVARKLVAYLMAVDRGQRNFQIAETRSNIAA

SEQ ID NO: 43571 - protein, 341 aa, unidentified
MEHIAIDLGGTNSQICVRNADGSIIEQRSTQTKRLAGYLAKRTRSRVILETCTEAFAIADAACVAGHEVRVVPATLVKSLGVGSRGTKTDKRDAQILSEVSTRIDLPSVHVPSMLARQYKALCTARESLIRARTLLINSIRGRLRSSLIRIRTGAVTTLPERVRAGFLATSEGISSYTEAQLKMVERLNEQLTVLDEEVTNLARESQLCRRLMTVPGVGPVVAIRFVAAIDTIERFGSAHEVQAYLGLVPGEHSSSQKVRRTGITKAGSAQVRRVLTQAAWVALQRCPHDPMVLWAKAIAARRGKVVAAIALSRKIAGILYAIWRDGVRYDASRGAEITNI

SEQ ID NO: 43572 - protein, 329 aa, unidentified
MEVSQAVVGLDVSKATLAVCHQVGAHLQHLEVANTPAGFRQLVRCGGATSLYVLEATGPYYLAVAYHLVAAGAQVAVLNPLVVKRFIQMHLGKGKSDRTDAQWLLRYGQQQATPRWQPEEAALVECRQLEHVIELLIRQKTMVYNALEALQMQPVVNPAARKPLQHILCQLTQQVQELEAKLLTSVELRYAREMALLGSIPGIGRKTAAPLLLFAGGFTSFQNHRQLIAKAGLCPREFSSGTSVRGKARITKMGGGLIRSKLFMCSWSARKANTACRELYDRLVAKGKNGKLALIAVCNKLLKQAFAIVTSGIPYQADFAKIKAPTLAF

SEQ ID NO: 43573 - protein, 438 aa, unidentified
MSNKVIFNLDELFISVGIDVGADFSWMSIALPNQQFVGKPYKILHNSIDSLTTAVSKIKEAEELYSLESRIFLESTGIYHYPLFCYLRDKGFNCSVINPIITKNSTNINIRKVHNDRFDSKKAALVGLKPDLKVSLMPSDLALNCRNLCREYYDLMDNRSAYVNKLQGELRMAFPQYLGIFSKVTINTSLTLLETYTSPSAFLKADKQEIIDIIKSTARFGLTYAQNKYNAIIQAATDANQFGYIIDSNIKRIRLYISFIRKYDEEINSILESLHELVDANEDSDFVKQIHLIETFKGAGFLSAVSIMGEIGDFSAFSKPKQLFAYFGLDPAVKQSGKFEGTKVQMSKRGSAIARRVIHTLTLQSISISRNREAKNPVLREYYLKKCDSKLKLVAMGAVSHKVCNMIFAILRDNKPFKIIAPQEHIKQYNSAKCDIAA

SEQ ID NO: 43574 - protein, 353 aa, unidentified
MNSLTDLGEVVDVVIGVDTHVGTHSAAAVNAATGGVLGEITVEATAHGYAQLVEFADEHAVLRAWAIEGTGGHGAGLARHLAQRQEIVVELDRPKRAKRRNGAKSDPLDAIRAAREALARPRLGTPRSGGDRQALSVLLAARRSAVQAATEAQLQVFSLVIAAPEPIRARFRGQKLPGMLATAASLRVQSSWDVETTTTVRALRSLARRFRALSIEAKEHEKAIRAIVRSWRPDLLEEFGVGAIVAATVLCAWSHPGRIHSEAAFAMLAGVAPIPANSGQVTNRYRLNRYGDRQLNRALHIIVQSRIRYDGPTRDYVARRTTEGKTGREIKRCLSRYIARDLYRLLESGPITA

SEQ ID NO: 43575 - protein, 392 aa, unidentified
MVISVGIDVSKDKHDCFILSSEGETLADGFTIPNTLDGFNFLLRKIQDCTTPQDKIKVGLEATGHYSYNLLGFLLDNGLATYVLNPLRTNLYRKSLSLRKTKTDRVDARTIASMLLSDAGLKPYTSTAYHNEELKSLTRYRFDKVKERAKLKSSISRLVCILFPELEKLVPTLHIASAYALLEEFPGAKQIASAHLTRLKALLETASKGRYKRDVALQIREAARNSIGSRMPAKSLELQHTIRLIRELDTEISEIENQIQSIMKELHSPITTIPGVGFRMAAMILAEVGDFTRFASPDKLLAYAGMSPSTYQSGQLKNCYPHMEKRGSRYLRYALYNATKYVCLWDPTFSAYLAKKLTEGKHYNVALSHASKKLVRLIFAMEKSRQPYRVAP

SEQ ID NO: 43576 - protein, 316 aa, unidentified
MMNALYLGIDVAKDSFDVASDPAGLKLSLPNDPKGRHKLLDTLQTHAVALIVLEATGGYERDLVADLLHAGLKVVVANPRQVRDFARGIGQLAKTDGIDAAVLAHFGQVVQPQPRPQPSGQMEVLAELVTRRGQLTNLRTQESNRLPHARHATVRKSLQKILRTLDQQILDLDKLIRQNIESDDGLRRKDEIVQSVKGIGPGTSAMMLGRLPELGSLNRQEIAALVGVAPWDIQSGKWAGKSRIWGGRQEVRNMLYMATLTATRFNPVIRDFYQRLTSKGKLFKVAITACMRKLLVILNTLVRNNCLWSPAPAKNH

SEQ ID NO: 43577 - protein, 432 aa, unidentified
MEEVTDEPLYRDRVCGIDIGKAEMYATIRVPSEANPARRAQETRGFATTRRGVLALADWLRCWQVPAVVMEATGDYWKPVLYRLEAEGLECVLADARQVKNLPGRPKRDPSDSRWLASCFERGSVTSCFVATPEFRLIRLHTRYRRDLTEDRTREKNRAEKLLESAAVKLSSVVTDLHGVAGRDIMDHLIAGERDPKALAQLARARARRKIAELEQALEGAEFFSPEHAALLKAMLERIDWINDEIARLSLVIERLLAPYEEQLQQAESMPGWGRRSAEDALAETGTDMTRFPTPAHLASWAGRTPLDHQSGKRAGPSKRKKGNRYLGAITGETAVAAGKTDTREGARYRKLARSRGKAKACVAVGNTQMRVYHKLISTPGARYQDLGPGYHEQQRARSRQVSHHVGKLSDLGYKVPLAPLDTETGELTTRS

SEQ ID NO: 43578 - protein, 407 aa, unidentified
MQFVFGIDVSCDSVTVAVASDEHTLLREYKINSDKAGFSRLLKDLRSVNHPQIIYESTGVYSRRVRTFLIHQGYDFVELNPLQAKLDLTENFRRKKTDRNDARDLACSQYIRNRLTTVQEKPVCLDLRDNERFYQQLTRDDVRKEDQLERVIQVVFPGVQRIYSDKYGQNLYETLQLFPNPDLVLKESLDSLTNKLQAGLSKRLGKKRCRDYAQRLINAAKAAYPAVDSSSCMLHQMQFYCQSLLEIEQERDQIINQMVAEAKAAKLPELEIYQSVPGIGLTTAICLTAELGDLHRFSSPSKINAYIGIDLVVYESGNYTGHRRITKHGNQYARKILFRTIDNILAATKTHPCHIADYYRRRKKESSKSPEKVTKKIHIAAMARLLRTIYHLVLHNQKYNYEIAISH

SEQ ID NO: 43579 - protein, 344 aa, unidentified
MDDDSGEMCTARISPKTAEIVKWAKALPGVVEVAYEAGPTGFGLARALIAAGMHCYVLAPSKMERPSGDRVKTDKRDCEWIARLVRLGELPVVVIPSEGQEAARDLVRAREDVRGDLMRSRHRLSKLLLRQGIVYEGTAWTTAHGTWLRSQSFDKPGVQFAFDEAYDTVLTTLARRDRLDKAILTMAAEPAWAPVVARLGCLRGVGTLTGFGLAVEIGDWHRFTGSSIGSFLGLTPSEHSSGGSRSVGSITKTGNGHARRLLVESSWHHRKPYRLSAEMIRRRDGQSPLVRARADQANRRLNQRWRTFDARKKRPTVAAVGVARELAGWCWSLAVMDGEKTTAP

SEQ ID NO: 43580 - protein, 339 aa, unidentified
MAQVTTLGIDLAKNVVCVHGVDVHGNVVVKKRLARQKVRPFVAQLSPCLIGMEASGSAHYWAREFSQLGHTVKLMPPQFVKPYVQSQKNDPNDAAGICEAVGRPRMRGVPMKSVTQQDVQALHRIRERQIKARTAFINQIRGLLAEYGIVIPQRASQVRHKLPFLLEDAENGLTATARDWLQALAEELQALDQRIAATDQQIERVFEADEACQRLAQLGGIGPLTATALVAAVGDATAFKNGRQFAAWLGLVPRQHSPGGKTTLLGMTKRGNRYLRTLLIHGARAVLRVVDRKTDPRSRWLQGVKARRGKHCASVAQANKTARIAWALLAKGAHYRQAA

SEQ ID NO: 43581 - protein, 411 aa, unidentified
MDVLVTRCAGLDVGKDEVVACVRVPDDKGRRRQRIQKYSTFTPSLEAMASWLVDEGVTEVVMEATGQYWKPVWYVLEERGLELKLVNARHVKILPGRKTDVADAAWLAELLEHGLLRGSFVPPPAIRELRDLTRYRKRLIQAHASETQRIQKTLEDAGIKLDSVASDVMGVSGRAMISALVAGERDPEVLAELARGRLRSKLPQLREALRGRFREHHALLVRLSLGHIEHLEAAITEIDAEVDRVMAPFAEARDHLDTITGVGKRAAECIIAEIGVDMSVFPTAAHLASWAGRCPGNNVTGGKRRSGKTNNGNVWLGDVLTECAWSASRARDTYLAAQFWRFARRIGRKRAATAVGHSILVIAWHLLTDKCDYEDLGGEYFTRRDTDRSRQRAIAQLQSLGYRVTLEPDAA

SEQ ID NO: 43582 - protein, 377 aa, unidentified
MTTQEKQRTMFIGVDVHKDTHTAVGLNPFGEKIFEMTISNEPEDFISLVEKTKVEAEKSGLVPSFGLEDVHSWGERLSSFLVEVGLPVVAVAPILVDHRRKKTTHPEKNDSLDAQGVAEVMIQKIDTLPIYTLTEEAQKAKQIRELSLEREWLVKERARLKNQLHVLLHRIHNTGYRVRFKDPFAKKALRYWSRSIPKNTDAILVQRTKRALRRILDLREEIQDIEEELATLMEVSGQTLSTASGCGVVIAAEIIGEIGDINRFHSPGALAKYAGCAPREHSSGKTIRWRKTRSGNRRLNRSFHRMALSQISRSGNDAARTYFKRKVSEGKTKAQALVCLRRQLVNVVWMMLKHKIEYRPPVGEAGYPQEKVVDFFS

SEQ ID NO: 43583 - protein, 402 aa, unidentified
MRYFVGVDWASLAHAVCVIDEGGQIVMRVAVDHTSEGLNKLVEALRRFGDPAELGIAIERPSGLLVDSLVESGFAIYPIHPNVVKASRPRYSAALGKTDPGDAYLLADLLRTDGHRFRALCPLSDETRALRALVRARSDLVGARVGLANQLRALLESFWAGAVAIFGEIDSPIALAFLLEYPTPASAARLAQKQLAAFLSAQSYSGRRSPDELLQRLRSAPAIQLGPAEMAAKGTLVCTYATLLDTTVRQIRELTSAIERAVMAHSDATVFTSFPRIGKVNAAQILAELGVRDRFLTEEQLAGEAGVAPVTRMSGKHRAVVFRWACNHRLRTALTWWADNSRRASPWAHTVYLSARQRGCDHPHAIRILTRAWLRVLWRCWNDAKPYDVTQHHAAVALKQPA

SEQ ID NO: 43584 - protein, 343 aa, unidentified
MEYYVGLDVSLKHTSICVVNPTGSIVQEGVVDSDPEAIALFVRSRAPGTVRIGIETGPTTTWLWTELNRLGLPVICIDARHAKAVLKMQINKSDRNDAAGIARIMQTGWFKEVRVKDIDSHAVKALLASRALLVKIKRDLENQIRGLLKNFGLVIGRGKFNVFAVRAAELIDNRPELIAAVRPLLEARNAIEQQVDDLDRKVHKLARHDVQVRRFMTVPGVGPITALCFKATIDDPTRFKRSRSVGAYIGLTTRRHASGEIDWSGRISKCGDAMLRMYLFEAAGVLLTRVPKWSGLKAWGAKLTKRNGFRKAKVAVARKLAVILHRMWIDETEFNWSTKKAAA

SEQ ID NO: 43585 - protein, 344 aa, unidentified
MEIVLQIFLGVDIGKDSFVACRIGMDGKALSRKFSNDEPGIAGLLRWLGDETPSCRAVLEATSRYHRLCERALLRAGVHVDLVNPRRARALAVGLGYSDKDDKVDAQALAQAARMLEAKDEKVASVQAQDLRDHSRSIDTIKRQAANFMKRMEGLDPESDAFKACAKAAQALKEVAANEEKIWTQAVRDEPETFRRYELAKSVDDVGHVTARVVSVELPANLDKSLRQLTAYAGLVPRRHQSGNNELPPEISGGNPWLRTGVFMAAMHSVFVGKRFLPWYETLKARPNVCVKTKGGRHLKAVVAVMRKILANIIAVIKRNSPWTTQPPSFSSRAAVPAVEMQPT

SEQ ID NO: 43586 - protein, 424 aa, unidentified
MRVTYQTCCGVDVHKSFLVATIIKTTGGIEPSYQKKRFSTFNNSILEFKQWLLDNDCHDVCMESTGKYWVPVFNLLEDEINVVIANPKWVKAVKGNKDDAKDSKWIGDLFRLGLVKGSYIPCKKIRILREYTRYRYKLVSCRSSEKNRYQNALTVCNVALDSVVSDIFGKSSTSIIDYLLEQSGTSINHEEIASKLLRSLKSKEDAVIESVEGYQMTDAQKYRMRLVRAHMDYITAEINDVDKMIENMISSNPDFENAVQFLCTIPGVKRDSATIIISEIGTDMFQFSSSKRLCCWAGLTPGSNESAGKKKSVQITRAGVYLKPALVQCAHAAVKSDKSPYYKKKYESLVKRRGKKRAIIAIARMILTAIFQMLSTGEQWNPSDLYKIDMPVALVEKQKAKAIKQAKKLLQREGLLPPDEPLAS

SEQ ID NO: 43587 - protein, 328 aa, unidentified
MLLVGIDWAERHHDVCVMAADGSVLASERIADGLVGVARLHELVSEWAQEPAEVVVGIETDRGLLVGALVVAGYQVVAVNPLAASRYRERHTTSGAKSDRGDARMLADLVRTDRHRHRQVAGDSGLAEATKVLARGHQQLVWARRRQANLVRSALQVFYPAAVAAFGGDPSGRDAVAVLGLAPTPEQGRALSHGELVRAGRRRAVDARAASIQAALAGRQLEAPPVVAAAYGQVVAAAVAVIGSLSEQLAVLEAALTKAFSAHRDAGIVQSQPGLGVVLGARVLAEFGDDPDRYATAKARKAYAGTAPITRASGLRQVVLARSVGNDG

SEQ ID NO: 43588 - protein, 366 aa, unidentified
MRWCDQHQRINHLTKRSMYTLGIDLHKRASTWSLINESHTEIWKTSVVSHPDHFSKTLPTVPVAPQDLQVAIEPVAGWRWATQLLEEHGCDVHMAHPRKVKLIAESKQKTDALDAYQLARLLASGYFPEARRVPDTTYDLRLLLRTRSHIVRLRTSVLNRIHGIATTTGLHTIPGGNPCSVVGKQTLLASESILRELHLLADALTERIKALDHTCEQSVAQFPDTVYLRSMPGVGIITALTVVAEVGDFCDFASAKKLASYAGLVPKQRSSGTRVRYGGITHEGSPYLRTILVEAAMRIHPKGAPELYQVVSNLTPRCGAKKARVALARKLLSIMWTLVATQTTYNPSLVSSATTILSNPDTGAGA

SEQ ID NO: 43589 - protein, 350 aa, unidentified
MTKSSVAQRIIVGVDTHKDVHVAAAIDVQGRLLGYHTAATTERGCSDLHQWALTLAPRIQYGVEGTGSYGAGLSRFLQAQGSSVVEIRGPNRKLRRDRGKSDTIDAEAAARAVLAGASSIEPKAGNDWVEQLRILRVARRSAIQARTQTINQMYAVVVGAPHDLHDQLHHLSRHQLLTHAARFRVAYLDDARSVARWTLRLLAHRHRALTAEVAAIDSVVAPLIRSHAASMLAVYGVGPEVAGALLVVAGDNPERLRSEASFAALCGVTPLPASSGKTQRHRLNRGGDRRGNTALWRIAMTRMNCDARTRDYVRRRTSEGLSKREILRCLKRYIAREIFQVLPRPRVDMT

SEQ ID NO: 43590 - protein, 342 aa, unidentified
MNQNILLTVDYHDENCVIRRLVCQTGDQQVVTVATTPENLERAVAQAEAAAGPHGRVIWIQESTTGWARVQKLLGDRVDFRLANVLQMPRPPKAHRRKTDKIDTSRIQREHLNGELPLAHQPPPQWRQLRRLVAYRENLVARQTAIRNWINRYLAHETWVDRNNLWSVKGRKRLKAVVATLPATDVLVIEAKLAELDQLQTTLKTVLRALLEAYRQSPDAQRLDAVRGIGPVTAVSIVARIGPITRFGNADQLIAFAGLAPGLQQSDQTRRDGRIGGGGTDAHLRHYLIEATIWARHITRYRTTYERTVQRRGAKVGRLVVARLLLRSIYKVLRDGVTFRAG

SEQ ID NO: 43591 - protein, 332 aa, unidentified
MNTIPVHLGLDYHQSVIQACVGTDKGQVLGNRRCANAVETVAAYAASFGAVESVTLEACSGAADFADALIAHTGWKVQLSHPGYAARMKLNPDKSDYSDARMQMELGRTGLVPRVWLAPREVRELRLLVRHRQQLVKERRACKLRIGAILREQRCLDAPAPRWTRPWLVWLREQAPLSEQGRWVVERHLASLKRLGEEIGTVETRLAAVTAKDPQVERLLAEPGIGPVTAWMLRAEIGRFDRFHNGKQLARFCGLSPRNASSGTRQADAGLIRAANGQLRACLIEAGHRLARTHPRWSTLAANLRARGKPGSVVAAAIANRWVRSLYHRLAA

SEQ ID NO: 43592 - protein, 420 aa, unidentified
MKVVYQTCCGVDVHKSFLVATIIKTTSGVQPSYLKKRFSTFNNSILQFKEWLLLNECRDVCMESTGKYWVPVFNLLEDDINVTIANPKWVKAVKGNKDDTKDSKWIGDLFRLGLVPGSYIPCKPIRILREFTRYRYKLTSCRSSEKNRYQNALTVCNVALDSVVSDIFGKSATSVIDYLIEQSDNSINHEEIASRLLRSLKKKSVSVIESIEGYQMTDSQKYRMRLVRAHMDYITSAINDIDTMLDSLVAPYENAVQLLCTIPGVDRNSAITVISEIGTDMAPFSNSKRLCCWAGLTPGNNESAGKKKSVRITRAGVYLKPALVQVAHAAVKSDKSPYYKKKYERIMKRRGKKRAIIAIARMILTAIYQILSTGEVWNPTDLYKIDMPEPLKEKQKEKAIKQAKKLLISEGIIFESQLVS

SEQ ID NO: 43593 - protein, 368 aa, unidentified
MKNGTAIERDVFWVGFDDHADKVVAAVLVNNEERIHERFEVVPDEKGLRQLIKKLKGYEGEVRCIYEAGPCGFVLQRRLVKEGILCSIAAPSLTPRQAGNRVKTDRRDAKKLVFLYRSGTLTTIHIPDEEQEALRDLVRAREDAVEDGRRARNRLGKFLLRHGYRYRGKTTWSREHWRWIRSIEFEQQHSRQALEAYIAAVIGTEDQLKNLDQQVSEAADACEMVVRAYATLRGIDRLSAVTVHAELGDLKRFSGAPEMMSAVGLVPSENSSGNSQRRGSITKTGNAHVRRVLVEAAWHARHRPAVGEALRRRREQQPAKIVAIAKQADVRLHRKFTGLTWRNKRSTVAAVAVARELAGFLWAIGQAL

SEQ ID NO: 43594 - protein, 429 aa, unidentified
MQESSLSAPAEGVAAYVGMDWADQKHDVILRAASEPAKVEYRRLAQQPEALMEWVAELQQRFAGKGKILVALEQSRGALIYHLMGYEFLELYPINPSQLASFRATFSPGGAKDDRPDAELICELLYCHRDRLKAWKPDDELTRKLTFLNEGRRTAVDQRTQLANEMKSQLKLYFPLALQVLDNDCSTALAADLLLQWPTLDSLQKPSAHKLRKFFYAHNCRQEQKLLERLELIKAAKPLTPDLAVIEPTALRVQLLAQQLKSLLPYIARYEKLIAELFDAHPDSFLFRDLPGAGSALAPRLLTAFGTDRERFEHSMEISSLSGIGPVRRASGKKSGKHATVHFRSACPKFLRQSFHEFAACSIRYCSWAEACYQTQRNRGKGHHAAVRAVAFKWIRILFACWKQRVPYDPQRYQQALQTRGSEYAEITA

SEQ ID NO: 43595 - protein, 298 aa, unidentified
MSVLVQEKALHVCLVDHQGKKLLHKNFATKTPERLLVALQPFHSRDLILGCESTFNWYWLADLCHQQNLPFLLGHALYLKAIHGGKTKTDRIDSEKLAMLLRGGNFPVSYVYPKEMRSTRDLLRRRCCIVRRRSATIVHPQMVNHQQNLPAFPKPISYKSNRRGIVERFDGDSVRRMIQLDVDLIDFYDEQIKRLDLYLEQHAKIDDPDTFYRLMSIPGVGRILAMTLLYEIHDIGRFAEVGHFLSYSRLVKGTNTSAGNHYKPTGAKIGNPHLKWAFGEAISLLKRQLPVATKHQRR

SEQ ID NO: 43596 - protein, 386 aa, unidentified
MKYVGIDVAKNVHYACVASQNNKILTQPFAFDNNIDGFNKLVGAFKKFPKNDVIIGLESTGVYGENLIAFLSEQGYKIALINPIETSAVRRKRIRNAKTDKIDSKNICKYLFQEEYRLLEQKELATIELRGVCRFRQTLKKSNTKLKAQLVSYLDVVFPEYHTLFSTVHGKGSYAVLSEFATPASIIKVNVTRLESLLSSASRGKLGRAKADALKSLAKRSIGSKTTDKGLQISLTIAQIRLIEAQIDETEERIAQLWNESDSVLKTVPGIGSINGSMILSEIGDISRFRKPDQLIAFAGLDPATKQSGNFRAGSTRMSKRGSPFLRYALVNAAWNVSMNNATFGEYYNLKLAQKGRHYKALGHVAGKLVRVIFKMMKDDVAFDLP

SEQ ID NO: 43597 - protein, 309 aa, unidentified
MKEQLVYLGIDIAKSYLDGAIENEKRRFSNDAIGHRQLIQWIKQIPAKVQVICEPSGGYERALVRAVVGAQLKISLVPANRVRQFARAAGILAKTDRIDAKLLCAFGEAMQPGTIGGSELEQEHLRELESQRRHLTHLLVMEQNRGARLSDVCVCKLNRRLIIQIKKQIEQLDRLIRNHIQQSPQLSAKAAKLTAISGVGERTAALLLAQLPELGELNRREVAALVGVAPFNRDSGKMRGKRAIYGGRRPVRHGLYMAALVAARHNPILRQFYLRLRAAGKPAKLALTATMRKLLIVLNSALKPDLSYA

SEQ ID NO: 43598 - protein, 399 aa, unidentified
MRTNHKVAQVGCDCHRMFSRITARDEDGHIIWRQRLEHGNRVKLHRQLGVWPEGTPVILEGTFGWGWFSDELLAAGLEPHLASSTKMAAWRKARGLAKSDRIDADLLSELWTQQPRWWEVWLAPPEVRAQREWLRYRMSLVKTQTAVKNRIHAVLHRHGIIHGFSDLFGRSGRRYLSLLLAADDAPLPESGRLTLKGHLQLLDQLRRQIASATRAFRQQVLGSSTAMRLRTLPGICWILGYTINAEIGDLKRFPSAKHLCSYSLLAPRANDSGLEPEDEDAPQGRHVGHVGRRTLKWAWIEAAHGAVRQGGRFRAIFDRYTNGGKRNRNRGYIVVAHELCRIAYVLLKKEVDYDPSAPAARPGSKKKKPMKKKPMKMLKSSTSRPGTGQPQHPMVAAAV

SEQ ID NO: 43599 - protein, 342 aa, unidentified
MYYIGLDVHKKTISYCVKDASGQVHQEGKVGATRWELDDWMNTLPQPWTVAMEATIFTGWIYDHLLPHAQQVKVAHPLMLRAIAAAKKKNDRIDAGKIADCLRCDFLPECHMASTAIRDRRRTLRYRHLLMRQMVQMKNRISGLLMETGVSHNKQRLHKVKYFRELLASNEEVNESIRPLLRVSRDTIVRLQKTEYALVSSLQRDPLLAERIKRLRTVPGVGPITALTWALEMGDVSRFPSIRQAISYCGLCGDEKSSADKVLRTPLSKQRNKHIQRVLVEAAKLAPRQDHNLALVYEREKQKGNANRATLAVARKMVAYLLAVDRKQRDFVPFADSQSAAA

SEQ ID NO: 43600 - protein, 407 aa, unidentified
MISVGIDISKEKITVCALEQGNKIIWKPFDVSLKKTKVEELIEKLEKLKEEVKITMEATGKYHLPILYELKDRGYFVTVVNPLKMKQYCRALNFRKAKNDKIDAKQIAEYGLMYWKELEEYKVDEENYRVLKELNRNYQHYMELRIDQMNYIDQTIHQTFPGIKKLILHNSGDFSKDKLLDFLEKWWHKDLVLEKTEEEFIEEYKRWAKEKRYHPNANKAKAIYQLAEDSISTQPSHNSKIETNIREGINLIKQINQILNRILSQMIEISEPLEEYQEAKKFSGISEKLAVQIVAEFGDLSKFKNKKSLISFIGIDAPPYESGNFKADQRKISKRGNAILRKVGYQAMKCMMSAKKPENEIYKYMIKKEKEGKAKKVCKFAGLNKFLRIYYARVIESKAQKQELKVA

SEQ ID NO: 43601 - protein, 344 aa, unidentified
MEITIIGVDLAKNVFQVHGANDRGKAVLRKQLRRDQFAAFFANLPPCLVGMEACGGAHHWARKLQALGHTVKLMAPQFIKPYVKSNKNDAADAEAICEAVGRPTMRFVPIKNIEQQSVLALHRVRQGFVKARTAQANQIRGLLGEYGLIVPQGIGHIAIRVPDLIEDASNELPGTFRLLIHRLLEHLKQLQRQVAEIEGQIKAWHRSSEASRRLEKVPGIGLLTATALVATVGDAKNFDNGRQLAAWLGLVPRQHSSGGKSTLLGMSKRGDAYLRTLLIHGARSVIYRASRRAHADSWLVKLIRRRNANVAAVALANKTARITWALLARDQEFQLDYTTVAATA

SEQ ID NO: 43602 - protein, 362 aa, unidentified
MEYFAGLDVSIEETAICVVGDDGKVVLETEVPTEPELIAEALERFAGRLRRVGHEAGSVSPWLHAGLIELGLPAVCLETRHVRAALSAQRNKTDAADALGIAHIMRTGWFRQAHIKTEECYRIRLLLIQRRNLKRKFLDIENAIRHSLKVFGIRLGKVGRGSMAKAVREAVAGDAMTAGLMDCMLRARAALWEEYLILHKLVTQLAMRDELCRRFMAIPGVGPVTALSFKSAIDDPTRFRRSRNVAAYFGLTSRRWQSGSSIDVKGRISKAGDPDVRRALYEAASAMLTRFKGRDTIKTWGLKLAKTKCHAKARVAVARKLAIVMHAMWRDGTFYAGDPDAEAPEGDTAYAAKMQRLSYARS

SEQ ID NO: 43603 - protein, 454 aa, unidentified
MEKRKSKSNKQTSGSRQLTLLNENCAAIDVGSMLMMISYTDSDGSTKLLEVDGYTENLIEAVETLRRAGVNKVAMESTGVYWAVLAMLLERSGIEVTLANAKHYKNVAAQKTDVKDSQWLHQLHAYGLLRGSHIAPELFRELRSYLHERDILQQQKSDTLNRIQRTLTLMNIKIQHLVSDIEGANAMKLLRGIADGISDPKQLLGLMDTTLFKASEEDLLKSLVGIYKEQLVTILKNQLKSYDFFKQQMLEYETSIEEVLKNLVVPDKDGNRDLVPPKKGLVRKNQYHINLKAYLQKITGVNLTAIDGLNEINLLQIIAVVGIDMSKWKNSAYFTSWLGLSPDPKISGGKVIGQGRKFTNNKATQAFRLAAQSMWQNKGSLGQLYRKLSAQKGSAKAIKAVARKLAVIFYTMMKNKVEFDNSKLEIDHNKQEARRIATLKKEAAKYGLVVQKAA

SEQ ID NO: 43604 - protein, 337 aa, unidentified
MEMLYAAIDIHKHVLQAALLDPASGELRDARFPATREALREWAMPLQGRVGAVAIEATSGWRWAWRELSALGFEVQLAEPAQTRALRGKKRKAKNDRLDARWLALLLAKEMLPRSWIPPEDIQRLRDLTRLRQALRHDRTSWAQRLHAVLAHEGWPCSRSELLSSKGRRRLDGLQLDSHVRVLVDAHLAVVDAVSAQMAEVERELRRLARSDRRLVALQTIYGVGPIVACHLLAEIGDARRFRRAEQVVRVAGLDPVVLDSAETRRRGKLSKQGSPHLRWALIQAAHHAAIHPASSPDGDHYLALKQRIGSQRAAVSTARRIAKRAYHVLAALENAA

SEQ ID NO: 43605 - protein, 333 aa, unidentified
MNEITSVAIDLAKGVFQLHGTDGQGRVRLQRQVRRAQLLSVLARLPRCEVTMEACAGAHYWARQLRLLGHEPRLIPAQHVKAFARRQKNDRNDAEAIACAARQRGIPQVAVKSEEQQAVLAVHRVRTRLLRERIALTNQLHGLLGEFGCVLPRGLKRLREELLCVLDAGTLPALLQSTLRDQLEHLGQLEQRLQTLTRQLDELARHSEPCQRLMRHRGVGPLIATAFAAEIADPGVFRNGRQVAAWLGLVPRQHSSGARVRLLGITKRGDPYLRQLLIHGARGALRHAARHSDAVSRWVLNVQQRRGANRASVALANKTARHLWATLRYSTAS

SEQ ID NO: 43606 - protein, 415 aa, unidentified
MESVDRCIAGIDVHKKMLAVVIRKPAGQVVEYIKRKFGTTKNEIFHLVGWLQHHQVSEVVMESTANYWRPVWYGLEQHFKQLHLTHPLKTRAPRGRKRDYRDAQRLADRWHSGDLEESFVPGAEQRAWRWLTRSRVQLKRKLSVIRGQVEGILEEGGIKISAVITDIFGVSGWAMLEKLAQGEADIDELMGEARGRLKKKRAQLKEALVGWLQPVYRMLLTQHMEQVRLLWKQVEEINHWLSEAMKDHVPALVRLTKIPGVDLYAAQELLAEIGVRALAFPSGDQFASWVGVCPGSQESAGINYSHRSAKGNRYLRRLLCQIAWAAVHTKNTFFGALFARFKPRLEAKRANWAVAHRISHVIWLVLHEEVEYQERGATPLDPKTLKKKLQRLLRTFAKQGLDAKSILEQEFAAVV

SEQ ID NO: 43607 - protein, 442 aa, unidentified
MPHATSSAPLEPDWAAFVGLDWGDEKHYWKLRDAHSQQSQEGVLQNTPEALDAWAAELNVRFGGRPIAVCLEQSRGAVVYQLSKYPHLILYPVHPTTSARFREAFYPSGAKSDPQDGDVLLDLVEHHRDRLRRLDPDTPETRLLQMLVEQRRAWVDEKTRHSNRLTGWLKIYFPQVLDWIDDIDSPLGCDLLDRWPTLEELQKSHPGTLHTFFVQHNCRSEKRMQERIQAIYQATPAIRDTAMLEAGPAIVKQIVAVIRALRANIDELDKRIASLVSTHPERALFEALPGVGPALLPRLIVAFGTKRERYTCADQLEAYSGIAPVTQQSGKSKWVHFRWACPKFLRQTLHEFAAHSIAKSVWARAFYDMQIAKGKGHHAAVRSLAFKWIRVLFACWKNHTPYDEQIYLRALQNNGSRLTQILGTQLKWKPVGGFQKLSSEKA

SEQ ID NO: 43608 - protein, 359 aa, unidentified
MNATTIGVDLAKNVFVACVGDGMGRVIETREFNRCGFLAWLSSLPRGTVIGMEACSGAHCWGRTMAALGLAPRLMAADFVRAYRKRQAVKNDRADAAAILAALHAPGMRFIAVKTEAQQQRLAWHSLRLGWIEERTALLNRIRGVLAEFGMVVEPGATRLRRWLAEHEFDTAQPMIVRHLIQSVRDQLDALDARIGECDRQIAAQQAKDAAARRVRELPGVGQLTADAITASVGDARMFSNGRQFAAWLGLTPSQYSSGGKPKLGRITRRGDSYLRSLLVQGARSVFAATLRKARSAPDTLTRLQQWIVGLNARVGYHKTLVAIANKHARQLWAVLAKGEAYSPEAWRQWGQTAEQPAA

SEQ ID NO: 43609 - protein, 366 aa, unidentified
MDTIYIGVDFHARQQTICYLKTETGELVTCELKHQDKQVVRAFYAQFRGQVIVGLEASGYSPWFERMLEELGGEVWLGHATEIRRRARWRQKNDRRDAELILELMLHNEFPRLHRPAVQSREVLRMLRYRQKLIKMRTMSKNSLQAIALQAGRAKRSRLFSKDGQQQLSAAEMSPVMDWQREHWLQLMEPLNQQLLETMVWFKAQSKDDVCIKRLRTHPGIGLLTSLCIVHTLQPVSRFRNTRKVAAYAGFDPVERSSAERKCFLGISKAGSRLLRYLLVEAAQTAVRKDEDLKRFYQRLAERRGRPKAKVAAARKLLIRAYIMLRDEIDYAEFRHRAVAARLARRGQGPSNVPEVLIGQPASPEQ

SEQ ID NO: 43610 - protein, 350 aa, unidentified
MRYLGLDVHSGATVWCLLDETGEVVERGKVSTTAPALTALVKRLGEGSELRAGQEVGTMSYFVHDVLTGAGVELLSFNAHALRMIACSRKKTDKRDAYWIAKALQTGMTPHPVYIPSGTVRRLRELLNQRSALSREQKRWLLRAKTYLRAAGHRMRTPTVMTAREALLSEPEGIDENLAEGLELCERMHKTLSHELVGLEAMIRREASGVDAIDRLQTIPAVGFWVSVTIYAWVGDVSRFPNARRLSAYAGLVPSVRQSAELERFGGITKQGSSVLRSMLVQAGHVLLHRCRSAEAAPLKAIAMRVHTARKRRKIAVVAAARHILRIAYYLLRDGTSYDPKRLPVPKAAA

SEQ ID NO: 43611 - protein, 418 aa, unidentified
MQKEFAAFIGIDWADRKHDVCISVPGSAKLERLVLEHRPAAIRAWAEKLRERFGGAPVAVCLELSRGPIVSALLEHDFFVLFPVQPATLARYRSAFTTSRAKDDPTDAALALELLLRHPDKLTRLEPESVGMRSLRRLVEARRSLVEDRVRITNRIIAALKAYFPQVLDWFRDKEAAVFADFIERWPTLELAQRARTQTLVDFFRAHNVRSESAIQRRIDMLASEQQLTSDAAVIAPMRLLVETLLPQLRAASAAITRFDAEIARICPELPDYALFRALPGAGPALAPRLLVAFGERRERFQNAAALQKYAGVAPVTERSGNKSWVHWRCACPTFLRQTFIEWVAQTVPRSFWAKAFYQACKARGMRHQAALRALAFKWIRVLYRCWVERTPYDESRYLMALQKRHAPLLKFAADAST

SEQ ID NO: 43612 - protein, 313 aa, unidentified
MSQSERVIGIDVSKNLLDVAVVPENDTWSVDNDEKGIRTLIKDAKRLRPRLIVLEATGGLETAVVALLAAARLPVVVVNPRQVRDFAKSLGKLAKTDKIDALVLAHFGEATKPEVRSLKDQQAQQLSALVARRKQLVEMLTAEKNRLMTAPEPVDNDIKAHIAWLEQRLSGINKDLRKAIKASAVWRAKEELLRTVPGVGPVLSVSLLAGLPELGKLNRKQIAALVGVAPFNRDSGKFRGRRSIWAGRAHVRAVLYMGTLTAIRFNPVISAFYQRLCAAGKAHKVALTACMRKLLTILNAMMKNHAPWQPYFR

SEQ ID NO: 43613 - protein, 356 aa, unidentified
MQKSISMASTSAVGLDVGDRFTYLCAVDERGEIVHERRLQTTPQDVSIYFTARSRCVVVLEVGTHSPWMSRLLEQLGHEVIVANARRLRLIADSDQKTDRIDARMLAELGRTRSKLLKCVKHRSEQAQVDLTLLRSREVLIRTRTKLINRLRGALKSFGVQPPRCDASCFHRRVRAAIPPMLMEALKPIVDLASFVETQIRTIDRKLVQVAKTRYPMTVLLQQVDRVGPVTSLAFALSIDDPKRFKKSRAVGAYCGLTPKQRDSGNTRSQLGITKAGSRLLRSCLVQCAQQILSKRGKDCDLRRFGLTICERGGGNAKKRAVTAIARKLAVLLHRLWVTGEVYDPLRQAKRLAAAA

SEQ ID NO: 43614 - protein, 430 aa, unidentified
MTTLHPMPDDVVLVAIDIAKARNEVLIETPGQKRRRRMTVLNTRAEHDRLIVLLKGFGRPVACAMEATGNYHRPIAWRLREAGFQVRLVSSVALARTREALHNGWDKNDPKDAQVILHMLRIGASQTYHDPLAAGINDVQELSKTHEAIAGAKTQVLHRIQTHYLPLYFPEVDRFRQNSRSDWFFAFLDRFPTPASITALDKPAFIEAAWSVVGRKVSKERLLGDIYETAKTSIGLPIPLEAPAIRMFRLVIAEARSLIRQRNEIEAMADQLLAESKDYKRLRQIPGIGPIIALAILAEAGDLRRFGHHRQFLKFCGLDLSTQQSGTYRGQTRLSKYGNARLRRNLWLAGQVAIRQKENSFRDKFERYIARDRHNADLRRKALTAITAKMARVVHAIIKSGDDYRPFVEGPVPGGRTPLSSAVRAQPATL

SEQ ID NO: 43615 - protein, 408 aa, unidentified
MICVGIDWGGQKHGVHVQDAETGSELLDAMIPHEPEALNELVHSLLKKVEDPDQVHVALETKQGLVVETLLEAGFCLYPINPKEVDAFRNCYRPSRSKNDQFDAWILSEMLKIHRGRLREIKSGSNEARELKILARDYAKLSDDRTRLVNKLTSALKRYYPAVLEWFGKLHQPSTVAFLKAFPSRKAVENASKQDLQECLRRARYPRPQRKAREIKQDLKSQSAWKADPVTVQAQTRKVRHLRRRLEVLLDEIPEYEEAMVSLMNSIQDSDVFKSLPGASKTNLVPRILAEFGDNKDRFKDFNAVQCQAGTAPVTIQSGSSKKVVRRRACSKPFRTVMYRFAFCSLSKSTWARDYYDRKRDEGKKHSEAIRALGNKWVKITFAMWQNGTKYDEDFHMENIARHKEKVA

SEQ ID NO: 43616 - protein, 412 aa, unidentified
MNIVFERCAGVDVHKRNVVVCASTPDEHGQRHKERCTFSTMMPDLLRMRHWLQSLGVTHVAMESTGSFWKPIFNVLEGHVEVFVVNAQHLKAVPGRKTDLTDAEWIADLLQHGLLRPSFVPPAFQRELRELTRYRTSVVEERSRTINRLQKILEDTNIKLSAVATDLMGRSAREMLAALVAGEADPAVLAQLARGKMRAKRDLLVQALQGQFQSHHRILISAQLAHIDALDEEIGHLSAEIAQRLRAYEPQLKRLETIPGIKRRLAAVILAEIGPDMQRFPSARHLASWAGMCPGNRESAGKRLSGKTRKGSPWLRTALVEAAHAATHGKESYLSAHYHRLVLRRGGKKATLALGHTLLVMVYHVLAEEKDYQELGGNYFDEQDRLAVQKRLVHRLEKLGYEVTLTPTSPAA

SEQ ID NO: 43617 - protein, 442 aa, unidentified
MARKPSKQRFTVVHPDCAAIDVGGREHFVAVDPRHENPVQSFTSFTDDLLKMANWLESLGIKVVAMESTGVYWIPIYEILSERGFEVYLVNARATRQITGRKSDVLDCQWIWQLMTHGLLRGAFRPDDLTCCVRSLVRQRASKVKDQAQTLNRMQKAMSQMNIQLANVISDISGVTGMKILRAICAGERDPVQLAELTDRRIKAGKEAVARSLHGNWRREHLHALTQELAAYDFLEQQIADCDDAIKAALEQLPVLQNKPEPSNKPLRSPHRNSAQQTELHQTLWKVLGVDLTAIPTIGVDTALVLAGEIGTDLSRFPSSQHFCSWLGLAPPTRISGGHRLASGGPKIVNRAAQALKQAASNARNDKGFIGASHRARLTRMDTSCAIKATAHQLARLVYNLLTKKQAYVEKGLEEFETRSQDRQVRALLRKARKLGYQLVAA

SEQ ID NO: 43618 - protein, 328 aa, unidentified
MEFYLGIDVSKAKLDCLLLKPASSKRKSKSLPNTPAGIEALLAWLAKQEVRTDHVHVTMEPTGVYHEAAALALSDAGIRVSLVNPLHLRRYAQSLGVLSKNDATDAALLARFGHERRPEPWQPPSAAVRHLQALLARRDAIAQDIQRERNRLDQAVLSKAPDTVLTSIRASLQHLQEQQRQLLQAISHHIDDDPDLRDKHALLLTIPGVGDRVADRFTALLGDARFTSAEQLAAYLGLIPVEWESGTSVRAPARLSKAGPAHIRALLYMPAVSAKQRNPHIKALYERLLARGKTKMAAIGAAMRKLVHLCFGVVRSGQPYAPDWAAKA

SEQ ID NO: 43619 - protein, 372 aa, unidentified
MYYNTIYVGMDVHKSSFTLCSYTIEAEKASHFQRTEADYKKVLKYLEFLRTVYGDDARFVCGYEAGCLGYTLYHQLTEHHVECVILAPTTMLEQRSRKRIKTDKRDAEVIARCLAQHNYSAVHIPTATDEETKEYLRMRNDHKLALKRIKQQILAFCLRHGHIYGGKSNWTISHLKWLKELELNSMHREILDEYLLTYTTLTDKLERLDSRIEEIASKPEYNESVKKLSCFIGIKTHTALSTLVEVGDFHRFATASKFASYLGLVPGEDSSGDDQTRLGITKAGNRHLRLLLTEAAQCYARGQIGYKSKALKARQSGNPPEIIAYADKANERLRRKYYKMVLQERKTHNVAKTAITRELVCFIWGMMTDRIA

SEQ ID NO: 43620 - protein, 345 aa, unidentified
MQPMYYIGLDVHKRKISYCVKDSSGKVFAEGSLSATRLDLDRWMKALPQPWSAAMEATMFTGWIYDHLKPHAATLKVAHPLMLRAIAAAKKKNDRIDASKICDCLRCDFLPESYMASMAIRERRRTLRYRNLLVRQMVQMKIKISALLMEAGVSYNKQRLHKAGYFRELLASNPDIDEGLCSLLRLCREAVVRLGKTESALVRSLQRDSSLTDRVERLMTIPAVGPITALTWALEVGDVQRFSSIKKAISYCGLCGAEKSSGNTVQRTPLSKQRNKHLQTTLIEAAKMAPRNSPELAMLYDKEKQKGNANRATLAVARKLVAYLVAVDRGQRDFQIAATRSNIAA

SEQ ID NO: 43621 - protein, 418 aa, unidentified
MKKHNNSGKKSEPTSKRAKSRGPMQRDTKEGLAELMGKLKEKLDPKKVAATSAGEEHPRGELRPNLDRLTVGVDLGDQWSHYCILGLEGETLAEGQLRTTQQDIAEFFQTWNAARVVFEVGTHSAWVQEVICGCGHEVLVANPRLMEGSKRRKRKNDRIDANKLARLGRIDPQSLHPMQHRSREVRQDLVMLRARDALVAARTELINATRGLVKSMGTRLPKCSSPSFAQKVEEAVPGEIREALVPLVRMTAALSDCIQGYDEKIEKLAGEKYGHTALLRQVKGVGPITSLAYVLTLENPERFAKSRDVGPYLGLVPKQEDSGESQPQLGISKAGDTMVRRLLVGSAHYILGPFGPDTDLRRYGLGLCERGGKNAKKRAAVAVARKLAVLLHRLWVSGEAYEPLRHGMSTTTAHAAAA

SEQ ID NO: 43622 - protein, 407 aa, unidentified
MAIFVGDDWAETHHDVHLMNDTGDKLGAKRLPEGLQGIAALHELLAAHANDPSEVIIGIETERGLWVQAMTAAGYQVYAINPLSVSRYRDRHSLAGAKSDPGDAKLLADLVRTDRHNHRPIAGDTDQADGLKVLARAHQNLIWDRTRHTNRLRNDLREFFPAALIPFESLAHRDAVAVLGKAPHPDQARLLSTAQIRSMLKRGGRQRNLDRRATEIQAALRSPQLAASPAVANAFATTTSSLVAVIAGLNTQIAALETELASSFDQHPDAGIYLSLPGLGVTLGARVLAEFGDDPERYVDAKSRRNYAGTSPRTIASGKKRAVLARHVRNRRLYDAIDQWAFCAISASPGCRNFYDQRRAAGDLHHQALRALGNRLVGYLHGCLKAQTHYNEHTAWAHRQQQIQLAA

SEQ ID NO: 43623 - protein, 391 aa, unidentified
MIYVGIDIAKDKHDCFITNSDGEALFNVFTIPNSREGYNDLYQKISSLTSDFSVIKVGLEATGHYNYNLLGFLIDKGLPTYVINPLHTNLYRKSLSLRQTKTDKVDARTIAFMLMSGVNLQSYSDTSYHNEELKSLTRYRFDKVKERAKLKTSVSRLVNILFPELEKLVPSIHMASVYAMLSEFPCASKIAAAHLTRLANLLETSSRGHYGKETAITFRNAARASVGSNMPAKSLELKHTIKLIQELDAEIEEIENEIKTIMDEINSPILSIPGINYRMGAMIIAEIGDFSRFDSPDKILAYAGMSPSTYQSGQLDSSYSHMEKRGSRYLRYALFNATKFVCHWDSTFAAYLAKKRAEGKHYNVAISHAAKKLVRVIYQLEKSGQAYITAT

SEQ ID NO: 43624 - protein, 354 aa, unidentified
MMTTILAIDLAKARSLFCWHDVVKGSQRWRTIPSTPRAFHEALTREKVDRVVIEVCDMAGWIKDLCEGLQVPLQIANGNTEGWRWRNVKRKTDKDDTLKLVSLSLTDQLPTVNLPDRPTRQWKSLILYRQKLIERRTRIKNKIHALLVSEGKAISGGKKAWSETSLAELSRLAKPIADCTMDELWQGQLHLELEALDDLNHAVDQLDQRLNALGEGDARVIRLQTIPGVGPRLSELVVAVIDDPGRFKNVRQVSAYAGLVPRRYQSGAMDRSGRISKAGCAKLRKLLLEIAWGMLRYNAHGQRVFQRISKGQKTRRKQAAVALARRILGWCWAMLRDQTDWRDPGAAAPSPVMT

SEQ ID NO: 43625 - protein, 391 aa, unidentified
MIFVGIDVAKDKHDCFILNSEGTVLADVFTIANNRIGFETLLSRIQSCSQGESKIKVGLEATGHYSYNLLGFLLDSGLATYVINPLHTNLYRKSLSLRKTKTDRIDARTIAMMLMSDVDLKSYSNTAYHNEELKSLTRYRFDKVKERAKLKSSVARLVNILFPELEKLVSSLHIAVVYALLSNYPGASYIANANTEELAETLCTASKGRYTKSKTAEIQVAAGVSIGSKMPAKSIELKHTIALIHELDKEISEVESAIDKITSQMDSPIFTIPGIGRHMGAMILAEVGDFSNFASADKLLAYAGLSPSTYQSGQLQNCYAHMEKRGSRYLRYALFNAAKYVCLWCPTFSAYLEKKRSEGKHYNVAISHAAKKLVRLIFAMQRSGKAFLADY

SEQ ID NO: 43626 - protein, 348 aa, unidentified
MKKKLNHLGIDVGKRICRVALKDDMGKILDEFFFGNSYQGILELIKRIQDHGTKKCNAVLESTGNMWMRIHDTLEDNGIDTILANPYKTKIIAQAKIKSDKLDARILSDLLRSGLISESYVPVKEFREKRSLVRHRIALSRTKTKLANKVHAILDKYEYRTELADIFGKSGINWLKSLSVSPIDKIILNTTLSSIESIDNQIEIVSKEIAKYAWKDSQDVKILLSMTGIDIFSAMLISTEIVDITRFSTPWKLVSYAGLVPSTRESSGKIKTGRITKQGSPLLRWILVQCSLSAIRHDHHMRTFYERIKQRKGHGKAIVATAKEMLVIIWYMLTRHQLYKYINKNRYE

SEQ ID NO: 43627 - protein, 430 aa, unidentified
MKSTQNKKIEQVKETSMIVGIDVGSEKHYFRAFNWRGIELTRKPVPFSNSMAGFDMFHSAVVELMESNHLEEALVGFEPTGHYWFNLGQFLSGKNIKFVMVNPHHVHKTKELDDNSPSKNDRKDPRIIANLVKDGRCFYTYMPSGVYAELRNASNRRFVLMEEHTRAKNRLHKWIAVYFPEYKGVYTHIDAKGGLMVLKKAATPDEIIKLGVEGIQQIWKDAKLRGSGRKKAMQIVTAATNSIGLKEGLEEAKMELLDLIEDYELQTKRIERVNDLIKNLCSQINHVDKLLEIKGIGITTVAGFIAEVGDITRFDNVKELQKLAGLELVSADSGKHNGRTKISKRGRKRLRYLLVQAAVSVIGKNDEFKEIHQYYTTRDNNPLKKMQSLIAVACKLIRVFHVILTKGVDYDASKMLGDIRHPGAADRKAA

SEQ ID NO: 43628 - protein, 429 aa, unidentified
MTKPPRKGGDTSMNALFAGIDVSLAENKAVFLDSTGEDVATRLRFPNNALGSELFLHKTLELCSQLNPERLLFGLEATSMYGWHLAMVLNQAQQLAQFHPAVYLLNPRIVKGFKKSYPRVPKTDWADAWTIAQRLRFGQLPTPFRFEQRYFPLQRLTRLRVRLAKDITREKNYFLTYLFLKCSGLTTEKPISDFFGAAGSALVTEWYSVEDIAAASLESLAQFLIDKSDNKFANPTEVARQIQVAARHSYRLPTAVKGAVNHILASTLRHIRFLEGQLHEVSEAIAHEMKGLDNPLLTMPGLGPVFTAGILSEIGSITNFGNDDDLAAFTGLTWNRKQSGPFQGEDSHLSGTGNVYLRHYFVEGANRVRMHDPVFRDYYQRKFKEATIHQHKRALVLTARKLVRVVFALLRDNRPYSPPGKAGPYLQAA

SEQ ID NO: 43629 - protein, 428 aa, unidentified
MKVLHERVAGIDVHKDMIKVAIRSPGEKPWTRNTEILEYRTFYGVLQATARELRRRGVTHVVLEASGVYTEPVYYALCEQDFTQVAVINPAHAKALRGHKTDAKDCARLAELFECGLLHGSYIPAPELKEVRDLTRYRMKTVQARTSEIQRLGKALESAGIKLGSVASSITGVSATAMIEALIDGERRGAVLADLARGRMRDAGKLADLSMALTGRFTEHHALLCRLHQDRIAGFDAAVAGLDDRIAGKAARWQREAGLLTSVPGFGDVVAQAWLAEIGPAPHRHFATHEKLACWVTLCPGNNISARKRKHGRTGDAGTYIKPMLVQAAWNAIRVRGRLQARYNRLVRRFGGDKNPGAKKKAIIAIAHTLLKIAYQVLKSGTPYTDLGADFYTRRESPEQKQAWLERQLQKLHPGCAITITISPPEAA

SEQ ID NO: 43630 - protein, 401 aa, unidentified
MWFAGIDWADRHHDTFVIDEAGRKVAQLRVDHTPAGLKKLVGFLREIAPLDQIACILETNHGLLITALLEAGLALYPVNPKTIDRKRAASGAKTDLIDAYLLAKHGRAEWADLRRLDPDSPKIAELKALTRDQESLIQSQTRLVNQLTACLKAYYPAALQLFTKLQQHSALVFLQTYPTPQAAKPATVAQIEETLRKGQHTHPTTVAPKIYEVLHQPHLRADEVTTRTKTRLMQALVAQLLPLLEQIAAYDKEMTELFLTHADSQIFASLPGAGKRLAPRLLAEWGDDRRRYADASSIQALAGTSPVPFESGNYAKVHQRLACLKPLRNALQQFAWQSTQQEGWAKAYYDCKRKAGKSHSMAVRALANIWVRIIFAMWVKKELYERTTFVAAQRRHASRAA

SEQ ID NO: 43631 - protein, 446 aa, unidentified
MTTLAGVMVVVPSASCLSEAPDMRITVSDDFRKPVNIMPTPTIDIAGPVAGIDTHTDTHTVAIVTETGKHLATDTFPTTSNGYRHVTEFLTAHRVTVVGVEGTNSYGAALTRHLIDHGHVVFEVLRPTRALRRRDGKSDPVDALAAARQVLTGQVLSTPKDTTGPVESLRMLQITRHQLVATAAKLVTLIKSLLVTAPVTVRQRYATMATPTLIMTLSRCRPLADVTDPINGTLISLKSLATTYNMLRAQCDELDNKITDLVEVINPGVTQVFGCRALTAAELIVSVGENPQRIRSQAALAHLWGVAPIPASSGRTNRHRLNRGGDRQANAALHRIVLVRMCHDERTRDYVQRRTKEGLSKKEIMRCLKRAIVREIYQVLCLGRPVKQSSGLSSDEFRALRSKKGLSQTQVARKLGCAPARISDIETGKRRLSELKSTYEEFLQTA

SEQ ID NO: 43632 - protein, 379 aa, unidentified
MALGEFFRQCVGIDISKNKFTACLYMYDRASDVGCYTKSIDFDNTKSGFNQMVRWGRKEAVKGYPLTFLMEPTGVYYERLAYHLHKIGQTVYVVLPNKARKFCESEGIKTKTDAMDARCLALMGCASRKLKPWEPPTAIYRELRQMTRFHADLCVIRRSVANRMEALDHMEGVSKTVRKHCERLIEEIDTLTEKNDKDIMRKVAEDKELLARVKRIATAKGVGVTTIVCVIAETEGFHLIENRKQLTSYAGLDVKAKQSGKEDPKHKISKEGNAHIRAALYMPALVAVRHNRQIREAYARICRKHPKEKKIGVTAAMRRLLLLIYTLWKNGEEYDETRDKTQMPRKKEVETEYGPEDCIGTNRESIDWNAVDENGEPPF

SEQ ID NO: 43633 - protein, 408 aa, unidentified
MQVLYPRCAGLDVHKDTIVACVRCVSAPVHQEVRSFGSTTGELLELAEWLASHDCTHVAMEATGVYWKPVWHILEDEFELVLANAAHIRNVPGRKTDVNDAMWIADLLAHGLIRWSFVPPAAIQELRDLTRTRKQLVREVTQHSLRIQKVLEDANLKLGSVLSDVLGGSGRAMLEAIVAGETSPDKLAQLALGTARNKTAELREALRGRVTEHHRGMLKMHLDVINALRNTLAELDARLGKSLTPIREHARLLTTMPGVSDLTARVMVAEIGVDMTRFPDAGHLISWAGLCPRNDESAGKRRSTRVRKSGTWLKTALVTAAWAAVRVKDSYLRAQFLRIKARRGAKKAILAVAASMLTAAYFMLRDGVQYIDLGADHFDHHDKTKTIKRLLKRLADLGCNLDQGARAA

SEQ ID NO: 43634 - protein, 345 aa, unidentified
MIVLGADMHKGSHSLAAVAAGSGELLGDKVVKVGQPGFAAALAWARELEAERVWALEDCRHVSGSFERFLLVNGERVVRVATRLMAGERRSSRERGKSDLIDAIAVARAALREGVERLPVAQLAGVELDIRLLVDHRERLVRMRTALNNDLLWHLHDLWPEQTLPGGALLSQKWTARLGRRLARAEQTARIRIARDELRQLRELSRSIDALERESSGLVAEVPPQLLTEPGFGPLTAAKLIGEIAGAQRFATDAKLARAGGVAPIPVSSGKTNRHRLDRGGNRQINTAIHRIAVTRARCHPETRDYIERKRSEGKTNREAIRCLKRHLTRRIWHLLQPPHPAPIS

SEQ ID NO: 43635 - protein, 410 aa, unidentified
MNLFVGLDVSSETLEACFLGNQIDQVFLRTRFTNDTVGASQIKNEIIKLNDENHFKKIMIGMESTSLYSFHPAIFFQNDQELKALNVKTVIEDPRRVRKYAESYDTDKTDYNDAFIIADYLRIGRGTTSPMREEKFMALQRLTRSRYQLIQQLTETKQHFLENLYYKVNTLSRELDSVQVFSATTIELMTEELSVDDLANMPLEDLAELVQKKGHGRFKDPEVFAKTIQKACRNSYRLDKAMADSIDTILGILAREMRGLTKSIKDLNKAIEDLVSTTPEYKCLTSIPGVGPVYAAGILAEIGQIERFPDQAQLAKYAGLTWKRKQSGNFESENTKLSQTGNRYFRYYLVEAANSVKNRVPEYKTFYQRKYAETPKHKHKRALVLTARKFVRLVGNHQLYMPPKEAKETE

SEQ ID NO: 43636 - protein, 366 aa, unidentified
MKKISTVQVFGNDIFKGPKLTIGLDLGDRWSFYCVLDEAGKIILEQKIPTTTEGMKQAFAKIPRSLIALETGTHSPWISRLLTEWGHEVLVAHAQKVELITKSNRKDDRHDARALARLARIDPELLGPVRHRSAKAQIHLTVIRARAELVSARTALVNGARGLAKSYGERLPKCGTYQVSRELAAGLSIELRDVLEPLFREIESLNERIKEYDGRMEKIAKEVYPEVSLLQQVKGVGTQIALTYVLTIEDPHRFLKSREVGCFLGLKPGRRNSGQSEPQKKISKEGDRYLRTMMVQGAHYILGPFGEDSDLRRWGRKLAERGGANAKKRAVVAVARKLAVLLHRLWVSGEVYEPLRNSNKAMQAVA

SEQ ID NO: 43637 - protein, 412 aa, unidentified
MDVIVERCAGLDVHRDSVVATVRVPGKGKSRRRRAQQTRTFGTTIAQLEQLGNWLEGFAVTLVGMEATGVYWKPVFFVLERRFECWLINAEQLHNVPGRKSDVIDSRWLCELLEFGLVRPSFVPPPEIRRLRDLTRLRSTQAEERTRAIQRLEKVLQDAGIKLTSVAAGTYSVSARAMLEALLGGVSDPACLAELAKGRLRAKIPQLQEALANRFDIAHHGVLVAGLLAHIDALDQAVAALDARIAAATDAELIERLSTIPGVKRHIAEVLIAECGVDMSVFGSAQRLVSWAAICPGTNQSGHRRRSGKTRRGNPWLRTALTQAARAAARSKNTYLASHYWQIRGRRGEAKAIGATRHDILIAYYHIVHERVPFRELGPDWLARRHSPEHRTRRLVKQLEALGHNVTLEAAA

SEQ ID NO: 43638 - protein, 342 aa, unidentified
MYYIGLDVHKKTISFCVKDAAGRVLQEGRIGSSRHELDAWIRTLPQPRTIAMEATIFTGWIYDHLLPHAEAVKVAHPLMLRAIAAAKKKNDRIDAGKIADCLRCDFLPECHIAPTPIRDRRRVLRYRNLVQRQSVQMKNRISGLLMETGVSYNKLRLHRMGYFQQLLSSNDEISDSVRPLLKLCREHIDRSIRLDRTMLRSLEQDPMLSERWQRLRTVPGVGPITALTWVLEVGDTSRFRSIKQAISYCGLCGAEKSSAEKVLRTPISKQRNKHIQRMLVEAARLAPRYSAELARLYERERQRGNTNRATLAVARKMVAHMLAVDRRKTDFVPEGKLRPTAA

SEQ ID NO: 43639 - protein, 417 aa, unidentified
MEPKLIVAGIDVHKKMLAVVVVDEDHPQQAREQRKFATNGSDLKHLAAWLDSHGVSLVVMESTALYWRPVWLALEGQYALHLAQAQSNAAPRGRKSDYVDALRLARRFLAAELRLSFVPDAEQRTWRCVSRNKHQKRQRRVQIQNQIEALLEECQIKLSSVITDLLGLTGYRILQALARGETDPAKLVELAAVNLKASKEQLAEAVSAPMQSQYRSVLAMQLEELDLLDKHIAELSRQLGKALQSHQEAVLRLCEIPGVREDAAWQMMAELGPAATTFETAEQMASWIGVCPGREESAGKSNRNRSPKGNRTMRRVLNQVAWSAVRTKDSFFRELYHRLIPRLGVHKAIWAIAHRIAKVVWKVLHERVHYIERGPLALDPVAMKRRVTKLARQMRRLGYTIEVKPVAVATAGIELPV

SEQ ID NO: 43640 - protein, 405 aa, unidentified
MEIIIERGCGLDVHKGTVVACIMGTGIKKEIRTYTTVTNDLLRLREWLQKSGITHVAMESTGVYWKPVFNILEDHFEVILVNARHVKNVPGRKTDVQDSEWLCRLLRSGLVSGSFIPPRNIRELRDLTRHKRKLIQSITAEKQRVEKVLEDANIKLSSIASDTFGASGKRIIEELIKGKLRAEEMAELSKGRLRQKREDLKEALVGQVREHHKFMIKASLKHIKAMEKILSDIERKIQEKIDCHYKEEYALLQTIPGVKGEASTLIAEMGVDMERFPSEDHLSSWAGMSPGNNESGGKKKPGSTTYGNKCLKTMLTEFAWVASKTKNTYLRSKYHSLVGRRGKKKALVALGHKILIMCYHILRYRCAYKELGVDYLDQRRKDKIARSYIKRLNHLGYEVILQEAA

SEQ ID NO: 43641 - protein, 324 aa, unidentified
MQPNSSSKCWVGIDISKDWVDVVVLIEERVVERKRWDRTAEQLEELANHLLSLAPQGVVLEPTGGLEAPVMAAAVALGLPMMRINPKRVRDFARAHGLLAKTDALDAYALALFGARMQPPVRPWPEAERQRLMAWVGRQRQLTDMRAGERNRLRRTDDPKLRASIERVIVFLGEELEQLQQQLRSWVVESETWRPQAELLRSAPGVGEKTSQVLLAYLPELGQLNRRQIASLAGLAPFACDSGQWRGRRQIRGGRSVVRSALYLASWTAVRTAPVFRDFYLQLVARGKARQLALLAVARKLLLVLNEMVRTSSPWQPLLSPSGA

SEQ ID NO: 43642 - protein, 378 aa, unidentified
MKRILKIGMDVHTTNYTLCAMEPIIGEDDRVFATIKVTPDYKNILMFIENLKLKLGLNDEYDIQCGYEAGCLGYSLYNQLTAAGIKCVILAPTTMLTPQGVRIKTDMRDAYMIAQCLSYGGYHAVYIPTEDDDSVKEYLRMRNDHKLALKKIKQQINAFCIRHGFCYDGTKWTLSHLKWLKKLEITNGLYRETLDEYMASYEEQEAKIERYDKRIGEIAEQTRYHDKVKKLGCFLGIKTHTALSLIVETGDFERFAKGNQYASYLGLAPGENSSSDNIHRLGITKAGNSHLRQLLIEASGGICKGAVGHKSKELRARQNGNTAEVIAYADKANTRLRSRYYKFIRQGKKRKVALAAIARELACFVWGMMTDNIEMKAA

SEQ ID NO: 43643 - protein, 388 aa, unidentified
MQVLANRPEAPTIIRTDLRAIFVSLELSRSSWLMTSLSPGAGEKMSKHSVAAGDVAGLLERFAQLKRKAQARTGWDFPIIAIQEAGLDGFWIHRVLQSEGIESHVVDPASILTSRRRRRAKTDQIDGETLVRTLLAYKRGEPRICSMVKAPTPEEEDRRRICRERKTLVAERVEHVNRLKGLLFAQGIFDYEPLRRNRWARLEELRTGDGRPLPAHLKAQASRELDRLEILVAQLEVVEAERDALVAQPSQRISTPGAMLTQLKGIGPEFAAVLWSEGLFRHFDNRRQVAAYAGLAPTPWQSGSVAHEQGVSKSGNSRLRTTMIQLAWLWLRHQPATALSLWFQERVKRNGGRMRKTTIVALARKLLVALWKYVSAGVVIEGAVMKAT

SEQ ID NO: 43644 - protein, 431 aa, unidentified
MSYRIAGIDVHKRMLHVVVSDVQVDGEYDFTRRIFGSLPEALRSLAAWLLEQQVQEVVMESTAQYWKPVWGTLERYWKQICQTREGALATSGTLHLAQAQSNRGRRGRKKDFRDAERLVKRLVAHELVLSFVPDVEQRLWRTVVRTKYQLTRNRVQLQNRLEALLEETHIKLSSLVSDLLGASARRMLHAIADGETNRETLAALADRGLRATQEQLQDALGVCQELNPVYRRLIRMVLDEVASIDKRIEQLNQEMANLLRPHEDQVKRLAEVPGLGVDSAQQVIAEVGATAATFPSEKHLSSWVGACPGDEESAEVNYSRRSPQGNRHMRRILNQAANAAVKHKGSIFEILYRRYVPRLGHNQTIGIIAHKLCRLVWKILHRGIRYEERGQEVSKASKQKRTRKMIQALRRLGDRIEPNPSQSAIPASHNW

SEQ ID NO: 43645 - protein, 349 aa, unidentified
MPKSNTAVVTIGIDPGKNTLHLVGLDARGGIVLREKVARAKIVSRLANVPPCLIGIEVGMGTHYVTRELLALGHDVRQVPPVYAKPFRQTHKNDFRDALAIAEAVQRPTTRCVPPKTDEQLDLQALHRVRYRLVGQRTAIINQIRCFLLEHGLTVRQRLHWLRHALPDILAQRTDVLSPRMVRILEDLAQDWRRLDDRIEAVSGEIEALSKTTETCRHLMTIPGIGPIISSAVVAAIGNGTAFTRGRDFAAWLGLVPKQISTGDRTILGRITKRGNRYLRMLFMQAARVVLLRPRNWMKNGYGPWLAAAAQRLHHNVLATALANKLARIAWSVLVQHRVYEARLSPAAV

SEQ ID NO: 43646 - protein, 366 aa, unidentified
MKKTSTVRVNGNRIFKGHKLTIGLDLGDRWSNYCVLDEACEVLLEQKLATTPEAMKQTFERIPRSLVALETGTHSPWLSRLLKELGHEVLVAHAQKVELISKSNRKDDRHDARTLARLARIDPELLGPVRHRGAKAQIHLTVIRARAALVSARTALVNGARGLAKSYGERLPKCGTEQVSRELAAELSKELREVLEPLLKEIESLNERIKEYDARMEKIARESYPQVALLKQVKGVGTQIALTYVLTLDDPQRFTKSREVGCFLGLKPGRRDSGQSQPQMHISKEGDRYLRTMLVQGAHYILGPFGEDSDLRRWGLRLAERGGKNAKKRAVVAVARKLAVLLHRLWVSGEVYEPLRNNRKAMRAVA

SEQ ID NO: 43647 - protein, 343 aa, unidentified
MQSISTIGLDIAKSVFQVHGVDAAGQVVVRRQLRRRHVLAFFQKLRPCLVGIEACASSHHWSRELQALGHTVRLMPPAYVKPYVKRQKNDATDAEAICEAVTRPNMRFVPTKTVEQQGCLMLHRARHLFIRQQTAVINSIRAYLAEFGIVAPVGRRDVEQLLEVVADTADRRLPEVARACLAALSTQLRALKAQILEFDRRIIAWHRSSATSKRLDAIPGVGPALATALVASIADPNAFRSGRDFSAWVGLVPKQNSSAGKDKLGSISKQGDRYLRSLFTAGALAVIRYAKIHGTDHRPWLTRLLARRPTKVAAIALANKLARMAWAMMARNECYNEPAALAA

SEQ ID NO: 43648 - protein, 341 aa, unidentified
MKNLFIGIDFSKEKVDVAIIFANGLTETAARVFNEFKTTVSGYKQLVKWVEQNSYGIDSSLWLFCGENTGDYSKGLCNFLYGKGYDMWLENAKSIKDASGLRRVKSDRADASMIAEYAMRNYDKAIMYEPLSESLAQLRELFLYRQMVVRHRCSFQVRRGEKRLTMEKSSVKTMISQSGRHIVSELNKEIEKIDKRIAELIKSDEELIEVFNIVTSVPGIGTQNAVCLMVYTDNFRRFNYDSRKIACYYGIAPFGKDSGTSVHSDPRVHYMANRQIKAMLTQAALAAINFNPVLARYYARLVERGKKKQVALNNVKNKLIHLVTAMVRNRQLFSPEYKISA

SEQ ID NO: 43649 - protein, 410 aa, unidentified
MRYYLGVDWADQTHAIWVVDEHGTKVAGRTVPHTAAGFSEWGRELDEWRAQGIELWAAIERPEGRVVDFLLDHGVVVYPVNPKALDRARDRFRPSAAKSDPFDARVLADFLRTDHGHLQALQPSSEVAQELKYLTEDYRRHVRQQTRLVNQLTATLKAYYPRALEVSELTTALARQFLPAYPTPAAVVALTEKQWQRWARAHRLSEARTQELWAVLQRPQLPVPDHVVRAKARLMLTLVEELTPVVAAVDQYREAIDAFFAGLPEGQWIRTLPIGKHGVTAPTLWALLGDTAGRWKSFQHLQGHAGAVPVTIRSGQQRVVRFRFACNKAMRDIIDQVAFLSLRKCEWARAYYDQQRARGHDHHPALRALGAKWLKIIFVMWDRHIPYDEQHHLATMARHQLRQGAQKKIA

SEQ ID NO: 43650 - protein, 348 aa, unidentified
MIVIGADTHKGSHALAAVDEGTGKVRGQREIKADDAGHVAAVRWARGLDEERLWAIEDCRHVSRRLEQALIAAGERVVRVAPKMMGESRRGERQAGKSDAIDALAVARAVVKDGVERFPSACLDERAMEIRLLSDHRDQLVAERTRIQNRLRWHLLQLCPELEARLPNGGLTRQVVQERIATRLRNIRDDPRARVARDQLRHICTLSSQINELERELGTLVAAHRPALLAEQGCGVLTAATLIGRTAGAERFPTDAHFARQTGTAPIPASSGQVVRHRLHRGGDRRLNSALHMIAITKARLDPQTKAYLERKRAEGKTKREALRCLKRHLARRVHHLLSMPAVGPDPS

SEQ ID NO: 43651 - protein, 313 aa, unidentified
MSEQYIGVDVSKEHLDVASSDGTNFRVGNDEAGHQELVTRFGAAPPALVLMEATGGLERALAVQLSAAGVALRIVNARHVRHFAKATGLLAKTDRLDAQALVHFAQTLKPEARAIQPEQTLALQALIVRRRQLVEMLTMERNRLRTAHRGVRKDLQTSIRWLEKRLAGVDEDIDGALRECGVWREKVQLLESVPGIARVISVNLLAGLPELGELNRHQISALAGVAPFNRDSGRWQGRRSIYGGRPLVRSALYMAALVGARHNPVLKAFYQRLRGAGKPAKVALTACMRKLLVILNTMLKTGQPWGGHLSAHV

SEQ ID NO: 43652 - protein, 345 aa, unidentified
MPIVGGLDIHRKQVTFDYLDTVTGEVKRGQIAPADRAHVRAWLARFAGQDDAAFAVEGCAGWRYVAEELAAAGIAAHLGEPADTAALRGRKRHAKTDKTDSRHLRALLAEGRLPECWIPPPHILECRALLETYHDLRRAHTAWVQRIHAVFFHQGAPPLGEGTLRTEPGLEALRAAAAAHLSPAGQQQVATAVDMLAATEAQLGPLRHQLRDIARHLTGAKVLAARLYGVGPLTALALTCWLGGADRFSSSRKAVRFTGLDITVHSSDRKGPPGRLSRQGPPVLRWAVYEAGKTHARTSAPDHGYYAAVADRKNTKRAALPEARKIIRQACHILTELGDDALTIT

SEQ ID NO: 43653 - protein, 385 aa, unidentified
MQQNDLSRSYIPFKQDNTLATVLEMGSKSWLLAGLVPGITRQPLKKLSTAPEQLLAQLHRWRDEAVKAGHTIERIVVALEAGRDGFWLARWLQARGIEAYVIHASSIPVPREHRRAKSDRLDTGMLMRALLGWLRGEPRHCHMVAIPTLAEEDAKRASRERESLVDEKTRLTNRLQSILVQLGLPKVNIKLRKTAKQLADLRTPEGEPIPPHTLAELHRGLDRLAVIKAQIDAIEKARLQQLKAAPEAGNHPMLLMLAKVLGVGIETADRLVHEVLSRNLRDHRAVARYAGLTGSPDESGTKRREQGLAKAGNARVRRAMLQLAWRWLLHQKNSDLAKWYRARTADGRKDTRKIMIVALARKLLIALWRYVHTGEVPGGVVLKQA

SEQ ID NO: 43654 - protein, 406 aa, unidentified
MTAIYTPKNEINGRLEIGIDVGSLNHAIAISDGAGNIIKEFEITHSQKSFDKFFKIIEDEASKRDATISIAMEGYNGWARPFDAQILAKGYRLYNVNNVKLARFKEIFPASAKTDSIDARKIVELFSLRKHLPVAKDVLQEIKTSDDVNEKLKKLTRRRKQLVVERVAIANRFSSDLQAVAPDLKAITKSTDNLWFLRFITLKEDIRDLKRVSTIKIQKIKYLSSKNLEIIKEWQKEATFSEATDYVASMIYDDAIRLLELQSKTKELHKEIALLNENSKIARVIQTIPGFATITAGELAGEIGTISRFKSEASLALYLGMTNLDNSSGKQTGTKRSISTNRHAKMAMITATMKHAQHTDQSKKYLEKKISEGKKYQQAIRSLGRNLVRVIWGMIQGDRIYEIREK

SEQ ID NO: 43655 - protein, 412 aa, unidentified
METLVERGCGLDVHQATVVACLLMVRKDGKVQKQVRTFGTTTRELLSMREWLLSQGCTHVAMESTGVYWKPVYAILEGAFQIVVANAQHVKKVPGRKTDVKDAEWIADLLCHGLLRQSFVPPQPIRELRDLTRYRRKLVESQSAERNRLLKVLETANIKLSSVATDVFGTSGRLMLRALIEGKTTPEEMAELAKRKLRSKIPQLELALEGKVEDHHRFLLKLQLDRLERAEGDLAVLEKHIQEKLEPYAAQLALLDEIPGVDWTLAAVIIAELGVDMSVFQSVSQLASWAGVCPGNNESAGKRKSTRIPKGNMYLKTALVEAAHAAAKTKGSYLRDKFYRLKARRGYKRAAVAIGHKILVSIYHMISQNVSYNDLGDLYLDKLNKNHLTRNLVHRLERLGYSVTLAPQQKAA

SEQ ID NO: 43656 - protein, 382 aa, unidentified
MQPIDTVNPTILLAIELSASTWLVAARVPRLEKPHLHRIDGGDTAALLALISSLRARSARGLDATIGVVCCFEAGRDGFWLHRLLTAHGVVCHVLEPTSILVNRRARRAKTDRLDAEGMLRVLAAYLRGDHQACSMVRVPTPEEEDAKRTHREREKLVQERLRIENRIEALLFTQGIRKRPSLRSWERDLAVLRTGDGREIPRHLRAELDRLRRRLVMTLELIREVEAERDQAARTKPQDQACRKIAALSRIRGIGENFAAVLTREVFYRSFDNRRQIASYVGITPMPYQSGGMDRDRRISRAGNPRARTTMIQLAWLWLRYQPGSELAEWFRERVGTLAGRTRRIAIVAMARKLLIALWRYAETGVIPAGAEIRAETTVAA

SEQ ID NO: 43657 - protein, 338 aa, unidentified
MHNSVVGIDIAKNIFHLYSVKADGKVMKKKLKRKEMLAFFANFPASLIGMEACGGSHYWARELSKLGHEVVLLNTRYVKSFVVGNKNDYNDAQGIFDAVTRPNKRVVAIKTEDQQDLQMAHSLRKLQVDERTALVNQIRGLLLERGVMIDKGLNQARKQLPLILEDADNGLTPAAREFIAQAYERLKTLDEDIKMHDRRITRLCQENALSKRFLDVPGIGPMTATLAVADIGTGKGYRSSRDYAASLGVVPRQHSSGDKPVYLGISKRGNRQLRTLLIHGARAVVKHCSGKSDPLNQWLQRLVERRGFNKAAVALANKNARILWAMASKNEIYSPLSA

SEQ ID NO: 43658 - protein, 343 aa, unidentified
MRQITTIGLDIAKSVFQVHGIDAEGNVILRRQLKRRYVLAFFQKQPPCLVGIEACASSHHWSRELQALGHTVRLMPPAYVKPYVKRHKNDAVDAEAICEAVTRANMRFVATKTPEQQSCLTLHRTRHLFIRQQTSVINAIRAHLAEFGIVAPVGRHGVDQLLGVAADSNDKRLPDVARACVAALGDQLRMLKAQILEFDRMIRAWHRSSETSRRLDDIPGVGPVLATALVASVADPRAFRSGRDFSAWIGLVPKQNSSGGKDRLGNISKRGDRYLRSLFTTGALAVIRYAKIHGTKHRPWLTALLTRRPTKVAAIALANKIARMAWAMMAKGERYKEPAALAA

SEQ ID NO: 43659 - protein, 311 aa, unidentified
MSAEKVYVGVDIAKDTLAVCFLNRHCQYPNTPAGHAALLGELGKIGMAAQLVCEATGGYERTLVQAASQAGWPISLLNPRQVRDYAKARNQLAKTDKVDAAILADYGKTLQPASTAVPSAQQQMLAELVGARQDLIEERTREISRQEHLQLPALVRDAKTALRRLEKRIEMIDRLIDAQIEADQDLSAKAARMEQVVGIGRVTVLTLLALMPELGKISPQQAAALVGVAPYAHESGQYRGQRHIRGGRPALRRVLYMAAVSACQHNRILSAYYRSLVARGKPVKVALTAIMRKLIVLLNRLLINPNFALAG

SEQ ID NO: 43660 - protein, 363 aa, unidentified
MNSVYHTELSSLEGTRCQFNGGTEPIKIGIDVHQDFYVVVCQVGGTNPKPPQRFHKEAFVHWATKLKQSGASVYAVYEACGFGFGLQRRLAALGIECHVVCPQKLDEQNRRVKTDGLDAKALCLKLDRFVQGNRDALAVVRVPGEEEERARALHRQREQLVQVRKQLEAQGRSLLLNHGCAPVQQWWKKRAFAQLDVPHWIKELLANSQPILLALQEKIDQLTLHLQNAAIAEPPRGLGKMTSVIIDREIGDWRRFNNRRQIASYTGLCPGEYSSGQSRLQGCVTKHGNPRLRAALVELAWRMVRFQPNYRAVCKWKARLAKGALSTGAARKKAIVALARQLAVDLWRVRTGRLSHEQLGLEI

SEQ ID NO: 43661 - protein, 323 aa, unidentified
MPSVVGIDIAKHTFDIATCQANGKYRTKAKLANCEAGFETLHQWLLKHSEPQAWILMEATGVYHEALAEWLHDKGYRVCVLNPAQVAYYARSQLQRVKTDKVDAKLIAAYGERHQDELRAWQPESRALRRLRALVRRLEDLQEIQQMERNRLEVADTSVHDSIQSVLQHVDRQIAETIRAIKQHIDDDPDLRGQRDLLTSIDGIGDKTAALLLAELGDPLRFAGSRALTAFAGLNPQLQESGVYRGQARISRTGSSRLRAGLYMPAVCSLKRNPAISALRDRLKAKGKSGKQIVCAAMRKLLSIAYGVLKSGQPFDPRLAIAH

SEQ ID NO: 43662 - protein, 377 aa, unidentified
MNAAAHQKCTAAEVSKMEYVGVDVATRSCSALILDEAGGMKMCLEEFANEESGWRALTEAIGPDAQIVMEAGTAAYPLYDFLCRGGFNVVMADPRKIKMITASKSKTDEKDAMALAHLLRLGYVPKAYVPTPDIMRNRELLRACVDVGQEITQTKNRIHAMLTKAGLRPEYRSSRNLFASRRQLEWLRSVRFGDHRDTVLQCLLMLLESLQGQRKLLKAQIARIGLSSREVNILMSIKGVDYYAALLIISEIGDIRRFRNADTLCAYAGLVPSVRQSAEVVSHGRITKRGPGTLRWILDVVAQVVVRYDNPMSAYYRRLVRRKKKRCVAITAVSRKLLVMMYAMLTRGERCRWEDAHLTDVKIMLMRRTCARKVSAG

SEQ ID NO: 43663 - protein, 323 aa, unidentified
MIKKDFNIVIGADIAKKKFDVACLLEGKFKHKVFTNDAVGFAGFVAWFLSLCGDANPLICMEATGSYSGSLADYLANHGFSVSLVNPAKIHAFAKSELSRAKTDKADAKLIARYAFMTQPPLWIPPPANIRELQSLVRRVEHLLEMIQMEQNRLETADASTHLSITNVLNTLQTELKSTRKAINDHIDNNPDLKQRSDLLETIPGIGEACIAHLLLALSEHHGFTHAKQVAAFAGLAPVLRESGQWRGNTHISKTGDSALRKVLYMPALCAKRYNPVIQVFWDRLQSNGKNGKAITCAAMRKLIHIAFGVIKSGKPFDPNYAS

SEQ ID NO: 43664 - protein, 370 aa, unidentified
MFGFSPHSLFPLPEPVRNLGARPVKSFSSATFLVFKNKSMKIKQTIGIDVSKKTLDVFIHSVKKHKCFKDEPQGFTSLIGWVEEHNPFQNQETLYALEHTGLYSLGLSIYLTEQDHSFVMIAGLDLKKSLGLARGKDDRIDSCAIALYAYRRREELTPCKLPSTNLLKIRKLLSLRDKFVKQRSGYKTTLKETLRVMPDEQGQTYVLIHNEQISALTKSIKIVEKELHKIIDSDGELKTQYLLITSIDGVGAQTAMFMIAFTAGFTLFENSRKFASYSGIAPFPYQSGTSIRGRTRISCLGNMKFKSLLSNCATSAIMNNAEMNAYYQRRISEGKDKMSTINVIRNKILGRIFAVVQRGTPYVNTMAYCS

SEQ ID NO: 43665 - protein, 367 aa, unidentified
MKKISTVEARQTRNFREQQLTIGLDLGDRSSWYCVLDEGGEVLLEQRLGTTPKAMKEVFGEMPRSRMALETGMHSPWVSRLLSELGHEVIVAHARNVRLIGESRRKDDRFDARTLARLARIDPQLLAPVQHRSAHAQAHLMVIRARAGLVRTRTSLINTARGLTKSYGERLRGCSPRNMNAEKAQSLSPELQAALEPLLAAIESLSERIYEYNQQIGKIARESYPQVARLQQVKGVGTLIALTYMLTLEDPQRFRKSRDVGCYVGLQPGRRNSGQSEPQLHISKEGDPYLRTLLVQGAHHILGPFGADSDLRRWGLKLAERGGKNGKKRAVIATARKLAVLLHRLWVSGEAYEPLRHSRAMPLPAAA

SEQ ID NO: 43666 - protein, 339 aa, unidentified
MEHYAGIDVSLESASLCVVDATGRIVREAKVASEPEVLIGWFSRLGLTMTRIGLEAGPLSQWLYAGMRDAGFAVELLETRHVRNAFKAMPVKTDRKDARGIAQLMRLGWFRPVHCKSLPAQEMRALLTARKLLQTKNHDVEMCVRGVLRGFGLKVGPTTPRTFASRVRHLVAGHTTLSTVTEAMLAARDTLFGEWQKLEKRLRSLAREDSRVRRLMTTPGVGTIVALTYVSAIDDPTRFRSSKTVGAHFGLTPKKYQSGETDVTGRISKIGDGSVRTALYEAANVILTRPVKGSALKSWGLRLAARAGMRKAKVALARKLAVILHRMLADNKPFNPAAI

SEQ ID NO: 43667 - protein, 330 aa, unidentified
MKKWEFTLGVDVSKNTLDISCSELNEHVKIKNGTEGFTVFLKWCKHFKIDLKQSFLVMEFTGGYEYKLIQFCESRGILYTRIPGLAIKNSLGITRGKNDKVDSSRIAQYGEEKHKSLTPSRPLNPAIVSLKELLSFRKRLVRENAGYQATIKERIHMYGENKKDIIVKKLEQKLKGNIKNIAAIEAEMLNIVAQDEKISINYSLITSIKGIGKINGLMTIAFTENFTSFTNPRSYAVYVGVVPFDHSSGISIKGRKRVSHIANKELKQELNQAARSAMEWDKEMRSYGEEKLKTKCYKIVLNNIKFKLILRMFAVVKREEIYVENYRNVA

SEQ ID NO: 43668 - protein, 343 aa, unidentified
MQSISTIGLDIAKSVFQVHGVDAAGQAILRRQLRRRHVLAFFQKLSPCLVGIEACASSHHWSRELQALGHTVRLMPPAYVKPYVKRQKNDTTDAEAICEAVTRPNMRFVSTKTVEQQSCLMLHRVRHLFIRQQTAVINSIRAHLAEFGIVAPVGRRGVEQLLEVVADTADRRLPEVARACLAALGSQLRALKAQILEFDRRIMVWHRSNATSMRLDAIPGVGPALATALVASIAEPGAFRSGRDFSAWVGLVPKQNSSGGKDKLGSISKQGDRYLRSLFTAGALAVIRYAKIHGTRHRPWLTGLLARRPTKVAAIALANKLARMAWAMMVRNERYKEPAALAA

SEQ ID NO: 43669 - protein, 452 aa, unidentified
MVSANRGKGKRRKGLRTVNAHAAGIDIGSQRHYVAVDEGRADDPVRSFGCYTPDLQEMAKWLKDCGVTTVAMESTGVYWIPVHQVLQESGLDVKLVDARQVKNVPGRKTDVVDCQWIQRLHSYGLLRACYLPDKETAVLREYWRHRGDLVESASREILHMQKSLEQMNLHLHKVLSDITGVTGMRMIRSILSGMRNPVHLASMRERGVKKSEAEIAKALSGDYREEHLFTLKQALELYDMLQDKIKQCDQKIEEFLLKLADKTDASEFVSSKGTRRKNQPYFDLGKQLYRVTGVDLTAIDGIDSLTAQTIISECGFDLRAFPTEKHFSSWLALCPENRITGGKVKKRRSRKSENRAATALRLAAQSLHHSDSAMGAFYRRIKAKVGAPKATTATARKLACLVYRMLRFGMDYVDQGQKRYEELYRQQQTRILQHRAALLGYALVNIETGVVS

SEQ ID NO: 43670 - protein, 373 aa, unidentified
MPKYSTAFGMDVHLRSTTVCALDADTGEAVTRRFPGNPWGEIAGWMDGFPGPSLAAYESGYLGFAPQRELAGLGVECVVAAVSKIPRSAADSASKNDRNNAARMAKAILAHDISPVWIPSPEVEGIRDLAGAYDGATARLATAKQRLLAFLAKRGFVYGGTTPAGNPRKYWTYDFLRWLDKVRPEDDGGVRTLAALRNEVEAAAEARADLLSEYRAAVDASPIAAEVAALQSIKGCAFALAAAFSAEVGDFTRFRSGRQVTAYFGLAPSQRSSGGSVRLGGISGAGNALVRKLAVEGSWCYAAARHQPKLMPRDTGVPLEIRVHGRKGSERLLRRREEMLARGMPAAKANAATAAELVRWLWALGMMCREGAE

SEQ ID NO: 43671 - protein, 339 aa, unidentified
MRKVAGLDAHSTYVVVTIVSNDGGRVAGPHRIRNEDADQLVALLDEHAPLEVVVEASGSWPWIYDRLEGAQVHVVLAHPKKLRAIAESNYKTDAIDAELLARMRLVDLIPEVYPKPIEQRELATLVRHRARLVRQRTGAAGRIHGELHSLGLSLRRGELLTQAGRRWVHTEAWPLFGPEQQCLIETHEHLIDVLTELIRGLDRRITRIGREIPAVQLLETIPGIGAYRALLIVAETDPITRFPGPKHLVSYAGLAPVSSRSGKSVRYGSIPAGANRWLRGALVQAALSHCRFAPDSRLTTYYEDVKDRKGWRIARIATARKLARVVHAMLRTGEVWSHA

SEQ ID NO: 43672 - protein, 436 aa, unidentified
MRVLYDRVAGLDVHKKTVVACRMRVTGEKRIEWEKKTFGTMTADLLGLHDWLSEWEVQQVALESTADYWKPVFNILEDGFEVILVNAKHVQKVPGRKTDASDAEWLAELMLHGLLKASFIPPKPQRELRELTRYRTTVVRERARIINRVEKLLESTNIKLSSVVTDVMGVSAKAMLTELAAGATNPKALAELAKGRLRNKVKELEAALTGTVGQHQRFILAQQLSHIDFLDGQIEALSQQISQHLQEMAPLPGNEDDPTGSSTSEEAEPLSWTEAVELLDTIPGVDERTAEIILAEIGLDMSQFPSADDLASWAGFAPGNHQSGGKRYSGRTTKGNRPIGAALNQAAWAASRTKDTWLKARYHRLAARRGKKRAIVALGRSILVSIWHMLSRRQPYQDLGADYYDQRRKDTKVTYLTKQLTRLGFAVQLDPLPVAA

SEQ ID NO: 43673 - protein, 389 aa, unidentified
MNSSRHTDTLAAVEEHCTMYVAFELGKAKWKLGIVVPGKTKLSRYVVDGGDVEAAWRLMTKAAAQAQKRLGRPVRMVSCYEAGYDGFWLHRWLVERGVESRVLDPASLQVDRRARRAKTDRLDLEQLMQALIRHEGGDRRAYSVVRSPSVEHEDDRRPGRERERLVKERTAHTNRISGLLHGQGVRELAPRAKDFMARLTEVRSGDGHALPAKLVAEIRREQMRLELVEEQIAEIEAHCRIARQAAAPGTMAAKAAQLMELKSLGPVSSQTLVNEVFWRDFQNRRQVGSYFGLTGTPYDSGRSVREQGISKAGNARARTSAVELAWLWLRNQPSSALSRWFKERVGTQQGRVKRIAIVALARKLMVALWRFLTQGLMPEGAVLRAPARG

SEQ ID NO: 43674 - protein, 418 aa, unidentified
MGKRMNRVCGADVHKDIIVATILNSDDTEFQEKFGTTTVELGRFRDWLIAHNCEQVAFEATGVYWFPVYDALSPTIDTIVANPWMIKGIPRNKSDTLDSKWIAGNCLDGKIKRSRVLPKDCRDLRTLTRARSAYTKTRTQLRNRIHKYLALCGITLSSYISDIFGKSGRHILDGLIESKDIDTILDSIPSGKVKKKRELINASLGKGLDGVSRMLVKDTLELLDHLEEKVNDTSLEILGRLQERAKDLAIVMSVPGIGFVSASIILAEIGDYHDFQTSEQLVKWCGLAPGLNESAGKKSPCGITKQGSKSLRTILVEIAQVVAKMSKNKLSRFFHRLRTRKNYNVAITALARKLISIIFHLLVNQELYQENNYTQAKTKPIKKDLLCLSKEEQLKDGVAAIVDAFYHLKKKSSLEGGG

SEQ ID NO: 43675 - protein, 402 aa, unidentified
MNAVGIDVSKGKSMVAIMRPFGEIVSAPFEIKHTASDIHSLVELINSVEGESRIVMEHTGRYYEVLAHQLSKANLFVSAINPKLIKDFDNDSLRKVKSDKADSVKIARYALDKWQNLKQYNVMDELRNQLKTMNRQFGFYMKHKTAMKNNLIGILDQTYPGVNTYFDSPARSDGSQKWVDFASTYWHVDCVRKMSLNAFIDHYQNWCKRKKYNFSQSKAEEIYGKAKELVPVLPKDAITKLIIKQAVDQLNSASTTVESLRTLMNETASKLPEYPVVMAMKGVGTSLGSQLMAEIGDVSRFTHKSAITAFAGVDPGVNESGSYEQKSVPTSKRGSSDLRKTLFQVMDVLIKTHPQDDPVYQFIDKKRAQGKPYYVYMTAGANKFLRIYYGRVKEYLSSLPES

SEQ ID NO: 43676 - protein, 415 aa, unidentified
MDVVVERPGALDVHKASVTACVRVPVERGPREEHVAQFSTTVRGLLGLRDWLAAHRVWQVAMEATGVYWKPVWAILEDDFELILVNARHVKQVPGRKTDVSDAAWLCQLAEAGLLRASLVPPKPIRDLRDLTRYRKAQIRDRQREANRLHKVMQDTGIKLDSVATDLLGKSGRAMLDALVAGTTDPEALEGRFSAKHALIVGQILAHMDFLDEAIDRLSGAIEEQLGTFGRQQVQLLCTIPAIQRRAAEVIIAETGGDMTKFPTAGHLASWAGVCPGNDESAGKRRSGRTRKGSKWLRQTLTESAKAAARTKDTYLAAQYHRMRARRGANRATTAVAHSILTAAWHMLQTGETYTDPGGDYFVRRDPERATKRLVAQLERLGHTVTLQEAVLRLSPTGIFSGSSLIRMGSVCRRS

SEQ ID NO: 43677 - protein, 313 aa, unidentified
MNTSEINVGIDTSSKQLDIYVRPNGQFFSVSNDDAGIKEAVKSLQKLKPTRVLIESTGRLELAFVCAAHKAGLPIVICNPGHVRHFAKSAGRVAKTDKLDAMDIAHFGEAMKPRLSSIKPEKLRAISDLLVVRGQCLEMSTMQKNRLKRMPKSVQKPIQSILKAIKKELDMIDRQLDKLVDSVAEWRQKRDLLLSAKGVGKALAYTLMSELPELGTLNRKQIAALVGIAPMNRDSGSFQGKRYIRGGRHRVRTVLFVSMMSAIQCHPKLKPMYQRMVAAGKPKKVALVACMRKQLTILNTMVKNHTYWDEKMA

SEQ ID NO: 43678 - protein, 406 aa, unidentified
MAGMIGVDPHKASHTAVAIDDKEKPLGELRVRSSSGQVEQFLSWAAQWPERSWAVEGAGGLGYLLAQQLVSVGESVLDVQPKLGSRVRLLATGNINKNDPNDARSVAVAALRSKDLRPVVAEDHAAVLKLWSKRRRDLGSLRTQVVCRLHSVLCELVPGGHGKREITAAQAAQALASLGPIGAVQLARYELALDFLEDLHRIDSQMREVKKRLELAVKASGTSLTEVFGVGPYVAATVIGYVVDVSRFADRDHFASYNGTAPIEVSSGGHKVFRLSRRGNRRLNHAVHMAAVTQISHRHSEGRAYYDRKVKEGKTSKEALRCLKRRISDAIFAHLVADAKRRTMTVTAGPGGQKGNGSVSSAAGSHPERQLFGQATPGPVTTIRPTASTGDADGQEPPRKKSRKAS

SEQ ID NO: 43679 - protein, 403 aa, unidentified
MDVIYERCCGMDVHKKTVVACVITPEGQQIRSFKTTTKELLSLSDWLSEHKITHIAMESTGVYWQPIYNLLEDDFSVMVVNARHIKNVPGRKTDVKDAQWIADLLRHGLVRASFIPARPQRELRELVRYRRRLIQERSRIVNRIQKVLEGANIKLSSVATDVVGASGLSMLRAMASGEDNPDVLANMAKGRLRDKIPQLREALRGTIGSHQRFMLESQLRLLDIQSQEIDRVDQEVAQRVSPFEEMICRVDEIPGIGRRGAEEILAEIGTDMSQFPTAAHLASWAKVSPGNNESAGKRKSERTGKGNPWLKTALIEAARAASRTKDKYLSAQYRRLARRRGANRAAMAVGHSILTSIHHMLSNNTHYRELGGNYFDEHDRYYTVKRSVRRIERLGYKVILETT

SEQ ID NO: 43680 - protein, 366 aa, unidentified
MATNAMWVRRTLTSIMKITTVGVDLAKIVFQIHGVDERGKAVLRKQLKRTEMLSFFANLPPCLIGMEACASAHHWARKLIALGHEVKLMAPQFVKPYVKSNKNDRNDAEAICEAVARPNMRFVPVKTVQQQAVLALHRARAGVMKARNAQGNQIRGLLGEFGIVLPQGIGHLRRRGPELLEDGDNGLPGLMRTLLSRLLTQLQQLDQQVAALEREIVLWHRQNDDSRRVERIVGIGPLTASAYVASLGDAKAFTNGRQVAAWLGIVPRQDSSGGKPKLLGISKHGDVYLRTLLIHGARAVLRHVEHRPDPTDSWLKRLMARRGKNVAAVALANKNARIAWALLARVRTRIRIEGTKPVISQARVTD

SEQ ID NO: 43681 - protein, 471 aa, unidentified
MPKATKPADSKAGKPCRSRKPAKAVEMPLYEPNAAGIDIGAREIYVAVAPERDTEPVRVFHTFTSDLHQMAEWLKSCGITTVAMESTGVYWIPVYDVIEQHGIRACLVNPRNMKNVPGKRTDYHECQWIQHLHTMGLLQAAFRPDGDVCAVRSLMRHRNDLVAMTNEHIQHMHKALTQMNVQIHHVISDITGLTGLSILDAIVAGERDAAKLAKLRDPRVKASEEVIRKSLEGNWREEHLFILKQRLELYRYHQQQIHECDKQIEKLLVAFEPKVDPEHKPMPADRKQRQRGRKKKSGSPEFDPRAEAYKLFGVDLTQIPGLMMLVFMLFSELGRDMSRWPTSGCFVSWLGLCPDNDISGGKVLWRGARRTKNRAGALFRLAAHSLHRDPSPMGDYLRRMKGKLGPPAATTATAHKIAIIFYTMVKNQVEYDESLWAKRDALREQRLEARLHRQAAQRGYKLVPLHQQPTA

SEQ ID NO: 43682 - protein, 326 aa, unidentified
MQFFLGIDVSKAKLDVALLFANDKFKSKVFANNAQGFQALLQWLLGHVPEARDSVHLCMEATGNYHEALACFVSDQGLLVSVVNPLLVKRFAEANRLRNKTDGGDAKCLALFCRSMQPERWEAPSVAVRTLQALVARLDTLQAMRQAECNRLDVAHSSVADSLRQVINDLDEAIKQVKVQIVRTIDDDPDLKQRATLLQSIPGLGDKTIPQLLAYIGRPERFKSVKALIAYASLSPVIRQSGTSLDRRGGTHPMGHQQLKRALYFPAMVAGRYNPLIAAFWNKLKAQNKPGKVIVVACMHKLLAIVYGVLRSGKPFDPNYLRQIAD

SEQ ID NO: 43683 - protein, 415 aa, unidentified
MSYKIAGIDVHKKVLMVVVMDAHAPADEPERRRFATMPSDLRRLLSWLQEKEVKEAVMESTAQYWRSVWLELEPYMRLQLAQAFSNRAPRGRKHDFKDAERLVRRLIADELILSFVPKGEQRIWRNMTRMKTQLTRDRVRLQSQMECLLEEMRIKLSSVVSDLLGVSGLRILWALARGESDPKKLAALGEERLRCNEEQLIDALTGSPQPTHRELLSLQLERLQLIDEQIAKLNGMIAQALKPHQETVVRLAEVPGFGVDSAQQVIAEVGVKASTFPSAAEFTSWVGTCPGKDESAEQNHSSRSAKGNKYLRRLLSQVAHAAVKKNGSHFQAVFRRLLPRLGYQSAIWAIAHRLCRVLWKILHEGVRFIEQGKEPDPQAKKQRARILARALRKLGYNVAISPINPSTAESATPTQ

SEQ ID NO: 43684 - protein, 429 aa, unidentified
MKIIYPRVCGIDVHKKFIVAVICISESVEPVYLKKRFSTFHNDLIRFRDWLIQNDCQNVCMESTGKYYIPVYNVLESHISNIVVANPKWVRAVKGEKDDDKDAKWIADLFKLGIVRSSFIPQKDFRILRELTRYKYKLVNMRSSEKNRFQNALTSGNCKLDMVFTDVFGKSASNIINLILSDNPYTDEDILSKVHKNCKASSDMILESINGTDLTPVQKSRIELVNDHIKQLSSNIQRLDKLIDLMIEPYEDYISFLCQIPGVSRNSAITILSEIGIDMNQFTSTRRLTSWAGLTPSSNQSAGKKKSVRISRAGVYLKPCLVEVAHAAVKDKNHPYYANKFNKISKRRGKKRAFIAIARKILVAAYHMLLTGEIWNPADLAEVETPVEQRIKYVKNNLKSDIKQLLDIGLTVEELTLMIQQNANITATQ

SEQ ID NO: 43685 - protein, 339 aa, unidentified
MKLYVGDDLHANNNFLALVDRKGKRVDQQKLPNDLFVIRDFLKPYQKDIVGIAVESTFNWYWLVDGLMDSGYQLHLANPSAIQQYSGLKHSDDKHDAFWLAQMLRLGILPEGYIYPKEERPIRDLLRKRRHLVRLRNSLVLSLENIISRNCGVQFRANEVKRLKEDRVSPLLESNEDLALAGKTSKEMIDQLTRQIYRIETSIVQRVELKESYRYLLTIPGVGKILALTIMLETGPIGRFADGGHYASYCRKVSSRWTSNEKTKGKGNRKNGNKYLAWAFSEAAEFARRYDAQARDYYTRKMRQTNFMVAHSALAHKLARAAYSLMKDQVTFMPEKLFC

SEQ ID NO: 43686 - protein, 359 aa, unidentified
MRVSVLSFEREAGQFNRHQSLHTGWLAEISSIEESEVKTMTEFVGIDISKDTFDFYFEEAGRALQWQLQQSETDYETFIKLTGSSRCCVMEATGNYHLKLVNYLHRHGIEVVVENPLKIKRYGQMKLQRTKTDKADAKLIFDYGKQILLHSRQTWQPTSGEIHQLKQYDTLSRQLSKQMTALSNTYHAMQHLEGLDDEIARILRETIQGIKKTIDELDGKMLELVKASYHESFDLITSVPGVGPKTAVMLLCLTDGFRRFDDVRKFVSYIGMSPRTYESGSSIKGKGHITKVGNGRMRSLLYLCSWTAKSCNPQCKALYEKLEKRGKPEKVMKVAIAHKLLRQVFGIMKRGEPFCVDVA

SEQ ID NO: 43687 - protein, 349 aa, unidentified
MTIVGCDLHTRKQQVAVLQTDTGEMAEQELLHEGDAVEQFYRTLPRPVTVGIESTGYALWFHELMQRLGHTLLVGEAAKIRAMVVRKTKTDRRDARHLLDLLKHDRFPAVWIPDPTTRDLRALVTHRVRLVRIRTMVKNGLPAIALNRRLALGSKLWSQRGRAQLVALELPQHTAQRREDSLELLAWLEEHIAGLDARITDAAHAHPGARLLLTHPGVGALTALTAVLVLGPVARFPGSKHLVSYVGLAPAVSASADTCHLGQITKQGSALLRWVLGQAAPLAARADDDLHRVYRTLIHRRGRPKARVAVARKLLVRLFIMVRDQIDYAEFRRRGRSPVPRQDLHRSPA

SEQ ID NO: 43688 - protein, 337 aa, unidentified
MTIIRIGLDTAKHVFQVHGVDENEQPVLRRQLGRSEMAKFFAKLAPTRIGLEACGASHHWARVLRGLGHEVVLMPPQYIKPYVKRGKNDALDATAICEAMSRPGMRFVPVKSAENQAALMLLSVRDLLVKERTMLINAVRGHAAEFGVIAAKGRGNVAELLQRAHAEEAGVPGLALALLKVLAGQIDALEAKLKTLEAELMALHKADPVSQCLATQPGIGPIGAVSFSLKVPDPKAFGSGRHFAAWLGITPKENSSGGRHRQGRISRQGDEGLRRLLVLGATAVIRFAKAGRSSPWLINLLARRPRKVAAVALANKMARTLWAMMVSGEVYRRPLAA

SEQ ID NO: 43689 - protein, 323 aa, unidentified
MDKIKKIIGIDISKDVIDVNDSEDRHYQYTNNRKGFSRMKHLEGKGMIWVMEATGYYHLPLARYLLSRGEQVSVVNPLSVKRYIQMRLSRIKTDKSDARMIRQYGEQNELRAWKGRSRKWEESLQVMSLLEQYSKQMTAMKNKLHGESAGGNVSTEVLKSLKRSMNQLRKEQNILEKHLLQLVREEERELLTNLESIPGLGRKTAIMLIVMTEGFRRFESASALRSYCGLTPIIRESGSSVRGRSRISKMGNQKLRNLLFLCSFTACQYNKACNDLYRRITDKGKSKKLALIAVSNKLVKQAFAIAKSGIPYDADYRSALPQK

SEQ ID NO: 43690 - protein, 316 aa, unidentified
MNIKTQVEINVGIDTSQSQLDIYVRPTGDYFSVENTPEGAKKAASKIRKYQPTRVLIEATGRLELNFVCVAHNAGLPVVVCNAGQVRQFAKSTGRLAKTDKLDAQDIAHFGEALQPTLTIIKPDKLRDISDLITVRRQCLDMGTMQKNRLLRMPKSVQPPIQRILKAIQKEIERIDQKLDKLVDAIPQWREQRDLLMSAKGVGKVVAYTLMSELPELGKLNRKEIAALVGVAPMNRDSGSYRGKRRVTGGRSKVRTVLYMSMWSTIQYDPKIKSMYERLLAAGKPKKVALVACMRKQLTILNMMMKNGTHWEEKLA

SEQ ID NO: 43691 - protein, 344 aa, unidentified
MKITTIGLDLSKNVFQVHGVDENGALVPTKRLHRKQMEPFFAKLPSCLIGIEACGTAHHWARVLVRFGHEVKLMPPAYVKAYVKRGKTDAADAEAICEAVRRPTMRFVPIKSPEQQSILMVHRARSLVVRQRTMAANALRAHLAEFGRVANPGVRNLLKLVRSVFDETEENRMLPDLARAALAVLVRRLVELEEELQTLDRTLLAWHKENEASRRLATVPGIGIVTATAIAATIDDPQRFRSGRQFAAWLGLVPKPHSSGNKVHLGGISKQGDRYLRRLLVVGATAVIRHCRDKDTPMAAWLRELLANKPMRVVSVALANKLARIAWALLSRQDVYRPYRRAQA

SEQ ID NO: 43692 - protein, 377 aa, unidentified
MKSTTVIAFDQHAATTMAAALLPGHRTPALHPLTSDLQMIGRFVDRLRRTGGVACCYEAGPCGFEWQRFLAARGVGCAVIAPALIPRRPGDRVKTDRRDASQLAVLYRAGALTTIHIPSEEEEAARDLLRCREDIRADLLRARHRLSKFLLRHGRRFTATKAWSRRHGAWLRAQTWPHAALQQTHEAYMRAVDEGVARLRTVDEELRAVLELPSLQPRVVRLRCFRGIDDLTAVTIAAELGDARRFATAPRTMAFVGLVPSEHSSGTKQARGAITKTGNAHLRRVLVEAAWHYRHHPFISEALRRRQQGAPTDVVAHAWTAQQRLHRRYQRLAARGKPKQHIVTAIARELTGFLWASLVPSSDRPSVERRILGASMR

SEQ ID NO: 43693 - protein, 337 aa, unidentified
MKRYLGVDLHRTQFTVCTRLENGRTYLRQWPLRELKLFAAQLRKEDEVAVESTGNTRLFHDAVVEHVAHVAVVNPSQFKVISQSMKKTDKNDAELLALYLAKGLLPEVRMKERKQREMSHLAQTRDLLVKQRSALKAKINNLLSAEGINLKRESLSSKKALERVLAIPLSPLMLAEARVLTDQIRSLNQSIAKLEGLIEEEGPKLAGHRNLMSIKGIGPISASVLLSVIGDIRDFSDPGKLAAYLGLVPRVQNSNETEHSGHITKQGNKLARTALVQCALIAKRDSSFLQNFYQRIQRRRGGGKANIALARKFLGVIYHTLKNDWVFEDFPNFVLAS

SEQ ID NO: 43694 - protein, 348 aa, unidentified
MTVYCGVDFHARKQTISYLTTEDGEVQQAELHHEQDNIRGFYAKLLRQGPVIVGFETSGYAAWFEELLEDLGCEIWIGMPAAIRRQARRRQKNDRRDADLILELMLRGDFPRLHRYTPASREVLQQLRYRHRLVKLRTIVVNSLQYLALSRGVSLRTKLLTGRGQQRMKELKLPSHLAKQRDEMCELLQELTAKIETAESWLELKAKQDAQVERLMSHPGIGPLTGLCLVYTLEQVERFANPRKVTAYIGFDPVEDSSGERQRIGSISKQGSRLLRFLLVEAGQVAVRADPDLKAAYWRVQLRRNHQKAKVAVARRLLVRAFIMLRDEIDYAEFQRRGVAARSTRRTA

SEQ ID NO: 43695 - protein, 364 aa, unidentified
MNKCHLNTELSSLEGTRSEFNRSRAIIKLGIDVHQDYYVVVKQEGGTNPKPAQRFSKEAFLHWAAKLRRQGGEIHAVYEACGFGFSLQRQLSALGIQCRVVCPQKLDEQNKRVKTDGLDAKALCLKLDRFVQGNRAALALVRVPTEEEEQKRAIHRQREQLVKTRKVLEAQGRSLMVNYGMEPVSSWWKARTFAQLQVPEWMKELLQNSQPILLALQEKIRALTVQLQAAAISQQPRGLGLLSSVVIDREIGNWTRFKNRRQVGSYTGLCPGEYSSGNTRVQSCVTKHGNPRLRAALVETAWRLVRFQPDYRAVKKWRHLLAKGALATGAARKKAIVAVARQLAVDLWRIRTGRVATETLGLIN

SEQ ID NO: 43696 - protein, 387 aa, unidentified
MDVRTVSSTPAASHDETARCLLAIELSKKSWVVAVNTPLAAKISRYTLQGHDVDALLKLIERIVARVTRELAQPVQVISCYEAGYDGFWLHRLLESRGICTHVIDPASLQVDRRARRAKTDRVDAERLLRSLMAYLRGEAKVWSVVRVPTLAEEDDRRLHRERDRRITERIQHVNRIKGLCALHGIYNYEPLRHTRMAQLEQLRTVDGRELPPRIKAEIRRELESLELVLRMIKTLEAERNAIAFQGRKAHGNARQIQDLVKLKAIGPEFAAVLTGEVFYRSFDNRRQVASFTGLTPSPFQSGSRDRDQGISKAGNGKARKTMIELAWLWIRYQPDSALTIWFHDRVGAVKGRIRRITIVAMARKLLIALWRYLQDGIVPVGASLKA

SEQ ID NO: 43697 - protein, 322 aa, unidentified
MSAPVLGIDVAKQRIEVALLVDAKVRNRSFKNTPDGFESLALWLRKMGIERVHACLEATGNYGEDLAIYLHEAGHTVSVVNPARIKGFAQSELIRTKTDKVDAGIIARFCLVMKPGSWTPPSHEIRSLRALVRRVDSLIGMRTQEKNRLGTAHESVIPLIKEHIDYLDKEIENIRHQIADLIDRDPTLRQKKDLLVSIPGIGKATIAVILSELDKLEKFKNVREVVAFIGLAPKETLSGSSIKGKPRLCKAGNARLRKALYMPALVSIQCNPLMITFYNRLKEKGKNGKVIVCAIMRKLVHIIFGILKSGKKYDPDYKPAFA

SEQ ID NO: 43698 - protein, 466 aa, unidentified
MAQKKKSTSIRKSKRNRPAQLKSPEWTLGLSVVHPKAAGIDIGNEEHWVAVPPSLDPVPVRRFSCFTGDLMALADWLQGLGIETVVMQSTGVYWIPLYDILEQRGMRVFLVNAQDTKNMPGRMSDLQECQWLLKLHVYGLLRNSFRPEDQVRVMRTFWRQRQQHIGDSSCCIQRMQKALTQMNLQLANVISDISGTTGQAIIGAILAGERDPQVLAKLRDPHIKASEEVVAKSLHGNWRPELLFVLKQESESYHALQKKIGECDRELHQHYQSMEAKADPRVLPEVPRDKRARGRHIPESFNLRDEMYRVTAVDLTAIHGVNVLTAQTVMAEVGWDMDKFPTEANFVSFLDLSPKNKISGGKIVGREKRKTKNRAGLALRLAAGTLLDSQTYLGAQYRRFRTQLGAPKARKAMGAKLARIIYRMLKYGQEYVDKGNQFYEEKYRQLQIRRLTKKAAELGFEIVKAA

SEQ ID NO: 43699 - protein, 318 aa, unidentified
MSSLTSAPVMGIDVSQRQLDVADAAHAKVRQFEHSVDGLAQLVAWLAPLLPRLVCLEATGGLEQRLVETLHAHGLAVAVVNPRQIRDFARAAGQLAKTDAIDAQMIALFAERMNPRDTPPMPENQRKIQDLTARRRQVQQMRTQERNRLSTAFNPDVRRLIEQAVELYDRQLEQLDAQLEQLIAQDEPLQAKATIVRSLTGIGPVATAALLADLPELGRLNRQEVARLVGVAPTNRDSGTLRGKRTTGGGRRDLRHALYMPTLVAVRFNPQLKKFYQRLVAAGKSKKVALIAAMRKLLVILNSMVKSQTLWKNPLLGT

SEQ ID NO: 43700 - protein, 418 aa, unidentified
MRVEIDEPGIVERIAALDVGKAEVVCCVRVPGPGAQRMQEVCTVGTMTAALLGLGDWLAELRVSRVVMEATSDYWRAPFYLLEDRFETWLVNAHDVKHVPGRPKIDRLDAVWLCKVAERHMLRPSFVPPPAIRELRDLTRYRVDLLAVRTAEKQRVEKLLEDALIKLSVVVSDSFGVSGRAILAALIAGERDPAVLADLARGRLRAKTDRLVEALTGRFTDHHAFLLAQMLQRIDGITADIATVQARIESQLGELAESVTRLDAIPGLGPVAAQMILAEIGTDMGRFPTPAHLTSWARFAPGVRESAGRKKGNAGTGNGNRYLARVVGEAAVSAGRTDTFLDERYRRIARRRGKKRAIVAVGRSILVIIWALLSDPEAQFIDLGADYYATRTNPERRVRHHIRELQALGYAVTLNPAA

SEQ ID NO: 43701 - protein, 370 aa, unidentified
MKQKILYVGLDVHKNTIDVAVATGRANGKVRSYGKIDSTLDAIDKLIKKLQGRDTELRFVYEAGPCGYQIYRHLRSKKISCAVVAPSMIPRRSGDRIKTDRRDAINLVRLQRAGELTSIYVPSVEDEAIRDLVRCRDDMRRFEQKARQRLLAFLLRHGHRYSGKKHWTKGFYSWLATVKFSHPADQIALQEYIDTANECSQRLKRITEQIQVHVEQWSRVPFVRAYQALRGVSFVVAVTVVAEIGDMNRFATPKQLMAYLGLIPSEHSSGKAVRRGSITKTGNSHVRRALIEAAWTYKLPARKSIILLKRQRGLPKSVCDISWKAQTRLCARYRRLVARGKARQNVVTAIARELGAFIWAIDKQMQLERV

SEQ ID NO: 43702 - protein, 410 aa, unidentified
MDVVYPRCCGIDIHKKTAVACVIVSDTKGPPRKEARTFGTMTDELLALADWLMSEGVTHIAMESTGVYWKAPFNLLEGQFEVLLANAQHIKAVPGRKTDVKDAEWIADLLRHGLLKPSFVPDRPQRELRELTRYRTVLVRERAAEINRVQKTLEGANIKLGDVASDILGRSARQMLEGLVAGTAEPSTLAQFARGRMRQKIPQLERALAGRFAVHQRLLVAQQLAHIDYLDEAIDSLSAEVAERLAPFEATLERLDVIPGVGRRTAEILLSEIGTDMHRFSTAGHLASWAGMCPGHHESAGKQHNGKTRKGCQWLRAALIEAAAAAAKTKDTYLAAQYHRLVRRRGSDKATVAVGHSILVIVWHLLQHDCPYVDLGSTYFDERDRTATERRLVQRLEQLGYSVHLDRSAA

SEQ ID NO: 43703 - protein, 344 aa, unidentified
MKHYAGLDVSVKETSLCIVDEAGRICREMKVVSHPEDLLAVLCDPAWRLERVGLEAGPLSQWLFSGLAEAGVPAICIETRHAKAFLKAQVNKSDRNDARGIAQMMRVGLFQPVHVKTLASQKRRALLAARKILQEKALAIENDIRGLLRNFGLKVGIVGVVGFEQRIHDLVEGVPELADIMEPLLAARRVLREKFAKLHRKVLLLARDNEVCQRLMTIPGVGPVVSLAFISTVDVPARFRNSKAVGPSLGLTPVLNQSGESHRVGRISLCGDEAMRALLYEAAQVMLTRVQKWSWLKAWAMNIAKRRGQKKAIVALARRLAVIMHRMWSDGTEFRWTREMAPTI

SEQ ID NO: 43704 - protein, 412 aa, unidentified
MKQQADRAAGLDVHRDNVVAATRISEPGGEVTVTKKRFPTTRRGIGELAAFLTDEAVTRVAMEATGVYWKAPYYGLEGLFDELWLCNAQHVKNVPGRKTDLSDAEWLADVAAHGMVRPSFVPPPEIRELRELTRYRKTQVDARGKEIQRLEKTLQDAGIKLTSVASAVWSVSSRRIIEALIAGERNPAVLAGLAVGKLRPKMGRLEEALDGRFGAHHAFVCRQVIDHIDFLDGSIAALTEEIAGRLLPFEAAVALVCSVTAIGDLAAQAIIAEIGVDMSRFPTAGHLCAWAGVAPASHESAGKKRPAGTRHGSTWLRRVLIEVARAASRTKGSYFSAQYSRIARRRGTNKAAVAVANSILAVIWHVLTNGCVYEDPGADYFERRHDPAVEAKRLQARIEALGYDVTLAPKAA

SEQ ID NO: 43705 - protein, 337 aa, unidentified
MKRYLGVDLHRTQFVVCTRWENGEQEIRQWWIGELAKFVEQLQPEDQIAVEAMGTTGRFYDAVAGRVARVVVVNPHQFKVISESVKKTDRKDAQALALYLEKDLLPEVRMKPKQNRELMHLAETRDLLVKQRSALKGKINNLLAMQGIELKREALSSKIALQRVLALPVSRMVQLELRVLVEQIRSLSESIAQLDEQLEEEGQQLPGYENLTSIKGIGSLSATVLLTVIGKISDFADENKLAAYLGLVPKIANSNESERSGRITKQGNKLARTALVQCGLVAKRYSPYLQRFYERIKQRRGGGKAKIALARKLVKIVYDTLKNQWVFEDFPSFTLAA

SEQ ID NO: 43706 - protein, 349 aa, unidentified
MSVKVNSAITVIGIDIGKNSFHVVGHDKRGAIMFGQKWSRGQVEARLANLPPCLIGMEACVGAHHLSRKLQMLGHDARLMPAKYVRPYSKGQKNDFRDAEAIAEAVQRPTMKFVATKTAEQLDLQALHRVRERLVSQRTGIINQIRAFLLERGVAVRQGLRFLRIELPRILATPSEVLSPRMVRVIEDLAGDWRRLDERIEGLSSEIETLARRDAGCERLMSVPGIGPIISSAMVAAIGTGDAFTKGRDFAAWLGLVPKQISTGDRTILGKISKRGNRYLRVLFVQAAWVVLIKPKTWDRHGLKPWLEAAKKRLHHNVLAIALANKLARIAWSVLARGRAFEASRIQVA

SEQ ID NO: 43707 - protein, 344 aa, unidentified
MRIASVGIDLGKTTFHLVALGERNQVLIRKKFSRSQLLAYTAKLTSSLIGLEACAGAHFVGAALREQGHEVRLIPAQFLKPYRKSNKNDFLDAEAIADAVTKENMRFAQIKTQEQLDIQAMHRVRDRLVQRRTSVINEIRGFLLERGITFPARPIHLQKNLIAVIEDAEQNLSPRTRWLLQQLWQEWKQLDSEIRTVTDEIERTGDENALCRRLRQIPGFGPLVSSATVAAIGNGAAFRRGRDFAAWVGVVPRQHSTGGRQKLLGINKRGNVYLRRMLIHGARAVLLRVKYNTGGFGQWVHRLAQRAPRNKVVVAIANKLARIAWAVLSSGKEYRHQPLQVSAA

SEQ ID NO: 43708 - protein, 349 aa, unidentified
MLHVGLDLSRRRVDVCLISSEGELVEHFRAAVDRDGLYGLSRRVAVYDEPVRGVVESMNGARFVHDELVRYGWEVLVADAQRVKGLAPLACKTDRIDARVLAELSFRDLVPAIWLPTPELRQERERSRWRLHLVKHRSILKNRVHASLIAFGHQVPMADLFGAGGRRLLAELDFPEPWLSHVRASVELIDDLDRRIAEIERWLQRSGADHRYIPLLMSAPGIGWVTGFTIAAEIGDINRFSSPVKLTGYTGLCPRVNQSGEVDRRGPISKHGPRYLRWGLMEAAIHASTHPLYKERYQRTKRRLGRQRGAKVAQIELARKLTEAIWYMLTRNQPFKPFAPEGAISRLTA

SEQ ID NO: 43709 - protein, 369 aa, unidentified
MADRITYVGLDVHKDSIVVAVAVGGLRGEVREYGRIANTSAALDRLLRKLGGDGMTLRFCYEAGPCGYGIQRRLSARGHECVVVAPSLIPKRAGDRVKTDRRDAASLAKLHRAGELTAVWVPDAQHEAMRDLVRARLDAVHALRRARQQLSGFLLRQGCHYGRPAWTKLHRRWLAGLKFAQAVHHLVLEDYIAAVEAAAARRDRLTGQIEAMLPDWTLAPVVAALQTMRGMALVNAATLIAELGDLSRFANPRQLMAYLGLVPSEYSSGASIKRGGLTKAGNRAARRLLIEAAWCYRFPARVSRELLLRQEEQPKPIREIAWKAQLRLCARYRRLARTGKPANIVTTAIARELAGFVWAIARQVTVTTD

SEQ ID NO: 43710 - protein, 347 aa, unidentified
MAKGSQAEVQVFAGIDVSARELSVGVRRGVEDGIAVTTFTNNAAGHKALLAHLLRGNARARVCLEASGNYSLDLALTLQAHSQVEISVVNPRRARRFAESLGERSKTDPVDARVLCEYAMRMRWVPWVPPSLAALRLRGITRAIEDLVAMQTQEKNRQHSLLASRALPALVIRELEQHLRYLQLRITRLRREALRLIARHPELNRRFHLMLTTRGIGETSALQILGELAVLPDTLDARQWVAFSGLDPKQFTSGTSVEKKPRISRGGSRHLRRALYMPALVAIRHEPFVRGFYQRLLRRGKAPLQAVVAVMRKLLHAFFAMFRLDQPYDGSKLCPAEFARDTVAVCA

SEQ ID NO: 43711 - protein, 346 aa, unidentified
MEIIRVGVDLAKNVFQLHGVNRYEKPVWKRSLRRGQWLQELQRRVAPGAEIGMEACAGAQHWGRRLEALGYRVKLIAPQFVKPYVKSNKSDRNDAEAICEAMSRPSMRFVELKSIEQQDIQAVHRVRAELVKQRTAKVNQIRGLVGEYGLVAPQQVSYVRKALPQWLEDASNGLSDRFRRLLAGLAEDLRGLDQRIEELDEHIGAIASESPVAQRLLTLRGVGPMIATALIAALGTGKGFTRGREFAVAVGLTPKHHGTGGKERILGISKRGDAYLRQLLVHGARAAVRAARSKDDSLSRWIQGLLAHKHSNVVTVALANKTARMAWALVRHDVDYDPTLAAKTNC

SEQ ID NO: 43712 - protein, 429 aa, unidentified
MNFRPIAGIDVGKFFSEMAILSPSNEVIARMKIHHDSSSDVERVVELLKKTEKDFDSRPFVVMESTGHYHKILFHSLCKAGLEVSIINPIQTDSIKNIGIRKVKNDKADARKIALLYRFQELKTTNIPDEDIECLRSLCRQYYKLSDELTAYKNRLTGIVDQLMLNFKDVFPNIFSKAALAVLEKYPTPAHILKANRNKLIALIQKNSRRSLKWSTAKYNLLVSKAREFAPLTVHNSSNIAMLGVYISMIRTLEDNLAKVLKTIHLLIAEDMAKDMPMLALTLELLQSLPGIGLLTAATILAEIGDFSAFSKPGKLVAYFGIDPSVMQSGEFTGTRNKMSKRGSRLLRRVLFTTALANIRTKRNKEACNPVLLEFYKQKCQSKPKKVALGAVMRKIIIYIFAVLRDRKPYQLRSPQEHAQMLAAKHIAA

SEQ ID NO: 43713 - protein, 346 aa, unidentified
MHYIGMDCHITNLEFAVVNEAGRLVKAHRVDTSVNGFMEFVKTVTPPRTIYMEEGTLAAWALETCVRFREKLVVTDAKKNHWIGSSGQKNDSIDALKLAQLARGGYIKEIHHPVGHRRRFRELMIAYHDTVRSTTRIKNKIKARFRQNGIQCTGATVYSETHREEWKGKLPQEATLLLILDGLWRQLKQSEQTEEELLAAARAQAKQYPEIKLFKDIPGIGFISAATISAILETPYRFADKRKVWMYAGLGIMTRSSGGKTYSEKLSTDYNRLLKYTLKQAAEAAIQAKDNPFRRKYLDMTLLRGIAPHRAKLTIARDMLATMWAMWRKGEKYSPEIREKAVCKQG

SEQ ID NO: 43714 - protein, 397 aa, unidentified
MSSGYEVFLGLDVGKGAHHAVGLDPAGTRLHDAPLPNSEPKLRALFDKLAAHGSLLVVVDQPATIGALPVTVARACGHQVAYLPGLAMRRIADLYPGRAKTDARDAFIIADAARSLPHTLRRVNVGDDALAELDVLIGFDDDLAGEATRLSNRIRGLLTGIHPALERAIGPRIAHPAVLEILSRCGGPAGIAQAGRRKLTAIATAHAPRIGDKLVTTILAALDEQTVTVPGTAAADTVLPRLADSLKTVLQQRKTVAAEVEEILDAHPLAGVLISMPGIGIRTAARILLEIGDASAFKTPGHLAAYAGIAPVTKKSGSSINGEHPARTGNRRLKRAFFLSAFAALADPVSRAYYDRKRAEGKKHNAALICLARRRCDVIYAMLRDKTHYQHRATQAA

SEQ ID NO: 43715 - protein, 346 aa, unidentified
MEYIALDVHKKYTWARVENTQGERLYESRLAHAHGTIRNFVGRWTTGSPTAVETVGNWYWVVDEIEAGGGKAQLVNARLAKLMMGSVNKNDKLDCKGMNRLQRTGTLPTVWIPSSLVRDARELPRTRMVLSRQRTQLKNRVHATLGKYGYVVEGVSDAFGKRGRQIMSELLRKLPPHTQQALQRILDQLDHVGENLKSIEGQMAEVFAPCPQTNWLKTLPGVGDLLAVVIWTEIGTIERFSRAEQFASYCGLVPREHSSGGKIRFGAIRRDVNVYLKGAFVEAANSALLNAERCDYSHISRLYQRIKPRRGQGKAKVAVARHLAEASFWMLKKGEPYREPMSSTQR

SEQ ID NO: 43716 - protein, 347 aa, unidentified
MKYYIGCDVHKKYSVFAMRDEKNNLSQPVRVEHERETFQKFLRTLPSGSPIAVETTGNWYWIIDEMEHAGHFPALAHAARSKLMMGQINKTDKLDAGGLAALLRNGTLPSVWIPQGDLRDQRELPRMRLALVHMRTSLKNRIHAIFANYGINFENESDLFGKKGRRAITQHLPELPPETRRTVEQELEILDKLTEQITQSEKRIKEVIAVTPDMKLLLSIPGVGPVLAITIALEVGDINRFPDNHRLSSYAGTVPRINSSGGKTRFGKTRPDVNHYLKRAFVEAANVIVLNQAKWPDRHAVQLYQRIKANKGHGKAVVAVARHLAESTYWVLKKKEPYKEPAAFKQG

SEQ ID NO: 43717 - protein, 340 aa, unidentified
MGEVTTIGLDLAKHVFQVHGVDAEGGTVLRKQLRRAQVLAFFSRLPPCLVGLEACATAHYWARELRALGHEVRLMPAQYVKAYIKRNKHDAADAEAICEAVQRPTMRFVPVKTADQQAAVLLHRGRERLVRQRTGLVNALRGHLAEFGVIAPQGLRNVGKLIAIVRDEGDAWLPDLARQVLQVLAAQIEQLEAAVVAIEKQLMAWHKSNPVSQRLASVPGIGPIIATALAATVVEPSGFRSGREFAAWLGLVPRQNSTGGKHRLGGISKRGNPYLRRLLINGASANLLRSKATNADPWVIGLRQRRPSLVVAVALANKTARIAWAVMHRHENYQRVAAAA

SEQ ID NO: 43718 - protein, 324 aa, unidentified
MNKINHFVGVDISKDKFDVWDSKAGHRSFANQPKGFREFTKQLSSNSFCVMEATGSYYQQLAMYLYGHKISLAVVNPISIKRFIQMKLQQNKTDKSDARMIALYGQEQPGLSPWIPAPEYITQCKQLQRVIVIYLKQNTSLKNHIQSLESRGVKNGVLIRSLKRQLKQVRQEIALLEAEMQSLIHQYDADLFVNLSSIPGIGKKTAAFLIILTNGFRDFDNYRQVSSFCGLSPTEHSSGTSIKGRSRISKRGNPYIRNQLFMCSFTASQCNPQCQLLYQRLVNKGKSKKLALIAVCNKLIKQSFAVAQSGIPYDPAYRSRIVCQ

SEQ ID NO: 43719 - protein, 311 aa, unidentified
MQITIGIDISKETLEAYRFPDNQHIQVANGRAGHKTLVRWIGKENGSLVVFEASGAYHRNFEAALAANGTAFAKVNPRQARRFAEASGRLAKTDRVDAIMLAKMGAILGLKAHEPKTEALHILRELITARRALMKDKVAAKTRLQITRQTLLKNQINARLNQIKIQIRQIDAAIAEKVAQDETLSNKLAILISIPGIAETTAFSMLIEMPELGTLEGKQAASLAGLAPMSRQSGKWQGKERIQGGRAFLRRAIYMPALVATRYNPGLKEKYDQLIRAGKSGKVALTAIMRKLVVMANALLRDGRTWSELRP

SEQ ID NO: 43720 - protein, 329 aa, unidentified
MTGETAMTLYIGVDFHPHQQTVSYCNTEEGEVRQTSLFHNLKLVRRFYEQFPKAVVGIEASCTARWFEQLMQDLGHELQVGNPTSIRARARSRHKSDKRDADLLLDLLLKDEFPALWRRGVEGQSVLEQLRFRHALVNQRTKLCNRLQALAHAAGLPKRGIQTKRARLALMGSNFTETQSFERDQLFEMLDDLSARIKLIEGWLEEKAAGDRRVELLLTHKGIGLLSALVVVHTLGDISRFPSSKEAVAYTGLDPLERSSAGRVRTGSRRTRRKQRSAALARTGDARCRPLRLGTQSVLSKIGESALEVDRQNRRDKKVADPSFHHAQR

SEQ ID NO: 43721 - protein, 405 aa, unidentified
MLFVGDDWSEDHHDVGLVDQTGRRLARARLPEGVAGIARLHELVATHLPSDAGPEQVWVGIETDRGPWVAALVAAGYRVYAVNPLSVARYRERHSTSGAKSDAGDAWLLADVVRTDAERHRPVAGDTPGVEALKVLARAHQTLIWERTRTLQRLRAALREFFPAALEAFDDLAAPDALELLARAPDPTRAARLSRSQIAAALRRARRRNVDAKAAAIQAALRTEQLAQPVELADAYAATVSSLVPLMGVFNAQIAAMEAQVDACFHRHPDAEIYLSQPGLGVVLAGRVLGEFGDDPTRYADAGARKNYAGSSPITRASGKKTVVIARYARNDRLGDATQKWAFSALTASPGARAYYDELRARGKGHQAALRQLANRLVGILHGCLKTRTCYDEQTAWGHRAATAA

SEQ ID NO: 43722 - protein, 400 aa, unidentified
MFCGWDWGSTHHGVCVIDDGGTVLRRWLIAHNGERLGELFFELAEIAPPESLPIAIERGEGLVVELIADAGHAVLMVDPAGFKAARPRWGSAGAKSDLGDAYMLADYARTDGHRLRRVQPMAHATRDVAVLVRSRTSLVEARTAASNQLWAVLAEHWPGAGAVFQKLISPIALAFLADYPTPEAAAHLGEGRMGQFCRRHAYRGAKTPAELLGRLRAAPSATNPISAPVLASVVAASVAQIRLLNGEIARLERDGRDALAAHPKAALLEELPRVANVSLAQLIAEIGPLLERCDNAEQVAAMCGAAPVTRASGKTRTVGFRYAANKPARVAITGFADNSRHSSAWAAERYRQARTRGARHPHAVRVVARGWIRVIWACWHTGTAYTPSRHRGEQLAAAMT

SEQ ID NO: 43723 - protein, 375 aa, unidentified
MKEYTRFIGVDQHKDSLSVAVAYAGREKEEFLGRIPNDPEVIARWIRQRALRWGGLKNTLWCYEAGPCGYGLYRQLREMNIACQVVAPGLTPKKPTERVKTDRRDAGKLARLLRAGELTPIWVPDEEHEALRDLVRAREVARDDLARHRQRVKKFLLRQDVRCPKGIRAWTKRYEMWLDTVKFSRAAHQEAWVEYRQAVREGEGRLARLGKAVEEAVQTSRWRPVVEALQCLRGFKIVTAATVVVELGERALYCEPDQLMSYSGLVPGENSSGERTWRGGITKAGNAHVRRVLVEAAWHYRHPPVVGRALELRQRGQPAEVLEISWRAQRRLNARYRKLLARGKDKNKVAVAVARELMAFVWEIMQVVEPMSASV

SEQ ID NO: 43724 - protein, 416 aa, unidentified
MTGVRVRLFVGDDWAEDHHDIEVMDQAGKVLAKKRLPEGVAGMAQLHELIGRFVPEHADEAEVVIGIETDRGPWVAALIAAGYVVFPVNPLQASRYRERHGVSGAKSDAGDAHMLADMVRTDSHQLRAAAGDSPEAAGIKVVARTHKTLIWDRTRAVQRLRHQLREYFPAALEAFEDLDAPEVLELLGKAPDPARAAKLTRAQVSAALKRAHRRNIADKTTAILTALRGEHLAQPGSLTVAYVATVRSLAAVIATLNEQVKALETEVGGHFGRHPDAEIYRSQPGLGTILGARVLGEFGDGPGRYISAKARKNYGGTSPITRASGKKKVVAARFIHNDRLLDALMSWAFSSLNASPGARAFYDQQRAKGVEHNDALRRLANRLVGILHGCLKTRTLYDEATAWGHRENLPQSSAAA

SEQ ID NO: 43725 - protein, 335 aa, unidentified
MEITTIGLDLAKHVFQVHAIAADGTVVLKKRLRRGQVYSFFAALKPCLVGVEACATAHFWARQLRELGHDVRLMPAQYVKAYLKRGKNDAADAAAICEAVTRPSMRFVPIKGEDQQAALMLHRARDLLVGQRTQLINAIRGHLAEFGLIEAQGPWNVPRLLAGMEEAGVPDLVPGLVRLLASQLEEVELRIDEIDTQIMAWHKASPVSQRLAGVPGIGPLVATAIVATLPDPTVFRSGREFAAWLGLVPRQNSTGGKTRLGRTSRQGNTYIRRLLVIGAQSALFCSKATKANPWIQALLAKRPRLVVAVALANKMARIAWALMARQTTYRTAAAA

SEQ ID NO: 43726 - protein, 330 aa, unidentified
MQTVTTIGLDIAKSVFQVHGVDAAGQAIIRRQLKRRYVLAFFQKLPPCLVGIEACASSHHWSRELQALGHTVRLMPPAYVKPYVKRQKNDATDAEAICEAVTRANMRFVPTKTPEQQSGLVLHRTRHLFIRQQTSVINAIRAHLAEFGIVAPVGRRGVEELLTVVSDPNDKRVPEIARACLSAFGAQLRRIKEQILEFDRLITGWHRSNEMSMRLDEAPGVGPVLATAVVATVADPKVFRSGRNFSAWIGLVPKQHSSGGKDRLGGITKQGDRYLRGLFVAGALAVIRYAKIHGTKHRHLAHRIASTAVDEGCRHRTRQQDRANGLGHDG

SEQ ID NO: 43727 - protein, 385 aa, unidentified
MEQGYKSKVFCGYSITIFPSEVFIMVVSVGIDVAKDKHDCFILNSEGEVLADVFTIPNNMDGFNCLLQTIRDCTTPQDIIKVGLEATGHYSYNILGFLLDNGLATYVLNPLRTNLYRKSLSLRKTKTDRVDARTIAAMLLSDIGLKPYTDTAYHNEELKSLTRYRFNKVKERAKLKSSVSRLVCILFPELEKLVPTLHGASIYALLEEFPGAVQAAGAHLTRLKYLLSDASRGRYGRDMAVEIRDAARNSIGSRMPAKSLELQHTIRLIRELDAEIEEIETAIQTIMDEIHSPITTIPGIGYRMGAMILAEVGDFSRFESPDKLLAYAGLSPSTYQSGQLINCYPHMEKRGSRYLRYAIYNAAKYVCLWDPTFAAYLAKKRAEVL

SEQ ID NO: 43728 - protein, 341 aa, unidentified
MAEYVGLDVSMKETAVSIRRDGKRVWRGKCGSDPRLIAEVIRRRAPGATRVVFETGPLSVWSYHALTAEGLPAICIDARHAKAALDMAPNKTDANDADGLAQLAEVGFFREVRVKGFDSMLGRTLVAARNRLVQITTELSNQIRGLMKTFGLVVPAGKGSRFEAHVRALLADQEGLAPILLPLLEAWRAVRLRAAELGRQLVTSARRSEACQILMSVPGVGAVTATSFATAVEDPENFRRSRSVGAWLGLTTRRYQSGEVDYDGHISRRGDTHLRGLLYEAATVILTPTSAESSLRTWGLKLKERIGFKRAAVAVARKLAVVMHAMLRSGQLFDRTAGMAA

SEQ ID NO: 43729 - protein, 456 aa, unidentified
MSHCTANKKAASAFVRRNSIPTTGAVAKALFNSAIGIDVHHDILVCAYQYCNRESDEITTEVCSFGTTASELAKFTDWCRNRHPEQILMESTGVLWFSPYEALESVGFTNRQLSLINARDFKAIVGRKSDKQDAERLALYARIGNVRSSFVPAKCFREMRTVSRLLSKTTDEQSRARSRYLKTLNFIGCRASSVFSDVRGKAATAILEVLAEGTREQLIDAIKIHGRRLRKSAAEILDALDFAVSPAMAMQLRIQKQHMEALSQTCEELYALLKVMQANYQSWINRLMTVPGIKERAARVIFAEVTNDLSSFPDAAHLASWVGVCPGTMESAGKRYSGRAAKGNRYLRRILVECSQAIGLMRKGALYSLFQAFKERKGTRRAVVAMAHHLVKIIYCLFTKGGNFEAQSTDALTKVRKQKYLSAVANIKKQNFEILTSGSLVDKATGAITTVDPMTV

SEQ ID NO: 43730 - protein, 360 aa, unidentified
MAAKKCNIMKTETTAIIPKLYIGIDVHKKSWTYHYQTDLFDGKTITQPANPKTLVDWVSKNFPTHEVTCAYEAGFSGYSAARLFQKQNWNVLVLNAADIPRPQKQSIVKTDKIDCRNICKQLKNEAVKSITIPEEQRESFRALFRERNNFVMGLRHIKLQIKSYLMYCGVTIPEEFDNASWSKNFIEWIKNQSQPFETGTLKISFLLKRFDFMYQETLTISNQLREYARKHYKKDYNLLRSVPGIGGITAVAILAELGDLRKYNRFDDLASSVGFVPGVYSSGDTTIVKGITPRAKSLLRSYIIEASWQAVRFDPVLQEYYRSHYGKQPNKIIVKVARKLLSRIHAVIKTETPYQIGVIK

SEQ ID NO: 43731 - protein, 331 aa, unidentified
MGYSKMEVVEIQMVIGIDVSKDKLDIYIQGTGEHRVIVNHPRQIGEWLTQMTQQYQGLKLVFEPTGRYEKKLILLALKHRVTCYGVHPNKIHNFKKCLGNSAKTDKIDAIIIAKYALDFPEQLKLIDDSYIEHMELRELSARRRQLKADIHRIVCQMKHDISSAEVRKSYARMKKVLLVELKTIEATMTACIHADKEKQHKVELLQSIKGVGVVTSQMMVTEVPELGQLDKRKICKLIGVAPLNCESGKKAGGRHIDAGRRDVRNVIYMAALVAIRHNEHMRRIYQQLRARGKLAKVAIVAIMRRLVCTMNAMIRDDKKWTNSNSLAAQKA

SEQ ID NO: 43732 - protein, 318 aa, unidentified
MQISGYVIGVDVGKFELQVAGHEKSIVSGVLPNSRSSIVGWLKRLPAGSVIAMEATGGYQELLARLAHERGFVVYVLNPTHVHHYAISLGNRGKTDRLDAEVIAQYIAQRHTKLHPYEPTSPELQQVRALQALRSTVVRVSTSLRLSAQRHGCASGHQKKALAGLSSWAEQLERELIAKIKAQSEWAKTYGLLTGICGIGPMNGVALTALFTRVHFTSNDAVVAFCGLDPRPKESGRKVGRRRLSKQGDKAARTLLYNAASSVARTPHFKDYYAALTARGLASTAALVVIARKLLRIAYGVWRTGRAFDPERLNLKTA

SEQ ID NO: 43733 - protein, 466 aa, unidentified
MKPFYMGIDVSKGYADFMIINSKKQPVVQSFQLDDTFEGHRSLYNLLSRFLADYPESTLFAAVESTGGYENNWYNSLIEFQGSLNIQTARLNPLGVMHNSKADLKKNTTDKISAQNIAEYLVAHREKVVYQQHDQLAGLRKQWGFIKMLTKQCTQFLNQLNALIYSANPELLSYCQAEMSAWMLKLLVKYPSADRLKKAHVKTVAKIPYVSKQKAQQLIAGAKRSVASDTDVTTQQLIVATAEQILHLKKTIADQTNQMLRECSIPEVELLKTFPGIGDFSAVGLIIEIQTIKRFAEAKKLASFFGVHPVYKISGDGVGGFKMSKQGRTAPRQILYMAALSAIQCNPLIREIYEKHQKQGKHNMAAMGICMHKILRILYGMLKNNKPFNPHIDIANRLRSVRMKNDTPVKNTSRRFQDYDQKAPVSKRQRKKRLERERSHSVSDTKVGITAPVPLADIIANILPQL

SEQ ID NO: 43734 - protein, 343 aa, unidentified
MEAITTIGLDIAKSVFQVHGVDAAGNVIVRRQLNRRNVLAFLEKAPPCLVGIEACATSHHWSREITALGHTVRLMPPAYVKPYVKRQKNDAADAEAICEAVSRANMRFVETKTPEQQACLMLHRTRHLFIKQQTSVINAIRAHLAEFGIVARVGRNGVEELLRVAADPGDRRVPEVALACIAALGAQLRMLKAQILEFDRQIMAWHRSNETSKRLDEIPGVGPALATALVASVADPKAFRSGRNFSAWIGLVPKQYSSGGKDRLGSISKQGDRYLRSLFTAGALAVIRYAKIHGTRHRPWLAALLARRPTKVAAIALANKIARMAWAMMVKGERYKEPATLAV

SEQ ID NO: 43735 - protein, 394 aa, unidentified
MILVGIDIGKNKHTFSIIDKNSGEILLSPSDFSNNLKGFLFLIQKLSSYTKSELLIGMEDTGHYHFALLKYLLDRRYTVVLINPTTTDLTRKLQGGITKNDPLDSLTICDVISSNHRNKPYRVTTLNRFDLYEQKQLTRHHHNLKEELNTYKNRLQKCIDIVFPEFNSLFHSKYGIVYMNILKTFSSAKAIANADIRSIRKCFEFKGQGKRISLSAEQLKLTAKSSIGIPSVAEEIQIRHLVSQIELLEKQLSEIDKRIEEFSLKNNSPILTIPGISHFSGTSIISELGDICNYTKASQIIKFAGVAPYHYESSQFTAQHTAITKKGSKYLRKTLYQIILPVISNNEVFYAYYTKKLNEGKGHRCAQGHCIRKLLRVIYHLLSTRQPFNPKLLV

SEQ ID NO: 43736 - protein, 376 aa, unidentified
MTEIYAGLDISDKTTHVCAIDKDGKVAWRGVCATDPQALASALKAHCEGLVRVVLETGPLSSFLYHGLIERGIAVVCICARHAKGVLSVQVNKSDVHDAHGLAQMARTGWFKAVHMKDSQTHMDRARLKIREQMVQAHNAMINQMRGLLKLFGLRLGGSTTPGMRNKRLEALLCQKPELRSVFAPLVASLTALEDQIKALSATLKARAQSDAVCERLMSVPGVGPITALTFVCSIEDPARFAHGYDVGAYAGLVPRRFQSGERDSQGHISRAGDGNLRHTLYEAANNLLSRVKKPFALQTWGKALAVTKGAKRARVAVARKLGCRLTVVPNRNVDARGGDLEITCEEKDLVGDKETPTSFELLLNRLTAIMAAWIT

SEQ ID NO: 43737 - protein, 491 aa, unidentified
MSEITIPPQERLDQLEKHYADRVTDFRQRLAELGLDKVLVVLLDIGKNAHWVTAASGAGVEWVRPHRLPSSQVGLSQFIQMTDSLIAEHQPALTLLGHEPTGVYHEPWARALMDYYKAPLADQTMSYTFFNPYQVKLARQQTHLRHRKSDPLDLAAMFDLSLRGLGQAAFLPTGVELLVRQEVGFIRAQSRLLRRLQRQLWQQLDRLWPGAAVNVAQFKRAHPGLPAPTPIVQTRPFERDTLRVLLLHYPNPYHLKALSDDELLALFRQHMGRCGPATLKTLRTWAKNAVLLPKNIAEPLAEQLQRLFNQYLTVQNLVEEAHGRLIPLIPHTPAHHIVAIPGLGDYDAARYYAGLGSIGRFHRSAEVWAFMGFDPICDGSGDKPERIGHLSKHGDPNFRDALYLMSYRVAQNYAPVGLTFANAFLRGKCEVEATLHAAHRVNRICFHLIKNDEPFQDQSTPKLEAEYTRRWQLFKAEKKKRKSRRKRGNRR

SEQ ID NO: 43738 - protein, 416 aa, unidentified
MNAVGIDVSSRKSTVAVLRPLGEVVCLPFDVSHDADGLASLAEKLKALDGETRVVMEHTGRYYEAVAKALHEAGFFVCAVNPLLIKEYGANSLRRVKTDKADAIKIARYVLDNWADLRDFTPMDAIRYDLKTLNRQFQLASKQRTASANNLIALLEQSFPGIRKCFDSPVRSDGTQKWVDFAHSFWHVDCVRKQPFAAFCERYRKWCKRHAYFFKLRNAEKVYALAKSAVVLTPKAKVVKVLVQEAANQLISISRSVEVYRAEMDRLAAMLPEYPVVMAMYGVGKSYGPQLMAEIGDVRRFERKQALVAFAGIDPMPNQSGDKNVRSNKSSKRGSPYLRKTLFNVIRTYLQCAPQDEPVFQFLNRKRAEGKPFYVYMLAAANKFLRRYYAKLRDYFASLDTLQPVAPIPTILKAAL

SEQ ID NO: 43739 - protein, 350 aa, unidentified
MKESNRVFVGCDLGDKFTEIAVLDGAGAVMETERIRTTRAALLKHLGKYQGARVVIEVGAHSRWVSELIESLGHEVVVANPRQVPLIFGRRQKTDRSDAMVLARLGRFDVSLLAPVRHRPRATQVDLATIRSRDVLVSARTKLVNHVRGTLKQFGLLMKKASTPTAVIKDARRVVPPELQSALGPVLATLELLDAQIDAHDGAVEQLAANYPQVARMTQIHGVGELSALTFALTIDDPHRFEKSRFAGAFFGLTPAKDQSGDSDPQKRITKAGDPLMRRLLVQCAHHVIGPFAKDSDLRRWGLRLAARGGKNARKRAVVAVARKLAVLMHRLWLSGEPYQPLGYATAHAK

SEQ ID NO: 43740 - protein, 373 aa, unidentified
MDQEVIFVGLDVHKATIAVALAPEGRSNEIRFQGSVPHRPGTMADLGRRLQGKHPGARLTFCYEAGSCGYGLARELTDAGYECLVIAPSLIPTRPGDHIKTDKRDATTLAKMHRAGELTTVWVPDASHEAVRDLVRAREAAMYWRNRARQALSSFLLRQGYRYGGRSAWTVSYWRWLATLELEHPAQQLAMQEYILAIQEADARHDRLVKQIEAIIPTWSMAPLVIALQAMRGVAMITAATIVAEIGDLARFTTPRKLMAYLGLVPAEHSSGAKVRRRGITKAGNPRARRLLVESAWTYAKSPRVSQEIQRRQEGVELEIVKIAWKAQLRLHDRYRRLAATGKPKNVVITAIARELVGFIWAIGQRVAAPAVA

SEQ ID NO: 43741 - protein, 342 aa, unidentified
MKYIGLDCHKKFDHATMIDTETGEVKAKRLTHLKEDFAEFIGEGSDTKLVMESCWNWCKTYELVKDLVEEVTLAHPLKVRAIASAKIKTDAIDSRTLVELLMADLVPQAHLRKAENRIKQRVIRHRAFLIVMRTRLKCRIHDLVDSQLLSRDVAQAKPTNIFSKKGMKWLCSLELATEEDRRISNSYLTLLEAINQEIASSNEMVKEIYDKDKDAQLLATIPGIGVTLATLISTEIDSIERFKSPSKLCSYAGLVPSTHSSGGKTYHGRITSEGNRWLRWGLIEAVVPASYGDAGIRQQLNDLRRTKSGNVAKTIMARRLLKIVYHVLSERRAYVPDYPGRL

SEQ ID NO: 43742 - protein, 408 aa, unidentified
MNPLYVGIDVSSKNNVIYLMLPNGDKHSSFSLANSHDGSTQLVKRIFTAMTSNNIDSVLIGLEATSVYGDNLVYFLKEDTTLASFDRKIHVLNPKQVNKFKESYNDLPKNDYIDAFVIADCLRFGRINKEVYMDDYRYKALQNLTRARYFAVTNLTKEKQRFINVLFKKYSTMTQEKIFSDTFSTTALAVYEKFESAETLAKMDLQELTAFIMEKGKNRFPDPDAVAKALQKAARSSYRLPKTVNDSVNQVLAISITSIRALESQIKAFDKAITKQMELLPNVLISIPGIGPVLSAGIMAEIGDINRFQNQAALAKYAGLAWQQHQSGDFEAQTTRMIHSGNRFLKYYLCEAAFSLVRCDKEYNRFYHIKYKEVNRFQHKRALALTARKFVRLVFALLKDNRLYRPAE

SEQ ID NO: 43743 - protein, 352 aa, unidentified
MTEHSKEQRITVIGIDLAKRSFHLCGMDAQGRRVFSKQVSRAKLAQELANRPPCLVAMEACGSAHYWARLFQSHGHEVRLIAPQFVKPFVKTNKNDAADAEAIAEAAQRPTMRFVPIKSVEQQDLQAIHRLRSQAVAQRTAQVNQIRGLLAEYGVIIPQGRAHVGPCLAEILENAENGLSALFRASLQGLADELRHLDARVAHYDAQIAALARESEPAQRLMTIPGIGPLVATALIAAIGSDPRLFGNGRSLAAFLGLVPRQHSTGGHDRLLGISKRGDTYLRQLLIHGARAVMRWVERKADALSRWATALRARRHTNIAVVALANKLARIAYAVLTSGQPYDPARGALSQA

SEQ ID NO: 43744 - protein, 384 aa, unidentified
MNKHSMIFIGLDTHKEFHEVAYCEEQRGASAVHYGRISSSKVSVKKLIRQFESKYPGATIHVVYEAGPCGYWIYRLIASLGHCCYVVAPSLIPKKPGEHIKTDRRDALKLVKLLKSEDLTPIYVPEPEDEAVRDLSRARELAMKDLKEAKYQLKALLLRNNIRYEGTANWSKKHLRWLTELILPHPAQHIVLQEYLQTIEERIRRLERLDNELTHHVHQWRYYPVVKAIQAMRGVRLLVAVGVVAELGDLHRFDHPRKLMAYLGLVPSEHSSGGKRHLGAITKSGNGRARRLLIEGAHSYRYPANVSTNIQIRQEGLPKDIVDIAWKAQLRLCKRYQRMSKKGKHYNLIITAIAREMAAYIWAIAKEVVLTPVNPKLRLSRVPA

SEQ ID NO: 43745 - protein, 457 aa, unidentified
MKKSKKKEKGFKIRVTSSMEMINPNTAGIDIGGNEHWVCVPEDRADKNVRRFGAFTKDLYAIADWLKACKITSIAMESTGIYWIPLFQILEKKKFKVCLVNARHLKSVAGRTKTDRYDCQWIQKLHSYGLLSPSFRPNDETCKLRSLIRHRDNLISMASKHTQHMQKALHQMNILLSNVVSDITGDTGMKIIKGIAQGEERPEVLAENRDPRIKATKEEIIEALRGDYRKEHIFVLKQSLELYNFVHKQISKCDSEVENLLEKMNKKVDRKLCPLPGAVKRRKKPRKNEPSYDLQTYLYEITGVDLTRVPGFETTGLQKIVSEVGVDMVKWKTDKHYTSWLGLAPNKEISGGKILKEKTKKVQSPAARHFRMAAFSLKHSQSYLGSFYRKIRARSGPSKAITATARKLAVIYYHMVRYGLEYIELGADYYIKNYKEIAIKKLKRNAKQLGFELVSVS

SEQ ID NO: 43746 - protein, 339 aa, unidentified
MSVIIGVDPHKASHTAVAIGGDEREVAKVTVRATCQQTTKLLAWAEPFTERTWAIESAGGLGYLLAQQLVDAGEHVLDVPPTLASRIRVLGTGRSEKNDPNDAFSVAIAALRSNGLRTVEQADHTEIMRLLAKRNHDLGRLRARLVCRLHNALADLSPGGISKELYVSDARELLGSFEASTPIEHMRHELALELVDDVARLDEQIKESHRRIRTAVRASKTTLTDLFGVGPVLACSIIGYSGDVRRFVNRDSFAAYAGIAPVEKSSGGRVFHRLSLRGHRRLNNAIHMVAISQIRQPHSEGRAYFERKVIEGKTKREALRSLKRHVSNAIYRQLVVDAR

SEQ ID NO: 43747 - protein, 350 aa, unidentified
MKYLGLDVHLKSTVWCLLDEEGATVEHGSVETTVVGLRELLRKLEQHGELLCGQEVGTLCYFVNDIFIERGVKLLTFNAYQLRMIASSRKKTDKRDAYWLAKALQTGMTPHPVYLPSGEVRELRGLLSQRQALSRERVRWRVRARRMVQAAGFKPATGGSAKVTKSLEDALTVPETLAPYLADGVKRCLRMEKALALELKDLDKQLHQRVKDNDVLKRLMTIPGVGEQVALTLYATIGDISRFKSARELCSYAGLVPSVRQSGNHQTLGHVTKEGSPRLRSILVQAGHSLLWRCKSDQSLPLKALAQRVHTSRQRRKIAIVAAGRYILRTAYYVMRDGTAYDPSKLPAAA

SEQ ID NO: 43748 - protein, 344 aa, unidentified
MNSVPFYIGIDISNDDFAASIFTDPEIPIKTRTQIPNEFSGYEKFESWLAENQVQTDNCIICLEATGVYGESLCYFLAAKGWKVAVEPPLKVKRAFPDKGHKNDKTDSKKISEYAYRYFDELQFWRPKANIIEQIKVLLMTREQLVGQRTASSNTLKALRKKVVQTPLANDIYQKNVERLSRQIHKIEKELEKLIDKHPDFKKTVKFLDSIPGVGMLLAANFLAATDGFENEMAFQYRKLAAYIGICPYEHSSGSSVYKRPRTPKYGPAKLRKLLHLAARSVVTHNEQFFLYYQQKIAQGKKPKLVLNNVSNKLLKIMCAVTRTQKPFVDNYVSIHPQFTHINP

SEQ ID NO: 43749 - protein, 359 aa, unidentified
MTIKGRVVAWVVTRTLNYLEQLPGLRVRIYKAENLRGILIMKQIDDKIYIGIDVSKKKLDFQYDETGKVLTIENHKGDFKKLNDYIPTDKKRVLVVLEATGGYEKEVVEWLVSRHIPVVLANARRVRDYAKAMGQYAKNDHIDSGVIREYGQQFGHKLHLQQAKSKLEKEIDELSRRRTQLISGRTKEKQHLATIQHGEGQKSIKRAIKFYNGEIDKITKKLALAVSKNDELQAKAELIQTVKGVGEVTTYTLIGELPELGQVNNNKISALVGVAPFCRDSGTMKGKRTTWGGRSSVRAALYMATLSASRHNPAIKMFYERLIAKGKPKKVALTACMRKLLTIINTIVKNNEPWHAKMA

SEQ ID NO: 43750 - protein, 447 aa, unidentified
MPRGEFAPSSASTGIGGHRGGSTMMEGYRMDEDRDWYVGVDWGSAAHHVRLMDSAGTTFAERVVPHDGEALAALADWLLSATRAAPARIHVAIEVPHGPVVESLLERGFRVYAINPKQLDRFRDRFSPAGAKDDSRDAEVLGDSLRTDRRCFRELAPLDPVVVELREWSRIGEELTRERVRLANRVREQLWRYYPQMLELGDDFAAPWLLALWRIAPTPSKAARLRATTLERWLKRHHIRRFDAAQVLACLRRPAITVAPGTTEAATAHLALLAKQLDLVNRQIAEANARLDRLTERLAAPDGDGAGPSAEQRDVTILRSSPGVGRIVLATLLAEASDPLQRRDYHALRCLAGAAPVTKRSGKSTIVLMRRAVNVRLRNALYHWARIAVQRDPRSKLKYAALRAKGHTHARALRSVADRLLAMACAMLKSRTLFDPHRACHPAAKAA

SEQ ID NO: 43751 - protein, 338 aa, unidentified
MLYSGIDLHKRTAVIATVDETGKVVCEASLPTSRFAVARYFAELPDSTRATVEATSSWYWLRDLLHQEGVPLTLAHAKFVKAIAYAKVKTDAVDALTLAQLHRVDLIPRAHMVSPELRPLRDLLRTRLQLVEKRVSAKNSVHRLLEKFNVPDPASLPDEAALSASLYEEQIELLDSQIRRIEQQLQPRLIPEPDIQRLLWIPGIGKITAFTLYLEIDGIDRFPSVRQFFSYCRVVPGAHNSGGKNRHGRRKDGNRYLKLALSHAAVRAIQYYPEIKRFYQRKARQKNPAIARTLVQKELARSVYIVLAEGVEFNHTFKGQPLERRKQSKWPRQASPDV

SEQ ID NO: 43752 - protein, 399 aa, unidentified
MDKTNNTVRFMDGGGETLSLFAVKNNADGADELHEKLRYTLLHTDYSKVIIGMESTSVYADHIAAYLKNDEFLRKWECKVYVINPKNINNFKKSYPELPKTDSIDTLIIADYLRFGRLPKTVFRDEKYLALRNLTRARFQAAQNLSREKTRFLETLYQKFSTLDSSKVFSDTFGATALAAACDFLTVDDIVYTPINELTNFISSKGKGKFADPEAIASALQAAARSSYRVSKTVNDSLNQLLAVRLIGIRSIDDQIKSLDKSIVAFMGAFQNVLISIPGIGPVYSAGIIAEAGDVSRFDNGQASLAKYAGLAWSRHQSGGFEAANTKMIVSGNKYLKYYLLEAANKVRMHDDEFALYYRIKYREVPKHQHKRALALTARKLVRLVYSLLSNNRLYMPHR

SEQ ID NO: 43753 - protein, 440 aa, unidentified
MSDLPVLDPHAAFVDVGSEQMYVSIAGGPPKVFGTVTMQLNALRDWLLSQKVRSVAMEATGVYWLPLYGVLEEAGLEVLMVNGRQTRNLPGRKTDMKDCQWGATLHAHGLLRAGFVPPAQIRRLQDYVRLRGGHIKSAATHVQHMQKALERMNIKLHDVISTLTGVSGLAVVRAILSGERDPGRLLALCDMQIQRTKAERVRESLRGTWAEEHLFALRQALQSWEHYQGQIAECDRQIEQLLRDSGDSDVPPRPTVARKPRKGPGVNAPKIPGLRDILAQMCGGQDLTTLPAHTEYSVLQIVSEVGTDLSKWATEKHFTAWMGLAPGSHQSGKRKGSVKRNRNRAGRLFCVIARSLARSKDIALGGFYRRMAARRGGLVANIALARKLAALFWRVMVKGMDYVEHGLAHYEAKVLETKQRALRRLAAQLGQQLVPVPKTT

SEQ ID NO: 43754 - protein, 355 aa, unidentified
MDSTKFVGMDVHKDAITIAVMNSAGKVIMESIIETKAVTILQFIQGLRGDVLVTFEEGTWATWLYDLLKPHVTKVVVCNPRKSALLKDGSKGDKIDARKLAELLRGGYLKPVYHGDHGLRTLKELSRSYLTISKDLTRVMNRIKALYRGWAIPCGGTQVYSPCHRSVWLSKIPEAGVRRRAEHFYEQLDALQGLRKQVRRDLLAESRKHDATKLLRQIPSVGPIRAAELVALIQTPHRFRTKRQLWNYSGLGLETHDSAQYRYVDGQLQRCKKPQQLRGLNQDHNHDLKKIFKGAATMASISAGPFHGFYEALLAKGTKPTMARLTLARKIAAITLIVWKKGANFDAKHLKQQAA

SEQ ID NO: 43755 - protein, 453 aa, unidentified
MAQGSGLTRGDRNRNRKIGLLRGVVRRDRAVLAVDLGEDKQAAVLVDHEGRVLARKMVKAKAHQLGGLLEWAAGQAARAGFAGLVVACEPTGHRWKALMGLADAAGAGFCCVQSLAVHKEREKDDYTRDKTDHRDAYLIGRLAVRLDCYLPERAEEAWARLRHLGARRSGLVADVISCTRQVADLLACAWPAALATAARPLESTTWLAAMGVVTDRCCGDPARLRKMGYDKFLAAVRRELPRWGAKRVYRKIATGLWDALAGRGGVAAQRRGALERVHLLLGDWRSLLARLADTEQRMCAVLEELGLAALAASIDGVSALSVAVILAETGDLARFASGRAVVKHAGLNPAENTSATLAGRTRISRRGRPGLRTAAWRAAWPGVRHNRVLAARYAHLTSRDGNRLSGGQARAACAAALLRWLWAVITRRQAWDARIAAGTIPARAGTVTAPAAA

SEQ ID NO: 43756 - protein, 392 aa, unidentified
MVVSVGIDVSKDKHDCFIVSSEGEVLADVFTIPNTMDGFHCLLQRIRDCTAPQDKIKVGLEATGHYSYNLLGFLLDNGLATYVLNPLRTNLYRKSLSLRKTKTDRVDARTIASMLLSDAGLKPYTSTAYHNEELKSLTRYRFDKVKERAKLKSSISRLVCILFPELEKLVPTLHMASVYALLEEFPGAKQIAGAHLTRLKALLETASKGRYKRDVALQIRDAARNSIGSRMPAKSLELQHTIRLIRELDTEISEIENQIQSIMKELHSPITTIPGVGFRMAAMILAEVGDFTRFASPDKLLAYAGMSPSTYQSGQLKNCYPHMEKRGSRYLRYALYNATKYVCLWDPTFSAYLAKKLTEGKHYNVALSHASKKLVRLIFAMEKSRQPYRVAP

SEQ ID NO: 43757 - protein, 340 aa, unidentified
MHNPNAGAVFVGIDVGARELAVALQTDDQLEPVRTFANTASGHQQLRRYLRRDQQPVRVCVEASGNYSLDLCLALHAMEGVELSVINPRLARRFAESLGTRSKTDPVDARVLCLHAQRMPPVAWQPPSPASLHLRSITRAVEALTHMLVQERARHHAAEASAALPRLVATELKRHQRYLEQRIQRLRREAVRIISTDADLARRFRLLQTMPGVAETSALQLLGELAVLPSTLDARQWVAHSGLDPRHHRSGTSIEWRPRLSKLGNRRLRRALYMPALVAVRHDPHLRGFYQRLCANGKAPLQALAAVMRKLLHAFHAMFQRDEAYNGAHLCPQIPFASHP

SEQ ID NO: 43758 - protein, 523 aa, unidentified
MAGKVSTIRRRKSRSNSRKRQNLQKPNGVIGHRVKKVGGANFAIVCVDPAKHRSEWMMADYFGNLLIEQQTLEHQTAFFKLAVAQIREAQQQHDIQDMIVVVERTGTYHLAPKRAFSKAGFETRVVHPFATKQYRMPANPGNKTDGNDLNAQHRAAVAGFGLCEVELESPYRELQLRSRHRRNLVEKSTAIACQIREHLHLTMPGFAKLFDHLFDHKSAMAIARRCDSPAKVIQLGHAGLSQHLRQSKIRHQSRTIDKVLAWASQVDSIQDGPLHHAIWTDLEELYQHFQRRIFVLEREIAGDLVQTPYVRLMAIPGINVVSSAELAGEMGPITRYANANAITGRCGLYPSRYQSDQTDNSGPIIRQANRRLRCALMRIADNLVCHCAYYRGQADADQARGIDKRAARVKIAKKFSRLAFACVAGDEPMKHPAFQKPDSILEKLREFHHQHQTPVEQLLADLETAVGQLPYNTRSHEAKIVADVLQQQSNRHRGGVAIGEVLPAVLARLEIKTTIDNEHRDRS

SEQ ID NO: 43759 - protein, 460 aa, unidentified
MLSMKTNRFLGIDVSKGYADFLLLDDNKNVVEEGFQLSDNKQGRQKLKELIKSWQEQGLEQLFCGVESTGGYENNWYSYLKANFKDSKVYVCRINPKGVKAIGEASLKRTITDAVSAENIAAYMISFPDKLDYGIHKEATNMTFKEGRQHATCIRMHQKQKVQLMNQLEKLLYQYFSEILIYCRHGIPVWLLTMLVKYPTAVMAIKAGAGKLAVFKGVSNTKAEAIIRKAKANMQDVSPQIAHMIQITAKEILHKETLIKDEKQYLATLHAESEEVTLLETIPGLGVNSAVTVALEIEDISKFETVKKLASFFGVHPTFKQSGDDVWGNHMSKKGRGEIRAVLYMASLSAIRYNPILKQVYAKARAKGMKHYPAMGVVMHKFLRIIYGVLKNKTAFNEQTDELNQKRSTEKQQEKEQKDKAENKVIKQKKYRFQEVSTDAPISRRKEQKIRKQIASQASD

SEQ ID NO: 43760 - protein, 286 aa, unidentified
MTITTVGIDLAKNVFAIHSVDQNGKTVLVKPKVLRAALPELIASLPPCVIGMEACSGAHYRARLFRQYGYEPRLMAAKFVSPYRMAGKSGKNDAADTQAICEAVRRPPMRFVPVKDESQQAMQCLHRTRQGFIEVKTATYNRLRGLISEFGGIAPQNTGALRHMVSAKKSPLPLQVQQCVDDLLEHVGCIEVNIAKYDRILSSMAKTDRQPAADGTGPTTACALVASISNAQDFKNGRQLAAWLGLTPSQQSSGGKSKPGRITKAGDSYLRTLLGQGVRSVLTGVD

SEQ ID NO: 43761 - protein, 434 aa, unidentified
MEEVTDEPLYRDRVCGIDIGKAQMVATIRVPSDRDPARRAAETRTFGTTKREVLALADWLRCWQVPAVVMEATSDYWKGPFYRLEAEGFECVLADAKQVKNLPGRPKRDPADSRWLAACFERGAITACFVATPEFRIIRLHTRYRRDLTEERTREKNRAEKLLESAALKISSVLTDLHGVTGRDIMDHLIAGERNPKVLAQLARAAARRKISQLEEALEGAEFFTAEHAALLATMLARIDRLSGGIEDLTAVIERLLAPYEEQLAQAGSMPGWGRRAAQDAVAETGAGMSRFRTGPHLVSWGGRAPQDHQSGKRAGRSKAKKGNKYLGAILGETAVAAGRTQTREGVRHRRLARRRGTAKACVATGNTQLKASQLLADPGMRYQDLGPDYYERQRDTRRQVAHHVGKLGSLGFEVTLCRIPEPDPDGTAPTQSA

SEQ ID NO: 43762 - protein, 407 aa, unidentified
MDLVHPTCAGLDVHQQTVVACVRVGSGKTVTYAVRTFGTTTQELLALSEWLSTLGCTHVALESSGVYWKPVWHILDGHFELVLANAMHIRNIPGRKSDVNDATWIADLLAHGLIRSSFVPHEPIQELRDLTRTRKQLVREIAQHTLRIQKTLETANVKLTAVLADIMGGSGRAILQALVAGERNPDRLAALASDRVHASRADLVAALHGRVTAHHRFMLKLHLTQIEALETAVREVEARLGEALAPFRVAVDRLITMPGISETAARVIVAEIGFDMSRFPTAAHLVSWAGLCPRLHESAGKRLSTRIRSSNPWLKTTLVQAAWSAARKKDSYLRAQFLRLKSRRGPKKAVIAVAASMLTAAYYMLKDGVDYRDLGGDHFDRRDKAKLAKRLIARLHDLGLTVEVRAA

SEQ ID NO: 43763 - protein, 436 aa, unidentified
MRGCRCSMIMGFTKPIKHFYLQRKKVITMNTLYVGIDVSSKSNVVYLMLPNGDKHSNFSVTNSHEGSTQLVKRILSALTSHSLDTVLIGLEATSVYGDNLVYFLREDATLAPFNRKIHVLNPKQVKKFHDAYNDLPKNDYVDSFVIADCLRFGRINKEVYMGDYRYKALQNLTRARFFAVQNLVKEKQRFMNVLFKKYSMMTQEKVFSDTFSTTALAVYDEFESAEALANMDLHELTDFIIEKGKNRFPDPDAVAKAIQKAARSSYRLPKTVNDSVNQVLSISITSMKALESQIKEFDKAIKAQMELLPNVLISIPGIGPVYSAGIMAEIGDINRFNSQAALAKYAGLAWKQHQSGGFEAEVTRLIPSGNRFLKYYLCEAAFSLVRCDKEYSDFYHLKYKEVNRYQHKRALALTARKFVRLVFRLLKDNRLYCPAK

SEQ ID NO: 43764 - protein, 368 aa, unidentified
MSRIAEQGGPVTGGVDTHADVHVAAVVDQVGRVLGTRGFPADASGYAAALVWMRAHGELTKVGVEGTGSYGAGLARYLAGCGIEVAEVIRPNRQARRQRGKSDAADAVAAAVAALSGEASGMPKSRDGAAESIRALRVARAGAVKARTQAGNQLRDLILTAPEPLRQQLAGLPSGRQAEVAARFRPGDPACPAEGTKAAMASVARRCQQLTAEITRLDAMLDELVRHAAPEGFLAKRGVATQVAATLLITTGDNPGRVRREASFAALCGASPVDASSGKQIRHRLNRGGDRQANSALWTIAMTRLAHDPRTKAYAARRTAEGKTKKEIIRCLKRYIAREIYKALCRPQRPGNATRAANNQDLSAPVLT

SEQ ID NO: 43765 - protein, 317 aa, unidentified
MSIVEAARGVTGGVDTHLDVHVAAALDPLGALLGTERFGTDPAAWLGSFGQVTKVGVEGTGSYGAGLARFLRRADVEVIEVDRPNRAEHRRSGKSDPLDAVEAARATLGGRAKSISKSKDGAVEAIRVLVVAKRSARQARVKALVPMRHRVITAPDQLRCRLKGLSVAALVADAARLRPSRSGDPMMAAHKASLCSLAHWVQGLEDEIAELDERIEKLVALTASELLSRFGVGPDTAAALLVSAGDNPERLHSEAAWAHLCGVAPIPASSGKSSRHRLDRGGDRQANSALWRIVMVPIAHDPQTTAYFERRVKEGRP

SEQ ID NO: 43766 - protein, 313 aa, unidentified
MSVALSKPIMGVDVAKNELVIYQADGDVLKEIPNTKTSIKQWLKALLGPVSIAIEATNIYHLEFADLAYEAGCTIYMVGGYELKHYREGVKIRAKTDALDAKLLARYLKNEAEELRPWTPPSPMYRQLLSLFRRRAALVQARVGLVQSWSNEPLLKAAFAEQIKSMQRLETMIEKTINDQLKQSGLLGQLKRCLKVEGIGFLTGARLLTAFQRGEFSNADAFIAFLGMDLRVSKSGQKDGRRSLTKRGDPEARRLLHNAAMSASRTKAWKGFYEAQRARGFSTTQALVMLARKLARVVFALLKGQSEYQPKVS

SEQ ID NO: 43767 - protein, 344 aa, unidentified
MKKNLFFIGLDIAKADFAASIYQTPGQPIITKEAIPNDPEGFEMLLLWLNDHHINKKNCRICMEATGVYSQAIAYYLLFAGFPVSVEPPLKVKRAFDPVGHKTDPVDSKQIAEYAYRFRDELTSWKPKDEILEKIRQLLSVREQFTKQKVALDNSLQAYSKQRVQVALIKKAQKETLDQLKKQIARIDKELEKLIKQDPGIFQKANNLKSIPGCGMLLAAHLLVITENFTKIQNSKRLAAFIGIVPYQNQSGTSVFKRAKIRHFGPMPSRKLLRLAAQSVATHNATFRCYYLRKLDQGKAKPLVLNNISNKLLKIACTIIRNNTRYIKDYRSIHPMYLKSLKSA

SEQ ID NO: 43768 - protein, 340 aa, unidentified
MRTLYAGFDLHSSNNYLAIIDEEGKRIFSKKLPNDAGQIVSALRPHKDKMAGIAVESTYNWYWLVDTLMEQGYEAHLANPSAIKKYEGLKHANDWHDAFWLAEMLRLGVLPEGYIYPKHQRGVRDLLRKRGHLVRLRTSLIISLQHIITRNCATKLGVNDVKRLGEDRVSPLLDSNEDVLMAGSISKETIDYLSRQIRSIERAVEGKVKLSSSYKRLVGIPGVGKILALTIMLETGPISRFPKVGNYVSYCRKVGSSWTSNGKKKGKGNKKNGNRYLAWAYSEASEFARRYNEQARTYYQRKTHRTNRMVAHQALSHKLARAAYYIMRDDVAFEGDKLFA

SEQ ID NO: 43769 - protein, 363 aa, unidentified
MGKRLRLEDRRDQAQIGGPPPGTEVKIAVDLSRSKWVYCVRWQGAERLRLSTSGELKHLQALVRRYEGCPVHLAFEACGFGYEVAWWAREERSAVTVIAPSRMERAPGLQVKTDRLDVGRMARQLEEGSLKGIYVPGRAGHERRQVVRTYGQAVKERKRAQVRIRSLLQEHGRIGPAPRAGWKAYCEWLSTQQLPADVKLCVETLLALRAMAARHGKVLQQRLLAMAGSQDYRDIVAALCSQRGVGALSAIRFILELGDVRRFPTADSIGHYLGLTPSEYSSGDTLHRGHILKCGPGSLRAAMLQCGWASVRQGGDATLRAVYDRLAPRTGKKRAIIAVTRRLVVRLRARWLEVLEEGRAAAA

SEQ ID NO: 43770 - protein, 343 aa, unidentified
MQTITTIGLDLAKSVFQVHGVDAGGQVIVRRQLKRRYVLTYFQKLSPCLVGIEACASAHHWSRELQALGHTVRLMPPAYVKPYVKRQKNDATDAEAICEAVTRANMRFVPTKTPEQQSGLVLHRARHLFIRQKTSVINAIRAHLAEFGIVAPVGRHGVEELLNVVADPNDKRVPEIARACLSAFGAQLRMIKEQILEFDRLISAWHRSNELSMRLDEAPGVGPVLATALVAAVADPKSFRSGRNFSAWIGLVPKQHSSGGKNRLGNISKQGDRYLRGLFVAGALAVIRYAKIHGTTHRPWLTALLARRPTKVAAIALANKIARMVWAMMARGERYKEPFALAR

SEQ ID NO: 43771 - protein, 421 aa, unidentified
MNQLTDTQYTAYVGIDWAAAKHDICVQSAKCEAREFACISSQPEAIETWAQDLYRRFGGPIAIALELSKGPIVWALQKYDFFVLYPINPSTLAKYREAFTPSGAKDDPTDAELAVDLITRHPERFSPLKPQSVGMRKLIGLVEQRDKFVSDQGRLVNRLGHALQQYYPQVLEWFSEHNTVVFCDFLSQWPTLNQAKRARKASLERFFKSHHVNSAELIERRITAIKAAMALTLDPAVIEPHRLQVEVLIEQLRITIKALKRFDDEIEATAQKLPDYDLLFSPLPGAAKVLAPRLLAAFGEDRQRYPQADALQKYSGIAPVTKRSGKTTWVHWRWQCPTFVRQTFVDWAAQTINKSAWAGAYYRQQRAKGCSYQVAVRALAFKWIRILHRCWQDRTPYDESKYLEALRRKGSPLLKYLAETA

SEQ ID NO: 43772 - protein, 356 aa, unidentified
MDKVIREGAVRVGVDLAKRVIQVHAVDAAGHVLATKPLARARFIEWCVRLPRGCMVAMEASSSAHHWARKLLALGLDPRIISAQLVEPYRSQGASGKNDANDAAALCEAASRPTMRFIPVKSIEQQSMLCVHRLREGIKEDRTACINRIRGLLAEFGLVFPQGPRELQAVLSEVLEDATNELGALARLTLQRAQAQWHELDEHLAWCDERIEAHAKDNAAVKTAATLMGIGPVTASAAVATVGDFKQFKNGAQFGAWIGLTPRQRSSGGKNNLGAITKRGDTYLRTLLIQGAKSAVMTAHRRQDKISTWVVALRERSGWQKAVVALANKNARILWAVLTRDEAFDANHLSVKPTVA

SEQ ID NO: 43773 - protein, 409 aa, unidentified
MQVVHEVCCGLDVHKKSVTACVVWAAGRRRQTRAFGTFTRDLLELGDWLRSCGATHVALESTGVYWKPVWNLLEGQFEVLLVNAQHIKAVPGRKTDQKDSEWIADLLQHGLLRPSFVPPTPTRELRDLTRYRASLAQEINRIANRIQKVLEDGNIKLASVATDTLGASGRAMLEAMVNGEQDSQRLAEMARGKLRNRIPELGRALEGRVTAHHRFLLRELLDHLYFVESKMLRIEQEIEERLGPFQSEVARLCTIPGVDRVTAWGLLAEIGLNMSQFADARHLASWAGLCPGSHESAGKRKSGKIRKGSLWLRRCLCQAAWAVSTKKNNYLSALFRRLAARRGVKRATIAVAHNLLVIAYYILRDQTCYQDLGPDYFDRLNPDGLRRRLTKRLAGLGFKVTVEPLAQVA

SEQ ID NO: 43774 - protein, 376 aa, unidentified
MKEKLRFLGLDVHAETIAVAVAEPNGEVRSLGMIANREDSIRKFIRKLDSPEHLRACYEAGPTGFVLYWQLTQLGVKCDVAAPSLVPKKPGDRVKTDRRDALKLARSHRSDDLTAVWVPDEGSEALRDLVRAREAAKQDQLRAKHRLTKFLLRTGQRPPLGVKAWTEKYVEWVQQVRYTHPAQEATLLDCLNEVQHMEERVKRLEQSIVEVIQLAPAPMQEVVRGLQALRGIAHISAVTIVVELGNITSRFESARDLMGYSGAFPSEDSTGKRIRRGGITKSGNAHLRRIVVESAWSYRHRPAIGARLRRRQEGLPAEITEIAWKAQNRLHKRYMTLMARGKEQRKTMTAIARELLGFIWAIGIKAEAACKQQMAA

SEQ ID NO: 43775 - protein, 423 aa, unidentified
MNFKAQAKQNQLLERISTQHLVVGIDIAQQSHVARAVNFRGITLGTPLHFSNNDAGFSQLLQWMKDMQETHQLNDTIIGMEPTGHYWLSLAAWLKDRNLEVVLVNPHLVKKNKENRDNTPSKSDIKDALVIADMVKNGYYTVIKETSEVFIELRVLMANRETIVHRLVSVKNQIHRWVDIVFPELRQVYKHLIGSGSLATLRLFPTPADLQKLTVRQVIDGWKTVMKRHSGERRACELLALAARSVGAKHTEKAYKLHIQQLLAEYDLAMEQLQVIEDEVATALARIPLAKPLLAMKGMSILSVAGILGEAGDLSGYAHGNALLRHAGLNLAEASSGKWKGQMSISKRGRPRLRHALFMATMALIMNDETFKRQHEVNVKTKSMKPMRSVMKLCGKLARILVAIARSGEAYEPDRALPMKQVA

SEQ ID NO: 43776 - protein, 324 aa, unidentified
MNTIGIDVSKEKLDCAWLKEQDKVKTKVFTNKHSGWQELLDWSLKNTGLAMAEHHFVMEATGIYHEQLATFLTDAGAKVSVVNPAQVKFYAQGLGVRSKNDKKDSVVLARYGSKENPTLWQPEAPEIRTLKALLARFDGIEKDLQREKNRQEKAVISLAPAEVLNSLTDMISLLETEQQRLDKLIEEHINKHDKLRENKTLLESIPAVGKVIATRMLMVIGSRQFDDAHQCAAYLGLVPVQHESGSSVKGHARLSKAGNPIIRAKLYMAAVVAIHHNPDIKAQYQRLTSKGKSKMSALGAAMRKLVQICFGVLKHQKTYQPQTT

SEQ ID NO: 43777 - protein, 338 aa, unidentified
MEHQQQYVGIDLHRRRSVIVRMTEAGEVLECVRITNDPVALSLELAKAGPDPQVALEATYGWYWAADLLEADGAHVHLVHPLGLHWDVRRVKNDERDATELAHRLRRGDLPESWIAPAEVRELRELIRYRARLAALRTSAKAQIHAVMAKLGILPTLSDMFSAAGQVLLDEMPFEGAYATRVDSLRGLLERYEDELDMVEHQLHGRLADHKGYNAIQALNGVGRITAAIMVAEIGDVGRFPDARHLCSWAGLTPTHRESDTKVHRGHITKQGSTLVRWAAIEAVARYHGGAPIAPAFMRIAKRRGVMIARVAAARKLLTLIFYGLRDGEIRCLAREAS

SEQ ID NO: 43778 - protein, 361 aa, unidentified
MNNESPEGVVHMQVSTIGVDLAKNVFQVHGVDSVGNIVITRQLRRKQIIELFGKIPACLVGMEACGTAHHWAREISKLGHTVRLMPPSYVKGYVKRSKNDAADAAAICEAVTRPSMRFVPIKTDEQLDMQSLHRVRERWIMRRTAIVNQIRGLLLERGITVRTGRCHLDAALPNILEDGSTPLSGTLRFLLAELKQELEQLAGHIEQAEILIQRAAQQSEACRRLDAIPGIGPLTATALIAAIGNGGAFRKGREFAAWLGLVPRQHSTGGKQKLLGISKRGNGYLRKLFVQGARAVLQYRDKQCSGLRHWLAELSSRSHYNVVGVALANKLARMAWAVLASGGAYRPPVMTDMTGLRMTPV

SEQ ID NO: 43779 - protein, 289 aa, unidentified
MDVHLRSTTVCALDAETGEAVTRRFRGNPWGEVAEWMSGFPGPSLAAYESGYLGFAPQRELSGLGVDCVVAAVSKVPRSAADLSSKNDRNDAARMAKAILSHDVTPVWVPSPEIEGLRDLAAAHDAATARLAAAKQRLLAFLARRGYVYGGTTPAGNPRKYWTYGFLRWLDGIHPADDGGIRALAALRNEVEAADETREALLAEYRAAVAAGPLSAEVEALQSIKGCGFALAAAFASEVGDFSRFRSGRQVTAYFGLAPKQRSSADSVRLGGISGAGNALVRKLAVEGC

SEQ ID NO: 43780 - protein, 446 aa, unidentified
MTSEGSAVAIGIDAAVVANHRIVVRRPEPGRSGEVIDDFTAGPTLAGLDGLAKRLAKWPGAMAVAEPTSMTWLPLNVALCQAGVDLALVGNRHSARLRSALAGKNKSDPIDAGVLSRAGEFFELRPARVPTADELALRRAVQRRGKVLVDANRCLRRVISLARWAFPDVWNACSGSRSTAIAVLTRWPRLDALARARSSSIIEVVAEHTRGVSDVERRAEAIRDAARRWVEFWTGHLDLEALGWETAELLADLATSEARVERAGEEARRRWECLYGDDRLLLSVPGMGPRTAPTVRAFFGNARHFESAKQAQAYVGLNPSNWSSGQMSSPSRAITKEGPAVLRLAFYQAANVARTRDPQLAEFYRRLMVERGHCHTKANCAVARKLVARTWATLTSGSLYELRDVDGSPITTREAAALASICAVPDKVRSRSRAQSAATHRARLTR

SEQ ID NO: 43781 - protein, 377 aa, unidentified
MSKLRFVGLDVHADTIAVAVAEAGGEVRSLGVIPNRLESIRKMIGKLAPVETLKCCYEAGPTGYVLYWQLVQLGVACEVIAPSLIPTKAGDRVKTDRRDAEKLARCYRAGELTSVWVPDANHEALRDLVRAREAAKKDQLRHRHRLGKFLLRHGKRPTDAGKAWTQKYLNWIRIHVHFEQPALEATLKYYREEVDHIAARITKLEQAIDEAVKQAPPEIRAVIEALQALRGVAQTTAATVFSELGSLSRFPNPSQLMGYSGLVSREYTSGNRVQRGAITKSGNAHLRRVLLEAAWTYRHRPNVQGRVLRRQKSLALSEEANRIAWKAQQRLHKRFAALTARGKESNVAATAVARELLGFMWAIAVHTKAQHQQAKAA

SEQ ID NO: 43782 - protein, 341 aa, unidentified
MDHFAGLDVSVKDTSVCIVDGTGKIVREVKVASEPEALLRVLRTPAYRFKRIGLEAGPLSQWLFSALGEANLPVICVETRHMRAVLKAQINKTDRNDARGIAQMMRVGLYRPVHVKTLRSQKVRMLLTHRKLLQSKAIAIENDLRGTLRNFGLKVGIAGRTKFEARIAELLEDLRDLAVLVEPLLVVRRVLREQIAVLHRRLLTIVRDDEVCRRLMTTPGVGPVVALTYRATVDVPARFRKSKSVGAVFGLTCSRNQSGERDRPGAISRCGDEMMRTMLYEAAQSMLRSTRWSWLKAWAMQIAKRRGIKRAIVALARRLAVIMHRIWVDGTEFRWTREVTA

SEQ ID NO: 43783 - protein, 375 aa, unidentified
MKKNSSGCKSPKARRKATRATNVTVGIDLGDKTSRYCMLDENGEVLREASVATTKKAMTQVFATMKPCRVAIEVGTHSPWVSRLLKSCGHEVIVANARQVQLISKSSRKNDRMDAQTLARLARVDPRLLRPIQHRSEQAQGHLRVIRVRAALVEARTMLVNAARGLTKATGERLPSCDADQMGVERMESLPAGLQNSLRPLLEEVESLTEKIQALDQQVEQIARTDYPETDLLRQVSGVGPLIALTFVLTVEDRERFQKSRDVGCYLGLRPRQSDSGESEPQLRITKEGDPYLRKLLVQGAHCIIRRRGPDTDLKRWGLKLSARGGKNAKMRAVVAVARKLAILLHRLWVTGEVYEPLRNSQSGPPVKKSRKAAA

SEQ ID NO: 43784 - protein, 333 aa, unidentified
MKNYRIYLGIDVAKLTLDYCLVTEDGQLERDQILNTQKSINTFLKNLKKVGHDLTQILFVFENTGIYSSLISLVLSENELDYAQVPALEIKRSLGITRGKSDKVDAKEIAYYAKRNTDKITLSVLPELNLQQLKIIFAEREKTIAAIKVFERTMENEMFLSKEVFGSVKSINRQTVKHLKKQLSMLDDKIKKLIREDEVLYKQQQLLKSIPGIGEITSVYLLMVTKGFTAFTNGRKFACYSGVAPFEHTSGTSIKGKTRVSHLADKKMKSLLHMVSLTAIKYDPELKEHYTRKKAEGKHTMLVLNTIKCKIVYRIFAVIQRQSNFVNLHKFAA

SEQ ID NO: 43785 - protein, 428 aa, unidentified
MNCNTQNAKIASITEKTLIVGIDVGSETHYARAFDWRNYEYTRKPLEFSNTEAGFQTFKAWMEDIAANHGKTVVIPGMEPTGHYWFALGKFLQDSGMRPVHVNPHHVKKSKELDDNNPNKNDRKDPKTIAALVNERRFSYPYIPTGIYAEIRSLSNLRFQTQEELTRLKNRIARWFAIYFPEYKDVYGDYKAVSGRMVLKEAPLPEDIHKLGAEGVNRIWRDAKLRGAGMKRAKTLVSAAEHSIGSKEAPGAARMELNNLLNDMDVYTSRLAELLLKIEEKLKEIPYIDKLMGVKGIGLVTVSGFIAEVGDIGRFDNPKQLQKLAGYAIVANDSGKHNGESRISYRGRKRLRYVLYEAAISLIGKNAEFRAIHEYYRTRKENPLKKMQSVVAVACKVLRIFYTILTKGVDYDAGKLMGDIRRPQMQAA

SEQ ID NO: 43786 - protein, 363 aa, unidentified
MTKQRSASAYPNLTIGIDLGDRRSRFYVVGGRGELVEEGWAATTGTGVREWLERYPGARVVLEAGTHSPWVSRLVEAEGHEVFVANPSELYGARRRKRRNDKLDGEHLARLGRADPALLHPIRHRGEQAQLDLAVIQSRDMLVKTRSALIAHVRGSVKAIGERLPKCEPDTFADRMAEHVPQKLRPALDPVVEQIGALTAQIKSYDRVIQRKAERDYPETERLRQIKGVGPLTALAYVLVIETPERFPRAREVGSYVGLVPRLDESGEWSPQLRITKAGSELLRRYLVQAAHYILGPFGPDTDLRRWGEALVARGGKHAKQRAAVAVARKLSVLLLRLWATGGPYEPLREDRVNRHAEEPALV

SEQ ID NO: 43787 - protein, 412 aa, unidentified
MADVVAWIGLDWADERHSVHLQPADGRLEHFELEQKPAVLHEWVAQLQKRFAGGKIAVALEQRKGAVIHALLMYDCFVLYPINPKALARYREAFATSGAKDDPRDSELLLDLVVRHRDKLRAWVPDTVESRKLQALCEQRRKLVNQRVALTNRLTSLLKQYFPQAPEWVGDLASVQACDFLTQWPTLADVQAARRTTVRRFYYDHNCRKRAVVDARLAAIADARPLTTDPAVIEPLSLSVQTYATQLRTLITAIQTFDARIAAVFAQHADHDLFGSFPGAGDVCAPRLAAAFGTDRARWDSAAELQAHSGIAPVTERSGKSVWVHHRLACPKFVKQTFHEFADQSIRFSRWARAYYDQQRARGNDHHAALRALAYKWIRILFRCWKERRPYDESQYIEALRRRGSPLAKNFA

SEQ ID NO: 43788 - protein, 346 aa, unidentified
MTIVEDRPVITGGVDTHAGTHVAVALDPVGGLLGVREFPATAAGYVGLLGWLGEFGDVALAGVEGTGSYGAGLARHLAAAGVRVVEVDRADRQDRHRQGKSDPLDAVSAARAVQSGRASGAPKGRDGAVEAIRALMVAKRSARSERTQAINQARALIVTGPDDLRARFAGHTAPALACAVAALRPRPGDVPGYATRVALRELGRRVQFLDARLERLDELIIPLVTARAPGLLSLHGVGPDTAALLLIAAGDHPGRLRSESAWAHLCAVAPIPASSGKVSRHRLNRGGNREANHALWRIVITRMSSHPATRTYVARRTKEGLSKKEIIRCLKRYVAREVYRRLRDGG

SEQ ID NO: 43789 - protein, 454 aa, unidentified
MPKKAKIETTATGKKFKVVNPNAAGIDIASSEMQVCVPEDRDCDCNRTFGCFTQDLTQIADWLTSCHIETVAMESTGVYWLPLYFVLKERGFDVVLVNARDVKNYSGRKTDEADAEWLMMLHSYGLLKCSFQPENEARAIRNLTRHRSNLLQSSSREALHMQKAMEQMNLKLGNVISDLLGKSGLAIIKAIIDGNHNPLELAMLAEDNCKASKEEIAKSLEGSWSEDHLFELGQAYELYNFIQKQIQQCDKQIEMHLIRYRAELDSSSDGDMPRSKKKIGKKNAVDFDVEKYAFDIWKVNAMSIPGMSAISLLQLIGELGHNFADKFDTCHSFCSWLNLVPNNKISGGKLLSSKVPKKTNTCGQVFRLCANSLKRNKTTLGYYFRRIQSRCGYSQAIVATAHKIAKIFFTMVKTHTEYDESKTGINEKALLERKILMTQRRLDKLNRQLEVSFA

SEQ ID NO: 43790 - protein, 344 aa, unidentified
MTEYVGLDVSKEETAFCVKDGEGKVLASGKVATDPAAILAMLKKHCLYPSRIVMETGTLSGWLARELRKRGISIDVIDARQAHAVMRLQHNKTDAKDADLLAEIARTGFCRPVAVKSEAAQEGRGFLKARAHLVRLRRDTENTIRGLLGSLGIRFPKGSGKLAGRVREALAERPELSPMIAPLLSMVAALKHEIERLDKAVMVRAKDDPSCRLLMTAPGVGPVTALAFVATIGDAERFANSRAVGAYVGLTSRRWQSGEMDYSGRISKHGDAMLRALLFEAANSLLTVVRKPHPLKDWARRVRKRTSHKKACVALARKLAVVLHRMLITGEAFRWPEKEAATRA

SEQ ID NO: 43791 - protein, 343 aa, unidentified
MKKIVKQVLGIDVAQKELVACLGRMHDDWTPELYANKVFANTEKGMEALVLWVKKQTDQQISLRFVMEATGVYHEALAYFLEEKEYELSIVAPGKISNYMRTLEVKTITDKTSSQATTMFGLERKLDCWKKPKDSYRKLRQLTRERDQLVEERTMVKNQLHAEQTEAFPNKSSVKRIKDRIVILNRQEKEIKAELAVLIAQDDEIKKIVVIICSLPGIGLLTAAIVLGETNGFNLIRNRRQLASYAGFDVKEKQSGTSVKGKPRISKKGNKYLRKAMHLPALTAIRFDERFKAIFARLVSKHGIKMKAAVAVQRKLLEMVYTLYKTNNPYDRNYLKKNELVEA

SEQ ID NO: 43792 - protein, 364 aa, unidentified
MSHSTTVVGLDVHKDSISAAVLQPEARSFALTTKFANEPGEVRRFVGRLARFAPLEFVYEAGPCGYQLHRELAALGERCTVIAPAMTPKTPGDRVKTDRRDAEKLAQLHRAGQLTPVRVPTREEEAARDLTRVREDALVDRLRARHRLSKFLLRQGLIWRETKNWGVKHRAWIRQQRFDFEALQRSFESYVRAVEEAEARLADLDRQVLELAQQPAWKDVVSRLRSLKGIDTLSALILAVEVQDFRRFSKVRQFMGFTGLVSREYSSGNSVRRGHITKVGNAHVRRVLVEAAWNYSRGTATGPVLAKRREGCSQEVLSIARRAQERLTRKFRKLSGRGKLRQIIVVSVARELAGFVWAVGQTMP

SEQ ID NO: 43793 - protein, 339 aa, unidentified
MRLYSAFDLHSNNAYLGIIDEDGKRVFRRKLQNDEGLMVKMLNPFKKDIEGIVVESTFNWYWAVDLLMEEGYKVHLANPSKIQKYSGLKYVDDEDDAFWLAEMLRLGILPEGYIYPKADRPIRDLLRKRGHLVKLRTSLIVSLQNIISRSLGGKMKTSDIKVLAEDRVTPLLAYNEDLALAGKVSKETIDALTRQIKAIEGAVEKKIDLSKPYHHLLSMPGVGRILALTIMLETGPIGRFQEVGNYASYCRKVPSSWRSNDKKKGKGKKKNGNKYLAWAYSEASELARRFDDHARTYFDRKRKRTNTPIAHSALAHKLARAAYYIMRDGVPFMPEKTFG

SEQ ID NO: 43794 - protein, 313 aa, unidentified
MFCERTSVGLDVHARSVVAAAIDGRSGEVFRARLTPSHAEVIEWVGKLPGPCAVVYEAGPTGFGLARALSAVGLRCQVAASSKLLRPAGDRVKTDARDALNLARLLRLDEVVPVRIPSAAEEAARDLVRIREAARADLMRARHRLSKLLLRHGIVYYDGKAWTERHDRWLHHQRFDAAPTQSAFEDAYEAVVLATARRARLDEKITALAADSEFSPMTRRLACLRGISTLSGFALAVEIGDWDRFTGASIGAYLGLVPSEYSSGTSRAQGAITKTGNTHVRRLLVEAAWHHRSTYRPGAVLSLNPWNDLIDVA

SEQ ID NO: 43795 - protein, 350 aa, unidentified
MSKVALDLSSVTVVGLDLAKHVFQVHCVDAAGKVVLNRALKRREVMDFFRKLPMCRVGLEACGSSHHWGRQLLALGHDVKLIPPAYVKPYVRRQKNDAADAAAIAEAVTRPQMRFVAVRSIDNQALLMRHRVRETLVGQRTQLLNCLRGHLAEAGLIAAQGARNARALADLLASGHPDIPSCVAKALLPLATQIEQLDAAIDVLDKEFAAAAKAEPQARRLMTIPGIGPQTAHAIIATLGPDGIGQFSGPREFAAFLGLVPRQNSSGGKQRLGRISKMGNAYLRKLLVVGAHSVLHHRERHNDPLRNWAKALLTAKPFKLVAVAIANKMARIVFALLSSQSAYTASAIAA

SEQ ID NO: 43796 - protein, 309 aa, unidentified
MRDAQAGKVKTRVFPNAHDHYPALLSWLLKQIDASPGELQVYLEATGIYHEPLAYWLHQSGVTVYVLNPARVSYYARSLGDQGKSDKKDSKRIVHFAQANPELTPWQPEPEEVRTLKQLAKRLETVQKDIQREQNRLEKAQFNRDTQAEHSITHVLALLRREAKRLIKEVDDHIDRHDGLKRDRRLLESIPGIGEVLSVHLLVTLRSRRFKSGRQVAAFMGLVPVEWTSGSSVRHAPRLSKNGDPALRQKLYMGAVVAMRHNPSIRRQYQRLCAAGKRKMSALGAAMRKLVHIAYGVLAHQKEYEPQPM

SEQ ID NO: 43797 - protein, 330 aa, unidentified
MQKVQHIIGADLSKKTIDLVYWSTKSHSNITNNLEGFKTFLRWIKQQRINRSELMIVMEHTGLYSFCFEEFLHKHQIPFCKVSALMIKRSLGLIRGKSDKIDARRIASYGFEKRDTLLPERATSKELKRLQLLYSTRERLVKQRAGLINAVKEYRSIGLSTNDPILQSQQRLIKHFEIEIGKLEAEMDMIFDSDPCLQKNQRLLQSIKGVGKVVSTATIIKTKNFTRFTDPRKFACFCGTAPFEHTSGSSIRGRTRVSHLADKQMKTLMDLSAKSAIQYDKELRNYYLKRIENGKSKMSTINIVRNKILYRMFAVIKRQTPFIENYLQTA

SEQ ID NO: 43798 - protein, 355 aa, unidentified
MNGLRYIGLDVHQDTVSAAVLDGTGKLLMQSVFATRAVAILDFLHGIKGTLHVTFEEGVHSAWPYDLLQRRVARVVVCDPRKNKLLKSGNKGDLIDARKLAELLRNNSLSPVYHGGMSALEVQHRTRSYTMLTEDTTRVMNRLRAVFRSQAIRVHGRKLFRSDLRESHLAQLATPGLRQRAESLYRELDALHPLRLQAKREMLAECRKHPAMKWLRSVPFLGKVRTAVLIGRVQTPHRFRTKRQFWSYCGLALETHDSAEYRVVHGQVQRKSRPAQVRGLNWNHNHELKGLFKSAATMAAFRKGIFREFYSGLLAKGIRPEMARLTLARKIAAITLKIWKEGETFNAEHIKPQAA

SEQ ID NO: 43799 - protein, 337 aa, unidentified
MEYFAGLDVSMAETHVCVMTRNGAVIHQAKVPSTPADIAAELAQVPTCRRILFETGRMAPMLFHGLSQLGLPVVCVESRQAYQALKSLATHKTDRNDARGLAQLARTGFFKPVYVKSLSAHAVRSLIIARKKLVGQRVTLENQVRGLAVVFGVRLPRALSPAFIKQALQASEGIPGLSAAMRGLVAARAAVLAAVVAIDGDIRRMVRASDACRRLMSIPGVGQLTALAFTAAVDDPRRFRRSRDIGAYLGLVPRRYQSGEIDYTGSISKCGDRRIRTLLYEAANVMLTRYKGPLKLKDWAFAIAKRSTMRKAKIALARRLAIIMHAMLRHGTEFKPA

SEQ ID NO: 43800 - protein, 369 aa, unidentified
MDHYAGIDVSLEYSSICVVDATGNIVREDKIASEPEVLIAWFGSLGYALTRIGLEAGPLSQWLYAAMKKAGLAVELLETRHVRDAFKAMPVKSDRNDARGIAQLMRLGWFRPVHCKSIGAQEIRAELTARKLVESKLRDIANSLRGILRGFGLKVGATTERSFPGRVRELVKGHPVLEAIAEALLSVHEVLLREFNGFQKRVQSAACSNVKARLLMTTPGVGPVISLTYAAAVDDAARFKSSKKAGSHFGLTPKKYQSGETDRSGRISKIGDASVRAALYQAAHVILTKPVKGCPELKSWGMRLAKRAGQEKAKVALARKLAVIMHRMLADGIPFNPNAKAERMAATAAKAASKVLALPASGTTVAEAV

SEQ ID NO: 43801 - protein, 397 aa, unidentified
MTASYAVFCGVDVGKGEHHAVGLDPAGKRLFDKALPNDESKLRAVFDKLAAHGPILIVVDQPNTIGALPVTVARDRGHDVAYLPGLAMRRIADLYPGQAKTDARDAYIIADAARTMPHALRRVDVGDEALTELGVLVGYDDDLAGEATRTSNRIRGLLTGIHPALERVLGPRIAHPAVLEILSRCGGPAGIRAAGRRKLTAIAVKHAPRMGARLVEEILAALPAQTVTVPGSKAAEVVLPKLADQLKSVLQQRKSIAENIEEMLDAHPLSKVLTSMPGIGVRTGARILLEVGDGAGFASAGHLAAYAGIAPVTHRSGSSIRGEHPARSGNHKLKRALFLSAFAALHDPASRAYYDRKRAEGKKHNAALICLARRRCDVLYAMLKHGELYRSPTTSAA

SEQ ID NO: 43802 - protein, 424 aa, unidentified
MKRTQNEKILQIKFETLIVGIDVGKQTHYARAFDFRGLELAKLLRFSNSRQGYEDLESWMQGIMKEHGKTEAIVGFEPTGHYWFTLGDHLQSQGHRLGIVNPFHVKCTKELDDNSPTKNDRKDPKTIAMLVKDGRYRDVYIPEDLFQELREAVNERERLLEQLIVLSNQVLRWLDIRFPEFSGVFKDWSRNAAWLTLRHHSTPKKVVTAGVEGLMRTWRQEMKRPSLKKAERLVKAASESIGRTAGSEVAEAALQNILTQYELIDRQKQETEMLMQELLLKVPNASKLMDIKGIGMVTAAVIVSEIGDIRRFRDPRQIQKMAGLNLRENSSGKHKGKTTISKRGRKRLREGLFRAMITMLATNQEFRVLHQRNLTRENNPLTKMESVIALCGKLIRVIFAILTKGNDYDAKKMLDDMNRSMKAA

SEQ ID NO: 43803 - protein, 326 aa, unidentified
MKTIYHVCCGLDVHKDSIVACILKTSPSSEASDKKEQILKEIRTFDTFSSSLQELRDWLVVNDCHYVAMESTGVYWFSVYETLERSCDGDFELLVVNARHMKNVPGKKTDVKDAEWIADLLRCGLLRGSFIPSEDIRELRELTRYRKNVVQDISKQKNRIEKTLQISGFKLSSFLSDIFGVTGLSLISVLVKKGYLTEEDIEELAQKISVEKRTEMKKYLTNPLSKHHQKVLEIQLKYFYEQLSHLDLVVNSITEIKAKFETEIANLDTIPGISKTAATAIVAEIGTDMSKFPTAEHLCSWAGLSPGNNESAGKKKRQELLTATRT

SEQ ID NO: 43804 - protein, 447 aa, unidentified
MRFYTQQHKYYCGIDLHARVMYVCILDSAGNVVFHKNMAAGPEPLLRAIAPYRDDIVIGVECIFTWYWLADLCARENITFALGHALYMKAIHGGKAKSDKIDSFKIATILRGGNFPVAYVYPREMRATRDLLRRRCHFARKRAALLAHIHMTASQYNLPPIEGRLSYKANRASVIEHFPDPQVQKSIAADLSVIDHYDELLNDLELHLVRSAKIHDADTFHRLQSVPGIGKILGLVILYEIHDIDRFPTVQDFLSYARLVKCAHESAGKRKGYGGAKMGSVYLKWAFSEAATLFLRNNGLGQAFLARLEQKYGHSKARTVLAHKLGRAVYFMLSRHAAFNLRKFVGQATAQPPMVLQAQSNDTAPIDAPYPAVPLKGTARPTRPPRSARALAAPSAVAKPHRAKTARTKAPRINALVVAKDRATPKTRARDTKRIIPGSKEVAMQSV

SEQ ID NO: 43805 - protein, 356 aa, unidentified
MSGRETAITTIAHHEPSRVTVGVDTHGKVHVACGLDQLGRHLATTRVVTTPRGYRALLAWAQGLGEVQAWGVEGTGCYGAGLARFLDDQGQLVLEVHRPDRSARRRRGKSDPVDAEAAARAVQAGQAAAIPKAGDSIAEMVRCLRVARTSAAKARTQAANALRALVVTAPVELREQLRDLPAAQLASTAARLRPGPVVAPTAATKLALRVLGERYQALTRELAMLDAQLDRLTAQAAPGLRQLCGVGPEIAGALLVAAGDNPGRLSSEAAFSMLCGVSPIEASSGQTVRHRLNRGGNRQANTALYRIVVVRLRWHQQTREYLARRTTEGLTKREIIRCLIGGLSRSRLVGRAVASR

SEQ ID NO: 43806 - protein, 491 aa, unidentified
MVFFSKATRTTAGPRWFGIDLAKRESQVAVLDPDGIQIETKRFATTRENFLAMAAELREGDTAALEVTTNSTSIARLIRAGSKARVIVSNPIKTKTIAQAKIKTDKIDARVLAELARVGYLPEVWLPDEDTEALRQFITDRVSLVRRRTECKNTIHSVLHRNMVRQERSDLFGTGGRRWLEEVIRGEGIKTPVPELDRMRIGSLLNEIDRIDALVADLESVIASYIAMRPSLKEQMDRLLSITGVNLVVAASLIGTIGDIRRFPDKKKLAAYFGVVPSTYQSGDTSRNGRITKQGRAEARWLLIEAAEILRRSPGPMRALYTRIQRKRNHNVAVVAVARKLVELVHHLLSNQEDYIYKLPRLTQEKRARWRFLAKKKLGVEIKSAAAKRAGRSALYGTGIDVQGRKLKSQIAKQAAADAERLYTAIVDQRKRHLDDPTSPLIPVADLLFDPTSPRETDWERILSQHTERLLLRYQKREASRSKSTPRPDIA

SEQ ID NO: 43807 - protein, 408 aa, unidentified
MKRYYIGVDWGDRLHQVYVGDHEGKKVREIKVPETVEALAEIGRWLDEQRAEGFELWAAIEKPAGRIVDFLLDHGVEVYPVNPKAVDRVRDRYRMSGSKSDAFDAYVLAEFLRTDQAHLKALRPSSENAQELKMLCRDQRRVVRLKSRLLNQLTTTLKEYYARPLEVFGDIETEVALDFLTRYPTPAHLGALKRKEFNRFATQQHHLSKQRCEELWEKLQKPQLAVPEHVVRAKAQLVEVLIDQLRASIKAVKTYHHKVESFFASSPAAPLAKTLPGGKSGTLVAAIWAELGDAQGRWESSGHLQAEAGAVPVTKASGKSHVVHFRFACNKHLRYSMYWFSFVSLNNSEWAKLYYRGQRDKGHNHPQALRALGAKWLKIIFVMWRDHKPYDEKFHLANIALQKMRQAA

SEQ ID NO: 43808 - protein, 417 aa, unidentified
MKKNSNSPMKKEPRAKRAKAQRPVQREPKEVLAELVEKLRGKLEGRATPASLGEARQRPELSPNLDRLTVGVDLGDQWSRYCILGLHGETLSEGALQTRQAEVTEFFQALTPARVVIEVGTHSPWMQEIIAGKGHEVLVANPRLMEGSKRRKRKNDRIDANKLARLGRVDPQSLHPIRHRSREVRQDLVLLRAREALVGARTELINATRGLVKSMGTRLPKCSSRSFAHKVEDAIPAEAREALLPLLQLADGLTHVIKEYGRKIEEMANQKYGHTKLLRQVKGVGPITALAYVLTLENPERFAKSRDVGPYLGLVPKQEDSGESQPQLGISKTGDTMVRKLLVGSAQYILGPFGPDSDLRCYGLRLCERGGKNAKKRAAVAVARKLAVLLHRLWVSGEVYEPLGYTSSGAMVQKAAA

SEQ ID NO: 43809 - protein, 363 aa, unidentified
MSTITVGVDLAKQSFSVCQMDSAGRVQQRHDFRREAFAAWLAQLPAGCMVAMEACSGAHHWARWCRERGLSPRLIAAQFVTPFRKSRGSKNDRNDAEAIATAARQGNMRFVAIKTVEQQARLAWHRVREGYKTENLAVMNRLRGLLAEFGIVVAQTTIALRRALASILERTDLPGELLELLRDLREHWQAIQARLHDCDTRIQAHAQGDANSMRVRGLIGIGALTADAIVASVGDARDFKNGRQMSAWLGLVPKQHSTGGRARLGSISRSGDSYLRTLLIQGARSSVRRAKLTPHDKATPEQRWITDLATRMPFGKLLVAIANKHARQIWAMLTRGETYDADAWLHHPMVQRNASRKRAQVTA

SEQ ID NO: 43810 - protein, 338 aa, unidentified
MKLYAGIDLHSTNSYVVLLNELGELKYKKRLPNDLGTIIYELKCHDHIDSVVVESTYNWYWLVDGLKEAGFAVRLANTTAIQQYNGLKHTNDKTDARWLAELNRLSILPEGYIYPKEERGTRDLLRKRMQLVQQQTANILSMQTIIERSTSKRFSGKLIHKMTESELREHLPSEDVFLAASSNLVILNSLQKQIKVIEKSIMSKVKSNTSFKQLLSVPGIGEILGLTIVLETGDINRFKNVGNYASYCRCVNSERLSNEKKKGTNNRKNGNKYLSWAFVEAAHFAIRHNEVIKKYYQKKTSKKNSIVAIKTIAHKLARACFYIIRDGVKFDINLAFMK

SEQ ID NO: 43811 - protein, 432 aa, unidentified
MNPQRTPFLSVGIDIGADFSLMAVASPAQEIVSRNYKILHSSLKSIQGAIDRIRDLERQHGIRAKVFMESTGIYHYPLYYRLKDEGLDVFVLNPLITHANTNIDVRGIHNDKFDAQKIALLGLKPNLKTSIVPDDDIAAVKALMREYHAMKKECSMYICRLKSQLRQTFPQYLSLFSKVNGKASLEILGRYTTADTILSVDSEELITLIMRFASKGRAMAEQKCEQLLQAAADSALFGHTNAGNIYLIRHFIDMIRIMTAQTDNLLTQIRESVTWQPESLLARQVGLLQTIPGVGFLTAVTLVCEIGNFHAFRRPKQLYAYFGLDPKVRQSGNFAGTELRMSKRGSPFARRSLYMLALQSVSLRKNGEPKNPVLRAYYEEKCKTKARMTALGAVMHKVCNIVFAVLRDEKPFAFRTPDEHRQAYCQTIKTAA

SEQ ID NO: 43812 - protein, 262 aa, unidentified
MEIIAVGIDVSKDRLDVAVRPSGEVFVVARNAGGVDRLIERMRALAPSLIALEATGGFETVVAAALAAAALPVVVVNPAQIRAFAKALGQRAKTDPIDAAVIARFAEATRPEPRPLADAATRLLADLVARRRQIIEMIAAESQREKRIAVPRLRKSIRRVIGMLEKELAGLDADIDDTVRGSPAWREKEDLLASVPGVGVVISHTLIADLPELGTLSRKQIAALVGLAPFTRQSGQWKGRSFIAGGRASVRTALFMGAMVAM

SEQ ID NO: 43813 - protein, 383 aa, unidentified
MTLDRYFRQCVGIDVSKDKFTACLQMYDRASDVGCHTMSIDFDNTKSGFNQFVKWSRKEAVKGFPLTYLMEPTGVYYEPLAYHLHKIGQTVYVVLPNKARSFCEAEGIKTKTDAMDARSLALMGCTSRKLKPWSPPAPIYRELRQMTRFHADLSQIMTSVMNRMESLSHMEKADKTVRKNCQKLIDEIGTLMENNGKAIMQKVAEDKELEARVKRIAKAKGLGVATVVCIVAETEGFHLIENRKQLTSYAGLDVRAKQSGKEDPKHAISKRGNAHIRAALYMPALVAVRYNPQIKAAYGRICQKHPKEKKIGVAAAMRRLLLLVYTLWKNGEEYDPMRDKTHTPKKRMKEEDTELEYEPEDCIGPKRDPADWNATDEHGNPPF

SEQ ID NO: 43814 - protein, 412 aa, unidentified
MNAVGIDVSKGKSMVAVVRPFGELVVKPYEVRHTSSELRELANSLKSLEGETRVVLEHTGRYYEPVAQMLHDAGVFVSAVNPLLIKEYGNNSLRKVKTDKADSLKIARYGLDNWVELREHTSMDTIRYQLKSMNRQYCLYTKNKVAFKNNLIALLDQTYPGVNTLFDSPVRTDGSQKWVDFAASFWHVDCVRSIGESAFVERYHKWCKRHGYNFNATKAAGIYADSKELIAMLPKNPLSKVMVQEAINQLNSISKTVEVFRSEMNQLAEQLPEYPVVMGMYGVGSSLGPQLMAEIGDVRRFAHKGSLTAFAGVDPGANQSGTYEAISTRSSKRGSPELRKTLFMVMTVLLQKAPPDDPVFRFLDKKRAEGKPYYVYMTAGCNKLLRIYYGKVKEYLNAVNEPVDMDSTGLSR

SEQ ID NO: 43815 - protein, 365 aa, unidentified
MQKISTMRTSRKNIFQGQLTIGLDLGDRSSAYCVLNETGEIVLEHKLATTLEAMKQVFGSMPRCRIAMETGTHSPWVSRSLTALGHEVIVAHAQKVRLITKSRRKDDRLDARSLARLARIDPGLLSPVKHRSAQAQLHLTEIRARAVLVSTRTAMVNAARGLAKSYGERLRKCGTEQFRRETTSGLSAGLREALEPLLREVESLNERIQEYDRRIEKMAKQTYPETALLKQLKGVGDLIATTYVLTIEDPHRFRKSRDAGCFVGLQPGRRNSGESEPQMRISKEGDEYLRTLLVQGAHYILGPFGEDSDLRRWGRKLSGRGGKNAKKRAVVAVARKLAVLLHRLWVSGEVYEPLRNSQKMINEAA

SEQ ID NO: 43816 - protein, 357 aa, unidentified
MTNISQLTIGLDLGDKMSDVCVLNTERKVVRSDQLPTSRESLAALFADYPGATVVFEVGSQSRWVQQLARESGLGQVITADPRKIKLITQSRNKTDRRDAYLLARVGQGLPELLSPVEHRDEAVHADLQVLRTRELLVTQRTQLVNRVRGVLKAAGLKLPSCSATYFFRQARPHIPEYLLPACAPAFAMLEAIHAQLLGIKRLLRQMLDKYPAAKQLMTTPSVGDKTALTFVLTLEDPRRIRGTRDVAAYLGLVPRKKESGKTDPQLGITKTGDTRLRRLLVLCAHHLLSRGKDCRLKRWGLELCKRGGSNGKKRAVVAVARKLSIHMLAIWRTGETYDLLRGIPDLQESATVTATA

SEQ ID NO: 43817 - protein, 355 aa, unidentified
MKYYTSTTEFNCGIDLHARQMYVCLMDRQGKKLVHTNVKDNDFAYFLKLVEPYKHNLTVCCECMFGWYWLADACQAAGLSFVLAHALYVRAIHGGKNKNDRIDSEKLAHLLRSNLIPPAYVYPAQQRPLRALLRQRIFYVWRRAQLLARIHCHQLAHNRIPAKQSRWTRDDWEERLLKAEIHPLRQLALSNDLAMIRHFDHQIFEVEKELYRQTKQLAAREYALLQTVPGIGENLGLTILYEIGDIERFPSVKDFLSYCRLVKGTVASAGKIKGLRGAKLGNPYLRWAFGEAAVIAKRDHFRIRPLAQRLEARMEGNKFKANTVLAIKLARSVYFMLKNKTVFDPDRLVAPLAKN

SEQ ID NO: 43818 - protein, 384 aa, unidentified
MRADRADAPAECEYATVYIAFELSKSNWHLGVMTPGSEKMSRYRIDGGDLAALSAVLGRARAKAERLGKPVRVLSCYEAGLDGHWLHRWLATQGVINHTIDASSIEVSRRARRAKTDRIDLAVLMRAFLAYLRGEPRACSVVRVPTPEEEDRKRRTRERERLLTERTAHINRIKALLHGQGIRDAMPLKPGFLSELEKVRSGDGRLLPPHLTDEIRREHERLLLVHKHIKALEAQNAAAHRAPAAGPVEAKAVALARLRGIGGQTAQVLVNEVFYRDFNNRRQVGSCFGLTDTPYDSGESRRQQGISKAGNHRARTAAIELAWLWLRHQPASELSGWYRKRVGDLKGRIRKIAIVALARKLMVALWRYLETGLVPTGAVMHPSF

SEQ ID NO: 43819 - protein, 421 aa, unidentified
MKRSGLEKASMVQEGTLIVTVDIGVTSNHGYCTAADGRSSKTFKFENTRDGYDALWTMVVASKAAFGCDEIIVGYESTGPYGEPLIHYLKQKPVKIVQVNPMHTKKMKEINDNSPLKTDNKDPRVIADIIRVGHALSVIVPEGDMAYLRRLNNARERHVRERTALLNQLQQFVFLTFPEFTRVLKTIFSKTALYILKKYTTPARIASANRDELGEEMMRLSRNKFRPRDAAALIRFARSTVGIQEGVQGLVMDIQHILLQLEMLHGFIAAIEDEMESTLKRIPYSQSLLGIKGFGIATVAGLIGEIGDFTKFKTQSEITKLAGLNLYEVSSGNSRGQRRISKRGRSLLRKILYYAAVQTVRKNGIMYDYYQRLLGRGMKNMMALVAVARKLLRIVFAMVRDHTEFIMNYSNQPKQIIKEAA

SEQ ID NO: 43820 - protein, 337 aa, unidentified
MSYLGVDLHSNSLTVCYRTEQGKERLQTFALKDLEKFVKTLRSRDKLAVEATGNTRWFVEQIRRRVKEVVVVDPNKFEVITKSVNKTDQHDAKTLAYFLSKNMLPKARMKDEQAAQLHSLAETRDKLVKQRTALINKIHNVLNAHGIKLSKESLGSDKGLSTVWAWDWPALVTVELKVLISQIQNLNESIKHLDGQLKDQGQKLPGHENLSSIKGIGEKSATVLLSVIGDINDFADEGKLAAYFGIVPRVSNSNETVHHGSITKRGSKLGRTTLVQCTLIAKRYSPYLRRFYEKLQRRRGSGKAIIATARKFLGIIYNTLKNNWIFADFPNFVLAES

SEQ ID NO: 43821 - protein, 340 aa, unidentified
MEELYVGLDLHSRNTYTGIMTKDFKRVFGKRLTNYLPVIVGALEPFRNDIQGIVVESTYNWYWLVDGLMDAGYDCLHLANPSAIKQYEGLKHVDDKSDSFWLAHLLSLGILPEGYIYPKEERPVRDLLRKRSFLVKQRTSHIHSLKSMIERNTGERISTRKLTGPDRIDLEQLLKEEYLFLSANASRSNIKFLSHHIKIIEKAVRKKIKIKKGFEFLKTVPGIGDILALTIMLEVGDINRFPKVGDFSSYCRCVSSKWTSNGKSKGKGNTKNGNKYLAWAFVEAAHFAQRFSPTIKRYYQRKSAKRNEIVGRKAIANKLARACYYIMRDRVPFKEEASFC

SEQ ID NO: 43822 - protein, 350 aa, unidentified
MQTKEHKIWVGIDVGSKSFHAALDFPMLFEKQEETSVSDLPNREFKLTSAGVKSFLNWIYLQQSDFFARYSDDEQDDLPIIFIMEATGICSTKLTKLIYTSAPDSKIIVANPEPIKSFRISLNIKNKTDKSDAQVIARYGRERKPSTKQKMPEEFVQLRELSRTRSFLKDQRTAINNHHDNIDSSLAKRMCSNTVNAINNEIDGLDREIEKIVLNTPEIKHEVDIMTSMPGIGIATAVALLGELGTLKNYPTRQKITAMCGLNPVRKQSGTSVNSTHLSKKGSPVVRRFLYMCSKTAVPSIPVLQDLYDRLLVKGNTRMQARCAVMRKMLLILRGMVIADKKYDKNFKKI

SEQ ID NO: 43823 - protein, 349 aa, unidentified
MDHYAGIDVSLECSSVCVVDASGKIVREGKALSEPAALIAWFCSLGFGLARIGLEAGPLSQWLYAAMKDAGLAVELLETRHVRDAFKAMPVKTDRNDARGIAQLMRLGWFRPVHCKSIAAQETRALLTARKLVQAKLHDVEMSLRGILRGFGLKVGKTTARSFAVRIRELAAGHPSLEAIADAVLAVHAVLLREFNGFEKRVRIMARSNPQAKLLMTTPAVGPIVALTYACAVDDPARFRSSKAAGAHFGLTPRKYQSGQTDRAGRISKIGDAGVREALYQSAHVMLTKAVRGCSELKSWAMRIARRAGMRKAKVALARKLAVIMHRMLADAKPFNPAAKTGTTMAAAA

SEQ ID NO: 43824 - protein, 457 aa, unidentified
MSQRKRKPRKSKINVNDLPAHLQHINLHAAGIDVGSHCHSVAVPPGSDDVSVREFGAFTSDLHAIADWLQKCGVATVAMESTGVYWIPLFEVLEQRGFEVKLVDARHVKNVSGRKSDVLDCQWLQQLHTYGLLQGAFRPPDEICVLRSYVRQKEMLTQASSMHILHMQKALQQMNLLLHNVVSDITGVTGMKIIKAILAGERNPQVLALNRQEGCRNSKETIAKSLVGNFRADHLFALKQAVELYEIYQAKITECEQALVKHLGTQPDITDDPPPDSGKNGRARERIRGGVDVREKLFKMTGVDLFATPGLAADTLLTLASEIGFDMSPWKTVKHFTSWLGLCPGTKRSGGKLLDGRTKRNPNRAAQAFRMAAASLVKTKTALGAFYRRIRSRTDGRRAITATAHKIARIFYAMLTQGTSYVEAGQQAYEQMYKERRIKALKKQALSLGFQLQPCSS

SEQ ID NO: 43825 - protein, 419 aa, unidentified
MSFKILKFKCCGLDVHKTWIYACIGITDSNNRTEYKQARFSSFTKGLNELCDWLAKYNCTDVCMESTGKYWIPVFNILEQHNLWVTLSHPKYTKPMKGNKTDRKDAKWICDLYMCGMVKPSFIPPADIRELRDLVRYRYKLTCMITGEKNRAQNCLTVSNLKLDDVFSDVFGKSSRSITEQILQHPGEKFDVAPFVHGRCKTPIEEIQAAVDGAISKEQAVKLRQCLDHIDELNKHISELEQEILRLSDKYEAALNLIRTVPGFDKNPMTAVQMLSEIGGDMSVFPTAKHLVSWAGCCPRNDQSNQKIKSTRISRAGSYFKPVLVQVANALIKSKKHLEFTNRYKRIKARRGHKKAIIAICRMILTAIWHILTDLKPYTPEGFLESHPVKEGKVLSSSQALNFFKQRGYIIKDEPLSVS

SEQ ID NO: 43826 - protein, 356 aa, unidentified
MVNSNKLDFTGQPIYIGLDVHKKSWSVSIHSAICEHKTFRQPSEVNVLVNYLKRNFPGASYHAVYEAGYSGFWIHDQLREKGVACTVANPADVPTKEKERRTKRDRIDCRKLARSLRAGEIEGIYVPCRPKLEDRSLVRTRQSMVRKQTRCKNQIKGILFFYGIPLPEDCTERHWSRKFVRWLERIHMERASGDVALKIHLEELKHLRQILAALDREVRVLARMEEYAAQVRLLRTIPGISTLTAMILLTELQDISRFPSLDELACYVGLIPDTHESGETEHTGSITKRRHAPLRASLVEASWTAVRKDPALLMTFQKSCKRMRKTRAIVKIARKLLNRVRYVLKNQRPYILGVVQ

SEQ ID NO: 43827 - protein, 343 aa, unidentified
MERYIGLDVSLKQTSICVVNQAGSIELEGVVDSDPEAIAAFVKSKASGTVRIGLETGPTTTWLWTELKRLGLPVICIDARHAKAVLKMQINKSDRNDAAGIARIMQTGWFKEVRVKDLDSHAVKALLASRALLVKIKRDLENQVRGLLKNLGLVIGRAKFNVFAARAEALIEGRPELGAAVRPLLAARKAIEQQVGDLDRKVHKLARHDVQVRRFMTVPGVGPITALCFKATIDDPTRFKRSRSVGAYIGLTTRRHASGEIDWSGRISKCGDAMLRMYLFEAAGVLLTRVPKWSGLKAWGAKLTKRNGLRKAKVAVARKLAVILHRMWIDGTEFNWSAKKAAA

SEQ ID NO: 43828 - protein, 373 aa, unidentified
MPKYSTAFGMDVHLRSTTVCALDADTGEAVTRRFPGNPWGEIAGWMDGFPGPSLAAYESGYLGFAPQRELAGLGVECVVAAVSKIPRSAADSASKNDRNDAARMAKAILAHDISPAWVPSPEVEGIRDLAGAYDGATARLATAKQRLLAFLAKRGFVYGGTTPAGNPRKYWTYDFLRWLDKVRPEDDGGVRTLAALRNEVEAAAEARADLLSEYRAAVDASPIAAEVAALQSIKGCAFALAAAFSAEVGDFTRFRSGRQVTAYFGLAPSQRSSGDSVRLGGISGAGNALVRKLAVEGSWCYAAARHQPKLMPRDTGVPLEIRMHGRKGSERLLRRREEMLARGVPAAKANAATAAELVRWLWALGMMCREGAE

SEQ ID NO: 43829 - protein, 430 aa, unidentified
MKSNTQNKKIEAITEKTLVIGIDVGSETHYARAFDYRGIEYSKKPFKFSNTEAGFVTFKEWILDLKEKHEKDKVVPGMEPTGHYWFNLGKYLQDNEMKPVLVNPHHVKKSKELDDNNPTKNDRKDPKVIAGLVREGRYMIPYLPDGVYADLRTASNIRFQLQSELTRIQNRISRWFNIYFPEYKTVYGKPDAKSGMLILKEAPLPEDILTLGIDGVDQIWRDAKMRAVGKARAKTLIEAAEHSVGSKEGAVSARMEIRMLLEDYESRNMRLQEVMVLIEELVKQIPMAEKLLEIKGVGIKTVSGFLAEVGDISRFNSPKELQKLAGLALVENSSGKHKGETTISRRGRKRLRYLLFEVAMSLVAKNPEFRELHNYYTTRRLNPLKKMQSLMAIAAKLIRVFYVMLTKGVNYDPKKMVNDIKRPAVYLQTA

SEQ ID NO: 43830 - protein, 345 aa, unidentified
MELHTIGIDLGKTVFHLVGLDLRGEVVVRKKFSRTQLLRFTANVHVGLIGMEACGGAHFLGRALREQRHEVRLIPAQYVKPYVKTNKSDYIDAEAIAEAVARPTMRFVPIKTDDQLDMQSLHRVRERWVMRRTAVINQIRGLLLERGITLRKGRHHVDAALPLILEDADANLSGAVRLLLTQLKLDLDQLSVRIDEADAVIQKTAHENEACRRLVAIPGIGPVTATALIAAIGNGGAFHKGREFAAWMGVVPREHSTGGQQKLLGISKRGNSYLRRLFVQGARAVLQQRTKQSSGLSAWLAQLTSRTHRNVAAVALANKLARIAWAVLAKNEQYRPSVVADVAAA

SEQ ID NO: 43831 - protein, 462 aa, unidentified
MAAPLFGTPGPLIEMCESVAVYGADGRVSSDLNGTLSEAEEARMTTQVPCLWVGIDASKAHHWWVAIDDTGTTVWSRKVSNDEAVILAGLSEVLALAGEVRWAVDLTGTAPALLLALLADHGQRVVYVPGRTVNRMAGAYRGEAKTDARDAYVIAETARLRRDFAPVEVPTHLLADLALLTTHRSDLIADRVRLLNRLHDVLTGISPALEAAFDYADHKGALVLLTGYQTPAALRRCGQTRLIRWLAARAVRHPETVAATALTAAHAQHIQLPGQDTAAGITADLATQILALDQRLKQLDRQISEAFRTHPQATVIESMPGIGPILGAEFLVAAGDLAAYPDAGHLASAAGLVPVAKDSGRRTGNLRRPQRYSRRLRRVFYLSAQTSIIRDGPNRAYYLKKRAQGHKHIPAVIALARRRVDVLWALLRDNRTFTATPPAETATAAACPSHQGAPHAGVRCAP

SEQ ID NO: 43832 - protein, 381 aa, unidentified
MQVTFGIDVSKSNSTVCELIGESKNELTITNDRPGFIQLLHELAAFSKHPQIIFEATGVYSRRLQAFLEDYGYDYVILNPLKAKKEMDMGLRHNKTDKTDAYHLALIQRLYHHPINQLQSQTYKQLNALSRFYDQLTADLVMAKNRLHQALQSTFPEIENLFSSAKGKNYWQIVVRYPHCDLVRRENKKQLINWLMSLKGIAFKHALRTADKLIELAYQAYPVVSCSSIEVEQVQYYAHRLLNLSDQRENLIARMVKLAKSLPNYDLENLESIPGFAQTTAVRVLAELGDLRRFSNPNKINAFIGIDPGRYQSGEMESNLSITKHGNAVARKLLYRAIGQIDNAAKTNPCHIADYYESKKLSSQTKGFKKIAIASIELLRN

SEQ ID NO: 43833 - protein, 342 aa, unidentified
MEEYVGLDVSKEETSFCVKDLAGHVLARGKALSDPDSLFEAMREHTLCPARIVLETGTLSGWLARGLRAQGLPVDVIDARQAHAVMKLQHNKTDANDAVLLAEIARTGFCRPVSVGSEAEQKHRILVKARRHLVRQRCATENAIRGFLSSLGLRFPKGSGKLADRVRTVLETRPDLKAMIEPLLASAAAQREQIKHFDEEISVQTRASAAARLLMTVPGVGPIAALAFSATIGDPDRFANSRAVGAYVGLTPRRNQSGEMDYSGRISKNGDSLLRSLLYETANVLLTVVRKAHPVKDWARRIRKRSSHKKACVALARKLAVIMHRMLVTGEAFRWPQKEAAK

SEQ ID NO: 43834 - protein, 397 aa, unidentified
MRFYNRQHRHYCGIDLHVKTMYVCIRDAAGQVLVHRNVQSSPEAFLEIVAPYREDLVVAAECTFTWYWLADLCAAEGIAFVLGHALAMKAIHGGKAKNDKLDSFKIASLLRGGLLPQAYVYPAGMRATRDLLRRRLHLVRKRGQLLAHIQNTQAQYNLPAFGRRLAYPANRDGVAEHFPDPSVRKSIEVDLALLGRYDTLITDLELTIVREAKRHDADAFHRLRSVPGIGKVLALTILYEIHNVTRFDRVQEFASYARLVKGKKQSGGKTLGTSGGKMGNVHLKWAFSEAAVLFLCRNAEGKRLLAQIQKKHGKGKALSILAHKIGRAVYYMLARGTVFSMEKFLHASRGGKRRRELVSQTSNSSHGTELAEIVPRRAPQSAARPSIMSQRSGSDMR

SEQ ID NO: 43835 - protein, 420 aa, unidentified
MLLRLRIYDKAVAFIGLSNSCQNKFLQVIYMFYLGIDIGKSFHVASLIDDKKNVVFKGFQFKNTLGDATKLLEKIAPYPEIEVGMEATGHYWLALYSFLIKYNYVVHVVNPIQTDSWRHCTKIRPHKTDKIDSLIIADFIRYGEYSETSLASEEILEIRNLSRFRISLVDSIGDLKRKTICVLDQIFPEYESVFSDVFGKTSKEILNLFTSPADFENISADKLNLLLDKVTKKHFAETKIKQLSDLAKNSFGISFGLDSLKFQLQLLIKQISFIEAQVAEVEQKISDTLDILNSPITTIPGIGKVIGATILGEIGDINRFSSPSKLVAYAGIDSKTSQSGTSENFSGKMTKRGSPYLRTALFRAALVASTTDPVFKAFYQKKRSEGKHHLTCIGAVARKLCYTIHVILSRNCAYEIQLTT

SEQ ID NO: 43836 - protein, 342 aa, unidentified
MSEVTIIGVDLAKRVFQLHGAHNDGSVAFRKKLSRGQLIAFVAQQPKCLIAMEACATAHGWGRAFEALGHDVRLIPPSYVKPFVKRQKNDVADAEAIVEAAMRPTMRFVVVKTEDQQARAMLFRTRQMFVGQRTQMINALRGHLAEHGLIAARGPAHLKQLVDALADNDTALHIEVRELGRMYLEQIEGMNARVAELDAKMRSAAKKADLVRRAQTMPGVGPVTALAIETFAPDLATFKRGRDFAAWLGLVPKQHSTGGKARLGKTSKMGQRDIRTLLVSGAMAVLQAVERFDTPNNSWLKRLLTRKPRMVAAIALANKMARGLWAMITKHEDYRNPAATMA

SEQ ID NO: 43837 - protein, 395 aa, unidentified
MGMHESVAQIGMDIHRTFSRVTARDAQRRVVWRCRLEHRDRVALRRALSQWPAGTPVVLEGSFGWSWMVDELAQARLVPHLASSRKVAAWRKLHGLAKSNRTDADLLSLLGFEPARLWEVWLPPAAVRQQREWLRYRMTLVHLQTGLKNRVHAILHRHGLFPEVVKLFGCTGRRWLQRLVQDRDCGLPDSARATLQGYLQLLDHLRLQIARVTRTFHRQVQADPTATRLATLPGIKWILGYTLRAEIGRIERFPSARHLASYSLLAPRANDSGEEDDGPPQGRHVGHAGRRTLKWAYIEAAHGAVYKSPSLRGWFDEYTQGGRQNRNRGYIGVARRLCQRSYVVWKKEVDYREEPASRPGSRAARRRRARSVQGQLSTGESPWRPADAMVPAATG

SEQ ID NO: 43838 - protein, 335 aa, unidentified
MYYVGLDVHYRTSTYCILDRYGREVKCETVRGHWPKLLERLAMIKGAWTICFEATCGYGYLHRELSRLARRVVVAHPGQLRLIFRAKRKNDRVDARKLAKLLYLDEVPEAYVPSEDVQSWRELIEHRRRVVDRQTTCKNAIRSLLRSHGILPPKGLWSKKGQAWLERLEMPTSAAQLKRDLLLDELGEAQRRVRTITKALDELGDRHPAVILLRTIPGVGMRTAETMVAYIDDPKRFRRSAQMAAYFGLIPCQDASAGTNRLGHITRQGPGTARKYLVEAAWQGVYRSPTIRAYFERIRRGKKERRKIALVATAHYLLRCMHAMLTRGQSWHEAA

SEQ ID NO: 43839 - protein, 381 aa, unidentified
MEKACGLDVHKDSVFACILDEQGEKKFEKRFGTLTPELTTLRDTLISHGCGRVAMESTSIYWMPVWQVLESDFELTLANPYFIRQLPGRKTDAKDAAWIGECLQKNQIKGSFVAGDLLQRMRQYTRQCHRLTKNRARLEQQMDNQLQRCNIRFSNYISNQGNNVSQRKIIRAIIKGERDPSALCSLVHGRTLNRHGRDVILHSLDGIIGQADVEMLRQCMEQLDLLENQQATCLTHLEELANIHFAEEISLLCSIPGIKLFSALCILAEIGNDMSQFQKATHLIGWAGLKPRNDETAGKIRSRKTLHGNKYLRQMLVECSWSVTRSNKTFLGRKYRYLSKRMKSQKALLAITRKLLVIIYNVLKTRRPFDPEKNIQALLPD

SEQ ID NO: 43840 - protein, 422 aa, unidentified
MKESVRIVGFDCGEDEHSAVLLDASGEFDKRFSVVNERGQIQEALAELLLEVGPDSPLVVVVESKRSHGRIVADVATELGCELWQVNTVALNHFRDLEGQPRKDDEWDAYLGARMVHLRMGGCRAAIETTEEERALSRLTRIYSRVTEDRKRYVARLRAVLLELAPEMLHGKWKGPRPDSKAMLYVLERWPGFNGLERAQLRSIEKILRQCRYKSENRIPVAKLIRKAARGISIEAEERSTLTMELGLLVRQIRLCDESIAQVYVEIACRVERHPVGRKLFEMHGNGPVITGVLVSELYPVARTAPEPKSATYAGVTPLSRKSGKSLDKDRLAQGVNKRVLHALYTSSVVAIKHSAVDRAYYQKKLRDYTGHPKPHVAAFIALSRQRHKLIYKLMTTDARYDKEILVASHLERIERDRIAAA

SEQ ID NO: 43841 - protein, 443 aa, unidentified
MRSIGLDVGSRVAEVAIVEPGRAARSGGRISASPEGLSTFAASLGPDDQVVLEATTNTWAIVELLERHAGRVVVSNPLRTRAIADAKTKTDTIDAATLAELLAADYLPTVWQPGAATRALRRRVAARAALVGERSRLRNRVSAVLVRNLARCPWSDTFGVHGRRWLAGLALPVDERELVDQTLRLLDVLESEIRAADAALATIVLDDAGVRRLLTIPGIGLGSAAALVALIGDVTRFPRPNKLVGYLGLDPIVRQSGGRAAHTGHISHAGAGHVRALLVEAAQAAIRVPGPLHAFHARLAARRGFSIATVAVARKLAVLAWHLLSHATEYRWAPPRLTAKKVRALELAAGAPRRHGQRGSGESRSARAAARGIERAALVQVEQAYVAFVEARAKDAAATKRGATREARAEARQGSAAEPDPRHSALRHGVDRVRPNDTRDPTA

SEQ ID NO: 43842 - protein, 368 aa, unidentified
MKQALFAGIDLHSNNVMIGIVDQSGRRLKHQKLGCDLKEITSFLEPWKPQLKSVAVESTYNWYWLVDGLRALSYPTKLADPAQIEQYSGIKHADDKNDAYFLADLQRLNILPTGYIYDPALRPVRDLLRRRLGLVHQRTALLLSFKSLYARTTGQAMSLSRLKAMEPNDTKTLYRHPANCLIALLQKEHIDKLCQSIELIEKSVLAQARELPCYQKLLSLPGVGRVLGLTITMEVGEISRFKTPGQFASYCRTVNSQRLSNNKKKGDNNRKCGNKYLAWAFVEAANFAKQHHQHCRRWFDRKAARTSKVIATKALACKLAKAAWYLMSQGSDYDPERMCPEGAMKEEKLKFVRAAASQKIGVGKNPFD

SEQ ID NO: 43843 - protein, 328 aa, unidentified
MRVMHERVAGIDVHKDMIKVAIRSPGEKRWTRTTEIFEFRTFYGVLQAMARDLRARGVTHVVMEASGVYTEPVYYALCEEDFTEVAVVNPAHARALKGHKTDARDRARLAELSGCGLLQGSYIPAAGLKEMRDLSRYRMKTVQARTPEIQRLAKALESAGIKLGSVASEITGKGPVAMIEALISGERRGAVMADLARGRARTAGKLADLSMALEGRFTDHHALMRRLHLDRITAPDAAVADLEARIAATAADWQREIGLLKTIPGSGDIVAWAWIAEIGPAPHQWFASHRKLASWVSLAPGSNVSAGKRKHARTGDAGCGVPKLDQST

SEQ ID NO: 43844 - protein, 415 aa, unidentified
MKVVFPTCCGVDVHKTFVVATIITTPADSLQPNYQKKRFSTFNSDLNRFADWLLEHNCLDVCMESTGKYWVPVFNILEKRGIRVVIANPKWVKAVKGNKDDTKDSKWIGDLFRIGLVKSSFIPDLNIRILREFTRYRYKLVSMKSSEKNRFQNALTVCNVALDSVVSDMFGKSATAITDYLTSDESFDPEHCVSLLQRSLKKKAGQVLESIEGFSIASEQKARIKIIREHYDFLEKMIAKVDTCVSEMVEKYEGGINLLCTIPGIDRRSAITIISEIGTDMRQFGSSKRLCCWAGLTPGNNESAGKKKSVRISRAGVYLKPALVQVAHAAVKDNDHPYYKLKYERIAKRRGKKRAIIAIARMILTAVYSMFCTGEVWNPVDLYKVDMPEHLKEQQLAKAIKQATRFLEKQGLSVA

SEQ ID NO: 43845 - protein, 347 aa, unidentified
MRIVPHSCAVYGVDLGKTTFHIAGADQVGRLTLRIKLRRDALLQFFATASPARVGMEACPGAHWLARKLIAFGHDVKLIPAQFVKPYLKSNKNDTLDAEAIAEAVTRPTMRFVPVKRHEQLDMQALHRVRAQFVHQRTAIVSQFRCFLLEYGIAIHAGIGMFRRDATRILADDSNDLTPTMRQLSTDLWSDFLRIDERVTTLSGQIEASAKHDDVVQRLTTIPGIGPLGASALCAAIGTGKQFRSGRDLAAWIGLVPRQHTTGGKPTLLGISKRGNSYLRRLLVLGAQSCLMHLDRSRDRLGQWLDTLESRMHHNKVVIALANKLARVAWVVLTRPGALYEKMDRRF

SEQ ID NO: 43846 - protein, 420 aa, unidentified
MKAYNVDNFAALIGIDWADKKHDICEHPTSTNKYHYTVVKHRPEALHEWAMDIKQRYPDQKIAIVCELKKGPLIYALAKYDHLTLFTVNPCAVAKYRQAFTPSGAKDDPSDAFLQVEILKLHMDKLSVIEPESAAMRTLSQLVEYRRSLVQDSVDLSNKITATLKNYYPQALEWFKEKDTYIFCDFIQKWPSLTAVKKARKQTLLDFFESHNSHYCTVNNARLDSIKNAMPLTLDEGVIVPNQMLVEVLITQFKVLLKGIEKLDKAIKSAYKAQQDKKIFDSLPGAGPQLGPRLLVAFGNNRARYNDAAELQKYAGIAPVIERSGQKMWTHWRYSCPTFLRQTFVEWAGFSIRYSFWAKAYYEQQKAKGKPHNSIIRSLAFKWIRIVFRCWKTNTPYDESTYLAALKRRGSPLLKFAINS

SEQ ID NO: 43847 - protein, 340 aa, unidentified
MEQIIGIDLAKRVFQVHIVSTEGEKQANKMITREKLMTFIAQQPSSRIVMEACGSANYWSRQFKQYGHEVKQISPQYVAPFRMGNKNDRNDAVAIVEAASRPGMRYVPEKTVEQQDIQCLHRVRQRLMKNRTALINQVRGLGLEYGIAIPEGSHKIMASLPDALEDAENELTTLSRELFQEMLQELRESQQRIKALDVRLKQMSAQNEDTVRLESIPGIGPLGASALTVALGDSSDFQNGRHFASYLGLVPKEHSSGGKVRLLGITKRGDGYLRGLLIHGARSVVYRVANLPDEQCGGLQRWLKGIIVRSGINKAIVALANKNARIAWALVSQKTEYVFK

SEQ ID NO: 43848 - protein, 382 aa, unidentified
MTTAAATHNAQSNTTEATLFVAFELSEKTWKLGFTTGHGQKPRERTVTARQQEHVLDEIAQAKRRLGLPETAPVVSCYEAGREGFWLHRFLQGHGITNQVVDSSSIEVNRRRRRAKSDGLDVRKLLSMLIRYHHGERQVWQVVKVPSVEAEDQRHLHRDLETLKQERASTTTRIEGLLSSQGLRVTSLTKLPEQLEALRLWDGSPIPPGLRRRVLRVYAHHTFLSEQIAEVEAERRAQLQTSSEASIDKVRQLMQLKGVGINGAWLLVMEFFGWRAFKNRREVGGLAGFTPTPYQSGESAREQGITKSGNRHVRWMTTELAWSWLRFQPDSALSCWFRERFGGGGKRLRRIGIVAVARKLLIALWRFLETGVLPAGAVLKEA

SEQ ID NO: 43849 - protein, 347 aa, unidentified
MIIIGCDFHSRFQQIAMLDSETGEVTERRLDHESGEAQEFYEGLKEPVLVGIESMGYLQWFEELLAECGHELVVGDAAKIRKMEVRKQKHDRRDAEHLLNLLVKGDFPRLWLPSAAERDVRVWLEHRHQLVQMRTRTLNGLQAVALNHGLCLRQKLWTKHGQAELKKLPLREGRARRRADLLALRAQLDRWIAELDQRIEQEVAQRPDAQRLLTHPGVGPLTALGTVLILGPVERFPDAKHVTSYVGLIPQEESSGGRQRFGRLTKQGNGLLRFLLVEAGQTASRLDPGLRRAYRRLTFRKGKASAKVAVARKLAIRLYIMLRDQIDYAEFCRRGSHAGMLGEVALA

SEQ ID NO: 43850 - protein, 450 aa, unidentified
MTAPGARFPEFAFNMASTLTAFPVEEKMDVINARCAGLDVHKDTVVACVRVAVNGKITRDVRSFGTMTCDLVALLRWLTEMGCTHVAMEATGIYWRPVWHILSDGVFEMVLANAAHIKNVPGRKTDVNDATWIADLLAHGLIRSSFVPEEDFQALRSLLRTRKQLVRERSGHILRIQKTLEDANIKLDSVISDIVGVSGRAMLQALIEGESDPIKLAALANRRIKASPDVLREALRGRVMDVHRFLLQLHLGQADALDESINRIDREVKLAIDRMDQKVIAGHVTIEVLIALLMTIPGIGLLAARMILAEIGRDMGRFPTAGHLVSWAGLCPGNNESAGKRRSSRLRKGAPWLKTLLVQCALAASHKKNCYFRAQFLRLKSRRGHKKAVCAVAASILTTIYHILKNGTPYKDLGADHFDRRSIEAKANRLVTQLAKLGFQAELHPLNVPT

SEQ ID NO: 43851 - protein, 363 aa, unidentified
MNLKYSVGLDVSSKKINACISVIDEKQKVVVKSSTVICNTLKGFSVLEEWILKHKKETIPVVVCMEATGIYHENCAYYLFGKGFEVSIILPNKAKKYLEAIGLKSKNDSIDAKGLSQMGAEQCLELWQPMGTFFYELRLLTRQHQNVTELKTVLKNQLDALGFAMHQLDAVNNQIDQTISLFESQLKELEKAIKAHLKSDEEVNRKSQNILKMKGLGVLTMSVILAETNGFTLFKNYKQLVSYAGYDVVEAQSGKRVGKTKISKRGNSRIRRALHMPSLVVIQHQVKPFQDLFDRTFEKHGIKMKSYVAVQKKLLTMIYHLWNKNEDYNANYQINILEEEQKFSSQAIGFEEGTMAKKIAPIN

SEQ ID NO: 43852 - protein, 336 aa, unidentified
MNEIIRIGVDTSKSVFQVHGVGAAERPVLCKKLRRSEVERFFATLAPTVIGLEACGAAHHWARVLQGLGHEVRLLPPQYVKPYVKRGKNDAADAAAICEAMSRPGMRFVPVKTAQNQAELMLHGARDLLIKQRTMLVNAIRGHAAEFGLTGAKGLCQVGPLLERIAGADVPGLAREIFARLAKHIEALDRQLAALDAQLRTWHRASERSRRLATIPGVGPIGASALAMKVPDPSVFVSGRHFAAWLGLTPKDHSTAGRQNLGGITRAGDETVRRLLVSGAMAVIQRAKPGRSSPWLLGLLARKPKKLAAVALANKTARIAWALMSRGTTYQHPAAA

SEQ ID NO: 43853 - protein, 255 aa, unidentified
MRSPDGTILREGSVTALRKALDELLADIPAPCVVGLESTLFTAWVYDHLTAKDISVKVAHPAMLKAIFAGKRKNDEIDARKLADLLRCNYFPECHMASRETRDRRRVLRYRNVLVRQSTQTKNKMAAMLMETGIPYNKKKLHISKKYFEDFLDTQAAAMPERLPGLLRLGRNVIEALRSMNRDLVRILETDSLLAGRVSRLMSIPGVGIILALTWALEIGDVGRFASQKAAISYCGLCGAEQSSAGKLQRTPISK

SEQ ID NO: 43854 - protein, 341 aa, unidentified
MQITTIGLDIAKNVFQVHGIDAAEKVVVRKQVRRGQVMKFFTALSPCLVGIEACATAHHWARELTKLGHEVRLMPARDVKAYVKRNKNDAADAEAICEAVRRPTMRFVGVKSAEQQGRLMQHRTRDLLLRQRTQLINALRGHMGELGMVAAQGREGLKTLLAIIAKGADEHLPVDARASLIVLAAQLEALQTMIGAIEKRIVRQHRASEASKRLASIPGIGFLGASAITATVTDPSAFRSGRDFAAWIGLVPRQDSTGGKQKLGPISKQGDRYLRRLLVIGAHSVLRRAKQSPQNYPWLTQLLARRPFKVVAVALANKMARVAWALLARGSTYRVPQLAAA

SEQ ID NO: 43855 - protein, 397 aa, unidentified
MIAVGIDVSKSKSTVAILNGDGSIRAKPFDVHHVADELQALVDYIKRTSEPPTILMEPTSHYHYPLLKAFTEAELPVCLINPYQMKKYGDTELRKAKTDKRDSLRIAQYALEKSYSLIPYTPQDQKYEDLRFLSRQYSQRISTLTVAKVQLLSLLDETMPGITTILPLKSRDPDNCVLLRFIKRFKSFDVIRKMGKTRFLDSYQVLVKKTKDRFAGSKGLAIYELVLNSVTTRGENPLSAMTQDQCVDLVSTSQKAADEINLQMRIIAETMPEYKVLRSMAGVWDRLGPIILGEIGDIRRFHSGKALNAYAGNDAPPYQSGQFESRNRHISKRGNPALRKACFEVMQALKLTKPQDDPVYLFLLKKEQEGKPYNVAKMAAVNKFLRIYYARAMELYK

SEQ ID NO: 43856 - protein, 372 aa, unidentified
MMIIGCDYHPSWQQVAWVETETGECGERKLVHATGEAKVFYQQLGSPALIGMEATGNSQWFIELVEDLGHAIWIGDAAQIRASYVRKQKTDKRDAAHILRLVVENRFPRLWTPDREQRDLRQLVLHRHKLVEIRSRVKNELQHLAMNKGMQKKATLWSQAGQQRLRELPLKPWAWCRREDLLGLLGMLNQQVGTLDQAVQKAAEEHAQARLLMTQPGVGPNTALAYVLTLGDVTRFQRGKQVASYLGLIPREESSGGRQKLGAISKQGNRLLRSLLVEAAQIAVRFDPGFRKQYLHRCHQKPKGVAKVAAARRLAVRLYWMLRTQVAYPEIVRIESSPRVPRVGASQTDGLIGRSRIPQAAGCSHRRIMVEV

SEQ ID NO: 43857 - protein, 311 aa, unidentified
MNDTIGVDISKDALDTYWLSKRKHKQFANNKMGLRALIRWVRQAKVSLVVFEATGVYHRLLETSLAAHDLPFARVNPRQARRFAEGTGTLAKTDRVDAAMLARMGSLLELKTDKPKSETLHNLKGMETARQALIKDRTAARARLNTATYPLLRKQATLRLRQIESDITQIDAAIEAIIAADKALSQKADILISIPGIAKITAYAMLTEMPELGTLSGKQAASLAGLAPISRQSGKWQGKERIQGGRACLRRAIYLPAVVATRFNPDMKAKYHGLIANGKCKKLAITAVMRKLVVMANALLRDGRKWTETRT

SEQ ID NO: 43858 - protein, 339 aa, unidentified
MKLYGAIDLHSNNSVVVLLDEQDRVVYERRLPNDLSVILGHLAPYRNNVQAIAVESTYNWYWLVDGLMEADYEVKLVNTVAVKIYDGMKYTGDEHDARHLAHLLRLGILPTGYIYPKAERAVRDVLRKRGQLVRTRTAQLLSIGNLVARNSGQPISAEEIRGLKDDQWDLLCNGNASRLLAIQSGRTVLRCLDEQIMLLEKAVLRQAKMKPAFEKILTIDGIGKILGMTIMYETGMPERFKKVGCFASYARCVDSQRFSNGKKKGSGNSKNGNKYLAWAFVEAAHHATRHNEKIRRFYERKKAKRNTTVAVKAVAHKLARACFHVLKDQVPFDVERAFS

SEQ ID NO: 43859 - protein, 343 aa, unidentified
MTISVLGIDIAKNTFQLHGTDCTGNAVLKQRLPRNKLAAYVANLPQCLVVMESCGGANYWARVFQRNGHSVKLISPQFVKPFVKTNKNDADDAQALVEAASRPSMNFVPIKQVEQQDIQSIHRVRSRVVKNRTTLINEIRGLCLEYGIIVSPGAAKVKRSLCSIIGDATTELTESSRECMKNFYEELTELEARLKKLNQKVRQLCQHNETCRRLLKIPGVGELTATAVVAAVPNANEFKNGRHMSAWLGLVPRQSFSGDKQVLLGISKRGDRYLQTLLIHGARAALSHYKKTETGYGRWLVERETTLSFNKAAVALANKNPRIIWSLLHTGEEFNSNVQMAAA

SEQ ID NO: 43860 - protein, 343 aa, unidentified
MEYGAIDLHSKESEIRIVTADGEVVLHRRIATRRELYRAVFGARPGLRILLESGTESEWVAQYLESLGHQVIVADPNYAPMYAHRGRGIKTDRRDVMALVDANRRGLYRVAHRVSAAHRTVRRHLQVRDQLVRMRTQMINVMRGQLRSAGLRIRSGRAESFGTRYQALDVPTPLREVLDPLVRGLAALEPLIAAADAWAQQTAHGNTVARRLMTAPGVGPITALSFQSALDTVTRFRGPGAVSAYLGVVPHEDSSGERQRRGAITKAGPSHMRAVLVQASWALWRSPRRSATLHAWVHRLADRRGKRIAIVALARRLTRILFAMWRDGLDFQPARVSRRGVTA

SEQ ID NO: 43861 - protein, 348 aa, unidentified
MKHYAGLDVSVKETSVCIVDENGKLCREHKVVSHPDDLIAILIDPAFSLERVGVEAGPLSQWLFDGLAKAGLPVFCIETRHTKAFLDALQQNKSDRNDARGIAHMMRVGLFKDVHVKTLTSQKRRALLTARSLLQEKAIDLENEMRGLLRNFGLKVGHASGGMFERRILELVENDADLREIMEPLLAGRCKLREGLARLERRVLAEAKQDEVCRRLMTVPGVGPIVSLAYVSTIDIPSRFRHSRSVGAILGLTPVLKQSGEMSRVGHVSLRGDAMMRRLLYEAAQSMMTRVVKWCWLKAWAMNIAKRHGSKKAKVALARRLAVVMHRMWVDGSEFRWTKEENIANTAV

SEQ ID NO: 43862 - protein, 326 aa, unidentified
MEHELHYIGIDTAKEKLDVDVLRPDGRHRTKKFANTTKGHDELVSWLKGHKIDHAHICIEATGTYMEPVAECLYDAGYIVSVINPALGKAFAQSEGLRNKTDTVDARMLAEFCRQKRPAAWEAPHPLERALRALVVRHQALTDMHTQELNRTETAREVQRPSIDAHLLWLEAELKRLEKQIKDLTDDDPDMKHRRKLLESIPGIGEKTSAVLLAYIGLKDRFAHARQFAAFAGLTPRRYESGSSVRGASRMSKAGHVSLRRALYMPAMVATSKTEWGRAFRDRLAANGKKGKGILGAMMRKLAQVAYGVLKSGVPFDASRHNPVAA

SEQ ID NO: 43863 - protein, 367 aa, unidentified
MKKVSTAAVKATKNFSQPKLTIGLDLGDRSSWYCLLDEVGEVLQEQKLGTTPKAMREVFGSMPRCRIALETGTHSPWVSRLLSELGHEVIVAHARNVRLIGESRKKDDRLDARTLARLARIDPQLLCPVKHRSAKAQADLTVIRARAGLVRARTALVNTARGLAKSSGERLRGCNVRNMNPEKAEGLSPELQAALQPLLAGIESLSERIREYNEGIEKLAQEGYPQVALLKQVKGVGTLIALTFLLTLEDAHRFRKSRDVGCYLGLQPGRRNSGQSEPQMHISKEGDPYLRTLLVQGAHHILGPFGADSDLRRWGLKLAERGGKNGKKRAVIATARKLAVLLHRLWVSGEVYEPLRNSHRIAMPAAA

SEQ ID NO: 43864 - protein, 391 aa, unidentified
MIYVGIDVAKDKHDCFIVNSDGEVLFKVFTIANNLDGFNNLYQKIESVMKDVTKVKVGLEATGHYSYNLLGYLIDKGLTTFVINPLHTNLYRKSLSLRQTKTDKVDARTIASMLMSDVNLKSYSNISYHNEELKSLTRYRFNKVEERSKLKSSVSRLVCILFPELEKLVPKLHMVSVYAMLSEFPSAKHLADAHLTRLTGLLSVSSMGRYGKEKAITFREAARTSIGSNMPAKSLELKHTIKLIQELTTEIDEIEKEIKIIMDKINPSILSIPGINYRMGAMIIAEIGDFSRFDSPDKILAYSGFSPSTYQSGQLDGACSHIEKRGSRYLRYALYNAAKYVCHWDPTFAEYLAKKRAEGKHYNVAISHAVKKLVRVIYYLEKTKQRYVKAA

SEQ ID NO: 43865 - protein, 410 aa, unidentified
MAERFVGIDVALREHRIAVLDRDGEAVGQSFTIAASKDGVATLLRTLAARAATAAQTLIGLEASGHLWENLEAALISAGYRVLVLNPLQTRRYRDVVRRKAKTDDIDAHVIAGLLRSGAAQASYVPDEQIQSLRELARLRARLMDDRQNYLRQLIAQLDVVLPEHRTALGDLLSARARGILAQFPTAQHLAQASPRAIRRAAQDAGTRGFALDAAVAVRDAARQSLYSNKAAAARAQVVRTLVSQLERLTTAIDEVDRAATALLPPSEPGTGPSDADLLQTIPGIGPHTAATLLGELGVLARFTNARALVAYAGFYPVIAESGGRVATPRLSAVGSRIARQALYLAAVNAVRRSAEWRTIYLRKRAQGKKAKQALIVVAVKLLHTVYAMLKHRRPFNPSRLLVAAATIGT

SEQ ID NO: 43866 - protein, 413 aa, unidentified
MQVLYSRCAGLDVHKDTVVASARLASGRDVSIEVQTFATTTAGLLALSAWLAERGCTHVAMEATGVYWKPVWHVLSDGDFTLVLANAAHVKNVPGRKTDVADATWLAELLAHGLVRASVVPDAPTQALRALLRTRKQLVRERASHVHRLQKTLEDANIKLASVLTDVTGVSGRAIVEALVAGETDPATLAALAHQRVKAPRERLIEALRGRVTAHHRFLLRLHLRQIEALEAAVAEIDQEVEADLEPFRAAVRLLSSIPGVSALGAEVIVAEIGTDMRRFPSAGHLLSWAGLCPRSDESAGKRRSTRLRHGAPWLKTTLVQCAWAAARKKGGYLQAQFQRLRARRGPKKAICAVAASILTAAYHMLRDGTFYQDLGPDHFSRRAKGDRTVRLVRHLTALGYTIQPPAQEVVSC

SEQ ID NO: 43867 - protein, 462 aa, unidentified
MKQKGRAGAKPSRDKSAKLPAIQPNVAGIDIGSREMYVCGPPQEDGSRELAVFTTTTEEIQACARWLQQRKVRSVAMESTGVYWIPVLEILESNGLETLLVDTRPLSRVPGRKTDVEDCQWIQTLHSHGLLQGSYRPSEAVSQLRTVVRQKAVLVREQADWVRRMHKCLDQMNVRVHHAVKDTQGTTGMAILRAIVDGERDPRKLAQLRDPRCRNSEEQIAAFLTGHWRSDHLFNLQQNLKMYDSIAERIASYEEEIQRRMEQLTPSGRQDAEAPPLKNPEKRKAMKRRDQEGKRQALYRMVGEDLTTIDGIGVETAEVIISEYGVDISKFPTEREFVSHLQLAPHRPVSGRKVLRTQRQKPKGTRTAEALRNAATAVRNSRTALGAYFRRMARRKDSGIAVFATARKIATFVYRMLRWGQKYVDIGQEAAEQQYQAVRLRTLTSTAAQLGYQLVKHEAVSA

SEQ ID NO: 43868 - protein, 431 aa, unidentified
MADTTDVTTQTHWLAIDVAKHWHAVLIETASGARHRFKMANTEQDYERLIHFIDGLGGRCRAALEPTGDWHRPLAYRLIVAGVDLVSVSSVAQSRYREAKFNSWDKNDPKDAAVILDMLKQGIVQRYVDPMVAGHHDLQELSKTYFQISKLKTRIQHSILNHHVPLYFPEMARYWNSSRSEWWIRFMLEFTTPAHVKQLSREDFIAAAWSLIGKKSDKAGKLGEMWDTAHQSTALPHEVGSLAVETFRITLRQLQHLNETRADLERRAETILSDNADYKQLRTLPGVGPIIALMILAEAGDLRRFNHHRQFLKYCGLDLAKHQSGAMRGREQLSKRGNARLRLAFWMAGTIAVRLRENSFSDKYERYIRTAPGDADLKRKALTAVCAKMARVAYGLIKSNRSYQQFYEQSLPSGSIPLCRAVEASAQLKTS

SEQ ID NO: 43869 - protein, 394 aa, unidentified
MKLIGIDIGKNKHFFCVMDQQTGEIISQPVSFSNDKEGFDFLVQKIKSYPKDSILIGMEDTGHYHFALLKYLLDLQYTVALINPKTTDFNRKMQGGITKNDKLDTINICDVLDTPERKKQYRITKVNSFDLYEQKQLTRHHHNLKEEENVYKNRLQKCIDIVFPEFNKLFNSKYGIVYMNILKMFGSAENIANTDIRTIRKCFEIEGRGNRISLTPERLKECARSSIGISSSAEVIQIKHLTAQIELIEEQLTEIDKKIEEFSIQNNSPILSIPGISHFSGTSILAELGDISNYSKPSQIIKFAGVAPLHYESSQFNAQHTSITKKGSKYLRKTLYQIILPVIRHNPVFNKYYQLKISQGKGHRCAQGHCVRKLLRIIYHLLKTNQQFDPQLLR

SEQ ID NO: 43870 - protein, 337 aa, unidentified
MRIIRIGLDTSKHVFQVHGVDDSEQPVLRRRLGRSEVAKFFAKLPPSWIGLEACGAAHHWARLLGGLGHAVVLLPPQYIKPYVKRGKNDAIDAAAICEAMSRPSMRFVPIKTAPQQAGLMLLRTRDLLVKQRTMLINAIRGHAAEFGVIAAKGPVRVAELLQQAHAEAAGVPMLALEMLALLAGQLDTLEARLKTLEARLMAWHKADPVSQCLATQPGIGPIGAVSFALKIPDPRGFRSARHFAAWLGLTPKEHATGGRRRPGRISRQGDQTLRRLLVLGATARIRVAKPGRASPWLINLLARRPKKLAAVALANKMARVLWAMMVSGQTYCHPQQA

SEQ ID NO: 43871 - protein, 340 aa, unidentified
MRKYIRIGVDIAKNSFQVHALESEDCSATKRKLSRSGIVKFLAEVEPCAIGMEACGSAHYWARRFRAMGHEVKLTPPIYVKPYVKRGKNDAADAAAICEAMSRPNMRFVAVKSEDQQATLMAHKTRELLIKQRTMSVNALRGHLAEFGVIAAKGISHVEELVERAAAAGLPGMVQATLAVLLAQLRSLDAAIDELERAIVADHRRDPVSRLAASVPGVGALAASAILASAPDPQVFKSGRDFAAWLGATPKQNSTGGKEKLGSITKQGNRYIRRLLVLGAISVLRAAPKRKGALCDWLAALRARKPAKVVAVALADKLARIVWAIITTGEAFRSSIYAKA

SEQ ID NO: 43872 - protein, 343 aa, unidentified
MKYYVGLDVSLKQTSICVVNETGSVVREGVVDSDPEMIAAFVRSKAPDAIRVGLETGPTATWLWTELKRLGLPVICIDARHAKAVLKMQINKSDRNDAAGIARIMQTGWFKEVRVKDIDSHALKALLAGRALLVKIKRDLENHIRGLLKNLGLVIGRAKFNVFSVRAGELIEDRPELMAVVGPLLKAREAIEQQIDDLDGKVLKLARHDAQVRRFMTVPGVGPITALCFKATIDDPTRFKRSRSVGAYIGLTSRRHASGEVDWSGRISKCGDAMLRSYLFEAAGVLLTRVPKWSVLKAWGMRLAKRNGLSKAKVAVARKLAVILHRMWIDGTEFNWSKKQAAA

SEQ ID NO: 43873 - protein, 345 aa, unidentified
MQITTVGLDIAKRVFQLHGVDAAGKAVLRRKLQRSEVLAFFKALPPCLVGMEACGTAHYWAREIRELGHEVRLMPPSYVAPYVKRGKTDAADAAAICEAVTRPTMRFVPIKTAEQQAVLMLHRTRDLLVRQRTMLVNALRGHMAELGVIAPQGIARVADLMAVLLGEDTTNVPALARQALRGLAAELEALDRRVKEIEVAIVTWHKDNEASRRLATIPGVGSITASAIVATITDPFQFHSARHLAAWIGLVPRQHSSGGKQRQGGISKQGDRYLRRLLVLGATAVIRHSRSKSTAEAGWLKSLLERRTARLVSVAQANKTARIVWALLVRGEAYRMPAAVPGGGV

SEQ ID NO: 43874 - protein, 369 aa, unidentified
MTALQNTKPEIWIGLDTGVASTALCAIDHNGKVLIQQELPTKAARIRNLLVEHFPEGVRAIGMEACSTSLQVVKGLRAFGYDANAYDTFAVRRFLELRKNKTDKNDARGIAEVARLGRGFLVEVHIKSNECYSTRSKLVARHNMVRQRVSTELMIKSTLRVYGTRIKERSHNSSRFRFHVERAIEEVRAETGHDLTQHMKPLLELSMKLRTEIANLESELHDFVMSNDLCRRFTEIPGVSSITAVSFFTAIEDPTRFRRSTDVAAYLGLTPKIFESGDSKRNGGITKAGNPMTRVHLVSAATVMLSVAKKHDTALRRWGLERAEAIGFAKARVAVARKLAVIMLNMWRTGRSYEAFPEVRDPEPLPVAA

SEQ ID NO: 43875 - protein, 355 aa, unidentified
MTSEKYIGLDVHQATISVAVMDASGKLVMESILETKAVTLLQFLAGLRGNLSVTFEEGTWAAWLYDVLKPHVAHLVVCNPRKNALLKAGSKSDRIDARKLAELLRGNHLKPVYHGETGVRMLRELARSYLTLMEDQIRVMNRLKALYRSWGIACAGRDVYYSRHRAEWLEKLREPGVRLRAERLYQQLDAMQRLRRAARHDLLVESRKHSISSKLRQIPYVGPIRAALLIALLQTPHRFRTKRQLWAYSGLALEIHTSGDYGYHDGQLRRSKKVVSIRGLNKDHNHDLKGLFKATATMASMRPGPFREFYLGLLAKGMKPAMARLTLARKIAAITLTLWKKGESFDADKLKQQAA

SEQ ID NO: 43876 - protein, 331 aa, unidentified
MYFSQFIGVDISKDTLDAAIYPAKDKKMDFLHCDNTSKGLCEMLAWLKRRGIKSSEMVICAEHTGVYTNPLIAFAEKKGLALSLNSPLDIKHSMGIARGKNDAVDAGRIAEYAHRHQDKLKLYEKPSETIIKLQYLLTERRLYMRQRTALLNINSAMGKYETAEARSRNESAIHHIEKMVKKVEGQMTAIIYDDPETKRNFDLISSVKGIGLINAINTVVYTNNFKSFETPRRYACYIGVAPFDYTSGISVKGKTQVSKICRTQQKAELSMAARSAIIHDPGLRRYYQRKMKEKGGGKEAHGVVLNAVKFKLILRMFAVVRSGEPYKVLNY

SEQ ID NO: 43877 - protein, 346 aa, unidentified
MKKIFIGIDFSKEKFDATVIKAEGVEERAERQHEVFDNKVSGFRRLLRWVKSVADEPDAGLWLFCGENTGGYSKALCNHLYGSGYDMWLENALSIKRSSALQRVKSDKADSGVIAEYAMRNYDQMRLYKPLGKNLERLREVFLYRHNLVKIKASMTVRKGEKKLTQEKSDISRFMAQSSKHLISEFNKKIAECDMRIDKIISEDKELRRNFEIITSVPGVGTQNAVCLMVYTDNFSRFDYDSRKIACYYGVAPFGRQSGTSVNTPPHVSPFANKLIKALLTQAALASINFCPQMAVYYRRLVEAGKKKPVAVNNVKNKLLHVITAMVRNGAMYNPDHDYYAALKVA

SEQ ID NO: 43878 - protein, 387 aa, unidentified
MPASGPRPDLVAVQVNLVAIFVSLELSRSTWLITSLVPGGADKMSKHSVRGGDVAELMAHLAKLRDKTHARAGASFPIIAIQEAGLDGFWVHRVLERAGIESHVVDAASILTSRRRRRAKTDRIDGEALLRTLLAYKRGEPRVCTIVRAPSPEEEDRRRLCRERKTLVAERVAHVNRIKGLLFAQGIADYEPLHGDRRQRLEALRTGDGRPLPPYLKAQIGRELDRLELLLEQLKAVEAERNAMLEPANDAAPVAVKGLAGLRGIGPEFTAMLWSECLFRSFRNRRQVAAYAGLAPTPWQSGSVQHEQGVSKSGNPRLRSTMIQLAWLWLRHQPTSELSLWFRERVKRNGGRGKKTAIVALARKLLVALWKFSSSGVVIEGAILKAV

SEQ ID NO: 43879 - protein, 378 aa, unidentified
MNRIIKIGMDVHTSNYTLCIFEPSFEHDGTVHCITQVKPEVKNIIHVIETFKKKHENEELNIVCGYEAGCLGYSLYHELKEKGIECVILAPTTMKTEKGGRKLKNDYRDAKMIAECLAYGGYSAVHVPTELDNSVKEFIRMRDDIKENLKSIKQQIIAFLTRNGKQFEGKSYWTRKHIDWINTVSFSEPLLQDTLNEYMIEYNHLCDRVETLDKQIEEISLKEEYVEKVQQLQCLIGIKTHTALSLIVETSDFNRFKKGNMYSAYLGLIPGDDSSGGQENKLGITKAGNNHLRRLLVEAAQGYTRGRVGFKSKDLKSRQEKCSSEVVAYADRANERLRRKYYRMTMRGKRFNVAKTAIARELACFVWGIMTDHIDLCS

SEQ ID NO: 43880 - protein, 341 aa, unidentified
MEKFIRIGVDLAKNYFQVHALASESSPAVKRKLARSKMHRFFSQIEPSFIGMEACGSAHYWARELKAMGHDVLLMPPSYIKPYVKRGKNDAVDAEAICEAMSRPGMRFVPIKSAEQQATLMLHKTRELLVKQRTMSVNALRSHLSEFGIIIAKGIGHTDELLKLAEVDTTLPDAAKTAVKVLAAILEDIEKAIDDLEGQIADAHARSDMNRLLARVPGVGKLIASVITASTPDPSVFRSGRDFAAWLGLTPRQNSSGGKQTLGGITKKGNRYIRKLLVLSATSLLRSVSKRKGALADWISALLAKKPARLVTVALANKLARIIWAIMRTGEIFRAEIFAKA

SEQ ID NO: 43881 - protein, 330 aa, unidentified
MRKEEKMTRGVFVGVDVSKDRLDVAFRPSGEKLIVPNDRRGVTRLLRTITRLKPECVVLEPSGGFERKLLERLSEAGAPIAMVNARNVREFARASGRLAKTDAIDAAVLAHFAEVMKPDLRRLPDPETRKLRALVTRRNQLVRMMTAEQNRRLQALESVRAGLSVIVRCLKKQIGVLDKQLAALIRATPAFRQKEELLRSAPGVGQVVSATLIAHLSELGTLNRKKIAALVGVAPFNRDSGKLKGKRAIWGGRSDVRSMLYMSTLVAVRLNPSLRVFHDRLRRAGKSPKMTLTACMRKLIVMLNAMLKSGNRCVEERSHPLKMIGQPAPT

SEQ ID NO: 43882 - protein, 348 aa, unidentified
MTHFVGLDVSVKETSVCVVDGAGKVLCERKVPTELDDIAVLLTSIGGDYIRVGIEAGPLSQWLMSGLAEAGLPMVCVETRHMKALLTAQQINKSDRNDARGIAQMMRVGLFKPVHVKTLAAQEQRMLLTSRKLIQHKLLDIECDMRGTLRNFGLKVGVISTAGYDARIRHLVESFPKLAAIVEPLLTVRRVMRQQLATLHKMLLDTVRHDPVCRRFMTAPGIGPVVALTYRASVDQPHRFVHSRAVGAHAGLTPKRHQSGETDDDGGISKCGDTMLRAMLYEAAQSMLTHSKKWSWLKAWGMRVAQRRGMRRAIVAVARRLAVILHRMWVDGTDFRWSNSSGAVAPAA

SEQ ID NO: 43883 - protein, 446 aa, unidentified
MMQKVMAMTSIHHSRRTLMNCTQNEKLNQVTPHTLIVGVDIAKFKHVARAQDDRGKILGKALVFTNTKEGFEAFFSWLEEMQHKHEKSDVLVGMEPTGHYWLNLAYTLKERLVSFGVVNPLHVKRSKELDDNSPTKNDIKDARVIAQLIKDGRFSYPRLPMDEDAEIKAGITIRNQIVGDLQVLQGRVHNWLDKYFPEFLTVFKDWSGKMALATLEHIPLPGQLNQTTPERVAEIWSIYGGVQRPSLKRIQRLQEAAARSVGLNVGLQMAQREIATNIKRYKMLKEELRALEKELETLVLTLPGIAEMLTVPGVGMVTVIELYSELGDIKNFKNPRQILKYAGLNLRESSSGKHKGQARITKRGRAKLRALLFRTVMPLVRHNRAFKALHQYYTTRQENPLRKKQSLIVLCGKLVRVLHTVGQKQCPFDEERMIQDIPHLSLALKV

SEQ ID NO: 43884 - protein, 342 aa, unidentified
MTYHMGIDTHHGYSFFQHMDAEGAIGISQRVATDRDRINELLAQLDDPTTITFEAGRNYWWLHELFAQHPLVSQVNVVDPRRSRHLSVELSVLSGYGRAKNDYIDAEMLAEQTRRGLAPTIHVPTAEQLEQRTLCRHRFNSVVNRSRAKNLIHALLELRGYSAKIADLVTPSATQDQFLALLPGYVAFIIEQLVARIKLFNQQIASCETRLAQLLPTGHPQMKIVMSAPGFGPVLSRMVLTELLDITYFKEPKYLISYAGLAPIDNESAGRKGSIKLNKYCNYYLKYAFIEAAHNARDNSSYRRKYDLDVKKQSKIIAKLNLARRLAKTVYWMLTRQQLYRW

SEQ ID NO: 43885 - protein, 488 aa, unidentified
MKLKKERREKNTNKTERIARGRKFISWHEMNRAQRREMTRKIQAEDLSLEVVHPHAAGIDIGNESHYVAVPSTRDDKPVRRFGCTTAELKAMAAWLQQCGIRTVAMQSTGVYWIAVYDILEAAGLEVYLVNARETKNLPGRKTDVQESQWLMKLHTFGLLRNSFRPCQEIRTMRTYWRQRHDLVQAAGRHIQRIQKALTQMNIQLANVLSDISGKSGQAIIHAILEGERDPYELAALCNPNVKASEEEIARSLEGNWQEDLLFLLKQEQEGYGFCQKQMAECDQRLQQYLAQKKDRSAGASLPEEKRRGRRQKNKKNNPQFDLRQQLFRAVGADLTRIDGIDVLTAMTVISEAGWDMSKWPNEDHFVSWLRLSPDNRISGNRIIGKGRLPTNNRLSVALRMAASTLRNSDTYWGAQFRRLKRRLDAPVAIKAMAAKIARLVYRTLRYGLQFVDRGAEVYEAAHRQREIDYLKRKAANLGLHIIEAPAF

SEQ ID NO: 43886 - protein, 461 aa, unidentified
MSLGIPPPKRVRMDAMPAIHPNAAGMDIGARAIVVAVPPERALEPVRVFETFTPDLHAVVEWLLQCGIDTVVMESTGVYWVPVFELLEQRGIQPYLVNARHVKTVPGRQSEWNDAQWLQKLHALGLLQGSLRPDAEMCVLRTLLRHRATLIAHRAPHIFHMQKALKLMNLQLSEVLTDITGVTGQAILRAIVHGERDPLRLAQLRTAACKSSKDVIAKALTGTWRDEQVFILTQALELFDFYTRQIAACDAQIERQFTAMKPRFQSDEPFVPLPRVKPGSKSKNHPSDNARTYLARLTGVDLVAVTGISASLAPTILAEVGTDMGKFPTVKHCCSWLGLAPHNDISGGRVWRSRTLKVVNRATQAFRQAAQSVARSDSAFGAYCRSMRARLGPQQAIVATAHKIARVVYHLLQQHEAFREESATAYTHQRRERELKHLTRRANKLGSTLNPVATSQAALPA

SEQ ID NO: 43887 - protein, 339 aa, unidentified
MNEVTVIGIDLGKHSFHLHAQDAAGRMVFRKKLSRQQLLRTLANVPCCRVVMEACAGSHWLARQLAGMGHEPRLISPQFVRPFVAGNKNDFGDAQAICEAACRPSMRFVSPRNEAQQTVSAMHRLRERLVRERTATVNQIHGFLLEFGISLPRGAALMSRLPTVLDHETLPPRLVGLVVRLHAQVHYLEEQIRQVVQDLKASLREDDKGRRLLEIPGIGPITASALAVELGDARQFANARQFAASIGLVPRQYSTGGKPTLLGISKRGDRNLRRLLVQCARAVMQHTASRTDALSLWVKTLSTRRHSNVVACALANKLARIAWAVLARGTHYQARALTT

SEQ ID NO: 43888 - protein, 321 aa, unidentified
MVAALGLDISKETIDACLLDDGNEHVKKVSNNAKGIAQLQRWLENRKAKNVHVCMEATGSYFEVAAETLSDSGYRVSVVNPRQIKSFSETLLLRTKTDKVDANTIAQFCRLHKPASWTPPTPEQRKLRSLVRFCSNLKETRASYLVQRETPNLVREVRVSIDEVIINLDEQIEKLEAEIDDLIDNDSDLRRRRDLLCSVQGIAKTTAVTILVEAPNLEEFSDAGAVSAFAGLSSRTRSSGTSVRGRGSICKTGNARLRKALWWPAIVAMRHNPRLRHLAERLRALGKPNKKIIVAAMRKLLVLAYGVLKSGRPFDGALTAS

SEQ ID NO: 43889 - protein, 344 aa, unidentified
MGYYCGIDVSLERSSVCTVNAAGLIVREATVASDPDALIGWLSGLDLPLSRIGLEAGPLSQWLHAGLAGAGFAVELIETRHVRAAFRAMPIKTDKKDARGIAQLMRLGWFRPVHCKSLAAQEVRAVLTARKLVQAKLHDVEMSLRGILRGFGLKVGRTTPRIFEARIRELVEGHATLATIAGSLLAARSVLHREFQGFERRVRSLARRDDRARLLMSAPGVGVLVSLTYASAIDDPGRFRRSRQVGAHFGLTPKRYQSGEKDVSGRISKIGDHGVRTVLYEAANIILTKPVKAGTLKSWAMRLAARAGMKKAKVALARKLSVILHRMLVDGTPFAADKAALARG

SEQ ID NO: 43890 - protein, 338 aa, unidentified
MNYMGIDHHKQYSHITMLNEKGKKLKSGRVANYRSELERFLDGSGEVKAVIEAGRSSYTMVDLLDELSIDVTIAHPLQVKAIAKAKIKTDKRDSFMLAHLLRTDLIPEVYKRSRENRSYQRILRQRAFYVGSTTRTKNKIRALLAQQGEELRDKVSRKKNLFTGSGVKFLKTLNLPDTDKKLLSALLKTFSHLDERKKETNGLVEKLYLQIPEARLIHTVPGYGVFLSVLTAVEIADIERFSEVSKFHSYAGVIPSTHSSGGRTYHGKIVKQGNRWLRWAAVEAVWPSLKADFDMRCFYNKLKKRKGPNPAKVAAARRMLTIIFRVLKENRPYISYKR

SEQ ID NO: 43891 - protein, 404 aa, unidentified
MDRQRTVAGLDVHKDSIYLCVMGHDEAIIFQKTYGTLTPGLRQMCADMVAHGVTEAAMESTATYWVPVWNALCDSMSLKLVNPYFIKQLPGRKSDVKDAQWIAECLLKNLIKGSFVPDGVVQDMRKYNRRIFDLNDDMVYNTNKLDAALQRCGFRLSNYVTKVKGKSYRSCIAAIINGTTDQAELVKLVHGKTVNKHGRDVIMAAVTADFHQADIDLIRQYKEMIDIIERQIKDCQSALTALCRKHFPTQYERLQTIPGVKERAATAIIAETGADMRHFPKSTNLVGWCGLRPRNDESNRKIKSNKITHGNKFLRKILIEIAWTASRTRNCFFSNFSYVQCTVRRKTKMKVQVAIARKILVAVWHMLSNDEDFIDVYLRRLAKEAEEHRHKQESIQRIELSMVN

SEQ ID NO: 43892 - protein, 402 aa, unidentified
MNCVGIDVSKGKSMIAVMRPFGEVVISPFEVQHTASELSELAKLLKSLDGETRVVMESTGNYHTPVAWLLHDAGLYVSVVNAMLVHDYGNNSLRRAKTDKKDAVKLANYGLDHWLTLPRYVPEEDTRLLLKNCYRQYQQYSKVQTMLKNNLISLLDAIFPEVNRLFNSSPRADGSEKWVDFVSTFWHCQCVSTLSLKSFSARYLKWCRKHGYYFSQEKAFEIHSKAQSCIGVMPRNETTKLLVQQAIAQLKATSAALAALKQEMQSLAAALPEYPVVMEMFGVGSTLGPQLMAEIGDVRRFHSKKALVAFAGIDAPPCQSGQMDIHSRSISKRGSAALRRTLFLVMGVYLQSAPLDEPVYQFMDKKRSEGKPYKVYMMASANKFLRIYYASVTAYLNTLARI

SEQ ID NO: 43893 - protein, 369 aa, unidentified
MADYREAFVAFDVAKIKHAVAVADSGRGGEVRFLGEIENRPVTIERTIRKLAKRYDRLHVCFEAGPTGYGLYRQVRDLGHDCMVVAPALIPKRSGERIKTNRRDAVTLARLHRAGELSAVWVPDIVHEAVRDLVRARQAGAEDLRRKRQQLLSFLLRHGRIYDAGGHWTLAHRRWLARQAFEHQAAQIVFQETSDAIEDAAQRLHRLDEQLAAIVETWSMKPVVEAYQAMRGASFLVAVIFAAEIGDVRRFETPPQLMAFLGLVPGERSTGDTVRRSGLTLAGNRRARRALVEAAWTYRYPARVSEPLRARLEGLPKAVRDIAWKAQVRLCARYRRLAAAGKKPPVIAAAIAREMAAFLWAIGREVAPS

SEQ ID NO: 43894 - protein, 396 aa, unidentified
MENPIIACDVSKGSSHIQGFIGLSNPVGNPFVVQHLKNDLKQIKELAKSLEKKTKKKPVFVFEYTGIYHECIAKYVRDIGLEAYAISPLESAKVRKSSIRVTKTDSKDCLNIATVYYHRNVRKFNSDNNDIKALSRRKRELRNELIHLKCVYHRYIDLIWPCFDSTFNIDTQSSSIVISKYKHPYKLKKWSAKDIANFLLNHGHFTKSRAFEYADKFKDYASNCVSGVDEDSEYVNGLINTYDQMQIIKEEIEAINIRLERMVEASIPYKLLKTIPGFGENILLQTSAEIGDYTRFKTAKQFVAYCGLDPSILQSGKDDGEHYSITRKGNRILRSMLYLAVSQMLTRKIDNQITRFYFKKKSSGLSHKVAAVASCRKLACCVFGMLSNGTCFETTI

SEQ ID NO: 43895 - protein, 321 aa, unidentified
MTYVGIDVSKLTFVVAYSSAKTSKTKTFKNTAKGIREFIKTISVNEHHCVMEATGNYSTLLVYMLSEFGFTVSLENPLKIKNFSRVMLSVIKSDEIDARLIALYGEKMQPSPYRMRSDSILILKQKRTVLRQLKKQLVATSNLKGSMEVLPIYDSKCKKTIEKTIAFLGKQIKYMEEELASLANDEFKKQMDLLTSIKGIGVTLAAALIVATGGFTYFDNAKQLTRYLGLSPTYQQSGTSVNFKGHINRNGDPILRSQLYVAALSSLRCNTECKVCFDRLRSKDKPGKVAVAAVANKLVRQAFAVVTQDKPYVDGFISVKP

SEQ ID NO: 43896 - protein, 414 aa, unidentified
MEQKLIYLGIDWADDHHDIVITDDSAKTLNQFQIDHTPDGFALLHANIANYQKSPTDVLIAIETNRGLLVHELIRTGYTVYAINPKAVNRYKDRHVLSKAKSDILDAQALAHLLRTDRHRFKALVPLPEDYRLLDRFCGDLRKLIDEKSRIVNQTISCLKEFYPKALELFSLNSQIFIDFLKAFPDHDTLRACKKKTFLAFIKKHRYPYPGKIEELWETIQSSTLQADTVTARAGKLRLLMLLDQLENLKIHCTHYEQEIQKILDTLPESNSIQSLPGVGDRLAPELVAALGPNGKDTHHRFHSAEEIAKLSGCVPIVKQSGKWEKVSIRHACVRSLRRTFHDWAFTSLKSSTWARAYYDYHKARNQSHFTILRNLGKKWIKILFAVWSKGTTYDEALHIQNLKARNIPWAMAL

SEQ ID NO: 43897 - protein, 405 aa, unidentified
MVSSIDRYDEVDVFIGLDVGKGEHHAVALDRAGQRLFDRALPNDERRLRAVLDQLATHGTILLVVDQPATIGALPVAVAQAAGALVGYLPGLAMRRIADLHPGEAKTDARDAAIIAETARTMPHTLRSIHVADEQVAELSMLCGFDDDLAGQITQVSNRIRGLLTQIHPALERVIGPRLDHPAILDLLQHYPSPAAIRAAGEKRLGNRLIKNAPRKGRVWAAEITTALGEQTVVVTGTDAAALVLPRLAEQLQALRRQRSEIAVEVEKIVDQHPLQPVLTSMPGVGVRTAARLLTEVTTKTFPTAGHLAAYAGLAPVTRRSGSSIRGEHPSRRGNKILKRAMFLSAFAALRDPESRAYYDRKIAQGKRHNQALIALARRRSDVLYAMLRDGTLYQPRSTEPALAA

SEQ ID NO: 43898 - protein, 336 aa, unidentified
MFQLGIDVSKKTLDLCLLREGVKGRVKTRKLKNDVDAACSVIDWLRRQRCEPADVHIIMEATGVYHESLAYGLHTAGARVSLANPHRSREFARGMGIMTKNDSVDAWVLACYGALKEPAPWEPPPENVRYLSALLRHRDTLVTDCTREKNRLEKCRATDTPDAIIESIGNVLQSLSAETDHLDNLIREHLEQYPELKKDFDLLTSIKSVGFQLGLNMLVILRGHRFDTAEQAAAFLGVVPVEKFSGTSVRGKPRMSKIGPPEIRAKLYLAALCGLRFNPVMKAMYERLCLSGKAKMCAIGALMRKLVHWCYGVLKTQKPFDAEYLSSDARSACQAA

SEQ ID NO: 43899 - protein, 357 aa, unidentified
MEQSNRISFKGQNIYVGIDVHLKSWSVTILSETSVLKKMSQGADPDALHRFLTSHYPEAEYYSVYEAGFCGFWIHDRLTELGIHNIVVNPADVPTMSSEKLRKTDAVDSRKLAVSLRAKQLKGIYTPDSEALEIRSLIRLKNSITKDMTRQKNRIKSQLRYLGVEIPKEYLEPHSNWSKRFLNWLREVEMRTPSGRHTMDILIMQFEALRRQKAEMTRKLRALSHTDRFEETLRLLMTVPGIGQTTGLALMAEIVDITRFDNAEQLAAYVGMIPMCHSSGEHEGVGDITLRKHAILRSNVIEAAWVAIRMDETMQLCYLNNCKRMVPSKAIVKVARKLVNRIYFVLKRHQPYVNAVA

SEQ ID NO: 43900 - protein, 361 aa, unidentified
MPVEHYIAMDTHCHSTDICVKTRANAPGRKWRVATTIPALREVIGSIRRPRHLAFEEGPLAAWLYRNLKADADRVTVCDPRKNAWIAKGGDKDDPIDADKLADLLAGGFLKAVHHSDEVSRDVFKQLVGSYHDRVGHRVAEANKVIGALRRWGVVIRESAFKDKAARVELLLKLPEGAELAPTRLSLKLLMEGYDQAVKQEKRLRQELVRLAKQEEVVVRLTDLPGIAWVRAATFYVYLDTPWRFRSKQALWKYLGIGLVRQTSGDGPEYLRVNLAANRTLKSTILGAAESVILKGDNPFAEQHRRWKDDGLSPRNARRNVARSLAAVMWGMWKNGGVYDPKQVNVKASEKVESNGSRSDR

SEQ ID NO: 43901 - protein, 455 aa, unidentified
MARKRKAKEGGKTSQAAMPVMRPDAAGIDIGATEIFVAVSADRATENVRAFPTFTQDLYALADWLKACGIQTVAMESTGVYWIPLFQILEECGFEVCLVNARHVKNVPGRRTDVSDCQWLQFLHSVGLLKASYRPAQEVCAVRSLLRHRESLVQMAATHVNHMQKALDQMNLQLHHVISDIVGQTGLAIVDAILKGQRDPLELAKLRGERIKASQTVIAKSLVGDYRHEHLFTLKQSLEAYRSYHKMIEDCDREIRQHLEEFRPPAEPPTPPASEAAAPKKQQSTDGILRSELQRVWGVDLTRIPGIRTGIAQALFGEIGPDFTKFRSASAFASWMGLCPDNDISGGKVLFVGTRKVKCRAALALRMAAQSLHHSKSALGDFYRRMRAKLGAPKAITAAAHKLARIIFHLISAHQEFDDSKLAADQQRYQKRQEAKLHAKAKSMGYALIPLAAAG

SEQ ID NO: 43902 - protein, 379 aa, unidentified
MSIVMGVDQHRAQITAEWIDLATGEVSRARVLPADRAGVRRFLARFAGERLEVALEATTGWRFLVEELRAAGAIVHLAEPAETAALRGNKKRAKSDRADARHHRELLLAGRLPESWIPPDHILDLRAQARLRHTLIEQHCQWQQRIQAVLYHHGCPHRRRLMEGDGPQWLEDQPLPAGARQQVTVALAVIDMLEREIDPVERELRGYARQQTGCQALIDAYYGIGELTAVTIVAELGDCRRFANSRDAVRYSGLDITVYQSDRHRAPGRLSRQGPPALRWALYEAAQASRRGGERSPDRAYYLEVKERIGGNRACLALARKMLKRCYHTLRELGDDALAPPAAPTQPGRGSAATRRASSGSPRPTNPPATPDAAGALAA

SEQ ID NO: 43903 - protein, 355 aa, unidentified
MNSVRYVGLDVHRDTISAAVLNESGRLIQQSILGTRAAAILDFIGGMRGSLHVTFEEGTHSAWLYDLLSRRVARLVVCNPRKNALLKSGNKSDAIDARKLAELLRADMLSPVYHGEKSAMEVQHLARIYALLTEDTTRVMARIKAVFRGQAIACAGKKLYSHKHRDEYLAELGAGALRRRAEFLYQELEAVQQLRRQAKRDMIVECGKYPETKLLCSVPFLGPVRAAVLIGRVQTPHRFRTKRQFWAYCGLALEMRDSGEYRMVDGQVERRKKPAQIRGLNWNHNHELKNLFKAAATSASACDGVFREFYLGLLKKNMQPEMARLTLARKIAAIALKIWKKGEVFDAEQVTLQAA

SEQ ID NO: 43904 - protein, 323 aa, unidentified
MQGKVLPEQSAERRVYVGLDCCKARLDVYIHPIGRALSVANTKEGLRQLRRALTGYDVALTVVEATGKFHRLAQRTIHAWGIAVAVVNPLRPRLYAEAAGILAKTDRLDARTLAIFGQSIKPSARPPAPERVEELQELVRTQQAAKDGATALANRCGAAQSAFAKREIGRLLKNVQRHVDRLNAEIERRIVQDPALARRYEILRSIPSFGPVVAAALTACLVELGQCSNKAIALLVGTAPITDDSGQRTGIRHIKGGRAHVRSTLYMAAMSAITHNPDMAAFYKRLLDNGKLKMVALTAVMRKLVVLANTLITADRLWSQVRP

SEQ ID NO: 43905 - protein, 408 aa, unidentified
MDVFHERCAGLDVHKEKIFVCVLIGRGSGFQKITFQYGTFHHQLVEMRQKLVELGVTHVLMESTGVYWMPVYDALEGFVEIVVGNAQHIMNVPGRKTDETDAEWLAKLLRFGLVKPSFVPAREFRELRQLTRYRRAVVQTRASEQNRVEKHLQIAGVKLSSVASHVFGVSGTDMLNRIAEGTTDPGELAGLARGRLRKKMPQLRDAFAGSISEHTQHLIALQMEQMNRLESTIAQAELKIDEKVKPHEEILARLDAMPGLNLRTGIDVLAEIGTDMSPWATHRQIAAMAGLCPGNYISAGKRLKNRSRQGNPYLKSILVQAACSAINVDGSYYQAKFKALKKRRGHKRALVAIAHAMLVAIYHMIKKGEPYREISAKVVSDHEHGRKKEYLVKQLETLGFEVSLKQIA

SEQ ID NO: 43906 - protein, 333 aa, unidentified
METIYFLGIDISKKTFNAALTLDGKNFHETLVENYATEIQSFFQLLKKQFSLNQLIVCMEHTGIYCLPLLNFLVKNQIKVCVEPALQIKKSQGISRGKTDQVDAKRIAVYALKNQEELKFWLPQRECIQKLNALLVLRERMVKMKVQLQVPIHECAEFIAPSILKEMTKNSKKTISALECDIKMIDKKIEELVNADEQLTQQYILITSVPGVGKITALNVIVSTGEFSRITDAKKFACYAGVAPFEHSSGTSVRGKTRVSKLANMKLKKLLHLAAMSAIQYCDELRTFYKRKTESGKNKMSVINAVRNKLISRIFSCIKNKRMYQKDFQLTIV

SEQ ID NO: 43907 - protein, 489 aa, unidentified
MSTARKQQEKEKDPTLNARAPKRKARGSRCPQGKGNRRRSKLTITNPDAAGIDVGSQVHYVAVPEDRAEESVRSFGAFTAQLDELVQWLKDCGIKTVAMESTGVYWIPLYQKLEEAGFEVLLVDARQAKHVPGRKSDVQDCQWLQQLHSYGLLRAAFRPEDSVCRLRTLQRHRKNLVESAAMWVQHMQKALNEMNLHLHHVLSDISGLSGMAILDAILAGERDPRKLASLAHYRVQKSQAQIEAALTGDYRPELLFVLSQSLQNYRQVQQQITQCDLSIEKQLAKMSDCKNPSQAAEPTPPSQDLGGGKPRKRKSPVALEISLAGHLKRILGVDLTTIPGLNVLAILTLLSEIGTNMAKWRNEKAFVSWLGLSPNNKISGQRVLSSRTRKVVNRAATILRLAAMIVGKTDTPLGSFYRRKRAQLGGPKAVTATARKLGCLIYRLIKNGQGYNEPDMHTYELKYKDQILNSLRKRANTFGFDLVELPKAA

SEQ ID NO: 43908 - protein, 330 aa, unidentified
MKQFIRIGVDLAKNYFQVHALAHEGGSAVTRKLKRSKMHEFFAQIEPCLIGMEACGSAHYWARELKTMGHEVLLMPPAYTKPYVKRGKNDAVDAEAICEAVSRPGMRFVPIKDAEQQATLMLHKTRELLIKQQTMSVNALRGHLSEFGIVVAKGIGRVDELLELAESDTTLPEAAKAAVKVLAQHLEGLDKSIDDLEKQIGRAHARSEMSRLLDKVPGVGKILASVIAASVPDPSVFKSGRDFAAWLGLTPRQNSSGGKQTLGGITKQGNRYIRKLLVLGATSLLNVVGSRRASRDQDRYVMIEIALPTATQRRPFLHADPLPASTTLVR

SEQ ID NO: 43909 - protein, 313 aa, unidentified
MSQVTIGVDVSKDTLDAYRLSDGAKRRFGNDKAGHAAFVAWCGQDVARVVFEPTGPYHRAFERALARAGLPAAKVNPRQARRFAEATGKLAKTDGLDAAMLARMGAVLDIEAKPGNSDEIIELKEMLVAREALVKDRVAAKNREKNLTLPLLKRQNRYRLKQIERHLDALDANIKARIAASDAMASRCAILTSIPGIGFLTAFALLVEMPELGTLEPGQAASLAGLAPITRQSGQWRGRSFIQAGRATVRTALYMPALVAARFNPDLSAKYTQLIAAGKPPKVAITAIMRKLVVLANALLKKGSHWQEKAACT

SEQ ID NO: 43910 - protein, 361 aa, unidentified
MSKATCLVGLDVHARQTHAAVLDLRTGEIGVSRLRMVPGEVVSFLERLPGPVVAVYEAGPTGFGLARAGRARGIDVRVVAPGLVPRGPGDRVKTDRRDAIRLVRLLAAGELSFSFVPGVEDEAFRDLIRCLEDVRGDFMRARHRLSKFLLRRGRRYEDGRAWTRAHLRWLRALVFDDACSQGTFADYLASVEFLAARRTSLLALLDQQAPECSHAPVIARLRCFRGIDTLSAAGVCAELGSFDRFPRPALVSGFLGIVPSERTSDTKRRQGQITKAGPGHARRLLVEAAHHYRRRPTISEGLARRQKGQDPRVIEIAWRAQRRLYDRWQHLREHRKLPAGKVTVAVARELAAFLWEAATLD

SEQ ID NO: 43911 - protein, 431 aa, unidentified
MSNRLQVGIDFSSKRAAFALLSPDGEPIVMHRAFANSSPGYTMAKQFLLETLEGCGFGGLDVSGEATSYYWLPFFLQLAADCDLACYDPKLFLLNARWVHWYKKSHPPDHKTDQKDAFYVADRMRTMRRRVNWQPDLDALRLRFYTRLRFHLAQDLTREKCFLHAHLFLKASAYAQNAPFSDAFGHTSRTILSQPELWDSLDNLPREELAELLHELSGHHLPDPETNAAKLQDAMRDSFTLPQVLQEPLQRVLDLGLARLQFLRQQIAQVDRWIACENQNHPGVRCLATIPGFGPVFSSGIVAEIGNLERFLAPSKWDPRRRDYRSRNLRDVEDAVAKVAGLWWPRKDSGDFAAEERRLSRAGNRYLRYYLILAANGLRCHVPEYREFYARKHREASIHKHWRALVLTARRSVGLIVGLLHRHEAWRSQEM

SEQ ID NO: 43912 - protein, 376 aa, unidentified
MTNTTHRSESTAAAALYVACELSAKEWLLTMSRAPDARRYRARVRAGDGEAVRRVVATTKERLGLGMEAPVRSCYEAGRDGFWPHRLLVTLGVMNLVVDSSSIEVSRRARQAKTDRLDGEKLLRMLLRYWGGERDLWHVVHVPTREQEDARHASRALTTLQADRTRLRNRIHSLLALHGASRLRIDARFPERVAEARDWAGECLPPGVQARLLATWRVLQTVEAQRQQAQRTERQQVRVTAAPTPAQRLARLRGVAARSATILTQELFSRDLRNRRQVGGLTGLVSAPYASGTTRIDQGLGRSGLPAVRRVAVEIAWAWLRYQPTSALTHWYHQRFGHGSAATRRIGIVALARRVIIALWRYVTHGIVPEGALLKA

SEQ ID NO: 43913 - protein, 331 aa, unidentified
MKNKQIIGIDVSKSTLDTFVFKSNHLFQVANNPAGFVRLLEESIQISGFSKDSLLFCFENTGCYSRALAVFLQDAGISFYAIDALDLKRSMGISRGKSDKKDAKAIATYAWRRRDELVCSKLPGPVLDQLSALLSHREMLIKQRTALKNASKGHNNIYSDNEFEFLKGSQVRMIKMLSEEIKNAETEIIFIINHNAELKSSYDLLLSIKGIGKILAFYLITLTHNFTKFTDPRKFACYAGIAPFEYSSGTSVRGRTKVHPCANKQIKSLLNLAAMSSIQLPGEYQMYYIRRTTEGKNKMSTLNIIRNKLIFRAFAVIKRGTFYVDLHRFAA

SEQ ID NO: 43914 - protein, 405 aa, unidentified
MWTYSAVLMNGGVFMTVFVGIDIAKYRHECLVVDHQTKVIHKSFTFDNNRQGFKTLETVLDSLDASKIIKIGFEATSHYGDNLKSFLISLGYDFMEIHPLLVSRFSKANSLRKTKTDKTDAQVICNYLMTVDFIPYHNKSYHIKSLKSLTRSRDALVKDRSRQLVYLTNLLDKSFPEFKPFFDNSLKSSTALYLLNNYTTASKMSRMNLTSYQKMASQLRRTISYGKFNKLRELAKNTVGREDELFEFLIKTHLELYHRFNHSISETDKLILQRYSTLDSFIDTIPGISIISAAGILSETGDIERFSHPDKLVTFCGLEPAIYQSGESEFHGRMVKRGSPYLRQYLMNCAMTVIAHNPVMYDYYSKKRNELKPHRVALSHVAKKLIRIIYKLETTKTNFDSNLMR

SEQ ID NO: 43915 - protein, 343 aa, unidentified
MSYKLYFGVDVSKLWLDIAYYDGVDVDWKHGHIRVDNDEKGFSQLGRWLDRLGVGKGTCIFCMEYTGLYSQEFRQWLERMKIVYGMVSPRKMHRFEPDLGEDERSLDRIKTDEMDSFRIAIYCKEHSMKIRRKPSHLPSDAYFKLKRLLAERRQYVKQSTLYKQQLHDIGKYDTEASRHRKEAELASLTENALQTSKEMEAIIREDADIRKNYGLLCSIKGIGLIVAAETIVLTENFTSITNPRRYACYVGIAPGRKESGVSIQGGDHVGRKGFTQAKADLSMAALHAIRFDKGIRAYWLRRKAEGKHSGVVLNAVKFKIVLRMFAVIRRQKPYVEMEEYGKK

SEQ ID NO: 43916 - protein, 343 aa, unidentified
MKLIRVGVDLAKNVFQVHGVNRSEKAVWRRKLTRENWLKVLRETVEPACEIGMESCGGAHHWARQLQQQGFKVRLLAPQFVKPYVKSNKNDANDAEAICEAMSRPHMRFVSVKTVEQQDIQAVHRIRAELIKQRTAKANQIRGLVAEYGLVAPKELGHLRRALPCWLEDAENGLSARLRRLLHGLWGDLQALDERVSELDREITMIARSDPVAKRLQQLRGVGPIVATALVAAVGNGEQFAKARQMSAALGLTPRQQSSGGKERLLGISKRGDVYLRALLIHGARAAIRTANNKDDRLSQWVTRLAARSHVNVAAVALANKTTRMAWAMLKHGTDYQPAMVTS

SEQ ID NO: 43917 - protein, 339 aa, unidentified
MKYTPVGVDIAKHLIQVHFIDENTGEVVDKQLRGRDFLEYFSNRNPCLIGMEACGGSQHWARELTKLGHKVRLLQARFVKAFVMGNKNDVMDARAIWMAVQQPGKEIAVKTEEQQSVLVLHRTRRQLVKFRTMQTNSLHGTLLEFGETIHKGRAAMEREFPEALERMKERLPPYLITVLENQYNRLNELDLLIEDIEKQLTSVARQNETCKRLLDIPGVGPLIATAAVATMGEASAFKSGREFAAYVGLVPKQTGSGGKVRLLGISKRGDTYLRTLFIHGARAVALVAKEPGPWITELKKRRPASVAIVAMANKLARTVWAITAHDRKYVRNHVSIRPY

SEQ ID NO: 43918 - protein, 343 aa, unidentified
MDHFAGLDVSVKETSVCIVDDAGRIVREVKVASEPEALLPVLTNPGYHFKRIGLEAGPLSQWLFSALAEAGLPVICVETRHMRAVLKAQINKTDRSDARGMAQMMRAGLYRPVHVKTLRSQKLRMLLTHRKLLQSKAIAIENDLCGTLRNFGLKVGMVGKVRFEARIGELVENLPDLAVLVEPMLIVRRVLREQIVILHRRLLGIVRDDEVCRRLMTVPGVGPVVSLTYRATVDVPARFHKSKSVGAVFGLTCAKYQSGEVDWSGRISRCGDEMTRAMLYEAAQAMLRSKKWSWLKAWAMQIARRRGMKKAIVALARRLAVIMHRIWVDGTEFRWTRKETVAA

SEQ ID NO: 43919 - protein, 374 aa, unidentified
MNEDKVWVGLDVGRERSQVCIVDATGAELLQQDCETKLTALKKAISIYPADRIAMIAVEASNDTHIVRKLRNVGFPVTIFETYKASKFLALRRNKTDASDARGLADLARLGRHTVSEVYLKSPECQKLRGILVMRQRLSIMRVAAENVLRSRLALHGLSMKRVYALGGLRQEVNDQLALLRAEEEVDLTSDLQPLVEMCEGLRAYLRQVDNDLQQRAKSNPVCRLLMEVPGVGPICALSFYTAIENPDRFTDASGVGAYFGLAPRRYQSGQTSRTRGISKAGSKLTRTHLVTAATVFGNTAPDCGLKRWFLALRERAGSGRARVALARKLAVILLAMWKTQSHFRYGPPGPDSLPGPDSPEPPRESCCEDIPLL

SEQ ID NO: 43920 - protein, 352 aa, unidentified
MTSLADIVDVVIGVDTHKHTHTAAVVTAATGGQLDELTVTTDPDGYAALVEMADRHSGLRAWAIESTGSYGAGLARHLRAVGEWVIELDRPNRPARRHGAKSDPLDAVRAAREALARQNLGQPRKTGDRTALSVLLTARRSAVEAATTAQCQLHALVVAAPEPLRAKFRGQTTTKMIASAARLRCHASWDLETRTTAAVLRSLARRSQALMSEAADYEHQILSIVRSWRPDLLELTGVGPIVAAVVLCAWSHPGRLRNDGAFAMVAGVAPIPASSGQMTRYRLNRYGDRQLNRALHTIVCSRLRHDPETRAYQQRRRADGKTDREIKRCLKRYVARQLFRQLEAGPGPLDRP

SEQ ID NO: 43921 - protein, 437 aa, unidentified
MTKAAAKTTAAQTTAAKTTAAQTTAAKTTAAQTTKAQTTKAQAEKAQAEKAHAKPSQAKAPRRRRGPANIFGADPHKHTLTATVLDCRGGVLGTRSFKVSGEGHRAMEAWALSLGPVERWGIEGASGLGRHTAIYLAERGHDVRDCSPNRTNERRRARQQGKTDASDSLRIARETQSDPAMPRAFKRAAGDAGPDGTAELMALWHKARRSVLKSRQHILNEAENLFCDLPLEIRELLPKVKDVKPRLAALARLDRSGAMDAATRLHLQLLDSYAREVAGLDAREKEAVKELAGLTKAAGSSLGELCGISTRSEAELLVEVGDPRRFTGEGGFARFNGTAPIPASSAEGDGEPVRYRLNRGGNRRVNAVLHIMAVTQLGHDPRAQRIFAEARHRGHSKKEAMRVLKRHLSDVVYRRMLADLGRRLAAPPNDNVKKRVA

SEQ ID NO: 43922 - protein, 341 aa, unidentified
MKNLFIGIDFSKEKVDVAIIFADGLTETAARVFNEFKTTVSGYRQLVKWVEQNSYGIDPSLWLFCGENTGGYSNGLCKFLYGRGYDMWLENAKSIKDASGLRRLKSDRADASMIAEYAMRNHDKAVMYKPLNESLEQLRELFLFRQTLVRYRCSFQVRREEKRLTMDKSPVKTMISQIGRHMVTTLEKEIEKVNKRIADLIKSDDELTEVFTIVTSVPGIGTQNAVCLMVYTDNFRRFNYDSRKIACYYGIAPFGKDSGTSVHSDPHVHYMANHQIKAMLTQAALAAVNYNHVIARYYKRLVERGKKKQVALNNVKNKLVHLVSAMVRNRQLFSPEYKISA

SEQ ID NO: 43923 - protein, 393 aa, unidentified
MQRISVGIDIAKEIHWITAIDADGVVLIDRKLLNTPTDIAALADQLTSLSGAIRIGLDVMGGIAGLAEAMLAAAGFILVHVPGLAVNRARQGTVGGENKSDPRDARTIADQVRTRADLRRIEPTTEIDLEIRLLVGRRRDLVEAQTQRLARMHDLLVGIFPGLEACLDLKTKGPLHLLTRFVTPAELRDAGKKRLIRHLQAAGGLPNVEALADRALAAAAEQAIAVPAERMTARLIRELAAEALASRSRLIELDRELEALLDRHPDAALIRSLPGMGVVLSAELIAEAGNLSRFRSADALASAAGMAPILRQSGRSRFLRRPIGGNKGLKRVFYQSAFCSLGHDDSRAFYDRKRREGKRHHQAVIALARRRVNVLWAVVQNRTPFQTGFKTAA

SEQ ID NO: 43924 - protein, 342 aa, unidentified
MQITTIGLDIAKNVFQVHGIDAKEKVVVRKQLRRSHVIAFFKALPPCLIGMEACATAHYWARELRKLGHEVRLMPARDVKAYVKRNKNDAADAEAICEAVRRPTMRFVQIKSAEQQGQLMQHRTRDLLIRQRTQSINAFRAHLAELGIVAAQGDAGVTELLAIVADEQDTRLPIDARASVIVLAAQLEAMRTLIGSIEKRIKTQHRSNEVSQRVETIPGIGVLGATAIVATAADPKVFRSGRDFAAWIGLVPRQDSTGGKQKLGPISKQGDHYLRRILIVGAIAVLRRAQENPGKYPWLTQLLARRPFKVVAVALANKMARTAWALMVHGGTYRAPELAEAA

SEQ ID NO: 43925 - protein, 312 aa, unidentified
MGDTAAVLGIDVSKDRLDIHVRPSGEAFAVERTASGLDALCSRLREIAPRLVAIEATGGFETIATAALAAAGLPVVVVNPAQVRCFAQALGRKAKTDPIDAAVIAHFAAATELEVRPLKDDATRLLGEFVGRRRQITEMIRAEHNRARRITDPHLRKSIARLAKALEKELAILDADIGTTVRGSPLWRATEDLLTSVPGVGPVIARTLIAELPELGTLDRRKMASLVGLAPYTRQSGRWKGHSRIGAGRRAVRAAMFMGAMVAKRFNPILKAFYERLLAAGKPKMLATIAVARKLLTILNAMMRDRHPWQSA

SEQ ID NO: 43926 - protein, 310 aa, unidentified
MDAIFIGIDVSKDQLDVHVRPSGEAFTVSRDGKGLEALIERLRTLSPQLIAIEATGGFETIAAAALAGAALPMAIVNPAQVRHFAQAVGKRAKTDPIDAEVIARFAEAVKPEVRSVPDAQARLLGELVARRRQIVEMTVAERQREQRASVVRVRKSILRHIKMLEKELAEIDTDIGTLVRSSPAWREKEDLLVTVPGIGNTLARAFLAELPELGSLSRRQIASLAGLAPFTRQSGRWKGKSMIAGGRAPVRTALYMAALSAISWNPPLKRFYQHLLAAGKPKMVALIAVARKILTIINAMLRDRKQWQLA

SEQ ID NO: 43927 - protein, 727 aa, unidentified
MGKGSGTTRGDARRNARRERLRALLPRDGAVIGVDLGEDKQALAVTDHDVRVLARKTVRVKAFRLGEALDWAVAQARAAGFARVTVACEPTGARWLQVQRLCAERGLPLVCIQPLMSHIAREQQDLTGHKTDESDCVLIARLAAGLHCYVPEELEEAWAHLRHLGRRRAQLITAATASGLRIADFLSVAWPVVTQACAHPFDSVTWLAALQVVTSRCGADPARLAGLGAEGFTALVRAAVGGWGGQRPAAAICGRVFAALADAEGAVTWCRRGLLRRVSDELGDLARTRAQLRAVEADMVTVLGELGLSRLGDIPGLSAVGAAAILAETGDPRRYDNSSSLVKHAGLAPADNASGNFAGQAHLSRRGRPGLRLAVWRAVWPLLRHNPVMAAKHAALTAAADAAAAGPGARQPSAAAAARARRASARVACAASLLRWIYFLTVHDATWDAAAAGAARRPPDQLPFFPRIRRRCPEPPPRRDSEPVPTSEPTPLTTLGSRPRPRPFSPARLNAVGASPGPHPRAGLSPLALRRARRTRATSAPPRAATRQRRGTPPCPQPPGPRPRPRPPAPTAKPGRQPEPVDKHPLTLVVTRVRPLGAFGVDTLRAGDGAVERLTRLVNDEPTVENWAPRAPAVFAAAEDGSGLAMTVIEAAAELAGLVRRLRTGGAAGTAVVAGGSVVTRQPLLARALEAQLRRVDAELELRVLAEEPVAGAMVLARRRLGSSLTK

SEQ ID NO: 43928 - protein, 427 aa, unidentified
MGRLKIVYPVCCGMDVHRDFLIACIAATNAQGVTEYQSRRFSTYTGSLRELRDWLLANDCKDVCMESTGKYWFPVHNILEESCHVVVSHPKFVKAIKGKKTDKKDAQWIADLFKHDLVRGSFIPPKDIRQLRDLCRYWVKLSSYMTGEKNRAQNCLTVSNFKLDDVFSNVFGKSASAITTQLLEHPGEQFDVAPFVDGRCKTPIVQIQEAVDGIFTYEQAEKLKIIRGHMDSLERHKAELESLILEIAQNYLPQIELLLTVPGIHDAFTAIRILAEIGADMTVFDTSKHLCSWAGLTPQNAESAGKKKTTRIGKSGAYLKPLLIQVALAASRGEKHPEIYGKKQALQKRRGKKKSHSCHCQETLNRHLPYSKQERAVQSCCLHPGRQESYGPPDLPRESLRDACSNGLYCFKPFSVVLVRIASHPRF

SEQ ID NO: 43929 - protein, 347 aa, unidentified
MGTPSYEGKQVYMGLDVHREFFVASCICDGVVVKRCRMPGTAEAVISLVSKEFSGASVRAAYEAGYSGFWLYRKLVAVGIDCIVVHAASIEVSSRDTVKTDKRDSLKIAQQLAAGRLRGVRVPTEEAEQRRLLTRTREQLMNKKRRVMVQIRMRLHYFGRFPESIQRRVKLQDVEDILVGLEGELQRTIGMLRDEWVELAKRIKEIDRLLVEQAKEDPLDAVYRSVPGVGPLISRILSAELGDMSQFRNERALFSFTGLTPSEYSSGGHICRGHISRQGNTRLRHMLVEASWKAVRKDPVIKEYYIKLSERIGKRKAIVAVARKLAGRIRAALRKHEHYTLDYRAAA

SEQ ID NO: 43930 - protein, 486 aa, unidentified
MLFGDAVQAVFPLGRFILHYDDRAPDALARKLNVIAPMKILSVINPHAAAMDVGSEQLHLSIAGDGPVVFGTVTDEVYRLRDYLKAQAVTTVAMEATGVYWLYAYAVLEAAGLEVVVVNGRHVRNLPGRKTDMADCQWLATLHAHGLLRGGFVPPAAIRRLQDYQRLRADHIIDAGSQVQKMQQGLERMNVKLHDVISDLVGVSGLKVVRAILRGERNPEVLLGLCDAQIQKKKRERVIASLRGTWTAEHLFALGQALEAWEFYQKLLGQCDEQIEAVLKELAGPPPATPAGEDKTTQAGKPPGKNAPQIEQLHQLLLRLCGGKDVTAIAGIGDYLLLQLLAETGTDLKARPSEKHFTAWAGLAPGSRQSGKRKGSVKRQRNRTGRIFCAGARSLVQSVDKALGGFYRRLAARKGGLAAMKALARKLAELYYRVLKYGLAYAEQGLRVYEQKYAESQRRLLAKLAAKQGFKLVSVQLQHGPPTTAM

SEQ ID NO: 43931 - protein, 320 aa, unidentified
MQTPTEVLNIGADVAKDEIVVACSQGCFPARKLANQRSALLAFLKGLPAGSRIGMESTGTYHELLAGAAHQLGFIVFVLNPKDARHYAKAVGLRGKTDRVDAQLIARMIAHEHTKLHAWIPPTPEQREMARLIKRRAKLSSLRQALAMSLKGLDGFAADLKGLRARFDQLIARIDQRVKALVEANPDRKQQVTHLRTIDGVGPVVSAALVNTLERTPLNSADAFVAFTGLDPRADDSGQHRGRRRLSKRGPAELRRLLYVAAMSAKKTKTWKPLFEHYRAKGLSSTAALVILARRIARTAWSMYTYKTEFDPARLTKSLT

SEQ ID NO: 43932 - protein, 326 aa, unidentified
MQYILGIDVSKNTLDVVLIAESGTFHKTIHNTSQGYQQLQKWLVDHRAQETHACLEATGQYGEAVAEYLYECGYQVSVVNPARIKRYGESKLHRNKTDKADAGLIAEFCQKENPAPWQPLSPEIKHLRALIRRLEDQKANLRQEVNRLKSGERDSWVVSDLQIHIDYLQDRIAATEKEIQDFINKTPGLKSQQRLLTTIPGIGGLTANTLLAEIGDISAFDGAPQLAAYAGLNPQGHRSGSSVHKKTRISKQGRSELRRCLYMPAVVAMSYNPVIQNLSYRMTERGSLKMEIVVAAMRKLLHIAYGVLKNQLPFDPYYGTQFDFSS

SEQ ID NO: 43933 - protein, 338 aa, unidentified
MTILTVGIDLAKNVFALHGVNEAGKPELLQPRVPRTKLHALVASLPPCTIGIEACSGAHHWARLFQAYGHTVHLIAPKLVMPYRMSGKRGKNDAADAAAICEAVSRPNMRFVPVKTVEQQSRLMVHRAREGYVQQRTATLNRIRGLLSEFGIVLPLKAEVVRREACNHLEDLPGYANTVIGDLLSEVHHLDERIKQYDRHIRTMARDCTPAQQLMQLTGVGETTATAIVAMVGNAHEFDSGRQFAAWIGLVPGQYSSGGKSRLGRITKAGDAYLRSLLALGARAVLNAAANKTDSLSRWAMQLRQRRGYWKAVVAIAAKNARMAWAVLTKGESFKLPA

SEQ ID NO: 43934 - protein, 346 aa, unidentified
MKLIKKVIGVDISKDSITVRFGTLDTEMTQVISKPFTFTNNTAGFKELLKTISKVHYFKSEELSSKDIPIWFVMEATGVYYENLAYFLTENKFSISVVLANKIKNFAKTLENKSKTDDIDAANQTKWGLEKPLKAWVPPSKVFKELKELTREHLSINKSITQLKNKLHAKGYSYEANKETVKRLNQHKKFLQQQLKQVKNQILALVKSDNELDEKIKTVATINGVGVMTVIKVIAETDAFALIKNKNQLASYAGYDIVQDQSGTHKGKTKISKKGNAEIRSALYMPALSAIKYNKNLKQLYIRLCKIKINKKIAIIAVARKLLLLIYSLWKKNEKFIQNYPNVKAA

SEQ ID NO: 43935 - protein, 370 aa, unidentified
MAQGSTLFVGLEAHKETLAVAYVAEDREAEVVSFGTIGTRQGDIDKLMRKLQAKGKRLHFVYEAGPCGYWLYRYLTKKNLKCWVVAPSQIPKKAGDRVKTDRRDAVQLARLLRSGDLTPVYVPAVEDEAIRDLVRAREDALKDSKAAKARLKAFLLRQDIRYEGRANWGPAHLRWVAEVVCPTPAQQIVFQEYVRAVSEHTERLQRLDAELQTQVKTWRWVPVVEAIQALRGVQFTVAVTLIAELGDLSRFENPRQLMSYLGLTPSEHTSGERRRQGAITKTGNSHARRALIEGAWAYRYPAKVSRPLQLRLEKLPKVIQDISWKAQVRLCKRYRRLMARGKNANQVVVAIAREMAAFVWAIAREVEVAR

SEQ ID NO: 43936 - protein, 392 aa, unidentified
MTYFIGIDLAKYKHDCFIMDENGEVIRDSFSFNNDKEGFNTLLNVLNSLDLNQEKKIGFESTGHYGSNLKIFLERNGYSFMEFNPLLVHRHFKSETLRRTKNDKVDARKISSYLYTREYKPNPNSSYHLNCLKSLTRTREALIKERTRHIIHMTNVLDKMFPEFKSQFGNQGLNASSAMYLLENYGSPSKMANMTRASYDKMKSELRHTISYAKFLKIKELAKNTIGNEDEILVFELNTYLELFKELDKKILEVEDKITKEFSIMKCHIASIKGIGIITAAGILAEIESIDRFDNPGQLCAFAGIEPSENQSGTHDGGGKMVKHGSSHLRYYLMQSAGYMLIHNPVLYEYYLKKRNEGKCHTVALSHVAKRLTRIIFYLEKNDTDFNIDKMR

SEQ ID NO: 43937 - protein, 379 aa, unidentified
MMTPSTAATCFVAIDLSKSKWLVALDAPQLAKIKSVRLDGFDTAGLIDLVRATVAEATELCGPDQRPIVCFETGYDGFWLQRLLANEGIETLVVDPTSFLVNRKARRVKTDRVDAEGMVVLLKNYCSGDRKAFRTVRVPTVAEEDAKRFHRERKRLMSERTGHINRIRALLALQGVRHINPAMVTWRKKLEGLETADGRPFPDQLMREIVRSFERLELTNKMIKALAEERDEALAAESGQFPEHEKAVLLEGLRGVGRHSAMLLSAEVFGREFKNRRHLSSYLGLTPSPYSSGDVERSQGISKAGNRPARTLGIELAWCWLRYQPQSALARWFRKYTAERPGVRKKVAIVALARKLIVALWRYVETGLVPSGAVLKAEV

SEQ ID NO: 43938 - protein, 387 aa, unidentified
MPQPNDLSRSLVALDQNSTIIAVVELSHSSWLVGGVVPGIERQPRKKLEPSPERLLALLHRWRDEAVRAGSTITRIALAFEAGRDGFWLARWLAARGVEAHVIHASSLAVSREHRRAKTDRLDTELLKRGFLGWLRGERGHCSMARVPTIAEEDAKRPNRERDCLVGERTRIVNRIKSTLVRLGIRTFKPTLRKAAERLATVHTPEGMPLPPNTLAELQRDIARLGLVVSQIREIEDARRKRLEEAPETGPHAMVGLLARIVGVGAETADMLVQEVLSRPMRDRRAVARYAGLTGSPDESGARRREQGLARAGNARVRRGMIQLAWRFLMFQKESALALWYRARTADSRSGTRKTMIVALARKLIIALWRFVTTGEPLEGVVLRPAT

SEQ ID NO: 43939 - protein, 379 aa, unidentified
MIESLPEAGCGRSIDLGSTETVGQRGRHTRISNKARTVVRVNQTRMMQGRAKREKKPMTEEAVCVGVDVAKNTLDIAISNSKETRQFNNDYQGITSAVHYISSLKPARIILEAPGHYEMPLAASLQTCHLPVVIVNPRQVRDFARATGVLAKTDSIDARILALFGLQVKPEIRLLPNQKAREMGNLLARRRQLIEMLTAEHNRLIQAYDSIRQSIEIHIKWLEEAISAINNDLDRQIRSSPSWCEKDNLLKSVPGVGKIVSTTLLIELPELGILNRRKIAALVGVAPLNRNSGTMRGKRTVWGGRAKLRAVLYMAALVGVRRNPVIAAFYQRLLNAGKAKKVALVACMRKLLTILNAMIRSKTFWSSNNIMQCVTVEAK

SEQ ID NO: 43940 - protein, 345 aa, unidentified
MPSFAAAGHANTIKNNSISGRFALIKNHESIDIFIGVDVGKSNHHAVAIDRTGKKLLDRALPQDEAKLRAIIRAVAGKGTVLLVVDQPSTIGALPVAVAQSEGILVGYIPGLAMRRIADLHPGEAKTDARDAMIIASAARTMPHTLRSIVISDEQAAELSMLCGFDDDLAKQATAASNRIRGLLTQIHPALERVIGPHLDHPAMPELLIKYPSPQALSRAGQSRIAMLLAKHAPRAGKRWAAEIFAALGEQSVVVAGSGAAGLVLAQLAAMLKQLRTAREELLTQVEALVEAHPLHLVLTSMPAVGVRTEARIITEVAGKEFQSSGHLASYAGLSPVTWRSGTSI

SEQ ID NO: 43941 - protein, 403 aa, unidentified
MWVKTVVKFQSKGCDLMIYVGIDIAKDKHFCAIADSDGEILEQPFGLDNNRTGYSLLLSKLKPFSRESVLIGMESTAHYGENLLFFLHDNGYSISVINPIQTATLRKAGIRKTKTDAADSLLIIKSLILNKNRVFDKQDIAYLRLKNLCRFRSKQKKSTTRLKIQLVTFVDIAFPELQTFFKSGIHGKACYELLKSCPAKDDIAALHLTRLGNLLSKSSHGRFGKEEAIALKSLAKSSVGTSDTSISHQIVSTIEQIELLEKQTASLDSLIISQVSDLDSVLLSVPGMSHIICAMILGEIGDIKRFSEPSKLLAFAGLDPSVNQSGKFKAKSTRMSKRGSYLLRYALVFAAWNVCRNNNTFNTYYELKRSQGHSHYSALGHVAHKLVRVIFKMLKDNVAFSLD

SEQ ID NO: 43942 - protein, 371 aa, unidentified
MNAVGIDVSKGKSTVAILRPFGEIVAEPFDVTHNDQELKELVERLKLLIGETKVVMEYTGTYFEPIARALHNAGIFVSVVNAILVHDYGGNSIRKVKTDKKDALRLASYALDKWLDLPEYTPEEDIRKTLKILNRQYIQYTKIQTMQKNNLISLLDSVFPNANSLFTSPQRKSDGHEKWVDFVSKFYHVDCVSKLSLSAFKLKYQSWCRKNNYNYSESKAEKIHTYAREQVSTLPMTDSVKLLIERSAGQLNSILETLAAIRSEMDRLSSQLPEYNTVMDFYGVGTVLGSQLMAEIGDTRRFHNRKAITAFAGLDAPPYQSGSLDVKSRSISKRGSPSLRKTLFQVVDVIIKKQPENNAVYQFLDKETIRG

SEQ ID NO: 43943 - protein, 415 aa, unidentified
MKTFAELTHFAGLDWAKDHHDVVIVDRQGQIVAQFTFPHSAEGWQRWCQCVQSYPAIGVALETSSGPAVEQLLESGATVFPMNPKSAKSYRQRKAPSGTKTDQLDAWSFADGLRTDGHGWRPLAPLDPVVQELRLLCRDEVDLTQQRTALINQIQQALSEYYPAALNAFEDWTAPYTWEFVKAFPTPEALVNAGRRRWENFLHAHRLYRPQTAQQRLDAFAKATAFAASPGITRAKSRLVLTLAATLLALEKHLEQYRQAIAQLFAEHPDHDLFGSLPGAGEKLAPRLLSEVGQDRNLFDDVQGLQCVAGTAPVSFQSGQVDRARIRWHCNKHLRYAVHLWADCSRKYCVWAQTYYQSHRAKGHTHASALRRLGNRWLKILWTMWQEGKTYDSERHARNQQEHGSWLLKLETAKP

SEQ ID NO: 43944 - protein, 309 aa, unidentified
MATSSYIGIDVSKDRLDVAVLGEECSWQVDNTPDGIAELVQRMAEMQPELIVVEATGGYQRAVVEALFWAGLAVAVVNPARVRQFARACGLLAKTDKLDAQVLAVFGQRVQPRPYEGKSEAEKHLSALLVRRKQLEEMLKAEQNRLRTISPSLRGSVERIIAILKEEKKHLEEQIEQFLNEQKVWQEEREILSSAPGVGMVTTATLLADLPELGKMDRKKIAALVGVAPMNYDSGKKRGYRKTKGGRGDVRSVLYMSTLVATRYNPVIQTQYQHLLKRGKEKKVALTACMRKFLTILNAMVRDQQPFRV

SEQ ID NO: 43945 - protein, 444 aa, unidentified
MIANVTPEPAPAAPSLALPLGEFACCIGLDWGDEKHATALQQRGSHAIECAELSSKPEAVHQWLESLQSRFGRLPVAIALEASKGAIVDILLQYPWLTIYPVHPATSRRFSKAFAPSGAANDEPDAKNLLEILRCHRHKLRALAPADEQTKRLAAQVQIRRKIVDQLTDLGNQLTSLLKSYFPQALELTGEDRLSGLSLAFLQRWPDLISAKKAKPETLRSFYYKHQVRRSELVEERLELLRQARPLSQDPLLIEISLLSLPRLLAQIQVLQKHLAILEEKIRESFAAHADAFIFKSLPGAGPAMAPRLCALFGSDRERWLDAAEMQKYYGIAPVIEASGKQRWVHWRWNAPTFQRQTLVEWAGLTVRYSPWAKTYYDQQSQRGKARAAILRALAFKWLRILFKCWKSRTPYDDATYMEALQKKGSPLNRGQAIQFPKKDPKNS

SEQ ID NO: 43946 - protein, 349 aa, unidentified
MRFYTNQHRHYCGIDLHTKTMYVCILDRDGQVLVHKNLPSNPESFLEVVAPYRDDLVVAVECIFTWYWLADLCAAEGIAFILGHALYMKAIHGGKAKNDKIDAHKIAMLLRSGMLPQAYVYPAGMRATRDLLRRRLHLVRKRGQLLAHIQMTNQQYNLPAFAKRIAYPSNREGVADHFEDRAVRKSVAVDLALLDRYDTLLTDLESYLVRQAKQHDPQAFQLLRSIPGVGKVLALTILYEIHDVHRFDRVQQFASYARLVKCAKESAGKKHGTSGAKMGNVHLKWAFSEAAVLFVRHNEPGKKLLAKLEKRVGKGKALSILAHKLGRAAYYILLRGKAFEIDRFVATVN

SEQ ID NO: 43947 - protein, 341 aa, unidentified
MDKITTIAIDLAKHVFQVAAENARGEEVWQKRLRSRAALHAFIEGLSPPLKVGLEAGLGAQAWARVLAARGLEVHVLPAQRVAEHRSGAKNDCNDARAILRALHDRSIHPVPVKSTVQLTMQALLRVRAGWQRRHTAVANQMRGLLLEHGVAIAQGDAALTRALERVLPDAQVPIPDRVRALLAELAGEWEGLSQRVQAMDPELAELARADPVARRLCTIPGIGPVTATALVCKGLDPVRFRNARQFAAYLGLIPDQHSSGTKLRLGRMSRRGDRYLRGLLVSGAHAVLRHTRRDALDAGHRRILHWQQRHGSKAIAVRLANHNLRVVYALLRDHADYHAA

SEQ ID NO: 43948 - protein, 346 aa, unidentified
MEHYAGIDVSMELSSVCIADANGKIVKEAKIASDPDALVAFFKQEGFPVARIGLEAGPLSQWLYAGLAQAGFETVLLETRHVKAALSAITVKTDRKDARGIAQLIRMGWFQPVHCKSPGSQELRALLVARKQLLGKLRDMELSIRGILRGFGLKMGVATRRSFEERAWELSAGQTLLETIVGAMLVARAALQTEYTRLHKTMLAIVHVDEVCRRLMSVPGVGPVVAITFKTAVDDPTRISKSKAVSPLFGLTPKKYQSGETDVTGRITRAGDAMVRTALYEAANILLSRVTRFSALKRWGMEVAKRRGLKRAKVALARKIGVILHRMWIDGTDFCWTKVERGVAVN

SEQ ID NO: 43949 - protein, 315 aa, unidentified
MTATIAQTVGVDISKLTLDVYLHPQATARQFPNTAAGIKTLLAWLNQTSIYRVIFEPTGAYHRVLERQLGEDGVPMVKVNPLQARRFAEAIGQRAKTDAVDAAMLARFGALDALQTRPVVSQTLSTMKELLVARRGLVKDRVAATNRNHVHRAPLLKRLADQRLRQVERQIAAIDAELRALCRADAELKAWLDILVSIPAIGEATALTMLIEMPELGAMENKCVASLAGLAPIARDSGQHSGKRFIRAGRAHLRQALYMPALVAIRFNADMKAKYQALLANGKPPKVAITAVMRKLAILANALLREQRCWAPRAA

SEQ ID NO: 43950 - protein, 327 aa, unidentified
MRQVKSLAEKAKTTVAFDVCKAALDVHIRVDGKAFQVPNTYEGFDQIALVLADYDVSLVLMESTGGYEDASACYFQSVGYDVAVINPRHGRNFAMAMGKFAKTDRIDAAILADFAAVIDTRPDRARFIKPPTDEERKFLSQMVARRRQVVDLLSTEKQRLSHADDYAKQSINKVVAFIESQLDEINKDVSFYLKKNYSGLSKMLSEIPGIGELSVGLLVGDVPELGQIGNRQLSAVIGVAPFNHDSGKMRGKRCISGGRQNVRNVLFMGVMSATRYNPVIKAFYDRLINKGKPKRVAYIACVHKLLRIINAMVRDGTSFNPDLHAVS

SEQ ID NO: 43951 - protein, 347 aa, unidentified
MKKIKLVAVDLAKRCYQVGAIDQHGKLIYNRKYSPAKFALAMQQLEPTTIAMEACAAAHYWGRKLQALGHEVRLVPPQHAEAFRRVHKSDAHDVLSIAEAAQRPNIHFVPVKPIAQQDLQSLGRIRERLIAERTAIINQARGLAREYGVNCRKSREALMNELPLALADADNELSAIARAALRELLQEITQRSARLKQLMQRMRELADSDPAYEQLQSIPGIGPITAPALLAKMGHGQQFHSGRHCSAWVGLVPRQHSTGGRTQLGSITKNGDRNLRTLLIHGARTVVRWIDRRQDALGQWVRQLLARGGKNKTVVALANKLMRIAWAVLTKAEPFDLNKAFRPQPAR

SEQ ID NO: 43952 - protein, 389 aa, unidentified
MHYVGIDIAKRKHVVFTLDGDGEPVGKALRVTNDREGFDKLLAHLSQLESTVTVGLEATGHYWLALYSVLTEAEYEVIVLNPLQVQAYRKSGIRKRKNDRYDALWIADYIRISRRLQASPEVQPDLVQLRELTRFRASLSQQIGDCKRRIIGILDRVFPEYETLFSSVFIQTSRQLLAEALTPEEFADFDLSELSQLLQQTSRGRHGRAKAEEIQALAERSVGVGFLGDALRVQLTCLLQQLALLEQQLKELDVQIEALMDRLPQYITTIPGVGPVTGATILAEIGDVQRFPAPEKLVAFAGVDPVVYQTGQFEARNTRMSKRGSPYLRHALWQAAFAASRFDPQLRDYYQRKRAEGKAHGTVLGAVCRKLLHRVYIILKEERPYVIRD

SEQ ID NO: 43953 - protein, 322 aa, unidentified
MNKDIKYYGIDISKDVFDVCDSTGESSQYENSVKGFKRFVKTLSVNSHCVMEATGYYHYQLAYYLLESAVKVSVENPLSIKRFIQMKLSKVKTDKSDAKMICEYAQKVEMRLWEGQSKNQVECLQISRLLDLYFKQSTAVKNKIHGENVLGKPSSLVMKSLQQSKRNIEKLIKELEARLTELVKSEHQELLTLLESIPGMGRKTSMMLIVLTDGFNRFDNAKQLCCYSGLTPTIRQSGSSVRGKSRISKVGNRKLRNLLFMCSFTACKHNKSCKQMYDRIVAKGKSKKLALIAICNKLLKQAFAIAKSGLPFDQSYRSKLGI

SEQ ID NO: 43954 - protein, 415 aa, unidentified
MEASYTIAGIDVHKKMLAVVVTDVGKEGEFQFERRKFGALDSDLRALAKWLAEREVREAVLESTAQYWKPVWRQLEGQCKLYLAQAQSNRAPRGRKRDFADAERLVRRHVAGELILSFVPDPEQRLWRTVTRSKYQLTGDRVRLQNQLEALLEDSRIKLGSCVSDLLGLSSRRILRAMADGETDPACLAALVEPEVRASQETLRDALTAAATLNGLHRRILKLFLDRQELIDQQMAELDQAIADALRPFHEAVQRLAEVPGYGVDSAQQVIAEVGPQAATFPSAAQMASWVGTCPGREESAEVSKTNRSPKGNRQMRRVLTQVAHSAVRTKGSVFQILYYRLLPRLGQNKAIWAVAHRLCRLTWKILHQGVAYKELGQRIDPKLIKQRTNKLIRQLRTLGYQVQLTPLSAGGATV

SEQ ID NO: 43955 - protein, 337 aa, unidentified
MRYLGVDLHSNNFTVCFLGEDGTHTFEKYLLTEFDTFKSVLHLDDHVAVEATGNSRFFHTQVSPLVADCVVVNAGQFGVIKQSVSKTDRNDARALAQFLSKGLLPSSRVKDELHAQINSLAQTRDRLVKLRTALLNKVHAHLKAHGRESRKEADDHPGNLRKVLGEEWSTSVKLELEVIATQIGSLTEGVKKLEREICELGKQLAGHNCLTSIKGIGDYSGAVLLSIIGDVNDFADEDKLASYFGIVPRVKDSNQTQHHGAITKRGSKLGRLVLVPCTLTAKRFSPYLKQYYERIKERRGAGKAIIATARKFLGIIYRTLKNGWVFSDFPNFVLAEQ

SEQ ID NO: 43956 - protein, 340 aa, unidentified
MKQIKRIGIDLAKSVFQLHGVDAHGHGVLRRQVKRAQLSAFFAQCPPCHIGMEACGSAHYWARELGKLGHTVRLIAPQFVSPYRKNDKNDGNDAEAICEALGRPTMRFVPIKDEEQQAVLCVHRARSLLVEERTALVNQLRGLLAEYGLVIPRGVARLRAALPGILEDAENGLPLLAREVFADLYERLRGLDTHIAAYDRRITHLARTMAAAKRLMQVEGVGPLTATAVVASVGDARLFNNGRQFAAWLGLVPRQHSTGGKSRLGRITKRGDVYLRTLLVHGARSVLMHRAEKTDAKSRWGAALQARRGFNKAAVALAAKHARILWALLAHEADYKPATA

SEQ ID NO: 43957 - protein, 387 aa, unidentified
MSKKIVAPSYVAAMERAEADPSTARFWVGLDVGYKSTAVCVLDCDGAIVHQVSMKSNATEIGRYLRKNFKSHVTLLGIESGGLTPHLTTKLRVQGFQVAVLDARQVHRVLSVKRNKTDTNDARGIAEIARTGREYLTEVYVKSNLCFEVRAYLTMRDRLVKQRRETEAMIRGLVRVYGGRIEGGTETAASYRSRAIDQMCLIADTEGVDLRPRVLPLLDLCEGFYVEANRIERELELLAASNPVCRRFMEIPGVGTITAVSFYSAIEDPTRFRHVDDVAAYLGLTPRVYQSGERLAHGGISKMGNQLTRTHLVGAATVMLSNTRSFSTLKDWGLRLSKRIGFNKAKVALARKLAIIMFSLWRDGTHFMAKAADVPAHRQLMQSRMPA

SEQ ID NO: 43958 - protein, 362 aa, unidentified
MNKGSKKSAVTTKPSKTVGLDIGDRYSYYCVLNADAELMEEGRIRTTEEALRRHFADSQRRRIALETGTHSPWISRLLQDLGQEVIVANARKLESISASRTKNDRHDAEQLARLAHSDPKLLSPVRHRSPERQRDLNLIRARSVLVRGRTMIINAARGLVKSSGGRLPSCSSQSFEEKVKASLSAELADLVMPLLTQASSLSQQIKKMDQRIDQLRERYAEIGILRSAPGVGPLVAATYVLTLDHHQLLRQSRSAGALLGLRPGQSQSGDYDPQCCITKTGNSYLRSLLIQSAQYILSRFGPDSALRKWGLKLAASGGKRGKKRAVVAVARKLSVILHRMWRSGQRFLAFPQSAIAVAAVEA

SEQ ID NO: 43959 - protein, 441 aa, unidentified
MSLNDLIMIDWRGQMTRFTTDEFAAFIGLDWADTKHDICLQVAGSAKREFQVLEHRPEVIDAWATDLLQRFQGRLIAIALELNKGPIVEALRKYDGLVLLHINPMMLARYREAFTPSRAKDDPTDAELQLDLLLRHRDKLKPLAPQSPEMRALSQLVEHRRRLVADRVRITNRLTSALKTYFPQVLQWLPNKETQLFCDFLSQWPTRKSAQLARRSTLARFFRQHHVHGEQRINERLEAMKSATAFTSDEGIMRPQALLVKALVSQLRVTLEALGNFDQAIAEQAQHHPDFALFEALPGAGAALAPRLLVAFGEQRERYGSAAEVQTSAGIAPVLERSGKQSWVHWRCQCPKFLRQTFVEWAAESIQFSFWARAYYQQQRDKGASHQAAVRSLAFKWIRIVFRCWQTGTPYNESTYLAALQRQGSSLIPNLGKSAKKGENT

SEQ ID NO: 43960 - protein, 353 aa, unidentified
MAGRRRHVIGGVDTHGKTHHAAVIDRTGRVLGDQEFRATTAGYQQLLAWLNSFGRVSEVGIEGTGSYGAGLTRHLAGAGITVVEVDRPDRAQRRRQGKSDPIDAIAAARAVLSGRATATPKLRTGPVEAVRVLQVTRRGAVKARTAALNQLRAIIVTAPEPLRGQLSGLTPAALLAACRDLPVEEDRLHDPAQAVATALRALAERIVALTTQTTQLSGWLSALVATTAPRLTAMLGVGPEVAAQLLATAGDNPDRLHSEAALARLTGAAPLPASSGRTDRHRLSRSGDRQANKALYTIVLTRLRYEPRTRAYVQRRTQQGLTIKEIIRCLKRYIVREVYQALIADFKALAAAA

SEQ ID NO: 43961 - protein, 487 aa, unidentified
MNRKTNTPEMQEEKCADTKRGRKPTRMLPPANLEGMREQVETIRAGLRSYTWKDLETKGKFSKNEKLSFISEDMLVVGCDVGSETHYARAIDWRGRELSGKAFPFSNDASGFQMAREWALDIAVRNGKNQIVLGFEPTGHYWFALAVWMVSNGISVVQVNPHAVNKTKEVEDNSQAKDDRKDPKLIANLVKDGNYGMPYLPEDVYAEMRALSMMRDQLTEDKGRDMNRLHRELKIVFPEYREAFSKIDGDFTISLLKRGLLPSDLAKLGEEGIRKIWHEDKLRGAGYRRVKDIVNFADKSVGLTQGSEARRKAIVFFANQIEYLTAELKEIEAMLAAKCREIPFAENILEIKGLGVEIMAGIVSEMGDISRFDDAKEIQKLSGLGLVACSSGKHKGQTQISRRGRKKLRYWLFQGALSVVSHNEAFKRIHLYYTTRAENPLKKMQSLIVIACKLLRIIFTILKRGVRFDPDRMLKDIVYPETAKAVA

SEQ ID NO: 43962 - protein, 348 aa, unidentified
METIYERVGALDVHKAQVTACVRVPDSAGRRDPQLAEFSTTVAGLMALRDWLAAYRVTHVAMEATGVYWQPVWHILEDDFELTLCNARHVKQVPGRKTDLSDAQWLCQLMEAGLLRGSFVPPKPQRQLRTLTRYRKTQIAERQREANRLHKALEDTGIKLDCVASDILGASGRAMLDALVSGTTDPEILADLASSLTGVARRTAEVMVAEIGVDMSVFPTAGHLPSWAERCPGNDQSAGKRRSGRTRKGSKWLGIALEEAALAATRTKNTYLAAQYQRLRPRIGHGRALGAVKHSMLVAYWHMFTTGETYRELGGNYFQTRDPERITKRLIAKLQELGHAVTLEPAAA

SEQ ID NO: 43963 - protein, 369 aa, unidentified
MGDHITYVGLDVHKDGIVVAVAEGGLRGEVRDYGRIANTPAALDRLARKLSREGVKLRFCYEAGPCGYGIQRHLSGCGHECVVVAPSLIPRRAGDRVKTDRRDAASLARLHRAGELTAVWVPDAGHEAIRDLVRARLDAVHALRRARQQLSGFLLRQGCHYGRPAWTKLHRRWLAGLKFEQAVHHIVLEDYIAAVEAAQARRDRLTTQIEAMLADWTLAPVVAALQTMRGMALVNAATLIAELGDLSRFANPRQLMAYLGLVPSEHSSGASVKRGGLTKAGNSAARRLLIEAAWCYRFPARVSRELLLRQEEQPKPIREIAWKAQLRLCARYRKLARTGKPANVVTAAIARELAGFIWAIARRVPPTAG

SEQ ID NO: 43964 - protein, 396 aa, unidentified
MPEIWAGVDVGKTHHHCAVINAEGSRLLSRRVQNDETELLKLIGDVLEISRDVLWAVDLNHGGASLLIALLASHEQPVAYLTGLAVHRASATYRGEGKTDAEDAFVIADQVRVRRDIGLLRPGDEIAVDLRTLTTRRLDLVFDRTRQINRLRAQLLEIFPALERALDLTNQGPLVLLTGYQTPAAIRRAGAKRIETWLKNRKVRSAAALAKTAVQAAQAQHTALPGEKLAAAMVVRLTKGVMALDEEIAELDALIEARFREHPHAQVIRSLPGMGPRLGAEFLAATGGHMDAFGSADRLAGFAGLAPQPRDSGRISGNLRRPRRYHRGLLRSMYLSAMVSLHCCPASKAYYDRKRREGKGHKQALLALTRRRINVLWAMIRDGECYHASPPLPAAA

SEQ ID NO: 43965 - protein, 404 aa, unidentified
MNNVAGVDVSKGKSMVSVLRPFGEVVAKPFSVGHTGSELKELADYLKSLDGETRVVMEHTGRYYEPVARFLHEEGIFVSAVNPKLIKDYGNNTLRKVKTDKADARKIARYGLDNWVELRQHTPMDTIRIQLKTLNRQQGLYSKTKTMMKNNLIALLDQTYPGVNDLFDSPVREDGSQKWVDFATTFWHVDCVRNMSLAAFTERYRKWCKRHGYNFRQGRAVEIHAGAQDLIAMLPKDALTKTMIWQAIDALNAVSMSLEQLKTEMHTLAAQLPEYPIVMAMRGVGDSLGPQLMAEIGDVTRFTHRNAITAFAGVDPGADQSGIHEAKSTRASKSGPPDLRKALFLVMDCLLKTMPQDDPVYRFMDKKRAEGKPYLVYMTAGANKFLRIYYGRVKEYLASTENSD

SEQ ID NO: 43966 - protein, 370 aa, unidentified
MIIVGCDFHPSFQQVAFLDTESGEVEEKSLTHSSGEAEQFYGQLARPALVGMEAVGNSQWFVGLLERLGHELWIADAAQIRASYVRQQKTDRRDAGHILKLLIEGRLPRIWTPSTEMRDHRQLLVHRHKLVQLRTRVKNELQHLALNQGMQRKWRLWTAEGRGKLEALSLDRWASQRRHDLLQLLAMLEGQLESLTQAVTEVAETYPSVRLLMTQPGVGPVTALGFVLTIGDVRRFSRSKQVSSYLGLIPREHSSGGKQRMGSISKQGNRLLRTLLVEASQSVVRFDPQFRTEYQHRCHQKHRAVAKVAAARKLAVRLFWMLRTQRPYPDVFASRAADLYHGRLSQTVKLNRHSRTRQRLGVRIEESWPK

SEQ ID NO: 43967 - protein, 411 aa, unidentified
MINAVGIDVSKGYSTIAVVDSLGKVTVSPFDVNHTVSELGRLADDLKRLQGETKIVMEATGIYYLPIANALHAAGLNVYAVNPILINEFGNNSIRKRKNDKADARKMGRYAIANWYELPPEYMPAEDIRQILKAVSRQYSKYNKVKTMLTNNLISLLDRSFPGLNQLFTSPVREKDGHEKWIDFATRFWHADCVAGLTPKVFAERYRKWCKRMGYYPVGIDEIHAFARQCVPVIPKSDNTKMLITTAVVQVNAVAETLNATGIEMNRLAKLLPEYEIAIGLRGIGKVLAPQLIAEVGDVLRFPKKSTLVAFAGLEPTPNDSGQFQGKQPISKKGSPHLRRTLFQIMDGLLQHSPVDDPVYQLLDRKRAEGKHYYSYMCAGSAKLLRIYYARVKEYLSKMDEDTPNREEQSQ

SEQ ID NO: 43968 - protein, 345 aa, unidentified
MKITTVGIDLAKNLFQIHGVDERGKAVLRKQLRSVQVAMFFGNLPPCVIGMEACASAHYWGRTLQRYGHTVRLMASQFVKPYVKTNKNDAADAEAICEAVSRSNMRFVPIKSVEQQAILSVHRVRQGFVKARTAQTNQIRGLLGEFGLVIPQGIINVTKRVPELLEDASNELPVPFRHLIERLTQHLKELDRQVKEFEKEIIAWHRGSELSRKLEDIPGIGPLAASALVASIADPHSFENGRQVSAWLGLVPRQHSSGRKPTLLGMSKRGDAYLRTLLIHGARSAILAAQRKVDNTNGWLTNLLTRRHPNIAAVALANKNVRTVWALLAHGREFKANYTRHRMAA

SEQ ID NO: 43969 - protein, 378 aa, unidentified
MEQLYVGIDVSSTKHAAYLMKPDGDKFSSFPMQNDRSGAKMISEKIVSALTKLGLKDVVIGMEATSIYGDNLVYALREDGNLGRFHRKIHVLNPKQVKNFKKSYPELPKNAPVDAFVIADQLRFGRIGKEVYMDDYRYKALQTLTRARFYAVQNLTREKERFANYLFLKCSGIAQSKDIPNTSATTLALMEHFETVDELANADLNELTAFVNRAGHGRFADPEATAKLVQAAARGSYRLPKTVNDSINQVMSASIAAMRALESQIRTLEKAIEKQFEIIPNTLISIPGIGKVYSAGIIAEIGDICRFTGQASVAKYAGLVWTQHQSNEFEAEDTRLIKSGNRYLRYYLLEAANSVRRCDSEFRRYYDLKFKEINAHSL

SEQ ID NO: 43970 - protein, 456 aa, unidentified
MVRQKRFRKRRDISLIHPHAAAVDIGATMHMAAVDPDCDPEPVRSFGTFTGDLHRLAEWFAQCGVKTVAMESTGVYWIPAYEVLEQRGFEVVLVNARDAKHVPGRKTDVSDAQWLRRLHAYGLLRGSFRPQGDLAALRAYLRQRERLLDYAAAHIQHMQKALTQMNLQLHHVVTDITGATGMKIIRAIVAGERDPEVLAAHRDPHCHASAEMIRHALVGNTREEHVFALTQALELYDGYQDKVAACDGRIEAVLKRLRATAAKPAGRLPPARHTTKQPNAPAFDVRAALYAVLGVDLPQIHGLGPTLALKLVGECGTDLSAWPNAQHFTSWLCLAPGNKISGGKILSARTRRSGNRAAALLRLAATTVGRTQTALGAFYRRLSARIGKAKAVTATARKIAVLFYNTLRHGLDYTDPGAAYYEERYRHRVLTNLQRRAKAFGYVLQETGSVPPMAVS

SEQ ID NO: 43971 - protein, 339 aa, unidentified
MELYCGIDLHSNNCVVAILAKDLEHVACRRLRNDLSQVVGFLEPYREQLVAVAVESTYNWYWLVDGLVERGFDLRLVNTTKSAKYSEMKYTDDKHDARWIARLLALGILPEGYISPPEERRLRDLLRRRAFLVRKRTDFLLSMGTLVQRSTAQRVESVVMAKWNGKEVRALLRDPFVAESVIAMIPVVRALTRQIKAVEKVVMAEAKPRKEYELLKTAPGIGDILAPAIMYETVTIDRFRDAGNYVSYCRCAKSVHTSNDKRKGAGNRKNGNKYLSWAYSEAAHHAARVEPLARQYLERKKKRSHPMVAKRALAAKIARGCYYVLRDQTPFDAIRTFQK

SEQ ID NO: 43972 - protein, 424 aa, unidentified
MNFKMQDKQNQLIERISDTHLIVGVDIAQQLHVARAVNFRGIVVGNPLTFENNEEGFINLLNWIQELKRLKNLDAAIVGMEPTGHYWLNLSKWLYNQNIEVVTVNPHLVKRNKENRDNTQSKSDKKDALVIADMVKNGYYSFIRPSSESFEKIRVLMSNRDVIVKRLVLSINQINRWVDVVFPELRQVFKDVSCKGAIATLRLFPTPDEISSMESIDVMTAWKSLMKRQPGPKKAQTLINLAKISIGTKQALDAYKLHLEQLLEEYDLAVKQLERVEQQVKEVLNQIPIAKNLLMIKGISEISLAGILGEAGDLSGFSHGNSLLRHAGLHLAEASSGKWKGQIVISKRGRSRLRRFLYLATMSLVMNNPEFKAVHSHNVKVKKIKKMKSIMKLIGKLARIIVGIARRNESYNPQKVQATIPLAA

SEQ ID NO: 43973 - protein, 343 aa, unidentified
MSNDTRIAVDVAKAVFEIAISDRPGHVSRRERLPRGQFLAFMAQQPEATVVMEACGSAHHWGRKIQGLGHRIVLLPPHHVRPYIRRNKTDRTDAKGILEASRNEEIRPVPVKTVGQQVLTSLHRLRSGWMTERTARLNALRGLLRELGVFIPMGAREVVPAVWSLIEDADSDLPEALRPIFAEACREIREIETRIKQVECQLEVTAEQLPAVEYLRTIPGVGLLIATAFVAFIGDIRRFPSGRHFASYLGLTPREYSSGLKRHLGRISKRGDGYLRTLLIHGARSVLMHARRQQPDRLREWANKLAQTHVHNKAAVAVANKLARIVWAVWRHERPFALMAKAA

SEQ ID NO: 43974 - protein, 427 aa, unidentified
MAKKKMDSEPEFAAFVGIDWADRKHVWCLQAADSRKRETGELEQKVEAVEAWVAELCRRFGHRPIAVAVEQVKGALVFLLNKYECLHIFPVPSTMTARMREALYPSGAKDDPRDADLLLDILEQHRDKLHRLSPDDEATRRVQNLVEERRKLTAERTAQSNRLTSYLKIYFPQMVEWFEKLDMPLVCDLLQRWPTLEELKKVSPEELRTFFRQHHCHRGLRERRILAIGGATPAGGDRAVIEAKRAVVKVIVQLIRSLLDGIAELDRKIEEVAAEHPDFFIFDSLPGAGAVMAPRLLAAFGSQRDRYHNADELQTYSGIAPVTERSGKRKWVHFRWACPKFLRQSFHEWAGHSIAQSVWARAYYQQQRGRGSDHHAAVRALAFKWIRILFRCWKERVAYDENKYLAALAKRGSPLGKLAVAGMGTSL

SEQ ID NO: 43975 - protein, 448 aa, unidentified
MPGNSSPSRRRRARLRVVNPRSAGIDIGSRFHVVAVPAELDDDPVRKFSSFTNDLKSIAEWLLAIDIKTVAMESTGIYWVPLYEILVGRGIEVFLVNARHAKNVPGRKTDISDSQWLQQLHSYGLVRASFQPDPSIAKLRAYFRQRDILVRYRSSHQQHMQKALMQMNLQLHHVVKDITGLTARRVIDAILSGERNPEKLATLRDRRCKETEATIAAALDGNYQEEHLFELKVAVEMFDAYSEKIRECELAGQVVLNELAGVDYVEPEKQASDCQIRSNGFSFNPQALITSLAGHDLLSLPGLGPATVITLISECGLDMSRWPSAKHFVSWLGLSPQNKISGGRVLSSRTRQGATRAGSSFWMAAVPISRTNTALGAFQRRLSARVGKGKALIATARKIAILYYKMLRYGMAFQEPGASAYQKASQERHVRGLERRAKALGYQLVPTG

SEQ ID NO: 43976 - protein, 450 aa, unidentified
MGSYAGVDWAADKHDVLVCDEAGEELLSATFAHDEAGLRLLCRQLLRLKVALVAIERPDGLLVERLLDAGLRVLALHPNQVAATRARFRVSGGKSDRFDAFVLCELARTDNHRFRVLEPDSDETKALRALTRAREDLVKTRVAVCNQLRSELERFWPGPIGLFADLDSQISLAFLERYPSPVETRTLGEQRMAAFLARQGYTGGKTAAELLAKLRSAPAGRAAEQETKVRRQIVRGLVGALKTLTAELKTLERELEDAVRAHPDGEIFLSLFKSRNSFVTAAELLAEIGDCRARYPNRDALAGDAGQAAVAIESGKRKSASFRWGCNKRLRSAFCTLADTTRHWHPWAQDLYAAARQRGHDHPRALRTVGRAWCRVVWSCWQTRTPYDPARHRALQQHCTVWITDTSGRRRPDLAATQRMLGAAVTEMAARRAEREALDAKPTSANTPST

SEQ ID NO: 43977 - protein, 341 aa, unidentified
MSESALIGIDLGKHSFHLHGQDKSGREVFRKKCSRSQMMQFFSNLVACTVVMEACAGAHHVARKLTAMGHQTKLISPQFVRPFVKGNKNDFVDAEAICEAASRPAMRFVTPKTEAQQTLSVLHRMRESLIRDRTKTVNQMHGFLLEFGISLPKGLAIMARLSVVLAEHDLPVRLTVLLQRLHDHFDYLNEQIKALDKELASQLADDDLGSRLLSMPCVGPITASLLAVEMGDGKQYRCSRDFAASVGLVPRQYSTGGKANLLGISKRGDKHLRQLLVQCARVYMLRLDYQKGALADWVRSLLSRRHSNVVACALANKLARIAWAIAAHHSQFEAGPDVLSA

SEQ ID NO: 43978 - protein, 354 aa, unidentified
MIIIGCDYHPGFQQIAFVDTETGELQERRLEHREEAEKFYRDLGAQGASVRVGMEASGHARWFERWLSELRFELWIGDAAEIRTKRVRKQKTDRQDAQLILRLLLEDRFPQIWVPNWENRDLRQLLWHRHRMVQARTRIMNQLQAVALNEGLRCKKRLWRDAGREQLESFRLAPWASRRRRDLLELLDRLTPTIAELTQAIEQEVEKCPAAQRLQMHPGVGALTALAFVLILGRADRFQCGKQIASYLGLVPLEDSSGQRRRLGHITKQGNSLLRFLLVEAAQVTVRSDPEWRSKYFHLAMRRGRKIAKVAMARRLAVRLYWMWRKGWDYGQLTKFSSHAGQLGHRDGVQSNTE

SEQ ID NO: 43979 - protein, 337 aa, unidentified
MDYFVGIDLHSNNSYIAVIDSDNNRIFKKKVRNNLSEIIKLLAPFEKQIKGIVVESTYNWYWLVDGLIDNGYQLHLANPSAIKQYEGLKHSDDTTDAFYLANLLRLDILPEGYIYPKHERAIRDLLRKRMHLVHHRTAQILSFENLVARNLGSKMHVSTINKMNEEDLEDLFEDEHLILSGKASIATIHFLRSRIIQLEKAIHKAAKLKKEYKLLKTAPGIWNTLALTIMLETGPIERFKKVGNYASYCRCVQSNRFSNSKSKGKGNRKNGNKYLSWAYVEAANHALWNYEYVKRFYQRKTAKTNNVVAIKAIAHKLARACYYIIRDQKEFDPLKAF

SEQ ID NO: 43980 - protein, 355 aa, unidentified
MSRDIKYIGMDVHKEATVIAVLNANGNLVMESIVETKAGSLLQFIHGLGGELHVTWEEGTWAAWLYDLLKPQVQVLVCDPRRNALLKEGNKSDKVDARKLADLLRTGMLRPVYHGEHGLRTLRELGRSYQTISQDLNRVMNRLKALYRGWGIACAGTQVYAPRYREEWLQKIEHAGVRRRAELLYQQLDGLQALRRTLRPELLAESRKHKATKLLRQIPCIGPIRAARLLALMQTPHRFRSKRQLWTYCGLGIETRDSAQYRFVRGQLQRAKKPQQIRGLNRNHNHEMKEIFKGAATRASCGVGPLRDFYVALLDKGMKAEMARLTLARKIAAIALTLWKKEERFDAEQLKTQAA

SEQ ID NO: 43981 - protein, 467 aa, unidentified
MAARQKRQKRISAQVVEDEDYQLRCEVVAGIDVAKESAVVCVRMPPAEGKKHRTSHLQTVPATVPAVTELAALLKTRGVQMVSMEATSDYWRVWFAVLEEAGLAVQLVNSSRARNLPGRPKTGKEDARWIARLTEMGLLRSSFVPPPQIRALRVYTRHIFDLTADRTRCWQRLEKLLEDALCKLSSVVSKLAGHQTARAVIEEMIAGQRDPRVLAALGKGRMSNDKLPALAGALTGMRFGPEHAHAAASLLRAIDLLEEEIRVTEDAVTAHLAAIPAAWGVDADGTTGPDAGQDEGAPVLPAAARLDEIPGPGRQAAAALIAEIGLDMSRFPTPEALVSRAGLTPTARQSGPRKGRGKKGHGNTYAKRICVLAACAAANTDTFLGDRFRRLASRPGGGGRKKAGCAVGRSILVIVWHLLNDRDARYRDLGSGWYLRHTDRSRKARNARRQLEALGFDVTITLRQDAA

SEQ ID NO: 43982 - protein, 428 aa, unidentified
MKYNTQNAKIKSITEKTLIVGIDVGSETHFARAFDWRNYEYSKKPLEFSNTEAGFMTLKAWMADFAEKYGKNVVIPGMEPTGHYWFNLGAYLQDNGMKPVHVNPHHVKKSKELDDNNPNKNDRKDPKTIAALVNEGRFSYPYIPTGIYAEIRSLSNLRLQTQEEITRIKNRIARWFSIYFPEIKDVYRNPDSVSGLMILKEAPLPQDIVKLGVDGINKIWRDAKLRAAGLKRAKTLVTAAEHSIGSQEAPDSARIELKNLLNDYEIYKNREEDLMSLTEEKLSEIPHIDKLLEIKGVGLKTVSGFVAEVGDITRFDNPKQLQKLAGYAIVECSSGKHKGESRISYRGRKRLRYVLYEAAISLIARNEEFKEVHRYYRTRKENPLKKMQSVIAVACKVLRIFYTILTKGVTYDGAKMMQDIKRPQMLAA

SEQ ID NO: 43983 - protein, 340 aa, unidentified
MRTLYAGIDLHSNNNHLSILDQGDRRIFHTRLPNMPDVLLAELEPFKAKLSSVVVESTFNWYWLVDCLMDVGYRVLLANPAAMQQYKGLKQVNDKHDAFWLAHMSRLGILPQGHIYPKADRPLRDLLRKRAHLVRLRTSLINSLQGIISRNCGCSLSGNKMKQLRENHVAPLLTGQEDLALSGEVSKEAIDFLSCQISRIELVVQEKIKLRKSFQCLLSIPGVGKILSLTIMLETGTINRFAKVGNFTSYCRKVPTSWTSNNKKKGKGNTKNGNKYLAWAFSEAAEYARRHSDYARSFFNRKAAKTNKAVAYSALAHKLARAAYYIMRDQVDFDEQKLFA

SEQ ID NO: 43984 - protein, 304 aa, unidentified
MNDTKYIGMDVHQATISVAVRDSRGNLVMEAIVETKAETILQFIRGLGGSLYVAFEEGTWAAWLHDLLQPHVTRVLASDPRKNALLKAGNKSDRIDARKLSELLYLNKLSPVYHGEQGIRTLKELARSYITITRDLTRVMSRLKAIYRSWGIPCAGQQVYAPRYRAEWLAKISEAGVCRRAELYYQQFDALAALRQGTRRELLAEARKHPATRLLRQIPAIGPVRTALLIALIQTPNRFRTKRQLWAYCGLALRTYTSGEYRVVGGQLKRGNGSSALLAVSANWIGVWLVTPSCGEDLEFRHSN

SEQ ID NO: 43985 - protein, 345 aa, unidentified
MKITTVGIDLAKNVFQVHGIDERGKAVLRRQLRRAQVAVFFANMPPCVIGMEACASAHFWARTLQGFGHTVRLIAAQFVKPYVKTNKNDVADAEAICEAVTRANMRFVPIKSIEQQAILSVHRVRQGFVKARTAQANQIRGLLGEFGLVIPQGIYNVAKRVPELLEDASNELPVQFRHLIERLTAHLKEQDRQVKEFEQEIITWHHGSELSRKLEKIPGIGPLAASALVASIADAHSFDNGRQVSAWLGLVPRQSSSGGKPTLLGISKRGDTYMRTLLIHGARSAIVAATKKVDNTQGWLTDLLKRRHPNIAAVALANKNVRTVWAILAHGREFKADYVPTLMAT

SEQ ID NO: 43986 - protein, 414 aa, unidentified
MELGYRLMVGIDWATEAHQVCVLDSQGRLLEQRRVEHRAEAIAAMIDRLIGLAGGDPASIAVAIEVPRGAVVEALVERGLHVFAINPKQLDRFRDRHTVAGAKDDRRDAFVLGDSLRTDLSAFRRIHLDDAWTIQIRELTRIEENLNTEINRLANQLRDLLLRFYPQLLRLCPAADQPWLLALLKLAPTPTKAQRLRRSSIERLLHQYRIRKWTADQVRTELKTAPLSVAPGVTEATSAHIALLLPRMELLMAQHKLCSRAVQTALNERVSAEEQGREHRDAEIILSLPGVGRVVAATMLAEASQLLAQRNYHALRTLGGIAPVTRQSGKRWAVRRRYGCNHRLSNAFYHWARVSSQCDPRAQHHYQTLRQLGHSHGRALRGVADRLLALLVAMLRDQTLYDTTRAHAPKPIAA

SEQ ID NO: 43987 - protein, 373 aa, unidentified
MKKRSSSQKIQKARVKTKRAQESVTIGMDLGDRTSRYCMLGSEGESLREGQVQTSKAGMLEAFGSLGRARIAIEVGTHSPWVSRLLGSFGHEIVVANPRQVKLITESSRKDDRLDAQTLARLARIDPQLLRPIQHRSETAQTALTVIRVRAALIAVRTSLVNTARGLAKAMGERLPKCDADQMGVLRAESLPPKLRQLLEPLLKEVESLTEKIKDSDREIEQIARKDYPETVLLQQVGGVGPLIALTFVLSIDDKNRFQRSRDVGCYVGLRPRRSDSGQRQPQLRITKEGDPYLRTMLVQGAHYILSRRGPDTDLKRWGLRLAERGGKRAKKKAVVAVARKLSILLHRLWVTGEVYEPLRNQNLRDLQKKSAA

SEQ ID NO: 43988 - protein, 363 aa, unidentified
MMLNIGIDVHKRRCYATVKGEFRGILMQERFDRTYAGIRRFIDSVRSQYPNQQMRAVVESTANYWMKVHDSFEDAGIDTLVAHPIKTKAIAEARLKNDKIDSATLADLLRADLVYESYVPDKEHREFRQLVRARMDLVAMRTMNKNKIHAILAKYEFKDPECSVFSDRGTQWLRDEMMQQHALSWVDKMQLESLLDFTSSLDKHIDTFTAKVASLAKEDPRVRLLMTMPGVDYLTALTVMSEIVDVRRFPTPWKLVAYAGLAPSQRDTGDTVRRGRITKQGSKWLRYAMCEAANTAIRRDERLREFYQRIEARRGLQKARIATAKEMLVIVWHMLTNNEPYRGTNSEAVQRKYKRMGWKANSA

SEQ ID NO: 43989 - protein, 353 aa, unidentified
MSEITRVGVDLAKNVIQIHAVDASDKLVTNRSLPRGNFMAWCAKLPAGCLIAMEACSGAHHWARKLVALGLDARIIAAHLVAPYRLQGKSGKNDANDAAAVCEAASRPNMRFVPIKTVSQQGMLCVHRLREGLKQDRTACINRIRGLLAEFGLVFAQSPEVLQRALPDVLEDASNELAGIARLVIERAKEQWRELDQHIAWCDARIGAHIKLDAQAKAAMQLQGVGPITASALVATVGDFKQFKNGAQFGAWLGLTPSQNSSGGKNKLGGITKRGDMYVRSLLIQGAKSAVMTAHRRSDPISRWAHELRLKSGWQKAVVALANKNARILWAVMVKGKSFDAHHVSVKPVCATA

SEQ ID NO: 43990 - protein, 426 aa, unidentified
MFSESHDDEQIIERVAALDIGKAEVVCCVRLPAAAGTKRRVQEVTTHSTMVGSLSELANRLVDLRVTRVVMEATSDYWRPPFYLFDAHGLRPWLVNAKDVKHLPGRPKSDVLDAVWLCKVAERQMLRPSFVPPAEIRRLRDLTRYRVDLVGVRNSEKNRVEKLLEDACIKLSVVASDIFGVSGRAMLAALIAGERDPKALAEMARSRMRPKITLLEEAFAGLPTGTFDDHHRFLLTRMLSRVDQADADIAALDVEIEAHLAPFDDAVARLDEIPGIGPTAAAVIIAEIGTDMTRFPTPGHLASWAKFAPGVKSSAGKNKGNGSTGKGNRYLARVLGEAAVATARTDTFLGARYRRIARRRGKKKAIVATGRSLLVVIWHLLSDPETRFEDLGADYYDRHQDTTTKKRNHIRGLEALGYRVTVEPAA

SEQ ID NO: 43991 - protein, 391 aa, unidentified
MICVGIDVAKDKHDCVILNSEGIVLADVFTIPNNLEGFNALLDKLWACSTPQDSIKVGLEATGHYSYNILGFLLDNGLATYVLNPLRTNLYRKSLSLRKTKTDRVDARTIAAMLLSDTGLKPYTDTAYHNEELKSLTRYRFDKVKERAKLKQSVSRLVCILFPELEKLVPTLHMASVYALLSEFPGAEQIAVAHLTRLKALLGEASRGRCGRDIAVEIRNAARCSIGSRMPAKSLELQHTIRLIRELDAEIEEIEAAIQSIMDELHSPITTIPGIGCRMGAMILAEIGDFSRFDSADKLLAYAGMSPSTYQSGQLKNCYPHMEKRGSRYLRYALYNAAKYVCHWDPTFAAYLAKKRAEGKHYNIALSHAAKKLVRLIFALEKSRQTYCPVI

SEQ ID NO: 43992 - protein, 349 aa, unidentified
MRFYSKPHQHWCGIDLHAKTMYICILDREGKVLAHQNLPSNPEAFLEAIAPYREDLVVAVECIFTWYWLADLCAREGIAFVLGHALYMKAIHGGKAKNDRLDALKIATLLRGGLLPQAYVYPAGMRATRDLLRRRLHLVRKRGQLLAHIQMTSHQYNLAPLGKRIAYPSNREGVVEHFEDRVVKKSIAVDLALLERYDALIHDLELYLARQAKQHDAQAFHRLRTIPGVGKILALTILYEIHDVHRFDRVQEFSSYARLVKCAKESAGKKYGTSGAKMGNVHLKWAFSEAAVLFVRHSAQGEKLLARLEQRFGKGKALSILAHKLGRAAYFMLAREKAFDLQRFAATAK

SEQ ID NO: 43993 - protein, 348 aa, unidentified
MDKEAAMPTYQLFVGVDIAATTATVVWQAPGAPATRPVTIEQSPQGFAALERRLRTTGYAPATTLVVMEATGSYWLSLATALADAGFAVSVINAGQAHHFAKALLQRAKTDAIDARMLTQLAALLQPARWTPPPAIYEELRQRLAQRDALIAVRQQVRNQLHALVQGPMVVASVRERMETLLATLAEQLAAVEAELAAVVEQQGSWTDAIKRLQSIPGVGLLTAAWVVVGTLDFTLCATAEQASAYAGLAPMPRESGSSVRGRAGIGRGGNSRLRTALSMATLSAAQHNPLLKAFYRRLRDAGKPPKVARCAAARKLLHLIWAVGTKDKPFDPGYKQQQHEVLPELAA

SEQ ID NO: 43994 - protein, 415 aa, unidentified
MALKIVYKICCGIDVHKTFVVACIASTNDKGVTSYESHRFSTYTSGLKTLLQWLLDRNCKDVCMESTGKYWIPVYNILEKDCSIVLAHPKYVKAIRGKKTDKKDAKWIADLFKHDLVAGSFMPPADIRQLRDLMRYRFKLTCFKSSEKNRLQNCLTVSNIQLGNVVSDTFGKSAQAILDKILEDPADTSFDLEPLVFKSLKKKLPELRDAIDGYITPEQAGKLKVIKAHYENLEARKAELEELILALATPYQQELAILQTAPGISSDFTAIGIISEIGTNMEAFPSAKHLCSWAGLTPTNNESAGKKKSVRVSKAGCYIKPLLVQCANAVVKSNKHPEIRNRYLRIKKRRGHKKAIIAIARMLLTALYNMLKNKEPYNAELYRKSDVLPVNREITIEQAILMAQFQGYKIKSAAE

SEQ ID NO: 43995 - protein, 345 aa, unidentified
MHIASIGIDLGKTTFHLVALGERNKILLRKKFSRSQLLAYTAKLAPSLVGLEACAGSHFLGTVLQEQGHQVRLIPAQFVKPYRKSNKNDFLDAEAIAEAVTKQNMRFAQLKTQEQLDWQAMHRVRDRLVQRRTALINEIRGFLLERGITFAAQPIHLRKNLPGVIEDAEQNLSPRLRWLLDRLWQEWKQIETDVQAITDEIERISNDDARCRQLRQIPGFGPLISTATVAAIGNGAAFRRGRDFAAWVGVVPRQYSTGGKQKLYGISKRGNVYLRRMLIHGARSVLFRVKCDTGGFGQWVHRLVQRAPRNKVVVAIANKLARIAWAVLSSGRDYRHQPLRQLTAA

SEQ ID NO: 43996 - protein, 418 aa, unidentified
MEIMYENAAGIDVHKKQITVAVRTPGARRGRHQQVRRYATFFTALREMVEWLTALGVTHVAMEATGIYWRPVWHALAEAERFEVLVCNAAHVKNVPGRKTDVGDAAWLAQLLEVGLLRGSFTPPEHLVAIRDLTRYRSSLVQERTRETQRLCKVLEDAGIKVDSVASESLGVSARHMIEALVSGERDPAVLAELARGRLRKKIPDLTLALGGRFNAHHGLMCRLHLDHIDHLAAAIGRVEAQVETMIVPFEVPRRRLCTVPGIAERASAAIISEIGVDMSWFPSGGHLASWIGLCPGNHESAGKRKTGKARKGNQYLKSVFVEAAWAAVRTDTRLKARYQRLLRRFGGARNQVAVKKAIVAIAHTLCVIVWHLLHAGVDYTDLGADYYTRRDNPEIRKNQLIRQLQELGYTVELALAA

SEQ ID NO: 43997 - protein, 345 aa, unidentified
MKHYCALDLSVKETAVCIVDETGKICRETKVATHPEDLISVIKDPKWQIERIGLEAGPLSQWLYEGLAKAGLPVICIETRHAKAFLKAQPNKTDRNDARGIAQMMRVNLYRPVHVKTLTSQKHRALLTARKLLQEKAIAIANDIRGLLRNFGLKVGLVGKVKFEERINELVEDRPDLHEIMQPLLAARKLLRDEFTKLHKKVLDLVREDEVCRRLTTIPGVGPVVALTYTATIDIPGRFAHSKAVGSVLGLTPKLNESGESKRVGRVSCCGDAMMRSLLYEAAQVLLVNVKKWSWLKAWAMNIARRRGRQKAVVALARRLAVIMHRMWSDGTEFCWTRESLPVAG

SEQ ID NO: 43998 - protein, 338 aa, unidentified
MAVLIVGVDVSQAQLDVAVYTPQGDIEYLGTFPNDPSGWEDLAQAVRRQQRRWQADQVHLVMEPTGGYEQPLARFALKQEWLVSLPNPRQVRDWARGVGWRAKTDRTDAQMLAAYGAATAPPCWRPLPEEVAELEELLDRRDELTEMLQQERNRRHALQAQGSDRGPVAASLEGHIAYLEQALTEVEEQIRHHLNQHPHLKRKVSRLRQIPGIGPRNVLYILVLCYRWGMLTGYQGNAKGLTAYVGLDPVPYESGRSVRRPARISREGNRRIRRYLFMGALGGVRGQNPLRTFYLRLVGRGRPKKVALVAAARKILVWAWAIFRDQTTFDPLRAGCRT

SEQ ID NO: 43999 - protein, 404 aa, unidentified
MSVHEAPATSSTIVVAIDVGKTSALFSVIDAARRRLVGPSEFVMTGSGLTAAVARAAAVVPPDGRVKVGVEAAGHYHRPVLDHRWPDGWEVLELNPAQVAEQRRVQGRRRVKTDAIDLEAITELVVAGYGRPVTARDVVIGEVSAWAVHRGRRVATRTATKNQLLGQLDRAFPGLTLALPDVLGTKIGRLVATEFADPARLAALGVNRLIRFAATRDLQLRRPVAERLVAAARDALPTRDAAIARRILAADLALLADLNDQIHWAESELESLLPRSPYAPLTSVPGWGVVRVSNYAAALGDPQRWPGPRQIYRASGLSPMQYESAHKRRDGGISREGSVALRRALIDLGIGLWLNDSPAKSYARGLKDRGKNGGIIVCALANRANRIAHALVRDHATYEPARWT

SEQ ID NO: 44000 - protein, 466 aa, unidentified
MRISQSIPARLAASVPTSERTIAHEAPCIRLTHDGATMHIPKGHRMKEWKDLTHYAGFDWARDHHAVVIVDAQGKIVADFEFEHSLEGWNSFGEKTAAWPNLAVAIETNQGAAVDQLLQRDYTVYPVNPVAAASYRKRKAPSGTKTDHFDGWGLADALRLDGHGWKTLQPMDPLTQQLRLLCQDEVSLIEQRTLLVNKLQQALLEYYPAALKAFDDWTSPFTWDFIIEFPTPQVLVKGGKRRWEKFLHGHKLWRPETAEKRLALFAQADQFKASEPITKAKSQLALSLSKLLRFLDQQLDQYRQQIEALFKDHPDHDLFGSLPGAKKVLAPRLLAAIGTDPQRYGTHNVLQSFAGTAPVSYQSGQINKAHVRRACDKFLRHTVHLWANSFRRASVWGQTYYQKKRAQGMSHACALRCLGQRLLKIVFKMLTDKKPYDAEFHARNQQKHGSWVLHLMNENPTPKGCE

SEQ ID NO: 44001 - protein, 407 aa, unidentified
MIFVGVDWAEAHHDVLVEDEEGKRLAGGRLPEGVDGIARFHQMVSDFAEEPDEVVIGIETDRGLFVGALVAAGYQVFAVNPMSTSRYRDRHSSSGAKSDPGDAKVLADMVRTDRHNHRPVSGDSELAEAIKVLARAHQSMVWSRTRQSNFLRSTLREFYPAALVAFGDLTSSDALEVLKVAPTPTLGATLSRSKIAAALRHGGRQRRIEQKAEEIQQALRAPQLQGPVLVATAMGSSVSATVAVITAMNAQIDELAKELEVHFEQHPDAEVVRSLPGLGTILSARVLGEFGDEPNRYVSAKSRKNYAGTSPITRASGTKRVVLARFVRNLRLADAIYLWAFASLSASPGARAFYDYRRASGDTHHAALRHLGNRLVGILHGCLASHSRYDEHTAWGHRAELEQARAA

SEQ ID NO: 44002 - protein, 325 aa, unidentified
MYHVGIDVSKAKLDVCLLSQDINGKRKNKSLPNNHQSAAKLIEWLILQKCSLEQTYVVMEATGVYHEILLYALHNEGLHVSLANPARVRSFTRGMDILTKNDGVDAYAIACYSLLKRPDKWTPPPEEVCILKALLRHRDALMEDVLRVRNRYEKAGSTTTSPIVLASLVKIRTQLEAELAEIERLISEHIDNHPGLKDDMKLLNSIKAVGPQLGRNMLVILRSYHFTSAEQAAAYLGVVPIERQSGSSVRGRPKLSKAGPSDMRKKLFMAALTAIKYNPHIKAHYERLTGQGKSKMSALGAAMRKLVHLCYGVLHTQKNYDENYA

SEQ ID NO: 44003 - protein, 340 aa, unidentified
MRQLYVASDLHGNNNLLGIIDGEGKRIFRKKLPNDPLLINDILKPFKEEIVGIVVESTYNWYWLVDALMEEGYKVHLANPAAIQQYSGLKHADDKHDAFWLAEMLRLGILPEGYIYPKEERPVRDLLRKRGHLVKLRTSLIISLENIISRNFGRKLPVNDVKGLRKDHVTPLFEGKEDLGLAGRVSKETIDFLTHQIRQIEGVVGKRITLKEQYRNLLTIHGVGKILGLTIMLETGPIGRFETVGDYTSYCRKVPSQWISNGKRKGSGNRKNGNKYLSWAYAEASDFARRLHPESRAYYNRKMQQSNPAVAHSALSHKLARAAYYIMRDQVAFCPEKLFG

SEQ ID NO: 44004 - protein, 349 aa, unidentified
MVANEVDYVVGVDTHRDEHVLVVVVAPAGAVVARQTVSASGRGYAQALRFAQRYAAGARVWAVEGAGHYGVGLARYLNGRGEAVLEVGRSSRNERRLRGKDDELDAVRAALTAFASEPLALPRSGERREALRLLLVARRSAVDVRREALVQLRSVIVTAPERLREELRGLPVQRLLERCCRLRLSAAAAPDEQAARLVLRTLARRIEAASAEADELEQEILAHVQALAPQLLDEPGVGPIVAAQLIVAWSHRGRVRSEAAFARLAGVAPVPASSGQTSRQRLSRGGDRQLNRALHTVVLHRRQHDPVTKDYIARRIAEGKSRREATRLLKRYLARHLYRLLESREPLMA

SEQ ID NO: 44005 - protein, 344 aa, unidentified
MSCYAALDVSQAMTAICIVDEAGQILLEKKVPTCPDAIADCLKISAPNLERVGLETGPLAVWLWNELAIRELPIVCIDARHANAALKMRPIKTDRNDAAGLAQIMRIGWFKQVRIKSRDSYQIRSLLVARETLVRIRVKIENEIRGLLRTFGVLFGKRVGGFEGRADEIIAGELDVSPEMRLIAGALMKARSSVLDQIRLLDKRLMAIARTTPTARLFMTAPGVGVITALSVASAFDNASRFKHSSSAGAYLGLTPRRYESGETSRNGRISKQGNCMTRKHLYEAATTLLTRNLKFSTLKDWGMKIAKASGFKKARIAVARKIAVILHAMWKTNTPFRWSQVTA

SEQ ID NO: 44006 - protein, 343 aa, unidentified
MSAYYYIGLDIHKRTISYCMKAIDGALIGQGKIEADRKSLDEWAKGLPGPWVGAMEATIFTGWVYDFLKPYAVKLKVAHPEMLKAITAAKKKNDRADAEKIADLLRVNLLPECHMLSEEIRELRRILRYRNHIVRMAVNMQNKVSGLLMEVGASYSKKRLHGKKYFRELLERVEDIPPSVKELLKLSRSSYEMFRSFQKRLVETLHTNNLIHDRVERLMTIPGVGELTALTWVLEIGDSERFTSIWKAVSYCGLCSAQRESAGKEQRGPISKKRNKHLQTMLIEAAKLAPRWNEQLAILHERELKRGDRNRATLAVARKLVAYMLAVDKKQADFKLPAEMQAA

SEQ ID NO: 44007 - protein, 313 aa, unidentified
MYYIGIDISKKALSVFDGKVSLEFENVAGLKPFYRYLKKHYKHFDNLVLIFEATGIYSDSLREFCATHQIKAYILNPKQSHNFAKSLGVRSKTDKIDARVIWRYQSLIPKERIQVPVIDPEIKMLASYLTSYQFIQVQRTAVSNHLESVTDNTLRKLLEKELLRKQQLEARLLGDIKSYIQEHPGLAEDYQRLMTISGIGEKLAFSLLFLFRHYQGTNRAQITALVGLDPIYKESGKSVRGKIKISKNGNRYIRKMLYLPTLCAIKNNKRISLFYQRLINNHKPKKVAVIAAMRKLLLVAHAVYHNKTEYVPG

SEQ ID NO: 44008 - protein, 331 aa, unidentified
MVYAGIDVHRKRSQVAVLDEAGTELVNRNVDNGSEAMIDILEELEVGTPVAFEAAYGWGWLADLVERYELEPHLVHPSACKAIATARLKNDKVDARMLAHLLRTDLLPEAWLAPKEVRDLRSLLRHRAALVRMRTALKNRIHAVLADEGLKAEGEALWSDIGHQWLVRVPLRVKHREIVDDCCGMLDALAIPIGRLEAEIHSLAKADPRVDALCQLPGVGILTAMTLVAEIGDIARFPTARKLCAWAGLTPTVRNSDTKVHHGHITKAGPAAVRWILTEASYQARRFPPFSATFEATTKRRGKRIAGVAVSRKLLARSFHVLKSLEEAPIQ

SEQ ID NO: 44009 - protein, 387 aa, unidentified
MYYCGIDIAKTGHVVALIDEDGTVVKQGLSIKNEQKGFETLEQLLLPYKQELQIGLEATGHYWLALYDHLSKQGYELTVINPLQVKAFRKLDIRKRKTDRIDSLAISEFMRFAKPSGTQVNLPVFLQLKELTRFRFWLVQQIGDCKRKIISVLDRVFPEYERLFSDVFLVTSRELLSQAVTAEEFAALDLSELEQLLQSASRKHFGAEKAAQIHSAACQSVGVSFLTDAIHVEMSCMLMQINLLEDQCTQVEDKIEELMTSTPHYITTIPGIGLVTGAMLLAEIGDVQRFPSIENLVAYAGIDATVYKTGQFEGDEMHMSKRGSHYLRAALWQAATASLLHNPELKQYYDKKRAEGKPHGVAMGALCHKLLTRVYVVMKEQRAYVIH

SEQ ID NO: 44010 - protein, 326 aa, unidentified
MEHELHYIGIDTAKEKLDVDVLRPDGRHRTKKFANTTKGHDELVSWLKGHKIDHAHICIEATGTYMEPVAECLYDAGYIVSVINPALGKAFAQSEGLRNKTDTVDARMLAEFCRQKRPAAWEAPHPLERALRALVVRHQALTDMHTQELNRTETAREVQRPSIDAHLLWLEAELKRLEKQIKDLTDDDPDMKHRRKLLESIPGIGEKTSAVLLAYIGLKDRFAHARQFAAFAGLTPRRYESGCSVRGASRMSKAGHVSLRRALYMPAMVATSKTEWGRAFRDRLAANGKKGKVILGAMMRKLAQVAYGVLKSGVPFDASRHNPVAA

SEQ ID NO: 44011 - protein, 408 aa, unidentified
METLHRRCAGLDVHQKEIVACRRIVSGRKVRSELGRFATTTQGLLALSAWLAEAKVTHVAMEATGVYWKPVWHVLCHDFSLVLANAAHIRNVPGRKSDANDATWIADLLAHGLIRASFVPPQPIQELRDLTRTRRELTREIVRHTQRIQATLEEANIKLTSVISDILGFSGRRILKAIVAGESDPRRLAELGHSRLACTREELAAALDGRPRDHHRFLIGQHLKTIEQLEGTIAEFEAQIEAALAPFLDAVERLKDIPGFSDNVAQTLLAEVGADMNAFPTAHHLVSWAGMCPRLDESAGKRRSRRLRKGAPWLKPVLVQAALAAIKVKTSSLRSRYLSLKPRLGHKKAIIAVAAAMLRIAYHMLKDGTFYQDLGPDYRGHKNPQRAAQNLAKRIRALGYDVELKKAA

SEQ ID NO: 44012 - protein, 358 aa, unidentified
MKTEVQRFGTTTAELLRLTEWLSQAACTHVAMESTSVYWKPVFNLLEGSFEVVLANAWHIKAVPGRKTDVKDCEWIADLLAHGLIRASFIPPPPIRDLRDLTRYRKSLVRDRVKANNRVHTLLETANLKLANVVSDVLGVSGRAMLDALAAGETDPEHLAKLARGSLIPKVKPLAEALCGRFTSHHAFLLGQMLTQLDPLAGLIARCDVRILEVAKPFEPEIQRLQTIVGVGRRAAEVLVSEIGVDMSQFSTAGHLASWARSCPGNHESAGKRRSVGTGTGNNWLRTVLLECAWAAAHTPARVTWTHNSDASVSVEDRNEPGSPWPTASWSSPTTCSAMVWTSTIWEPITLTGSTPPS

SEQ ID NO: 44013 - protein, 345 aa, unidentified
MSESYAGSQFVGIDLHRRRSVIVRTTAAGDQLECIRITNDADRLSTVMARAGEAPEVVLEATYGWYWAVDALQAMGAHVHLAHPLGVKAFEYRRVKNDQRDAADLADLLRMGRLPEAWIAPPPTRELRELVRHRAKLVALRSQCKAEVHAVLAKCGVQVLMTDLFGVEGTELLDRLKLPASYAARIASLRRVMTALEFEIDVFAGLARTRLVRDPANTAVQTIPGIGPILGAVFVAEIGDVHRFARAEQLTCWAGLTPKNHESDTHVHRGRITKQGSRLVRWAAIESVQILPRTSHVGPIRERVGARRGHNIGVVAAARRQLEYVFYALRDHQVRALQHPRPAAA

SEQ ID NO: 44014 - protein, 365 aa, unidentified
MLYTGIDQHSKQITVSVRDEAGDVILRRQVSTRWAKMDAFVEEMKQHLAAHGGVLAVVEVCGFNHWLLLRLHAAGWQVIVVQPEESAAHKTDRRDASALSEVLWVNRERLRQGLPVRGLRQVQVPGLEEQADRRITSLRRSVGCELTRTINRIKAVLRRHNLEQECPTKGLETKAGLKWLWQLSVPVIERVELDQQLWRLKLLREQRVQLQFEIEERCEHNAAARRLSTIPGAGAYAALGLASRVGDVRRFRRPRSLANYWGLTPGSRNSGEATQRLGSITKQGSPLARFLLGQLVLHVLRKDSGMRLWFRQIKRRRGAKIARVAVMRRLATIIWHMLTKNEDYVLGGPPRRRLKNAGNDRNDKA

SEQ ID NO: 44015 - protein, 369 aa, unidentified
MADYREAFVAFDVAKIKHAVAVADSGRAGEVRFLGKIENKPVTIERTIRKLAKRYDRLHVCFEAGPTGYGLYRQVGDLGHDCMVVAPALIPKRSGERIKTNRRDAVTLARLHRAGELSAVWVPDIVHEAVRDLVRARQAGAEDLRRKRQQLLSFLLRHGRIYDAGGHWTLAHRRWLARQAFEHQAAQIVFQETSDAIEDAAQRLHRLDEQLAAIVETWSMKPVVEAYQAMRGASFLVAVIFAAEIGDVRRFETPPQLMAFLGLVPGERSTGDTVRRSGLTLAGNRRARRALVEAAWTYRYPARVSEPLRARLEGLPKAVRDIAWKAQVRLCARYRRLAAAGKKPPVIAAAIAREMAAFLWAIGREVAPS

SEQ ID NO: 44016 - protein, 358 aa, unidentified
MDTDRKDSGGRVMGQTERPSSPVDASSFQYVVGVDIGSQTCSCCALKPDKSQALKPLEFANAPAGFTQVQEHLEHLGVPANHLLIGLEATSRYGENLYRFLESRGYQLCLLHPRQTHQFAQQRGLRAKTDQLDASTIARILLSGEARRGYVPTELIATYRELVRLHSHLSDEVARYKNEIHAELFVLFPEFRQIFSDPCRPTALGILKRYPSAQACASAGVEAMTVTLHELAPRHYGRKTAEQLVNLAQHSTSAGIAVSARSSSLKILCDQLEHTQRNLAHLEEEIENRLDADRGATGLQSVPEFGRRTVAVLRAELGDVTRFGRADQVVAYAGLDIQVRQSGKWKGEAKLSKRGSGR

SEQ ID NO: 44017 - protein, 443 aa, unidentified
MDQCAPYPLRGRAARDGVCVSVRVLRDVLRKADDMNHNVAGIDVHKKVLAVAVGKATDDALVFERKLFGTVGRSLAELAEWLKERGVKEVVMESTAQYWKPVWLALEGSFDLHLAQARSNLAPRGRKTDFRDAERMVRRLLSGDLTLSFVPSAEQRQWRLLARSKYQLRRDRVRLQNQLEGLLEEGRIKLSSVVTDLLGLSSLRILRALAAGENDAVKLAALADKRLRVSGEDLAEALRGSLTRIQRLLLNQFLTRLDVIDGQIRELDRTLAEEMEQDSDAIHRLSQIPGVGPDAAAQIIAEIGPKAAAFAAPEKLASWVGVCPGRQESAGESTSNRSPKGNRPMRRILTEVAFAAVKTKDSHFQEVFRRLVPRLGIKKAIWAIAHRICRLIWKLLHEGAVYIEQGARGQDPQAIRKRARKLVGDLRRLGYKVLIEEPTPKAA

SEQ ID NO: 44018 - protein, 465 aa, unidentified
MTVHSVGIDFHQGLHRVRCLDEQAQACDGFGFQTTPEGLLTLEERIFKDSSNPIIVFEPAGIPWLTVAAYLRSRHPDCRLVKAKMQKVAALRKYLKGPVKSDRIDALTLAKMPFIDPEQLEEVYLPSAEIHALQRLTRQRKRLQSDISGRKVRIEAIIDGYLPGVRKTFSAPWSIQFREFLRSRFNPFGIVRDGEKTFVSFLTKASYREKVSKTESQHIFQACQSIAAICKVSETVSAINEDFFVELQDEVTRELRLMEAEEAESELLEQRISEIYHKLHPSNNLCTIPGVGEHTAPIFLASIGDPTRFRNQSSFANWTGVVPRSRQSSNMEAKGLRMTKAGPSIMRLALFQSGDIGRRWDPQMAAIYYRQMVNHGKNHKQALGAVMSHLGARVWKVLLEDRPYELKDMQGKPITRQNARSLILTKYHVPEEVRKEKRRRMNKTGVVRETATNSICETAKAPQPA

SEQ ID NO: 44019 - protein, 384 aa, unidentified
MLKGAGEAVQNRKGRGSSNRPKVVEPVGEQERRATTNSAESPNSRWSRTRELELRKAGSRPKRKAVITMPKGKVYVGIDVAKASLEVAISTGECFSVTNDDEGMAQLVQRLGAAEPVLVVMEASGGYERQAWVALWEAGIAVALVNPRDTYHFAQAHRQLAKTDALDAGGLMLFGAQMQPMPSAPPSAADQELRELVGRRRQLINMLTAERNRRQQMLSAASKQSIERTIKTLLRERKAIDRAIADKLSHNAQLTDLVQILRSVKGVAAVVSATLITRLPELGTLTQRQVAALVGVAPFDRRSGRWVGESRIFGGRADVRTALYMAVITAKRYPGPIRELYQRLRGAGKKPKVAITACMRKLVIILNAMVKHHSHWSPSCTAVS

SEQ ID NO: 44020 - protein, 340 aa, unidentified
MSQVVTIGLDLAKSVFQVHGVDAAGGIVVRRQIRRPQLVAFFAKQPACLVGMEACAPSHHWARELMALGHQVKLMPAQYVKPYVKRGKNDAADAEAICEAVTRPTMRFVAIKSPEQQSAMMLHRVRLVLCRQRTQLTNAMRAHLAEFGIVAPIGRLGMERLLGVIEDPTDRRIPADARTCLKMLAVQLKTLKEQILENDRRIIADARRTEVGRRLMEVPGIGPVLASALVAAVADPAIFRSGRDLAAWIGLVPRQNSSGGKERLGSISKAGHRYLRQMLVVGAMAVIRHAGRSAEQRAWLMQLLARRKPKVAAVALANKTARMVWAMMTSGERYREPLAT

SEQ ID NO: 44021 - protein, 315 aa, unidentified
MDEQRTVFVGIDVSKDRLDVHLRPSGEAFCVPREGKGMDDLVIRLQGLSVALVVLEATGGFEATVAAALAGVGLPLCVVNPRQIRDFARAMGRLAKTDTLDAEVIALFAERVRPQARPLREPERVHLAELVGRRRQIIEMIGMETNRGRQAIDKPLARRLARHVAYLQKELDAIDHDIGDAIKHSPAWREAEALLKSVPCIGDVTARTLLAELPELGTVSRHQVAALVGVAPINRDSGLMRGRRAIAGGRTSVRAVLYMAALTATRRRSPFRAFYDQLTARGRPKKVALVAVMRKLLTILNAILRDHTPWRPLNA

SEQ ID NO: 44022 - protein, 387 aa, unidentified
MYYIGIDISKYKHDCFICDETGIIINENFSFKNDSKGFNLLLEELSKLDNSKTIKIGLESTGHYGINLKLFLEKNNYSFMEFNPVLIKKFINGQTLRKTKTDKVDAYLIAKYLMTVTYVATPKNFYLKYSLKKLTRYREDLIKSRSKSIVKITNILDHIFPEFKPFFKNNLGKTALYILNKYHLPSKISNMRDYETIQKISHGKFTNMQFIKLKNLAKDTIGESNNYLELELKLLLSSYFNTIQNIEVLDNEIISITNKLNSPILSIPGIGKLSAATIIAEYGDICNFKSSNAMLAYAGLEPSVIQSGTELKSGKMVKRGSGHLRYILMNVAMFVVLHNATFSVYYYKKREEGKSHRVALSHVAKKLIRIIYYLEINNTLFDASKLV

SEQ ID NO: 44023 - protein, 338 aa, unidentified
MNYYAGIDVSLEALSVCVIDASGKIFRETKVASEPEALIAWFGSLGVSLTRIGLEAGPLSQWLYAAMRQAGLAVELLETRHVRNAFKIMPVKTDRKDARGIAELMRLGWFRLVHCKSMEAQETRAILTSRKLVQKMLHETEMSLRGTLRNFGLKVGKVAAGQFEFCIRELVEGHPTLATIAASLLATRATLRREFNALEKRLRAIARSDTRARLLMSTPGVGMIVALTYACAIDDPSWFKSSKIVGAHFGMTPTRYQSGETDRTGRISKIGDSSVRAVLYEAAHVILTKPVKGCTALKSWAMRIAKRAGMNKAKVALARKLAVIMHRMLADGTTFQPA

SEQ ID NO: 44024 - protein, 391 aa, unidentified
MGDDKHVVIGMDPHKRSVTIEVMTSEEQVLGGGRFTTDVEGFTSMLAYVAAWPDRVWAIEGCEGIGRHVAQRLVAEGEVVVDVPAKLSARVRVFATGQGRKTDDTDAHSIALVGVRMNGLRAVVDDEQLELLRLLVDRRRRLGEEHTRMVCQLHQLLLELIPGGAKRDLSAAQARKLLAGVRPRDVVGKTRKQHAMELVVDLERIYQRKKAANKELIELIKSTGTGLLDLHGIGPSGAARLLVEVGDITRFPDRGHFASWTGTAPIDASSGDRVRHRLSRGGNRQINVVLHIMATVQLRNPTEGRAYYDRKIAAGKSSNEAMRCLKRRLSDIVYRTMLNDLVANKATGPGGHRGASLQSSAAGSHPHTGSSDKSLPGPVKAKPKTRLPGAS

SEQ ID NO: 44025 - protein, 356 aa, unidentified
MTQPGRPAPRSAALDYDSTIIGALEMSEKKWVLAVQLPGVKRHTRHVLEASGKELASLIERLKARCAAAGHPIARVILTHEAGRDGFWLARFLVRRGVEVHVMQPSSLPVDRRARRAKTDVIDVEMLLRTLMAWLRGEPRVCSMVPIPTETDEEARRAHREREDLTGERLSILNKIDSILATLGVKGYRALRRDRRKQLASLRQPDGDPVPQAARIRIERLLDRLELTLRQIKEVEPARDAVLKKPAPADEAERMIRSLVDMRAIGPELATLLVREAFSRPISNRRALGSYAGLAGTPFSSGGSEREQGIGKDGNRRVRAAMVELAWLWLRWQPDSTLSAWFREGSAKPVAGSRRS

SEQ ID NO: 44026 - protein, 414 aa, unidentified
MDVLHERCAALDIGKKDLKACVRAPGPKGKRSRRQEVRTFATTTNALLGLRDWLVAEQVSLVVMEATGDYWRGAFYLLEDCLNVVLVNAAHAKGLPGRKTDVSDAAWLAQMGECGLLKASFVPPEPIRHLRDLTRYRATLAAERTREAQRLEKELEDAGIKLSVVATDILGVSGRAMLAALIDGERDVHTLAEQARGRMRPKIPQLVEALTGNFGAHHAFLCRLHLERIDQLSAAILELSARIEAELRPFARQLERLATIPGVGQSTAEVIIAETGGDMTRFRTAGHLASWAGVCPGHHESAGKRKSGKTRHGNRWLAGALGTAAMAAARTKDTTYLGARYRRLVPRLGKQKALVALEHSILTAAWHMLTDDMDYHDLGGDYFIGLDPERAARRAIKQLNALGYTVRLDPIHAA

SEQ ID NO: 44027 - protein, 411 aa, unidentified
MQYFIRKEGMPMLSIGIDVSKGKSTVCGMKPGGEIVYTPFEVQHTREGMSELVSLLRSSGEEVRAVLESTGSYHCPVVAALLENGIFVSVVNSLRMKRFCSQSIRKVKTDRIDAMQIALYGLAYWQELQPTRLPEDTYRELQLLARQYYQMTSMLIKAKVDFNALCDQVLPGMQELMNDHAGRHKLSDFVLRYHHTTHILEMGETRFRKDYCKWAEKKGYRNCERMAVLIFATAQNGIPVLPNAPSTQIVITEAIRVLHTVEASRDAILTQMQALAKTLPEYSLVREMPCIGDTLAPRLIAEIGDVRRFHSKRALIAYAGIDAPPYQSGKFRANNRHISKRGNRYLRKTGYEVMQSYVMHKPANDPIFTFIEKKRSEGKCGKLAMVAGLNKFLRVYYGKVTELYRSLPAIE

SEQ ID NO: 44028 - protein, 355 aa, unidentified
MDREKYIAMDVHQASISVAVRDAAGKLIVESIIETKAATILAFIRGIQGSLWITFEEGTSAAWLYDLMKPHVTKVIVCDPRKNALLNAGNKNDRVDARKLSDLLRAGLLTPVYHGESGVRTLRELCRGYLTINKDLTRVMNRLKALYRSWAIPCAGDKVYSPRHRNTWLEKLSEAGVRRRAEQLYQQLDALVPIRREARRELLAESQKHPATQLLRQIPRLGPIRVALLIALIQTPHRFRTKRQLWAYCGLALQTRASGEYRFTGGELQHSKRLPALRGLNVNHNHDLKNVFKSAATHVSISTDPLGDFYRSLLDKGMKPTMARLTLARKMASIVLSIWKKGARFDPGELKQQAA

SEQ ID NO: 44029 - protein, 407 aa, unidentified
MELPALFQRVVGLDVHQAKISACALIEQPDGTVTVEHREFGAFKRDRRALAEWVRTLGPDLVVMESTGIYWKSPYAALEQVGIAAWVVNARHVKNVPGRKTDVADAQWLATLARAGLLQASFIPPADIRHLRLIARQRQKLGGMLASEKNRLHKLLADAGIRLNVLVSDIHGQSGRAMVKALIEGQPLPEILDLAGRLRASREQLFEALQPEQLSDAHRFVLWEIMAHIEELEARMGRFEHSLLAGLVAWEPQLVLLQTLPGVDRIGAAMLLVEIGTDMSSFGSAEKLASWVGICPGNHESAGKRKSGKTRKGNAWVRRLLCEFAQAASRSRCGLKEKFQALSIRKGHKKAIVALAHKMLRILFAMLKNHTPYQDQAVDYEALLVQRNAPRWIKMLLKHGFISPAST

SEQ ID NO: 44030 - protein, 340 aa, unidentified
MHATTYGLDVAKRVNQMYWVDGDTGEIVNRRFGRDDVIGYLSRRPPGRVALEACGSAHWWARKIKGLGHDVVLLHAKFIRPFVQTNKTDAADARAIWTAVQQPGMRTVAAKTEDQQAMLSLHRIRSLLVKIRTMQVNQLRGLLYEFGASFRAGRVAGLAEIRSRMMELEEALPGALMCCLQDQLKRIEGLQTEIDQLEHRIGACQKQDAACRAISDVPGIGRLTATALVATMGDAATFKSGREFAAFLGLVPRQSGTGGKIRLGAMSKRGDPYLRTLLIHGARSVLCHTKAPTPWQSAIQERRPANVAAVAVASKMARTAWAILAKGQAYQRDHVSLRPA

SEQ ID NO: 44031 - protein, 351 aa, unidentified
MIVLGADTHKRSHTIAGVGATTGELVGERTVQVGRAGFAALLAWARELDGERVWAIEDCRHVSGSLERFLIARGERVLRIPTNLMAETRKSARQRGKSDGIDAINVARAALREGLATFPTAHLDGPELDLRLLVDHRERLVNHRVELNNTLQWHLHDLWPELELPGGALFSRKWSTRIARRLTRAEQTMRVRIARDELRRLRELTDTIKKLAREITQLVEQIAPQLLAEPGFGPLIAAKLIGEIAGAQRFATDAKLARAAGAAPIPASSGNTRRQRLDRGGNRQINAALHRVIVTRARCHQPTRDYIERRRGEGKTTRDAIRCLKRYLARQVWNLLRASPPNMTLTTPSIS

SEQ ID NO: 44032 - protein, 572 aa, unidentified
MATQQRNTAPRTRQSKSKPQTKCVLQRPRGVIAPRVAKVGVEKFAMVCVDPAKKRSWWMMADFLGQVLIETGAVEHDRPHLDAMLARVRSVVRERGVQDVLVVIERTGNYHQATRRAFAQAGFDTRLLHPFTTRQFRLPANPGNKTDANDLAAIHRAATQGFGLIEQTLDEPYLALRMLARHRRDLVEKVTALSCQIREHLDLAMPGYAACFSDFWGSSVALCLARATGTPAQLLAQDRQGLTHILQREKRLFQSPTLDLLLAWARQAPAPDVDAALRHRVWTELDDARQQVCRQIARLEVDLAELLVKTPYLWLLLLAGINVVSAAELAGEMGPIAHYANANAITGRAGLFPSRSQSDEVDVSGSLIRCANRRLRTVLMLIADNLTQHNHFFIGRSRLWAQNKVDPRAIRVRVAKHFTRLLFALVAGRQVLRHPCVAGRESVLHKLLKFHHEHHSTPAQLLPQLEAAAAQLTQPAREREGELLNAALASRASHRGPRSLADLLPLILLKHGVRITRRSAAAVPATAVPSASVAVGESSIPSVLVPGEASDVTCSMTLPPVGTTASNGSIPV

SEQ ID NO: 44033 - protein, 404 aa, unidentified
MWYVGLDWADTHHDVEVQDEAGKRIGARRFAHSHAGLHELQAFLLGIAASPEELACIVETNHGLLITFLLEAGIPVYPVNPKSANRLRKAAGAKTDRIDAHLLAKLGRFDLAELRRLEPDSPSVAELKTLTRDQDALIQTQTRLVNQLTACLKEYYPAALNLFAKVQQRSTLVFLQAYPTPQAALAASIEEITATLRTGKHTNPRRVAPKIVEELHRPQLVASPVIVRAKSRLMLSLVKQLLVVIEEIASYDKAIRPLFLSHPDQELWSSLPRAGKRLAPRLLAEWGDDRSRYADGNSVQTLAGTAPVPYESGNYAKAHKRFACSKPLRNALHQFAWQSTQHEAWARDYYQRKRAQGKTHSMAVRALANVWVRIIYRMWMSETCYQTATFEAAQLAHAPRQHVA

SEQ ID NO: 44034 - protein, 401 aa, unidentified
MNAVGIDVSKGKSMVSILRPYGEIVSSPFEIRHTSSDIHSLIKQIKSIDGESRIVMEHTGRYYEPLAHELSHANLFVSAINPKLIKDFGDDSLRKVKSDKADAVKIARYALDRWNDLKQYSLMDEIRNQLKTMNRQFGFYMKHKTAMKNNFIGILDQTYPGVNTYFDSPARDDGSQKWVDFATTYWHVDCICKMSEHAFIDHYQKWCKRKKYNFSKSKAEEIYGTAKELVPVLPKDDLTKLILKQAVEQLNAASQTVEELRTLMNETAAKLPEYPVVMAMKGVGPSLGPQLMAEIGDVTRFTHKGAITAFAGVDPGVDQSGDHNRKSVHTSKRGSAFLRKTLFQVMDALIKSKPQDDAVYQFLDKKRVQGKPYYVYMTAGANKFLRIYYGRVKEYLGSLPQ

SEQ ID NO: 44035 - protein, 338 aa, unidentified
MNIVFLGIDLAKNVFQICGLNQAGKPVYTKRTGRKELLQMLANIPACLIGIEASTGAFYWQREFEKLGHNVKVISPQYVKPFVRGQKNDGNDAQAIAVALMQPTMHFVPPKSPEQQDIQALHRARQRIVNHRTATVCQIRGLLLDRGITIGAAVSRVRRAVPLILEDAENGLSVRMRSTIAELYDLFNDLERRIHFFDKEIETVFRQSEACQRIAKVKGIGPKTATAVVAAIGKGTEFKNGRHFAAWLGLVPRQHSSGDRQVLMNLTKKGDKHLRTLFIHGARAVVRVAANNNDSHMNQWVNQLKERRGFNKTTVAVANKNARIIWSMLRNETEYQVV

SEQ ID NO: 44036 - protein, 386 aa, unidentified
MKTQTQSTSNTATEDCATIFVSIELSRKGWLIGIHTPLADKIGLHKLEAGDSAGLLALVGRIAEKVECATGNPSRVLSCYEAGYDGFWLHRILDEAGVVNHVIDPASLQVNRRARRAKTDRIDAVGMLRALMAFHRGEDQVFSVVRVPSVEEEDARRVHRERERLITERIQHVNRIKGLLATQGIYDYQPLRQKRIDRFDALKTAMGTAIPRHLRDELMRHLQRLDLVLEMIRAAEEERDRVVEAEMAVNESARKIQTLVAMRAIGPQLATVLVGEVFQKEFANRRQLASYAGLTPSPFNSGSVVREQGISKAGNPRARTAMIEMAWLWLRYQPGSALSHWFRKRAGTGSGRIRRITIVALARKLLIALWRFLETGLVPDGAELKA

SEQ ID NO: 44037 - protein, 387 aa, unidentified
MPQPNDLSRSLVPLEQDNTLIAVVELSQSAWLVAGIVPGLERQPLKKLHANEEALLALLQRWGNEGTKSGRPVARVVVAFEAGRDGFWLARWLRARSIEAHVIHPTSIAVSREHRRAKTDRLDTELLKRAFLGWLRGERGHCSMAAVPTLDEEDAKRPSREREKLVGERTRIVNRMKGALARLGVRGFKPTLRGAPERLEALRTPDDAALPPNTLSELRRDMVRLRLVREQIKELEATRLEGLKRASGEGASAMVRLLAQVVGVGVETADMLVHEVLSRRLRDRKAVARYAGLTGAPDESGAKRREKGLAKTGNDRVRRGMLQLAWRFLRFQEASVLAQWYRTRTADARGATRKTMIVALARKLLIALWRMATDGEVPEGVILRPAA

SEQ ID NO: 44038 - protein, 344 aa, unidentified
MHIASIGIDLGKTTFHLVALGERNKVLVRKKFSRAQLLAYTANLQKSLIGMEACAGAHFMGAALREQGHDVRLIPAQFIKPYRKSNKNDFIDAEAIAEAVTKENMRFVQIKTEEQLDVQAMHRVRDRLVQSRTALINQIRGFLLERGITFPADPIHLRKNLPIVIEDADQNLSSHLRSLLERLWQEWKQLEIDVKTITEEIERISQENALCRRLLQIPGFGPLVSTATVAAIGNGAAFRRGRDFAAWVGIVPRQYSTGGKQKLFGISKRGNVYLRRMLIHGARAVLFRVKYDTGGFGQWVRRLAQRAPRNKVVVAIANKLARIAWAVLSSGKQYRHQPLQPVAA

SEQ ID NO: 44039 - protein, 435 aa, unidentified
MSQSNMPSSPVDASSFRYVVGVDIGSQTCSMCALTPDKRQVLKPSEFANATAGFALLCGKLEQLGVPAAQILIGMEATSRYGENLSHFLASRGYQLCLLHPRQTHQFAQQRGLRAKTDQLDATTIARVLRSFEARRGYVPTELIATSREFVRLHTQLSEEAARYKNEIQTVLTVLFPEFTQVFADPCRATALALLKLYPSAQALAAAGVEAITVKLHELAPRTYGRRTAEHLVQLASHSVSNGLAVAARATSLRILCDQLEHTQANLKQLENEIDKLLQTDAGAKGLQSVPDFGRKTVAVLRAELGDVTRFQRTDQVVAYAGLDIEVKESGKWKGQAKLSKRGSGRLRRILYLAAVRCTRRADSAFGAYYHRLLARGMKARDALMAVMRKMLIVAYRLLKTEELYDATKVAAVVLTRESEPPQPPSSPELGAIGA

SEQ ID NO: 44040 - protein, 377 aa, unidentified
MKAITLYLGLDVHKDSITIAIAQPGSKGEIRLFGTITNDLGRLEKALERIHKAHPDAHLEVAYEAGPCGFVIARRLKQLKVPCLVAAPSLIPKLPGSPFKTDKRDACAIARLLRAGELTAVYVPEATDEAIRDLCRARTDAVDDHRRCRHRLKAFLLRHGYRYQGKANWSQPHMRYLRELVLPHPAMKAILEEYLQGIDAAHQRVQRIEASMLSLLQTWRLKPAVEALMAFRGFQLVASMITVSELGDIHRFGHPRQLMTYLGLVPTESSSGPRQRQGAISRCGNGHQRWLLTECAEHYATPPKVSKELSRRQQAQPDSVRALSWKAQNRLHLRFMKLLGRRLQRNKAKVAIARELCGFIWALLRAQDCYKQPVTVS

SEQ ID NO: 44041 - protein, 343 aa, unidentified
MQVSTIGVDLAKNVFQMHGVDNAGKVVITRQLRRKQVIDFLSKIPACLVGMEACGTAHYWAREISKLGHTVRLMPPSYVKGYVKRSKNDAADAAAICEAVTRPSMRFVPIKSADQQALLMLHRTRDLLIRQRTQLINALRAHLAEFGLVAETGREGLAQLAEIITDESNREALPSAMKQALQAIVDQLAALELQIGALDRAIHAHHRANDMSCRLETVPGIGVIGATAIASTVTDPSNFKSGRDFAAWIGLVPRQHSTGGKERLGGISKQGDRYLRRLLVIGATSVVQHARRHPQKHPWIIRLLARKPAKLVAVAVANKMARIAWAIMAKGGHYRAPELAAAA

SEQ ID NO: 44042 - protein, 386 aa, unidentified
MQKLNDLSRSPSPLDPDGTLIAVIELSLSSWLVAGIVPGVERQPLKKLAVDESALLKLLHRWREEAAKAGHRIKRIAVAFEAGRDGFWLARWLSARDIEAHVIHASSVAVSREHRRAKTDRLDTELLKRSFLGWLRGERDHCKMVAIPTTKDEDAKRPNREHESLVGEQSRIVNRMKATLIRLGIRGFNPKLKKAAERLDGLRTPEGEPIPPNTLAELRRDMVRRRLVSDQIRQIEDARLERLKQAPSDGPHAMVRLLARVIGVGVETADMLVQEVLSRSMRDRRAVARYAGLTGSPDESGRKRREKGLTRSGNARVRRGMIQLAWRFLMFQKDSTLAQWFRARTENARSARKTMIVALARKLLIGLWRLVREGVVPDGVVLRPVS

SEQ ID NO: 44043 - protein, 337 aa, unidentified
MGLYCGIDLHSNNHVLTVIDEADRRVYERRLPNDLAITKAALEPHRAELVAVAVESTFNWYWLVDGLMEAGYAVRLVNTAAVRQYEGLKHTDDEHDAFWLAHLMRLGILPTGYIYPKSERGLRDLARQRMRLVQHRSSLITSVQNQVWRSTAVRLSSHTIKGEGKKPWPEISDPDIALSLKAGRAVIDTLTVQIERLEKLLLKRVGLSAQFRMLKTVTGIGPILAMTIALEVGDIHRFASVGEFASYCRCVDTQRLSNGKKKGEANRKCGNRYLAWAFMEAAHFAIRLLPAAKRFYERKRRQRHALLAVKALAHKLARACFYVLRDQVPFAPERLFV

SEQ ID NO: 44044 - protein, 392 aa, unidentified
MFFVGIDIGKNNHVASMMDESGKVVFKAFSFPNTSDGGHALFSKLASYSSSPDDFEIGMEATGHYWLSVYSFLFEKKFLLHVINPIQTDGWRRGTEIRKRKNDIIDSVLIADLIRYGQFVETRLADEDLFSLRSLTRFRTYLVESISDLKRKVVCVLDQVFPEYQSIFSDIFGKTSKEILLQFSSPIDFESVSSQTLAELLAKLSRKQVGPAKAAQLKAAASCSFGVTFAKSSFTFQLKALIEQIAFIEKQVKETETEIAGIMEKLESPITTITGIGNITGAAIISEIGDISKFDSPRKLVAFAGLDATVTQSGEFEAAHNVMSKRGSPYLRKAIFQAALVAAFKDPVLSAYYQKKRAEGKHHLTCIGAVARKMCNIIYAVVKNNQPYVPKA

SEQ ID NO: 44045 - protein, 347 aa, unidentified
MTIVEDRPVITGGVDTHADMHVAAALDPVGGLLGVQEFPATAAGYASLLSWLRSFGILDVAGVEGTGSYGAGLARHLAAAGVRVVEVDRPDRQDRARQGKSDPLDAVSAARAALSGKASGAPRGRDGAVEAIRALMVAKRSARQERTQAINQARALIMTGPEELRARFVRRSPAQLIEAIAALRPRPGDVPGYATRVALRELGRRAQFLDAQLDRLDELIGPLVTARAPGLLALHGVGPDTAAMLLVAAGDHPERLRSESSWAHLCGVAPIPASSGKTAGRYRLNRGGDRQANSALWRIVIVRLSSHPATRAYADRRSKEGLSKKEIIRCLKRYVAREVYRQLRNGA

SEQ ID NO: 44046 - protein, 371 aa, unidentified
MKKDSTTKFIGLDVHSKTISVAIADEGREGEVRHYGTIENTTEAIDKVIKKLTATGVELKFIYEAGPCGFALYRYLTGNGFTCIVISPAMIPRRKNVRIKNDRRDAMTLARLYRAGELSGIYVPEPEDEAIRDLARTRDDARVAERKAKQRLNSFLLRQNLIYPGKTKWNRTYFNWLGSVGMKYPAQKIALQEYIETVNECTGRVARLTEQIGLAVEEWKMAPMVKALQALRGVSLICATVTVAELGDLSRFQNPKELMAYLGLVPSEHSSGETIRRGGITKTGNGHARRVLVEGAWTYKHHARVTLPLIKRQRDLPKSICQISWKAQLRLCARYRKMVARKKPNNVVVIAIARELAAFMWAIAQEVRAAT

SEQ ID NO: 44047 - protein, 349 aa, unidentified
MNMLAETVDAVIGVDTHTDTHTACLVDRVGREIASTTVEATPDGYAGLLAWATQLAPGLQLVWAVEGCRSHGAGLLRVLIAAGQQVVEAGRPRRASRRPGGKSDPADAQLAARNVLGAKRHAQPRRDGDREAPRILLVARDHVNTTRTAAVNLFKSLLLTAPDVLREPLRRLSTPRQTAACAVLRANPREPMEDRVRRQTLRSLAQRIRLLDKEIRANERQLRDLVEAVMPALLDEPGIGPVSAAHLIVAWSHPGRCRSEAAFAALAGVSPLEASSGRITRHRLNPFGDRSLNRALHTIVNWRMIHGHEPTQHYLVRRRGQQKSDNEIRRCLKRYTARHLFRLMERTDI

SEQ ID NO: 44048 - protein, 343 aa, unidentified
MAQFVGLDVSQKLTSICVVDETGRRLWRGQCRSEPEPIGRAVRGHAGGDASIGIETGPMTPWLVHELRNRGLNVVCLDARHASAALKMQMNKTDQNDAEGLAQIMRTGWYRSVHVKSIDAHRTRALLGARAQLVGMTTRLSNHIRGVLKTFGMLPGAMRGLPFDRRVEALLVDRADLAAIVRPMLTAWRQLREQIAVFDKAVRALAKSDPTCRLLMSVPGIGVVTVLAYVSTVEDPARFTRSRSVGAHLGLTPRQYQSGEVDRSGRISRCGDTLARTLMYEAAVVILSRVKKASGLKDWAQAIAKRSGIGKARVALARKLCVILHSIWRSGEPFRWSAQPVGA

SEQ ID NO: 44049 - protein, 391 aa, unidentified
MTILVGIDVAKDKHDCFIMNSEGEVLAQPFTILNNKEGFDFLYEKIKAVSSSDKIKVGLEATGHYSYNIIGFLLNKGLATFILNPLHTNLYRKSLSLRKKKTDKIDSKTIAMMLLSDVSLKSYSDISYHNEDLKSLTRYRFSKVEERAKLKTSLSRLAQILFPELEKLVPTLHMTSIYQLLEEFPSASAIASVHLTRLTNLLSKASKGHYDRETAIKIRDAAKNSIGSNMPAKSLELKHTIKLIRALTIDIDEIEAEISKMMDKIASPITTIPGIGRNMGAMIISEIGDFSRFSSPDKILAYAGFSPSTYQSGKLDNCYAHMEKRGSHYLRYALFQAAQLVCHWDSTFSAYLAKKRAEGKHYYIAISHVVKKLVRVIFHLEKTKQAFLKAS

SEQ ID NO: 44050 - protein, 397 aa, unidentified
MDAAGRRLAAARLPEGVAGITRLHEMIGAQLGEDAGAGEDAGAGEVAIGIETDRGPWVSALVAAGYTVYAVNPLQAARYRERHGVSGAKSDKADAHTLADMVRTDAHQLRPVAADSPQAEAIKVVARAHKTLIWERTRHTLRLRYVLREYFPAALEAFDDLAAPDTLELLAKAPDPASAAKLNRSQIRAALKHARRRDIDMKTTRIQAALRSQQLGRAPVITAAYAATTRSIAAVLATLTAQINTLRGQVETHFGRHPDAEIILSQPGTGVLLGARVLAEFGDAPGRYADAKARKNYAGTSPITRQSGKRKITHARFVHNDRLVDALMSQAQSALLASPGARAYYDKQRARGLDHHAALRQLANRLVGILHGCLKTRTLYDEATAWSHHNQDQRTAA

SEQ ID NO: 44051 - protein, 465 aa, unidentified
MPRPTTGDHRDLKMVNPGAAAIDIGSTMHIAAVNPSICDIPVRAFGTFTQDLHALAEWFADCGVTSVAMESTGVYRIPAFEILEARGFKVILVNARYAKNVPGRKTDVSDAGWLRRLHSYGLLRGSFRPDAEVATLRACMRQRVRLSEYAAAHIQHMQKALMEMNLQLYHVVSDITGATGMKIIRAIVAGERNPDVLANYRDVRCKSSPETIRAALLGNDRAEHVFALAQSPDLYDFCKARIEECDHRLEAAVAALSAKGGEDLPPLPKARIKGGQVNAPAFDIRASLYGVLGTDLTQIHGPGPSLALKLVAECGTDLRAWKTAKHFTSWLCLAPGNKISAGKLLSSRTRRSSSRAAALLRLAATTIGRSDTALGAFYRRLSARIGKQKAVTATARKIATLFYNAIRHRMTYQDQGATAYDERHRKRVLANLQRRAKTLGYDLAPVPSEPAVSQEATQFFAGQKP

SEQ ID NO: 44052 - protein, 330 aa, unidentified
MKKWDFILGVDVSKLTLDVHCAELNEHVQIENGSEGFKVLKKWFKQFNIDVTKSIIVMEYTGGYEYKLIQFCESLSIAYTRIPGLAIKNSLGITRGKNDKIDAKRIAIYTEEKIKTINPSKPLNRQILKLKELLSFRKRMVRQKAGLMASLKERIAMFEVSTNDIITTMTQDYIKKLDDDIKKLDITLQTLVKEDEKMFTNYQIITSIQGIGPVNALMTIAYTENFTSFTNPRAYAVYSGVIPFEYSSGTSIKSKKRVSHLANKELKQELNQAAKTAIIWDKDLCEYATRKLKSKPYALVLNNVKFKLILRMFSLVKRGEKSVDNYNKAA

SEQ ID NO: 44053 - protein, 429 aa, unidentified
MKIIYPRVCGIDVHKQFIVAVICISESVEPVYLKKRFSTFHNDLIRFRDWLIQNDCQNVCMESTGKYYIPVYNVLESHISNIVVANPKWVRAVKGEKDDDKDAKWIADLFKLGIVKSSFIPQKDFRILRELTRYKYKLVNMRSSEKNRYQNALTSGNCKLDMVFTDVFGKSASNIIDLILSDNPYTDEDILSKVHKNCKASPDMILNSINGTDLTPVQKSRIELVNNHIKQLSSNIQRLDKLIDLMIEPYEDYISFLCQIPGVSRNSAIIVLSEIGVDMNQFTSTRRLTSWAGLTPSSNQSAGKKKSVRISRAGVYLKPCLVEVAHAAVKDTNHPYYANKFNKISKRRGKKRAYIAIARKILVAAYHMLLTGEIWNPADLAEVETPVEQRIKYVKNNLKSDIKQLLDIGLTVEELTLMIQQNSNNIATQ

SEQ ID NO: 44054 - protein, 338 aa, unidentified
MLYTGIDLHKFTSYLTTVDSNGCIVKQADIKNVDHNFVQYFSELKDDNKAVVESTMTWYWLNDLLTSMNIPLILAHAKFVKAIAYAKVKTDKVDSHTLAQLLRLDYIPSAHKISNDLRSLRDALRARLKIVQRHTSITNSMHLLLAKYNLDSPDELSGIPKYQYDQLSEVEILLKEQALNLEKQLYPNLIPNEDIQRLLWIPGIGKMNAFSILLEVDDINRFADVKNFFSYCRLSPSARNSGGRTKQRSSKDGNKYLRVVFADAATRAVQHYPVIKNFYNSKLRKKNRLVAKTILAKELARIVFFVLKDKTNFNNTFKGIELQHKKYLQWPRVTNPYA

SEQ ID NO: 44055 - protein, 393 aa, unidentified
MICVGIDVAKDKHDCFILSSEGEVLADVFTIQNNAEGFDTLLQTIRRCVCPGDKIKVGLEATGHYSYNILGFLLDKGLDTYVINPLHTNLYRKSLSLRKTKTDRVDARTIAAMLMSDVDLKSYTDTAYHNEELKSLTRYRFDKVRERAKLKQSVSRLVTILFPELEKLVPSLHMASFYALLSEFPGAKQVAGAHLTHLKAVLYDASKGRYGRDMATTLREAARCSVGSVMPTKSLELQHTIRLIRELDAEIEDIEAAIQSMMDEMQSPIMTIPGIGVRMGAMILAEIGDFSRFDSPDKILAYAGMSPSTYQSGQLSLSGAYSHMEKRGSRYLRYALYNATKYVCLWDPVFAAYLAKKRTEGKHYNVALSHAAKKLVRLIYAMEKSRQSYRNAA

SEQ ID NO: 44056 - protein, 357 aa, unidentified
MNKSKQLDFEGQDIFIGLDTHLKNWMVSIMVNESPFKTFSQDPRPETLRNYLAKNFPNANYHSAYEASFCGFKIHRDLLNLGIKNIVVNPADIPTTDKERKQKEDSRDSRKIAKQLSQKDLTAIYVPEIEIEGDRSFIRYRKTLTKEIARTKHRIKSQLYYFGIEIPTKFSEKSYWSKNFTSWLQEIDLPTESARMTLNGHLEMAEMLRKKQLSTNKEIKKLSEKKIYKENYNLLISVPGIGGLTAMIILTEIGDINRFKNLDKLCSFIGLVPMTNSTGENEKTGDITVRKNKILRKALVESSWIAIRNDPALILAYQKLIKRMEPQKAIIRIAKKLVNRILYVLKNKKAYVQAVVK

SEQ ID NO: 44057 - protein, 401 aa, unidentified
MERPKEIGVGIDTGKHHHLAFLKDGDGRPLSRTFLHLEDTHESVERLVQEISRAEATFGTPVPVTINMEATGPYHIPMFNALSALYRVHLWQPRQAKEISKKNIRRAKTDRRDCRTLALLHQRQEPPATRYDDPLLVGARQLVRLHYSLMDVKVSLHQRWNHELFLAFPNLDTLLNPETITAQRLLQRARTPTEFLDLPARELAQLLNNRRRRIGATAEEIRRKAEQTLRAPAHETAAAFAMGPLRDSMNFLEAQRERVDRELEAYWEQLRSTTVLASFPCMGWFRALALHAEFGGLRRFSHADAAVAFAGLENYVYQSEGKLVNGRMTKAGAPLIRRVLWELLGIPSHQIPKITDGMERMKARGKHRNATIHAAAKKVVRILWAMERDQIPYHRAAVPFI

SEQ ID NO: 44058 - protein, 488 aa, unidentified
MSATGQQEGKKDPTLNARAPKRKARGSNCHQGKGHQRRSKLTITNPDAAGIDIGAQVHYAAVPEDRAPVSVRSFGAYTAQLDELVQWFKDCGIKTVAMESTGVYWIPLYQKLEEAGFEVLLVDARQAKHVPGRKSDVQDCRWLQQLHSYGLLRAAFRPEDSICRLRTLQRHRKELVEYAAMWIEHMQKALNEMNLHLHHVLSDISGQSGLAILDAILAGERDPRKLASLAHYRVQKSQAQIEAALTGDYRPELLFVLSQSLENYRQIQQQIAQCDLSIEKQLAKMADWTNPNQKSDSTQQSQDSASGKPSKKKPQDALESTLAGHLRRILGVDLTTIPGLNVLAILTLVSEIGTNMAKWRNDKAFVSWLGLNPNNKVSGQRVLSSRTRKVVNRAATTLRLAAMVLGKTNTPLGSFYRRKRAQLGAPKAITATARKLACLIYRLIKNGQGYEEPDLHIYELKYKDQILNSLRRRANSFGFDLVEVPKAA

SEQ ID NO: 44059 - protein, 312 aa, unidentified
MMKKHVGIDISKKFFDLHILEEGKDMHFEYTPEQIKQCVKLLLNNDVELIVMEATGGYELELACALQAAGLAIAIVNPRRIRDFAKAAGKMAKTDKLDAAIIALYGATLEPPKKAIIDANTCKLKALVARRNQLVAMRSSENNRMEHSRDKEIARSIKTVVKTIEREIEKVEKEIENHIQQRPELKQKAELLKSVPGIGETTAFMLVTELPELGNANKKEIAALVGVAPMNRDSGLFRGKRMTGGGRCDIRARLFMPILVAIKYNTVIRKFYEHLLNEGKTKMTAIVAAMRKLLVILNTMIKNNQKWSPKIA

SEQ ID NO: 44060 - protein, 316 aa, unidentified
MVPSPLFVGIDVAKATLDIAVRPTAETWSASNDATGIDALVLRLGALAPTLIVLEATGGYQGPLVAALVAAALPVVVVNPRHIRAFAQAVGILAKTDRIDARVIAHFAEAVKPAPRPLPDAETQELRALLVRRRQLVEMVSAERARLDTVPPSIQDAIQAHIAWLTTQIAGLDDALTRASQTHPVWQAKDDVLQSIPGVGPVLARTMLGQVPELGTLGPKPLAALIGVAPFNRDSGTLRGRRTVYGGRAEVRAVLYMGALVATRHNPVIKTFYERLLAAGKAKKVALTACMHKLLTIMNAMVRDLKPWQPQEVPSA

SEQ ID NO: 44061 - protein, 321 aa, unidentified
MLPTLGIDISKAIFHEELLVNEKLRQRRFNNRPEGFKELCAWLAKHKAERVHVCLEATGRYGDDLALYLYQQGHTVSIVNPARIKAFGESELLRNKDDRPDAGLIRRFCEKQQPPAWQPPAPELRELQALTRHLDNLLETRQQQLNRLDGVSTKTVAKSLRKLVAHLDTEIQRTEKQIQDHIDDHPDLHQSQQLLASIKGIGKLTAAKLLAELEDISHYQTARQVAAYAGLTPRNRRSGTLRGKTRLSKTGNSRVRKALFFPAIVAKRHNPIVRSFCQRLADSGKNKMQIIGAAMRKLVHIAFGVLKSGKPFDPNHELLLN

SEQ ID NO: 44062 - protein, 326 aa, unidentified
MKMTHSQAVVGIDVSSGKLDAHVHGHDQSRQVTNDASGHRELVAWARAKRATTAVMEASGGYERDLARALRRAEFAVYVVDPKRVRHYAKAVGQLAKTDRIDARIIAEYGTTVLAAGRLALPRPDDPQRDRLSALLGARAALIEHRDALQQQSAAMPAGLARQALKDAHASMKLRIKQLERQIGALIAEHAAFAALARRLDTVPGLGPVAIAALIAWLPELGYAGRARISALVGVAPVADDSGDREGKRHIAGGRKKLRNVLYMPVVAAIRCNPVLAAYYKRLLACGKEPKVALVACMRKLLVIVTAMITNQQDWAPHSGAQTAAA

SEQ ID NO: 44063 - protein, 458 aa, unidentified
MYRELLPFREVLSCELKTSLFPAAAGVDPNKLLETYLDRLTMFTGVDVADQTFTTLALDAGHEVLGSLEGCPNEPAGFEQFITWVRDLRDRHGLRIIAVAGETTGIYYWALWDFLGEQADVARVLYNPRTTEHMGEVLSKKVRDELVDALLLAEQLRLGSTPEVVLQEDVDLLTARYYSRAARDLAQQINRKKNQLRALLRAYCLPVCQVFPSEKLHHPAVYALLQECLFPDEFVWASAETIAAILVAHCRDAFGLAEAERLVAASRQAVTRPIGRDAIRSLVHAHIADITTFQERKARYLKTGYALVEDRTQAKLLRTVKGAGVSNTLALVSELGDVHRFVNGDHMASFLGLTTSKHISGTTLFHSSRITKQGSPNGRYAAVNVAKHLMRWVPRYGNMYQRIKDRKPHRKGHFIALVAVARDFVSNVLYDMWQNNRPFFVEVSDYRAYRQKRAVLNE

SEQ ID NO: 44064 - protein, 406 aa, unidentified
MFYLGIDVARDTHRLVMLDDNGERVSGGISFQNNTADFEKVLSKLKELSINPDNSICGLEATGNNWENLYCFLTSNNFKTILLNPHQTNKFREALRKKAKTDDIDAFVIAGLLRSNEFASSYVPEDKIQTLRELTKLRYEFIKDHKNYQRQVLALLNIIFPEYRQTALKNPFTIASTAIFKAFSTAKHLSIAKPKHIEKIVRSIKGNNFNVKEIENLISIAKTSVYSGRCQESRALTLNILLTQVENFDKSIQQLEEQVNLILSPTSNDDINSFPGSNLLTIPDVGPKTLAAILSCVGESGQAFSSGIKLIGHIGFFPQIYESGETKRANKLSTKGPAYLRHALYIASVACIKHNLQLRKLYHDKLSQGKKPKQALICVAKKLAHLCLSMLHSGQDYNPARVFSYA

SEQ ID NO: 44065 - protein, 381 aa, unidentified
MNSVGIDVSKGKSMVAALRPMGELVLRPTEYLHTEIELERLTYDILALGEDTRVVMEATGRYHEPIAAALHEYGIYVSVLNPILIHQSGGGSVRKVKSDKKDALKIAKYGLDNWIELREYTPVDALRQQLKLLSRQYNLYMKSVVSLKNNLISLTDKVFPGVNELFTSPEKSDGHQKWIDFTETFWHCECISLVSEKVFTERYRKWCKRKNYHFSFQKANDVYIESLGHIVTLPKNSNTKLLVTTAAKHLTAFKCQLAVLKNEMVSLAKQLPEYDTVINLYGVGDITAVQLMAEIGDVRRFPNRNALVGFAGVDPCVDQSGKHNSRSNPTTKRGSSHLRRTLFQVVSTYVKQKPLDEPCLPVPLQETLRRQTFLCLYNCRS

SEQ ID NO: 44066 - protein, 391 aa, unidentified
MKSSHHIDTPAAGAKDGTLYVAFELSKSKWLIGIVLSGESKMSRHQVAGGDTAAVWQLISKKRAQAEKKLGRAVRVVSCYEAGFDGFWLDRWLAEQGIENRVLDPSSIELPRRARQAKTDRLDLERLMRVLIRHEGGEPRVCSVVHPPSPEQEDARRLSRERDRLIGERTAHGNRIKGLLHGQGVRDVEPRRKDFREQLARARTGDGRALPGKLVAEIVREHDRLVLIAGQLAEVEGLMKAEREAAVPDSRARQVNQLIGLKSIGAVGGETLANEVFWRDFQNRRQVGAYFGLVGTPFDSGQSSREQGISKSGNSRARTLAIELSWLWVRYQPDSALSRWFKERVGDQKGRIRRIAIVALARKLMVALWRYLTQGVVPENAIVRAAAPAGR

SEQ ID NO: 44067 - protein, 339 aa, unidentified
MELYSGLDLHSTNTYIGILDTDFKRVFKKRVSNNLDLILETLAPFKDQLKGLVVESTYNWYWLVDGLMDAGYGRVHLANPSAIRQYEGLKHSDDKHDAFFLAQLLILGILPQGYIYPKQDRPVRDLARKRMFLVKHKTAHILSLQSLIARCSGQRISSNQLRTFTSEDLQRLLKEEHLVLSAQANLDSISFFKQQIHGLEKVIKNKLKLSQAFNGLLTVPGIGHILAMTIMLEVGDIRRFAKVGNFTSYCRCAPTQRLSAGKSKGSGNRKNGNRYLSWAFSEAAQMSRRYNQRFRSYHDRKAAQTNTIVAARALSNKLARVCYYILRDQVVFNEELILH

SEQ ID NO: 44068 - protein, 344 aa, unidentified
MDHFAGLDVSVKETSVCIVDDTGRIVREVKVASEPEALLQVLGNPAYRFKRIGLEAGPLSQWLFSALAKTGLPAICVETRHMRAVLKAQINKTDRNDARGIAQMMRAGLYRPVHVKTLRSQKLRMLLTHRKLLLSKAIAIDNDLRGTLRNFGLKVGMVGTVKFEARIKELVENLPDLAVLVEPLLVVRRVLREQIGILHRRLLAIVRDDDVCRRLMTVPGVGPVVALTYRATVDVPARFRNSKAVGAVFGLTPSKYQSGEINRTGAISKCGDEMMRVMLYEAAQVMLTRTNKWSWLKAWAMQIARRRGMKKAIVALARRLAVIMHRIWIDGTEFRWTREETAAI

SEQ ID NO: 44069 - protein, 339 aa, unidentified
MPFVAAGIAKSVFQVHGVDGSGEVVVRRRLSRARVLPFFAKLPRCLVGIEACSTSHHWARELISLGHDVRLMPAQYVKPYVKRGKNDASDAEAICEAVTRPTMRFVAVKTPEQQSVMMLHRVRLMLNRQRAQLSNAMRAHMSEFGIVAPVGRMGLERLLEIIADRDDKSIPADARICLEMLGAQLAVVKEQILENDRRIRASARETEVGRRLMDIPGVGPLLASAFVASVADPRMFKTGRDLAAWIGLVPRQNSSSGNERFGGISRAGNRYLRQMLVVGAMAVIRHAERHGTKRAWLIALMTRRAKKVAAVALANKTARMVWALMTSGEHYREPVVVHS

SEQ ID NO: 44070 - protein, 454 aa, unidentified
MSQAPKATKQVAEVDSLTIINSNAAGIDIGLEEMWVSVRADRDAEPVRRFGMNTPDLIAVAEWLKACGVETVAMESTGVYWIPLYEVLEERGFQVYLVNARHAKNLPGRKKDETDAQWLRRLHTFGLLNNSFRPAGEMCAVRAYWRHRADLIEHRAAHIQHMQKALHQMNVRLSPTVKDVTGVTGMAIIRSILAGERDPVTLAQLRDPRCAQPESEFVKALTGNYRDEHVFALQQAVALYDAYTQQILECDQELDRKFSALKPVHDDDLPPLDTTDKRNTHSKNAPAYDGRSLLYQLLGVDLVAVDGLNEVTAQIILSEIGTDMSRWKDDKHFCSWLGLAPHNDISGGKVLRSRTLKTHNRAGQAFRLAAQAVSKTDTAYGAFFRRMRARHGPMKAIVATAHKIARTVYFMLKNRTPFHDINAEEYTQREREREIARLQKKATQLGFTLAPASV

SEQ ID NO: 44071 - protein, 361 aa, unidentified
MKKPSQHLIAEVPHRQAKVEITIGIDLGDVWSHYCTLNQDGEVVDRGRFRTTPKAIEKWFTDVAPARVAMEAGTHSIWISAQLQELGHEVIVANVRELRAISHSDRKSDQVDAEKLARYARLDPNILRPIAHRTVAQQEALTLIRARALLVRLRTAAVNAVRGLTKSCGYRMPASATTCFAQRSLAVMPPGLAQALGPVLQQIADMTLKIKQYDRQIQQLGQTEYPETQALLKVHGVGHLTALTFVLTLGSKERFGRSRDVGCYLGLRPRRSQSGDHDPQLGITHAGNAYLRSLLIECSNHILRPHGRDSALRQWGLHLAARGGKQAKSKAIVAVARKLAVLLHHLWSTQELYMPFYEQAA

SEQ ID NO: 44072 - protein, 309 aa, unidentified
MKEQLVYLGVDIAKSYLDAAVGNEKRRFSNDATGHRELIKWVKQLKAPVQVICESSGGYERALVQGLARVGVQISLVQANRVRQFAQAAGILAKTDRIDAELLCEFGKVMRPQTVTGAKLEQEHLRELESQRRHLTHLLVMEQNRGARVSDASVQRLNRSLINQIKKQIEQLDLLIKGHIDQSHELSAKAAKLTSISGVGVRTAALLLAQLPELGQLNRREVAALVGVAPFNRDSGRMRGKRAIYGGRKPVRHGLYMAALVAARHNPILRNFYLRLRAAGKPAKLALTATMRKLLIVLNSALKRDLRYA

SEQ ID NO: 44073 - protein, 388 aa, unidentified
MTYFIGVDIAKYTHYACIIDSDGVVHSEPFPFENDLEGFKVLLSHVSHFDKDELIFGMESTAHYSNNLSNFLLSNSYRVGIINPIQTHALRKTRIRNAKNDKIDSMVICQALSLRLHTEVTLNDTLLELKDLCRAYQNIKTMRSRTKIQYATYIDQTFPELYKYFKKNLHLNTTYQLLKQYPLPSKINKVRIDTLTKLLQNASHGRYGKEKALELKELCLTTVGIQRDSLGFQIQQAIEQIELYTKQLEEIKDAIKTIVLSLNSPIMTIPGMGVIQAAIILSSIKDITLFSSPSKVLAYAGLDPRVYQSGNFKATSTRMSKRGSGMLRWALVYAAYNVSLNSEMFKKYYNLKVSQGKTHYSALGHVAHKLVRVIFKLLTTNSSFIEAA

SEQ ID NO: 44074 - protein, 343 aa, unidentified
MKLTRVGVDLAKNIFQLHGVDGAERPVWCKRLKRNGWIKEIEQNVELGAEVGMEACGGAHLWARLLQSKGYRVRLIAPQFVKPYVKSNKTDANDAQAVCEAMSRPSMRYVAVKTIEQQDIQAVHRVRASLISERGAKANQLRGLAYEYGLVAPREIAALRVAVPVWLEDASNGLTVRLRALLSGLYADLRALDERIRELDKEIRAIGRENEAVGRVQQLRGIGPLIASALVAMIGDARQFKNGRHVAVALGLTPRQHSSGSKERVLGISKRGDSYVRTLLIHGARSALRTAPGKNDRMSRWALALAKRSHVNVAVTALANKMARVAWAMLKHGTTYEPNGLAG

SEQ ID NO: 44075 - protein, 345 aa, unidentified
MKIDTIGIDLGKTVFHLVGLNAEGEIVIRKKLSRKQLLHFTANLPVRLIGMESCGGAHFLGRALREQGHDVRLMPAQYVKPYVKTNKNDYIDAEAIAEAVGRPKMRFVPIKSDEQLDMQSLHRVRDRWVGRRTSLINQIRGLLLERGITIRQGRRYAEAALPGILEDPDTRLSGPLRTLLAQLQQELRQLQNQIEEVDEVIVKAASEHEACRRLMAIPGVGSLTATAIVAAIGNGIEFSKGRNFATWLGLVPGQYSTGGKQRLLGISKRGSSYLRRLFVHGARAVLQRQNKQSSGLQTWLAQLATRAHKNVVAVALANKLARMAWAVLAKSEPYRPPQSVSAISV

SEQ ID NO: 44076 - protein, 378 aa, unidentified
MTAVLQNKDSANGTTLYMALELSNKKWKLGFSNGEKNRHTTIVAGDWIDLHKQMDLAKQKLRLQEDCRIVSCYEAGRDGFWIHRGLEAEGIENHVVDSSSIEVNRRKRRAKTDKVDVKALLRLLQRYWHGDREAMSVVRVPTVEEEDQRRLHRERIRLIKERGGHSARIKSLLVAHGIRLEIRTDFLERLEAAKGGSTGYELGSDLKAELRREYERYRMVHQQIKALEGEQQLRAEEEETEAMKQINQLLKLKGVGWQSSWILVMEFFSWRDFRNQRQLGACAGLTPTPYASGDSEREQGISKAGNRRVRSLMIELSWLWLRYQPNSTLTQWFQQRFAGGGKRMRRIGIVAMARKLLIALWRYVKEGLVPEGAVFKVA

SEQ ID NO: 44077 - protein, 448 aa, unidentified
MAMRKKKIALDVINYCAAGIDVGSRSHYVAVGQDPVKDVREFGVYALNHEQMIAWLNERKVKTIAMESTGSYWQTLFAVLQCAGFEVILVNGQQIKNVKGKTDVKDCMWIQKLHSLGLLKGSFLPAEHTNQIRTYYHHRQSLIEESSKMINKMQKAMRLMNVRLDIAVSDIKGKSGIAIIEAILRGERNGEKLAELADWRVKKTKQEIAQALHGNWRKELLYELKDCYELYQIFQVKMTKCDKEIETLLQSITSHLEKTIVPKLPQKRQAKNQMNFDLTTFSYVYTGVNLFAIEGVSYNTVMSFIAEVGDGIKKFATAKRFASWLRLAPNNKISGNKRISSRTPKGKHRFALALLQAANTVGQMKKGALPSFFKRIAYKKGRQAAIIATARKTAVIIWNMINRQTLYKPLDERQYSQRVKNAILRNIKNKMQRLNLDINDLAQLSKSS

SEQ ID NO: 44078 - protein, 341 aa, unidentified
MGALGALKQITFDYLDTVTGEVRRGQIAPADRQHLRAWLARFAGCDDVAFAVEGCAGWRYVAEELAAAGIATHLGEPADTAALRGRKRHAKTDKTDARHLRTLLAEGRLPECWVPPAHILEYRALLETYHDLRRAHTAWVQRIHAVFFHQGAPPLGEGVLRTEQGLAGLRAAAAAHLSPAGQLQVATALDMLAAVEARMGPLRKQLTQTARHLTGARVLAERLYGVGPVTGLALTCWLAGKDRFSSSAKAVRFTGLDITVHSSDSKGPPGRLSPQGPPVLRWAVYEAGKTHARAAAPDHAYYAAVADRKNTKRAALSEARKIVRQACHILTELGDDALTAA

SEQ ID NO: 44079 - protein, 340 aa, unidentified
MNHYAGIDVSLECSSVCVVDANGKIWREARVASEPEALIAWFHSLGFGLERIGLEAGPLSQWLFAGMKAAGLAVELLETRHVRKAFEAMPVKSDRNDARGIAQLMRLGWFRPVHCKSMSAQETRATLTARKLVQSKLRDVENSLRGILRGFGLKVGKTTEREFAGRINQLVTNHPQLQRIADALLAVREVLRTEFAAFQKQTRKMAQSDSRTRLLMSTPAVGPIVSLTYASAIDDPARFRSSKQVGAHFGMTPKKHQSGETDYTGRISKIGDSSVRTALYEAAHIMLTKPVKGCSQLKSWAMRIARRAGMSKAKVALARRLAVIMHRMLADGTPFNAAAA

SEQ ID NO: 44080 - protein, 365 aa, unidentified
MRKISTMQQNGKKIFKGQLTIGLDLGDRSSAYCVLNEAGEIVLEHKLATTPEAMKQVFGSMPRCRIAMETGTHSPWVSRLLTALGHEVIVGHAQKVRWITKSRRKDDRLDARTLARLARIDPELLSPVKHRSAQAQLHLTEIRARAVLVSARTALVNAARGLVKSYGERLRKCGTQQLGRETTSALNAGLRQALEPLVQEIESLNDRIKDYDWRIEKMAKQTYPETTLLKQVKGVGDIIATAYVLTIEDPHRFRKSRDAGCFAGLQPGRRNSGESEPQMRISKEGDEYLRTLLVQGAHYILGPFGEDSDLRRWGQKLSARGGKNAKKRAVVAVARKLAVLLHRLWVSGEVYEPLRNSQKAMSAAA

SEQ ID NO: 44081 - protein, 338 aa, unidentified
MKVKRQNVGVDVSKDTLASCMVFLTEDFEIKIKASKMFQNNADGFSELFNWANSKKDSDLELSFTMEPTGVYYEGLAYYLFEKKQIVHVVLPSRAKKYADSLQEKAKTDKLDAKFLSRLGVERKLEKWHVGSPVYRKLKTLTRERNALIKERTVFQNQLHALNHSADPFKKSVTRLKQIIRFINKQIKTIELDCEHIVNKDEMVKAKIDKITTIPGVGFITAIVIIAETHGFALITSIKQLVSYAGLDIRIRESGKWKGKSKITKKGNVHIRKALYFPSYSSVKYSETNRKFYMRLFDKKGKSMVAATAVQRKLLGLIYTLWKNDTTYIDNYKQNKAA

SEQ ID NO: 44082 - protein, 347 aa, unidentified
MQFYTNSHPFYCGIDLHARILYVCILDTLGKTVFHKEIKAHPEALLKILSPYIGKIVVGVECMHCWYWVSDFCEEHKIDFILGHALYMRAIHGGKTKNDRIDSYKIACLIRGGNFPLAYTYPQEMRATRDLLRRRTGIVRHGADLKAHVANTTSQYNLPPNQVNLKNVCAREKIKTTFDNPVVQHNVDLDMALLDCYAKELSKAEYLIEQQAKQHQPVYYQLLRTVPGIGRILALTILYEIGDISRFETVQKFASYCRLVKCKAESAGKSYGTQGNKIGNAHLKWAFSEAAVLYLRGNPAAQKYLVRLQKRMSKAKALSALAHKLGRAVFFMLKHRTVFDEKRFLAG

SEQ ID NO: 44083 - protein, 385 aa, unidentified
MQYFCGLDVSIKETAVCVVNGDGDVLLRTSVPTEPAAIREVLGPFMQGLNRVGHEAGALSPWLQPQLLALGLPVVCLEALHVRAALNAQRNKTDAADALGIAHLVCTGWYKSAHIKSEACYRLRLLLTHRRNLKRKFLDLENAIRHSLKAFGIRLNKVGRAGFDAAVRAAVAEDPFTAELMDSMLTARAALWKQYLHLHDLVLAQVGQDELCRRFMGIPGVGPVTALSFRTAIEDPTRFKHSRDVAAYFGLTSKRWQSGSSIDIQGRISKAGDPDVRRSLYEAATVLLKRFRGQDKVKTWGLQIAKRSCHHKAAVAVARKLAVIMHAMWSDGTCYDGAAGVSSEQQCERTRKKEQKHLGRHAKAVSEREQRSESVATDPVERAGA

SEQ ID NO: 44084 - protein, 358 aa, unidentified
MQSVTRVGIDLAKMFIQVHAVDAVGKVVCNKQLSRDKFIAWCNQLPAGCLVAMEACSGSHAWARKLIALGLDAKIIAANHVAPYRLEGKGGKNDANDAAAICEAASRPSMRFVPVKTLSQQGMLCVHRYREGVKEERTANINRIRGLLAEFGIIAPQSPNKLRERLAEIIEDADNDLCGIARLVIQEAFSHWDDIDKQLGWCTQRISAHVKENQQAQTAVQLMGVGPVTASAAVVTVGDFKQFKNGAQFGAWLGLTPRQNSSGGKTKLGRITKRGDVYLRMLLIQAAKAAVMTAHKRDDPISRWLLQLREKSGWQKAAVAMANKNARILWAVMTKGCDFDPRYVSVKPSGGGSIAVAI

SEQ ID NO: 44085 - protein, 387 aa, unidentified
MPQLNDLSRSLVALDQDSTIIAVVELSQSSWLVGGVLPGIERQPQKKLEPSAERLLGLLHRWRDEAVRAGKKITRIALAFEAGRDGFWLARWLNARGVEAHVIHPSSVAVSREHRRAKTDRLDTELLKRGFLGWLRGERGHCSMARVPTIAEEDAKRPNRERECLVGERTRIVNRMKATLARLGVRNFKPTLRKAAERLATVHTPEGMPLPPNTLAELQRDMARLGFVVSQIREIEQARQKRLEQETETEPHAMVRQVARVIGIGIETADMLVNEVLSRPMRDRKAVARYAGLTGSPDESGARRREQGLARAGNARVRRGMIQLAWRFLRFQKQSALAQWYRARTADSRLGMRKTMIVALARKLLIALWRFVTTGEILEGVILRPAG

SEQ ID NO: 44086 - protein, 410 aa, unidentified
MEITLERCCGLDVHKKTVSACVLIRQGTGWEKEIRTFSTMTADLLALHDWLQALGVTQVAMESTGVYWKPVFNLLEDSFQVLLVNAAHMKAVPGRKTDVRDCEWLADLLAHGLLRGSFIPPEPIRDLRDLTRYRKSLTEERVREINRLQKILETANIKLGAVASNVLGTSGRAMIEALIEGNRDAESLALLAQGSLRKKLPLLRQALEGRFRPHHEFLLKQILSHLDFLEEMIEHVNEEVEHRLGPFSEEMELLKTIPGVNQRVAETIVAETGVDMSRFASARHLASWVGLCPGNNESAGKRLSGKTRKGDAWLKSALVESAWVNSRAKNYLGAQYHRIARRRGKKRALICVAHSLLVIIYHILKEGTPYYDLGEDYFDRMNLQVLKKRWVQRLEAIGFKVNLEPLPVAI

SEQ ID NO: 44087 - protein, 342 aa, unidentified
MNAVHTVVGVDVAKNVFQAYWVVAETGEIRNIQIKRAKFLEHFAGRPRCLIGMEACGGAHHWARELSKHGHDVVLLPAKAVGAFVAGNKSDAIDARAIWTAAQQGGIKRVAVKSEAQQAVLALHRMRQQLVKVRTAQSNALRGLLMEYGEVFRQGRASLARGIAAALERIEQRLPRVVVESLMELWQRVGQIDGQVKQIERRLKSLLTEDRNAQRILQIPGVGMLTATAVSATMGQASAFKSGREFAAWLGLVPAHTGTGGKTRMLGISKRGDSYVRTLLIHGARSVFSSTKHPGPWLQKISQRRPLNVAVVALANKMARTIWALLAHGRTYQPDHVSRAST

SEQ ID NO: 44088 - protein, 387 aa, unidentified
MSVIIGMDPHKSSATIEVVDEHGKIQAVGRYGTDKAGYAEMLKAGRKFDERIWAIEGCNGIGKHIAHRLVHDGESVVDVPPKLSAQVRVFATGNGRKTDPVDAHSIAMVALRSPNLLRVEVDPDLVVLGMLVDRRDALGRGRTQTINRLHRLLLELFPGGAKRYLSSRQARALIATIRPRDIVGKTRRRLVVELIDEFEGFDKKIKAVKKELKELVIARGSTLQDLHGIGPSGAARLLADVGNIHRFVNRDRFASWNGTAPLDASSGEQNRHRLSRAGNRRINRALHIMAVVQLRNPTKGRAYFDAKVAAGKTSMEAMRALKRRLSNVVYAQMLADQKRSETTGPGGHLGTTLQSGVTDLTPDIGSWDKPLPGPATSQPRTAVPAAS

SEQ ID NO: 44089 - protein, 324 aa, unidentified
MTSVSNVNATMPYLGIDVSKDKLDLAVEGQAEVVVFANDAAGITQLIERMRQLRPALIVVEATGGYERLLLNTALDAALPMARVQPGRVRHFAKAQGLLAKSDGIDARLLALYARCLQPAVSEKRSKNQLELHALLVLRRQLIDTRTTLTNQLRMADSAFVRDSLAQLARQVHDRVKRVDKHIARLIDSDDDLAGRRDLLLSVPGVGKTTAATLAAQLPELGKIDRCQISALVGVAPYNRDSGKWAGKRAIFAGRAAVRSVLYMATITAIRCNPVIQAFAERLQKAGKLPKVVIIACMRKLLTVLNAMARDGLTWSPKCRLQSA

SEQ ID NO: 44090 - protein, 342 aa, unidentified
MPVTIGIDPHKSTHTAVAVDRDEHQLARLTLPADGHQTDRLLAWAEPLDTDRVWAIESAAGLGRLLAQQLVAAGEHVIDVPPTLTARVRLLGSTKASKNDPHDALATAIAGLRHCGLRNVAPDGDTAILRLLADRHHDLTGLRTQAACRLHVMLRELSAGGAGLRISAAQGTEFLKRIDATDRVSIERKRLAAEHLADIRRLDIDIAAIKIRIANAVTASTTTLTELHGVGPLIAAIILGHVHDISRFRTRAQFASYNGTAPIEASSANKQRHRLNPRGNRCLNHAIHIIAVTQVAHDTPGRAYYLRRQAEGKTRKEALRALKRRVSNAVWRQLQIDAHARR

SEQ ID NO: 44091 - protein, 347 aa, unidentified
MGHYAGIDVSLECSSVCVVDASGKIVREGKVASEPVTLITWLGSLGVNLERIGLEAGPLSQWLYGALRETGLAVELLETRHVKTALSTMPVKTDRNDARGIAQLMRLGWFRPVHCKSMAAQEVRALLTARKLVQSKLYDIEMSLRGILRGFGLKVGPTTSQSFAARINHLVDGQTSLEAVAAALLSLHAVALREFKSLEKSVRQISRADARVRLLMSTPGVGPLVALTYVAAIDDPARFTSSKSVGAYFGLTPKKYQSGETDVSGRISKMGDGSVRTALYEAAHVILTRPIKGGALKSWAMKLARRAGMMKAKVALARKLAVVMHRMWIDAIKFDTDKASGCLRVAA

SEQ ID NO: 44092 - protein, 364 aa, unidentified
MMRFYGEQRRFYCGIDLHASKMYVCVLDDQGTVVLHRNMRTEPDALKRALAPYRESVVVGAECMFSWYWVADWCRAEGVEFVLGHALYMKAIHGGKAKNDRIDSEKIARLLRGGTFPLAHVYPKEMRGTRDLLRRRNLFVRRRAELLAHVQNTFTQYNVPTASGKGRDRVREGDVGSSFEDPSVQVMLDADVEVIEQLDETIVDLETHVLKHAKVHDAARLHLLQTIPGVGKVLSLVMLYEIQDVNRFENIGQFASYARLVACAKESAGKKQGSGGRKIGNAHLKWAFSEAAALMIRSSPEAKAFMEKMTRQRGKARAVALVAAKIGRVAYWIMKRKQPFDGQQFWKNSLPKGMPTVEGAAMTP

SEQ ID NO: 44093 - protein, 431 aa, unidentified
MSQFHDSFVVGIDVASEFSFVAMLAPSGELIRKPFRIDHTPTGFNQLLQILKKEEERLNSSPVYFVESTGIYHLPLFFFLKSNDLKGFVLNPLSVHSTKNYDIRKVKNDKKDALAIARLVKYQDIKVSLVPEPQILSLRMLVREYFALADNLTDCKLRFINDLRLVFPGFIEVFSSPFSAAALALLKEHPSPTSLQNADPQTLTELIAKAARRSFSWAKGKMINLLEYAQMAQSIGLPAVALEAKIRIQIQTLDAIQTSMANIETAIRQHISSDAFPKLFLTSIELLDAMPGIGFISAVTLIAEIGDFTKFPSAKALTAFLGIDPTVNESGNFKGDRNRMSKRGSKLARRILFTIAMASIRNTKKGTAINPILKAYYESKNKSKKKKVALVAVMHKLVHYIFAVLREQKAFVLRDPEIHRSLHIVNLKAVA

SEQ ID NO: 44094 - protein, 317 aa, unidentified
MTLPTASFVGIDVSKQQLDVAVRPRDETWTVAHDEAGLSALVVRLRTLAPTLIVLEATGGLEVALAGALATAGLPVAVVNPRQVRDFARSTGTLAKTDRLDAQLLAQFADAVRPEPRPLPDAQAQELTALLQRRRQLVEMLTAEKNRLTFASRRIRPQLQAHIEWLHKQLAQFDDDLRQLVHASPLSREKDDLLRSAPGVGPVLSTTLLAALPELGRLTRQQIAALVGVAPLNRDSGTLRGRRTVWGGRAHVRAVLYMSTLVATRHNPVVAAFYRRLRAAGKAPKLALTACMRKLLTILNAMLKHHTRWAPVLAQDA

SEQ ID NO: 44095 - protein, 344 aa, unidentified
MNYYAGIDVSLKESCVCVLDAGGKVIRETKVASEPEAIIAWFAQLGLAMELIGLEAGPLSQWLFAAMKQAGLAVELLETRHVRNALKTMTVKTDRKDARGIAELVRIGWFRPVHCKSISAQETRAILTARKLVDTKLHDVEMSLRGILRGFGLKVDKTTATSFAARIRELVDGHPTLQGLVDALLSIREVLARVQGFEKRVRTMARHNEQAKLLMSTTGVGAIISLTYAAAIDDPARFESSKVVGAHYGMTPKKYQSGQTDYNGRISKIGDASVRRALWQAAHVILTRSVKDSALKTWGLSVAKRKGMAKAKVALARKLAVVMHRMLVDGKSFDPALPKQAAAA

SEQ ID NO: 44096 - protein, 420 aa, unidentified
MKQQAERAAGLDVHRDNVVAATRVNEPSGEVAVTKKRFPTTRRGVRELAAFLSEAGVTRVAMEATGVYWKTIYYALEGLFDELWLCNAQHVKNVPGRKTDLGDAEWLADVAAHGMVQPSFVPPPEIRELRELTRYRKTQVDARAREIQRLEKTLQDAGIKLTSVASAVWSVSSRKIIEALIAGERNPAVLASLVLGKLRPKIAQLEEALDGHFGPHHAIVCRQVIEHIDFLDGSIAALSEEITARLIPFEAAVTLVCSITGIAELSAQAIVAEIGVDMSRFPTAGHLCAWAGVAPASHESAGKRRPAGTRHGSTWLKRVLIEVARAASRTKGSYFSAQYSRIARRRGPNKAAVAVANSILAVIWHVLTNGCIYEDPGADYFERRHDPAVEAKRLPAVEAKRLQARIEALGFDVTLTLKAA

SEQ ID NO: 44097 - protein, 338 aa, unidentified
MTIVFLGIDLAKNVFALHGVDATGRACLVRPCVRRDQLLESVAKLPPCTIGMEACSGAHHWARQFAGFGHTVRLMAPKFVAPYRMSGRRGKNDAADAAAICEAVQRPTMRFVPIKSELSQCRLAIHTVRQGWVKARTATINRLRGLMSEFGIVLPLKAQTVRRQTAEHADKLPGWMKTACLDLLDELRRLDERVAEYDEHIRTMAQADDRSKTLMQVPGIGATTASALLASIGHGHDFANGRQLAAWLGLVPGQYSSGGKQRLGRITKAGDSYLRALLILGARATLAAAAKKKDRLSRWAVALSERRGYWKAVVAIAAKNARMAWAMLAKGEAFKPVT

SEQ ID NO: 44098 - protein, 327 aa, unidentified
MACRPDGVKWTAPNDAEGIAATVARLRTMVPSLIVAEATGGYERALVGGLAAAGLPLVVANPRQVRDFAKATGQLAKTDRLDADILAFFAERVRPTPRPLPEPVLQQLDALMTRRRQLLDMLTAERNRLEHAAPPIRRSVADHIRWLERRVADVDRDLDHTIESSPVWRAKENLMRSVPGVGPVVSRTLVADVPELGRLNRKQIAALVGVAPLARDSGTLRGKRVVWGGRAPAPCSTWGRSSRPVATSSSVPSTVASSRPASPQKLALTACMRKRADDPQRDGADQYPVAANQSTGRCLTFKTVAIVQHIRFHPRHLIGVNDPAGLA

SEQ ID NO: 44099 - protein, 522 aa, unidentified
MAVRTTHKGKRSRCSDVLHRPRGLFHSRVQQVGPEHFGIVSVDCAKARSKWMLADFYGKVLIPPTVVAHNRVELDATIAQIRQALTTNGLYDMLVAIERTGRYHHVIRDAFVRAEFEARLVHPFATKRFRQPADPSTKTDDTDLAAIHRAAVNGFALLEPKLSEDWQSLQVLVRHRRNLVQKNAALRCQIREHLEAAWPGYAACFDELWDSHIAQALIRRYATPLDLLTESAPAIDHWLRQQGVRFQRPTLDTILVWAQRATPGDPLTELHRRLALAYDDDRLQKTQEIQALERDLARRLAQTPYVLLLSFPGINVVSAAEFAGEMGPIEHYANPRNITGRAGLFPSRYQSDQVDRPHGPLVRRGNRKLRAAILGVADNLLACNQHFKVLATRWKALGKHTRHTHVKIALRFCRIAFHMVAGRQVFHHPGLRERHYILDKLLAFHTEHQTPWEQTLRDLHYAIDQVPTKERGREAQPLADRLQRWRQRRRGPQALAEILAIVLARLGVGIVQSQESGEQDPT

SEQ ID NO: 44100 - protein, 326 aa, unidentified
MDEYIGLDVSLKETAISIRRAGKRVWRGKCASDPQLLAALIRKHAPAAKRVVFETGPLSVWFFHALTAEGMPAICIDARHAKAALDMAANKTDANDADGLAHLAEVGFYKEVRVKSFDSMLARTLVAARTRLVRIGTELSNQIRGLMKTFGLIVPAVMDSKFERHVEALLSDNVDLARIIGPLLEAWHAVRLRAAELGRKLLADARRSDACQLLMSIPGVGVVTATSFITAIEDPTNFKRSRSVGAWVGLTTRRYQSGEIDYDGHISRRGDSHLRGLLYEAATVLLTRSRSECDLRKWGLQLRERLGFKRAAVAVAASSPSSCIAC

SEQ ID NO: 44101 - protein, 409 aa, unidentified
MRKIKGKRSASSIVGCAPRCAEPHAETPEGVLTATIHRRQTVSKSITSFVGLDVHKDSTAIGEAEAGRESPRFIGTVGPDLGQLLKALKSLGRPETMLVVYEAGPCGYGLARQLRSRGYTCEVVAAGKIARRPGERIKTDRRDALTLARLARSGDLVRVMVPDERDEAMRDLSRAREDAVRARLKARQQLKALLLRHGHRYGGKSSWTLAHERYLAAVSFAHPAQDIAFAEYRQAVREGHERVERLTQALRDQTEHWRMRPLVAALSSLRGIDFVAAVTLAAEIGDFSRFAHPCELMGFLGLVPSEYSTGDTRRQGDITKTGNGHARRVLVEAAWNYRFPARISRVLQIRQEGQPKAVREIAWRAQLRLAHRYRRLSSRKLHPNKICVAIARELAGFLWDIARQVKVAA

SEQ ID NO: 44102 - protein, 406 aa, unidentified
MDPASNKHFGGTIMICVGIDVAKDKHDCFILSSEGEILADVFTIQNNAEGFDTLLQTIRRCTCPADKIKVGLEATGHYSYNILGFLIDKGLDTYVINPLHTNLYRKSLSLRKTKTDRVDARTIAAMLMSDVNLKSYTDTAYHNEELKSLTRYRFDKVRERAKLKTSISRLVCILFPELEKLVPSLHSASVYALLSQLPGAKQVAGAHMTHLKAILCNASKGRYGRDMAEAIRNAARCSVGSVMPAKSLELQHTIRLIRELDSEIQDIEAAIQTIMEEIASPITTIPGIGVRMGAMILAEIGDFSRFDSPDKILAYAGMSPSTYQSGQMSLTGAYSHMEKRGSRYLRYALYNATKYVCLWDPIFSAYLAKKRAEGKHYNVALSHAAKKLVRLIFAMERSRQPYSSAA

SEQ ID NO: 44103 - protein, 344 aa, unidentified
MTQYAALDVSQEMTAVCLVDEAGQVIGEAKLPTCPDAIATWLGKRAPNLVRVGLETGPMAVWLWNELHAQGVPIVCLDARHAHGALKVRPNKTDRNDASGLAQIVRTGWFKQVQIKTRSNYEVRALLTARDVLVRIRVKMENEIRGLLRTFGVLFGKATGGFSRRADDIVAGELDVSPTMKRLVEAIVQARAAVLDQIKGLDRQLIATAKVNPIARLFMTAPGVGVITALSVASAFDNAERFKRSSSAGAYLGLTPRRYESGEVSRNGRISKHGSTLTRKHLYEAATTLLTRTVRFSTLKAWGLRLAKVSGFKKARVAVARKLAVVLHAMWKSNTEFRWSEAAT

SEQ ID NO: 44104 - protein, 376 aa, unidentified
MGDHSEAFVAFDTSKLRNAVAIAEAGRSGEVRYLGEIDNTASATAKLVKKLAAKYGRLSFCYEAGPTGYGLYRQITKLGHECSVVAPSLIPKKAGDRVKTNRRDALGMVTQFRAGELTAVWVPDPRHEAMRDLTRARGAAVEDLRSKRQQVSSFLLRLGLHYGGKKTWTKTHMSWLASQKLDHAEQRIAFEEMLLAVRQAQERIARLEEAIRTAVPDWSLAKLVDALMAMRGIDMISATGFLAEIGDLSRFRTPRELMAYLGLVPSEHSTGDTVRRGGITKTGNGRARRILVECSWSYRHPPRVGKKKQDKVAAAPRRVSEIAWKAQNRLYGRYRALTRRGKLKTVVITAIARELSGFIWAINREITAAGTAVTSQ

SEQ ID NO: 44105 - protein, 331 aa, unidentified
MMYAGIDLHKHDVVVAAENEHGPVGKTRRLPCQDEGAIIKHFAGLRPFCAVIEASSSYRWLYELLSPMGDVVLAHPLRLRAIVTARAKTDKLDAAMLAKLLRAGFIPEAYIPPTEIQELRDVTRGRARLSYAATSTKNQLHVLLCRANIHPPFTNVFCKAGRRWFGELDLGRGASAVRDELLRRLVHYDEELKRVDGCLAEMAARFPQVECLLDLHGVGLYTALLIVAELGEPDRFTNANQAGAYSGLTARVHQSGGHDYHGHISKQGSRWLRWVLVQAAIKIVRKDEKLKNFYTRIRKRSGRNVARVAVARKLAEICWVRLRRWHRDHAA

SEQ ID NO: 44106 - protein, 338 aa, unidentified
MNIVFLGIDLAKNVFQLCGLNQAGKPVYTKRTGRKELLQTLANIPACLIGIEASTGAFYWQREFEKLGHKVKVISPQYVKPFVRGQKNDGNDAQAIAVALMQPTMQFVPPKSPEQQDIQALHRARQRIVNHRTATVCQIRGLLLDRGIPIGSAVSRARRAIPLILEDAENGLSSRMRRTIAELYDLFNDLGRRIHFFDKEIETVFRQSEACQRIAKVKGIGPKTATAVVAAIGKGTEFKNGRHFAAWLGLVPRQHSSGDRQVLMNMAKKGDKHLRTLFIHGARAVVRVATNNNDGHMNQRVNQLKERRGFNKTTVAVANKNARIIWSMLRNETGYQVV

SEQ ID NO: 44107 - protein, 413 aa, unidentified
MIVGIDVGSEKHYFRAFNWRGIELTRKPVAFSNSMEGFNSFYNTIVELMQKRELEEALVGIEPTGHYWFDLGQFMGEKDIKFVMVNPHHVHKTKELDDNSPSKNDRKDPRVIAGLVRDGRYFYSYMPTGVYAELRNASNRRFVLVEEQTRAKNRLQKWIAVYFPEYKGIYTHIDAKGGLLVLKQAPTPEEIVRLGVEGIIKIWKDAKLRGNGHKKAMLILAAAMRSIGLKAGLTEARMEIQDLIEDYELQTKRLERVNDLIKELCQQVRYADKLLEIKGIGITTVAGFIAEVGDITRFDSTKELQKLAGLELVSDSSGKHNGKTKISKRGRKRLRYLLFEAAISVVGKNEEFKEIHRYYTTREKNPLKKMQSLIVVACKLIRVFHAILTKGIRYDASKMLKDIRHPGEQLKAA

SEQ ID NO: 44108 - protein, 410 aa, unidentified
MENCKVIVGIDVSSKDSTVCVLMDKVRQGKTFKISNDMVGFQQLYKRLRLYSVIPLIVFESTGVYSLSLQAFLEKKHIQYLKLNPLKAKKLMDNNLRHNKTDQVDAYRLALIQFNAPQKLLKPQSRAYHEMQNASRYYEELNKAMVVAKNQLHRNLQTTFPQIENLMCHPTGKIYWSVVALFPHAQAVLDSNKEHILGELETISGLSQKKAEYLTQRLISLARLTCAYDNKDSIVIRAIQRNIASLFSLDQEKKEALAYLYKLASKNQADTRILTIYQSIPGIAKTTALRLLAELGDLRRFDSPNQIDAFIGIDPGIYQSGELDSHLSITKHGNSIARKIMYLSIGQMESVKTTQPCHITDYYDRKKSSQSRGFKKIAIASVHKLIRTMYALVAKNQLYDYNVATRNQRL

SEQ ID NO: 44109 - protein, 370 aa, unidentified
MRQSTPLFVGLDVHKDSIAVAHAEGGTAAPPVFVGAIGSRQADLDQLLRRLHSKAAALTVAYEAGPSGYGLYRYLTAKGVACHVVAPSLIPRKPGDKVKTDRRDAVTLARLLRSGDLTAVYVPSVEDEAIRDLCRARDAARVTMKDAKLRLKALLLRLGLHYVGRADWNAAHRRYLAKVVCPTPAQQIVFQESVRAVDEQVDRVARIETELRAAAPRWRLDPVVQALQALRGVQWRVAITVVAELGDLTRFENPRQLAAFVGLIPSEYSSGGSRRQGGITKAGNGRARRALIEAAWAYRHPAKVSAHIQQRIDHLPKPLQDIGWRAQVRLCKRFRRLTARGKHPNVAVTAIARELIAFMWAIAKAVPLTT

SEQ ID NO: 44110 - protein, 356 aa, unidentified
MKNTTLTKSYDGEDVYVGIDVHKKNYVVVVRVKQTIVKKWTTAAKPDALAQQLRKYFEGGILHSVYESGFSGFVLHRVLTESGIDSIVVQAASVEVAAYDRVKTDKRDAAKLAQQLEAGRLRGIRVPSEAQEQHRLLSRTREQLVQERAAVKQKIRMKAHQFGLIDPDERREMSPKLVSELLKRSPSEAFTITVEAHWQIWQALDQQIEKLVKLLKQQAQTDANEKVYRSVPGVGLISGRVLSNELGDMSEFSNERKLFSYTGLTPSEQSSGEQIHRGHITKQGNRHLRGLLIEIAWRAIGKDSTLLTFFERLYPRIGRKKAIIAVARKLLGKIRAAFRKGELYQLDYPANSIATS

SEQ ID NO: 44111 - protein, 345 aa, unidentified
MLYTGIDLHKRFSHLTTVDEKGMIVKQEKINNEPVHILNYFKSMKDDHKAVVESTLGWYWITDLLHANGLDIVLANPRLLKAISYAKVKTDQLDSTTLAQLLRTDYIPEAHQLNPDLRAKRDLLRSRLTLVQRKTRAINNVHGLLDKFNLTDPNDLKGLYQFQFQQYDQQVSFLHAQVKELEKTIYPLIIHNDDVQRLLCLPGIGKISAFTIYLEVGDFARFPTEKQFFSYCRVVPGASNSGGKCKHNRKASKAGNKYLKIVFNDAAVSAYTHYPVVRDFYNRKCRKKNKHLARNLVAKELARIAYHIITKNCDYDYTFKGKELTRKKFWRWARSTSPGMRLVAV

SEQ ID NO: 44112 - protein, 411 aa, unidentified
MYYVGIDIAKSFHVVSIINDNETKVINKPFKINNDLKGFEKLLTILDSVTLNKDDFLIGLEATGIYGENLLEFLNSKGYSVKLLNPFQTSRYREQITMKKVKNDNIDSLVIALFLKDGKYSSGYVTDDEYQSLRTLYRNRASIQADMKEVKKRILTQITVTFPEFESFINPFTISGLALLEKYPTAHHYKHSSVDRIMKVFTHIQGNNFNRDKALRLLELSRESIYSGKAKDARAIAIRSTIRLLKMYLSEIDIIEAEIVALLDQKGINSQTLDELPSKNSLIENLKTIPGVSEKTIAAVISECGDLTRFPSIPKFIGYLGLFPTENSSGNSKSVGHLSKRGSSLVKHALYLSATSCLIHNKQMKQLYDTKRSQGKSKKESLVAVSRKLATIIYSIFKYNTPYNPNRVFTN

SEQ ID NO: 44113 - protein, 418 aa, unidentified
MEVLFPCCCGLDVHKDTVVACLVRSVTAGVRTKETRTFGTTTGELEALGAWLRAVGCTHAAMESTGVYWKPVFNILTEPGDDLAVWVVNAQHARAIPGRKTDVKDAEWLADLLQHGLVRPSFVPGREQRELRDLTRTRTSLVDERSAAVKRVQKVLEDANIKLSGVATDVMGTSGRAILAALLEGTADPAEMAELARGKLRAKIPQLERALAGRVREHHRQLLALHLSHIDFLEGAIAELDARIADKTRPFEAELARLDTIPGVDRRTAEVLVAEIGVDMAQFPSARHLASWAGMAPGNNASAGKRKGGKTRQGSKHLRRALVEAARAAARTKQPGRTAFAQQYRRIVVRRGPKKAAVAVGHAILVTAYFLVSRHTTYREPDPSQFDDRRRARVRQRALDQLRALGYHVTLAPKEVAA

SEQ ID NO: 44114 - protein, 456 aa, unidentified
MKIPQSTIRLLTGRLVKILLYREVSTMKSNTQNAKIEAITEKTLVLGIDVGSETHYARAFDYRGIEYSKKPFKFSNTEVGFATFKEWILDLKERHEKDKVVPGMEPTGHYWFNLGKFLQDNEMKPVLVNPHHVKKSKELDDNNPTKNDRKDPKVIAGLIREGRYMIPYLPDGVYADLRTASNIRFQLQAELTRIQNRISRWFNIYFPEYKTVYGKPDAKSGMLILKAAPLPEDILTLGIDGVNQIWRDAKLRAVGKARAKTLIKAAEHSIGSKEGTMSARMEIRMLLEDYESKNMRLQEVMVLIEELVKEIPMAEKLLEIKGVGIRTVSGFLAEVGDISRFNNPKELQKLAGLALVENSSGKHKGKTTISRRGRKRLRYLLFEVAMSLVAKNPEFRELHNYYTTRRLNPLKKMQSLMAIAAKLIRVFYAMLTKGVDYDPKKMISDIKRPTVYLQAA

SEQ ID NO: 44115 - protein, 441 aa, unidentified
MAMRRRDEEVVFPHAAGIDVGASSHWVAVPRDATEDPVREFGPMTDDLNAMADWLVASGVDTVALESTGVYWIPVFEVLEQRGLKVWLVDARQMKYVPGRKSDIQDCQWLQKLMSLGFLRAAWRPEGDVCVVRAVARQREILLAEQASWVQRMQKSLVQMNIQLTEVLTDVMGTTGQAIIRAIVAGERDPKALAKHRNRRVKASAEEIAKALTGNWRDEHLFVLCQALAMYDDIARHLTECDSKLQALLRALGQCNVDLGKAPRTGSKLRDQFDARQILANWAGVDLTRINGLGLTAVMKILSELGPDLSRFATVKHFCSWLGLCPGTKISGGKVLCAKTKHSANRVRQALKMAAMSLSHSDSALGAFYRRLCSRMDKPRANTAAAHKLARMVYFMLTRGEDFVDQGQQRYEEQQRQRSIAALKRRAAALGFDINPTPAPA

SEQ ID NO: 44116 - protein, 361 aa, unidentified
MTGAVAGIDPHQDTFTVGIVDRNGVELATTTFPNQGSGYLEAVDLLATHRVGQVGVEGTASWGQHVAIALVAAGLDVREVPAQRSAQQRRARRLAKTDAVDAVAAARALLAEPTLGPAQALEIYDPLVAKIEAVLEHRRCLVEARTLMLHYAQDQLAKLPTEIRDQLPTTGKIESRLRKLEAIDTTIVSTQAGAYRLSWLLPLIDQDRAARRQIRALERRIDELLDAHGTTLRDEAGIGPIAAATLLAEVGDPFRFARESKFARWSGTGAVALSSGEGDGPPVRHRLDFRGNRRINSVLYIASVTQQRDHDAARTYINRKTTEGKTRREARRAHKRHLANRVIRRMWADERRRATAHPIAV

SEQ ID NO: 44117 - protein, 343 aa, unidentified
MQAITTIGLDIAKSVFQVHGIDAEGKVMLRRQLKRRYVLAFFQKLPPCLIGIEACASSHYWSRELQALGHSVRLMPPAYVKPYVKRQKNDMADAEAICEAVTRANMRFVPIKTPEQQSGLMLHRTRHLFIRQQTSVINAIRAHLAEFGVTAPVGRKGIEELLRVIADPSDKRVPDVVRACLAALGSQLISLKKQILDFDRMIMAWHRSDQTSKRLNCIPGVGPLLATALVASVADPKVFRSGRNFSAWIGLVPKQHSSGGRARLGSISKKGDRYLRSLFVAGAFAVIRYAKLHGTKYRPWVAALLARRPTKVAAIALANKLARMAWAMMATGERYNYPASLRV

SEQ ID NO: 44118 - protein, 321 aa, unidentified
MQQTAFFVGVDVSKATLRCAVHGRAAGQELANEDGAIRAWLASLPAHTMIASESTGRYHQLLVQLAHASGRAAFVLNARDVFFYAKALGARGKTDRTDAQIIARYLAEHHRSLKPWVPASAVQTRLHELLRCRAAVANKRSALRQVLRGVDELGAQATLMDGRFDELLHEIDARVAQLLEQDQQLSLKCAALRSITGVGQLGSALLGALFSRIPFSNADAVVAYSGLDPRPNDSGAKTGRRRVSKRGSPQLRRQMYLSAFAASHSKALGPLYRSIKARGFAPTQALVILARKLLRVAWAVWKSGQAFNPSLLGGANACPRT

SEQ ID NO: 44119 - protein, 339 aa, unidentified
MKDFMEHAIIKQNVGIDIAKDNFKVCFSITTSNLSTKVLGSRTFSNHYKGFKEFVDWLSRKRKSSDDVYFTMEATGVYYENLAYYLWQEPSFRIQIVLPNKVKNYGKSLDIKSKTDKIDAAILARCGLERALRVWYPISPNLLELKQLTRERDATSRSRTSASNRLHAAQHQGNPNKKVIVRTKAQIALFDKQIKGIEKEIKALVNQDENLKKKFAYLTSIPGVGLITAAVIVAETNGFETFTNIKQLTSYAGLDVKIVESGKWKGKSRISKQGNSHIRKALYMPSMSRVRYDKGAKRFYENLNTRKGNAMSALVAVQRKMLGLMFSLWKNQQMYSAPD

SEQ ID NO: 44120 - protein, 387 aa, unidentified
MPQPNDLSRSLVALDQNSTIIAVIEMSQSSWLVGGVLPGIERQPCKKLEPSPERLLAVLHRWRDEAVRAGRTITRIAVAFEAGRDGFWLARWLEARGVEAHVIHPSSVAVSREHRRAKTDRLDTELLKRGFLGWLRGERGHCSMVRVPTIAEEDAKRPNRERECLVGERTRIVNRMKGTLARLGIRTFKPTLRKAAERLATLHTPEGAPLPPNVSAELRRDMARLGLLIGQIREIENARQERLEQQPGTGPHAMVRLLARIVGVGIETADMLVNEVLSRPMRDRKAVARYAGLTGSPDESGTKRREQGLARAGNARVRRGMIQLAWRFLLFQKESALALWYRARTADSRLGTRKTMIVALARKLLIALWRFVTTGETLEGVVLRPVG

SEQ ID NO: 44121 - protein, 359 aa, unidentified
MTVTMTFAGLDVHARSTHAAAIDVRSGELRRARFAGGSDDVLAWLGQLPQPLQACYEAGPTGFALYRAAEAAGLRVDVVAPSKTPRAPGDRIKSDRKDAELLARLLMAGQLKTVAVPTASFEAARHLARAREWVRGDLMRGRHRVTKLLLLHGRVYPGLSTWTVRHRHWLGAQCFDEPASELAYLDALAAVDGLVARKQALDERLSRLALEGDWAATVARLRCFRGLDTLTALVLALEVGDFGRFRRPAQLASWLGLVPSLDQSGQSRRQGAITKTGSSYARRLLVEAAWHYLRQPLIGATLSNRQAGQPAHVLQIAWRAQHRLYRLQKRLRARGKPGNIATVAVARELACFLWAAAVV

SEQ ID NO: 44122 - protein, 331 aa, unidentified
MDTDTGEVTEKRLAHREEAEKFYRALAGQKVRVGMEASGHARWFERLVAELQFDLWIGDAAEIRTKRVRKQKTDRQDAQLILRLLLEDRFPQIWVPSGENRDLRQLLWHRHRMVQARTRIMNQLQAVALNEGLRCKKRLWRERGRQQLESFLLAPWASRRRRDLLELLDRLNPTIAELSQAVEQEVEKCPEAQRLRTHPGVGALTALALVLIIGKAERFQCGKQVASYLGLVPLEDSSGNRRRLGHITKQGSSILRFLLVEAAQVTVRSLPEWRSKYLHLMMRRGRKIAKVAMARRLAVRLYWMMRQGWDYQQWVKFGSHAGQPGNRHGVQ

SEQ ID NO: 44123 - protein, 338 aa, unidentified
MALYCGIDLHSTNCWMTIIDKERKVTRETKVGNDLEAILRFLAPDRAEIEGIAVESTFNWYWLVDGLMDEGYQLHLTNTWAIKQYEGLKYTDDRHDARWLAHLLSLGILPEGFIYPKQERVVRDLLRRRTFLVHKRTSFLLSMRGAFECRTGMRTTSDDIKKWTPADVEQHIDDPLAALGITCLLEPMAVLSDQIKILEKEALKRAKVRNEFRRLQSVWGIGKILGLTIMYEVGDVGRFAKVGNFASYCRLVKSDRFSNGKRKGSGNSKNGNPYLSWAFSEAAHFAVRFYEPAKKFVQRKRAKTNGIVAIRALAHKLARASYYVMKDQVDFDPDKTFS

SEQ ID NO: 44124 - protein, 407 aa, unidentified
MQLSALHKRVIGLDVHQAQITACALIEQADGTTRIEHRQFGAFARDRRELAHWAAALRPDEVVMESTGIYWKSPYAALEAVGIAAKVVNARHVKNVPGRKTDVGDAQWLATLSRAGLLNASFVPPANLRELRLISRERQKLVSQLARDKNRVHKILTDGGIRLNVVVSDIHGKSARAMIKALLAGAQPQQVLKLASRRLKASHQQLLDALQGNLTESHRFVLDELLEQIEHIEARITRFEARLLAALGPQHDILALLQTLPGVDLIGAAMLLVEIGTDMSVFGSPERLSSWVGICPGNNESAGKRKCGKMRKGNPYVRRLLCEFAHAASKTTSVFKSKFQALLLRRGYKRAIVAIGHKLVRTIFFMLNRREYYRDSAVNYEELAVRRNAPRWIKSLTRFGFIAPVSA

SEQ ID NO: 44125 - protein, 406 aa, unidentified
MLFVGDDWAEDHHDVEVQDETGKVLKRVRLPEGMAGMSRFHELVARFVAEDAEPSDVAVCIETDRGPWVRALRAAGYRVFGVDPKQAARHREILTSSGAKSDKGDAHALADMIRTRRHQLRQVAADSQIAEAVKVVTRAHQTLLWERTRHMLRLRVALRDYFPAALTAYKPLGLTSEAVLRLLAKAPTPQTAAKLTITQISAALKGRRDVAAKAAAIAEVLRAEHLGQAPLVTGAYASTVKALVAVITVLNSEIKTLESEVEAHFGRHPDAEVILSQPGMGVILGARVLAEFGDAEGRYASAKARKNYAGTSPITRQSGKTRVVQARYVHNDRLLDALHLQASCALLHDPEVRAYYDQLKARDISHNAALRQVGNRLVGILHGCLKTHTAYDQATAWSHRNHDLAA

SEQ ID NO: 44126 - protein, 354 aa, unidentified
MTSTKYIGMDVHKESISIAVMNAAGKIVMECVIETKANMILQCIDGLRGDLHVTFEEGTSAAWLYDLLKPHVTELIVCDPRKNASMREDNQNDKIDARRLAELLRIDHLAPVYHGEHGLRTLKELVRSYLTVTKDLVRVKTRVKAIYRSWAIPCNGKEVYAACHRAEWLEKIKELGVRRRAEFYYQQLDALRVLRQGVRHELLAESKKQRAWKRLCQIPAIGPIRAAVLLGILQTPHRFRTKRPLWKYSGLAIETCSSADHRSIHGQLQRSKKNSVRGLNQNCNHDLKNLFKGAAVIASSKPGPFQEFYAALLANGMRPEMARLTLARKIATIVLIVWKKGVCFDAQHLKPQTA

SEQ ID NO: 44127 - protein, 342 aa, unidentified
MRYYAGLDVSVKTTAVCVVDEHGKVVRERSLATEPESLADWLSKTGLPIDRVGHEAGPMSAWLHEGLAGKGVPIVCVEARHMQSALAAMRNKTDRNDACGIAQMMRTGWYRTVHVKSGRAQELRLLLVARQTLIDNRRNIENTIRGTLKVFGIKVGPVSRLRFCERVRELVCNRPEIAETIEALLKARDALMAQYHELHRRLKAIARADEVCRRLMSAPGVGPVVAVNFRAGVDAPERFARSSSVGAHFGMTPQRYASGETDRQGAISKCGDEMVRTALYEAANVLLTRTKRASGLKTWGLAIARRSCMAKAKVAVARKLSVILHRMWADGTEFCWGEGAPA

SEQ ID NO: 44128 - protein, 411 aa, unidentified
METLISRCAGLDVHKETVEADVRRIEPGGRLHHQTRQWGTMTRDLVAMADWMAAQGVTHVAMESTGVFWKPIFNILERRFTVMLVNARHLKQVPGRKSDVRDCQWIAQLLQHGLLKGSFIPPRAQRELRDLTRYRTQLLEEKTRTANRIHKVLEDANLKLASVASDILGVSGRAMLKALIEGEKDPAKLAAFGQRKLRGKIPELEKALEGHVTEHHQFMLRLLWKQLTQEEGLIAELDAGIEEKTRPFAAEMERLDAVPGVDRRVAEVVLAEVGADMKPFPSHEHLASWAGMCPGNEESAGKRRRRRILPGNRWLKQTLVQAAWATSHAKNTYLASQYRRLAGRRGKKRALVAVGHSMLVIFFHMLKEGRTYADLGGDFFDRLEPVRLTRYYVKRLEALGHTVTLETLVGG

SEQ ID NO: 44129 - protein, 366 aa, unidentified
MRVYVGLDVHSKRSVFVIEQEDGKVIGRGQIPTTPAGLGWLKKEYRLGPGTAVALETGTVAFYVARELTRLELKAVVIDAHEVRVKAQRPGQKSDRRDAFEICEGLRRGIYRTIVHVPSEEISRLRETLSRRRHFVWVRTGEINAAKRLLRAAGLGHLSKSLGTEAAWEKLLVALPVEGELRSYVAQHGAVWRCVQEQVAVLDEALATQQAPVASAVERLQSVPGVGPIVALTAVAVFSDVTRFGSCKEAASYGGLVPSSNQSGDRDTHGRITKRGSAALRSMLCEAAHHAARPTHPLNPYFAKLCAKAGYKKAVVAVAHRLCRILFAMLRDGAVFDIGKLGVEEGSFRQTRIRHYRLKAVPAVRG

SEQ ID NO: 44130 - protein, 414 aa, unidentified
MDIVYTHCAGLDVHKKTVVAAIIVPAAEGGPNQETRTFGTMTADLLALSDWLMAHEISHVAMESTGEYWKPVYNILETNFEVLLVNAQHVKAVPGRKTDVNDAEWLADLLRHGLLRASFVPPLGQRELRELTRHRSNFIRERATVVNRVQKVLESANLKLGSVASNVMGVSGRAMLEAIIAGQATPAQMAELSKGRMREKREQLAKALEGRVKPHHRFVLTELLCQIDNLDEAIARFDQEIEKYCAPFEAAVVLLDTIPGVARQTAEIIVSEIGTDMQRFPTADHLASWAGVAPGNDESAGKRRSGKTRKGNKPLGAALNQAAHAAARTKGTYLSAQYHRLAGRRGKKKAIVAVAHSILVIAYHLIQRQEPYRELGGNYFDQRRPEATAKRLLKRLEQLGYAVQIQQQPSLAAA

SEQ ID NO: 44131 - protein, 310 aa, unidentified
MDAIVVGIDVSKDRLDVAVRPTGETFVVTRDAEGLDALIARLKPLAPTAVAVEATGGFEMIVAASLGAAGFAVVVVNPAQVRAFAQALGKRAKSDPLDARVIAHFIEATKPAIHPLPDAETRFLADLIGRRRQIVAMMVAEGQRLKRLPDKRLQKSIARLLAALQKELSSLETHIDEVVRGSPAWREKEDLLASVPGVGKVIARTLIAELPELGRLDRHKIAALAGLAPWTRQSGTWKGRSFIGGGRTDVRAALFLGAMVAARHNPPLKAFRDRLVQAGKPKLVALVATARKLLTILNAIIRDRKPWQPA

SEQ ID NO: 44132 - protein, 363 aa, unidentified
MNATAALPVVGVDLAKSVFQLAVADGAWHVIEQQRLTRTQFERWFSNRAVGLVVMEACGSAHRWARWLNGLGIEVRLLPAAYIRAYVKRNKTDSADACALLEAARCAEIIPVRVKSIEQQALQGLHRTRSLWMGTRTSRINALRGFCREFGIVIAQGSRLGVEQIGRVLADPHAPVPTLIRGTMTLLVEEIRLLEVRIAQLERELTTLARQSPACTTLLSIPGVGLLTATAMVAATSGEVSHFRDARHFASWFGLTPKERSSGGTRHLGRISKRGDRYLRMLLTHGARSVLRAASVARHAGRTIDALRHWALAVQGRSNHNKATCALANKLARICYATLRDGEPYGTARLQNKVTRTAFALPA

SEQ ID NO: 44133 - protein, 371 aa, unidentified
MSNGTTFCLNPTYYIGMDLHSNNVVVCILQNAANNDGTLTKKVIRRAKVKLSPDLSELYEFLLPFCKDHPHQATVESTYNWYNVADLFERHQWNLSLADPTTVKNNKIKLSNDETDAEFLANQMRLGALKAAKIITKKNRAFRDLVRLRVDLVLDRGRYRTILKNFFNNQKYMKISTTQLNRLADECFNGRSDCLSKYFDEPNVATKAEHYLLAMHQLSSQIEALETLIKEQEQCNNLTCHQYLARLCSIKGCGFILASIIASEIVDIHRFRSDRDFVSYCRLSPAIRISNEKDKGKGEKKNGNAYLSWAMTELANLMVRFNPEVKKKYDRLFKKSRLRAKAIRSLAAKIARCIWHMLMKNEDFEIQRAFI

SEQ ID NO: 44134 - protein, 365 aa, unidentified
MPSVSHLALTHLGLDVHKDTISVAILTPDRDGPDVDRIPHDEPSVRRLVGRLGDPRWLRACYEAGPTGYELARLLHSMGVRCEVIAPSLIPKAPGDKVKTDRRDCRRLARLHRAGELVAIRIPSVQEEAVRDLCRARADMVEDRTRARHRLSKFLLRHGRPWRGGNAWTLTHERWLLAQRFHEPALAATYAHYRAVLQGRDAQLEAIEADLAVWYDLPPFADAVHRLSAYRGITRLGALTLASEVCDWRRFPRAAAFAGFCGLVPSEYSSGTSMWRGHITKCGNAHLRAQLVESAWAYQHRPAVGVDLRGRQQGLDPQVVTRAWAAQLRLCGRFRRLAARKDSKNVVATAIARELAGFLWAEMAA

SEQ ID NO: 44135 - protein, 400 aa, unidentified
MNVNELNYLNLRVCGIDPHKRFFKAVIVDMNTLNTLYESNFPNNKSGVTELEAKLREYRCNLVVVENTNNFSSALYYYLKRHNFDVKSVSPKNVPQKPKKSDRIDAKWIAIVYAKGLVEEDYVPPEDIQHLRDLVRARERLVDMRTALKNRVHTLLTRGALHLNKLYSDIFGKKGREAINAIVSSNLDDVDERVSQVIGDAFLELINKRVMNLFMGLIEILLDRRIKELEEVIAAYVDTHSSIKAMVERIMTIPGISLVTAAIIVAEVGDFTRFPDKKQISGWAGIVPRTRESAGVQRGYGITKRGSPYLRHALHEVANVIILRKEPKELYAFYWRVRRRSGKYKAITALAHKVLIVLWGMMTTGSNFEMDSNMRRLYNRKLKRFNNMAELGKRVLLEVT

SEQ ID NO: 44136 - protein, 429 aa, unidentified
MDQSVSLTPPIVAWVGLDWADQKHDVCLQVSGSAAVECTVVEHQPEALHGWVADLRRRFPHGQVAIGLEQARGSLFYALMNYEFLVLYPIPPKALADYRQALYPSGGKDDPTDAQLLLEFLRKHPERFRPWVADDVQTRQITLLSEHRRQLVDDRTALTNRLSTLLKGYFPEALEWAGDLRTPLAWDFLAQFPSLERAQRASRLDVRKLYRAHTHRTPQQLEELWEQIRTAQPLTTDRAVIESSVLMAQILVGQLRVVQAGVKSLERRLRDLFTAHPDRAIFQSFPGAGKALAPRLLAAWGSDRKRFAAADNMQCFAGPAPVTVQSGKSKWVHRRFACPTFLCQTFHEFAAQSRLRSPWAQAYYQQMRDKGTDHHPAVRALAFKWIRIMFRCWRDHTPYDEVRYQQALQRRGSPLATTLNRLAAPPARA

SEQ ID NO: 44137 - protein, 404 aa, unidentified
MIFVGIDWAEAHHDVCLLDEAGEVMATRRIPEGLEGVSCLHAMVGEHAEEPDEVVVGIETDRGLLVGALLAAGYRVHAVNPLAASRYRERHTTSRAKSDRGDARMLAYLVRTDRQHHRAVAPDSELHGAIKVLARSHQNLIWTRQRQTNALRSALREYYTGALKAFTELGHADALAVLAVAPDPERGRQLTEARIVRALRKGGRQRNLERRAREIQAALRAPQLEAPPLVVEAQAANTTALVAVITTLDEQISRLEASLVDAFDRHPDAEILRSLPGLGDVLGARVLAEFGDAPDRYVDAKARRNYAGTAPITRASGTSHVVLARLVRNKRLFDPCYQWALCALTASPGARAYYDAHDPGPRTSKVARRKLANKLVGILHGCITNRTLYDEELAWHRASEQLAA

SEQ ID NO: 44138 - protein, 335 aa, unidentified
MSDPLPPLGLDVAKVSFQAHLRWDGKSASHGFANSAGGFEQLEDWTTSLGVQQFHACLEATGTYSDALADYLCSHGHQISLVNAARVVAFRKSEGIRSKTDQQDAKVLALFCEQKRPALWRPAPAELQELTCLVRRRLEVQAMKQQEVNRLENSRWDEQTRQEIQAHIASLQTQLSTLTKRITRHLAAHASLQQASGLLVSLPGIAQLSAAHVLAEGIWPTNFQSAAQVVGYSGLAVKQERSGTSVHGQERIDRTGNAQLRKALYMPALVAMRIDADFARWVAGMRAAGKPNKVIIVAVMRKLLHLIYGVLKSQQPYDPRKAFPSHYQEEVPLAA

SEQ ID NO: 44139 - protein, 384 aa, unidentified
MLIGIDPHKTTHTATAVEPSTRQEVASIRIEASLREYRRMLTWAQQWPQRRWAVENAEGLGRHLTSWLLARGEAVVDVPTTATARVRQLSRGGGRKNDRIDAAAAACVAALQGDARPLEAEGPADAIAVLDEHRVNLTQSRVRAVNQLHALLRALIAGGAPRDLSAGTAATLLRTVRPTGAVEEARKAVAKDLVTEIRSLDTQLRANARAIAHLVGATGSTLTETVGVGPIMAGRLISRTGRASRFPSSSAFANYAGAAPIEIASAERSRHRLSRHGDRQLNSALHTIAITQIRMPSSRGHRYYKTKLEEGKTPREAARCLKRRLADHIWRTMINDERRGTGPGGHLGTTLQSSVADPTPTTSSSDKSLPGPATHDATTGDTAA

SEQ ID NO: 44140 - protein, 417 aa, unidentified
MEVLYPRCAGLDVHKKTVVACVRIQQGAAIEHEVRTFETTTSGLLDLSAWLSEKGCTLAAMEATGVYWKPVWHILADGEFELLLANAAHVKNVPGRKTDVNDATWLSELAAHGLIRGSFVPDRPTQELRSLLRTRKQLVRERSSHIQRLQKTLEDGNIKLDSVISDILGVSGRAMVEAMIAGQTDPVVLARLADRRIRATPEELREALRGRLTAHHRFLLQLHLEQIDALDRAIARIDEEVKTDLDSFREATQIVKTVPGFDDLSAQSVLSEIGVDMSRFPSDAHLLSWACICPRNDESAGKRRSTRMRKGSRWLKATLFSCAWAAARTKGSYFQAQFHRIKARRGAKKAIGAVAASLLRTIYHMLKDGTLYQDLGADHFEKRHKTASTRRLVQRLQNLGFAVQLTPAPHDPRLVSL

SEQ ID NO: 44141 - protein, 342 aa, unidentified
MNAVRKFYVGVDVHERESQVAVYESDGTLLEERRIGTERLPKFISSLPGEKHVGLESVGFIYPIYDALAGESCDVAVANPNNILLIARTRIKYDKVDARVLGELLRTNFFPRSHIPSEAIREKRLLTRERVRYGVKRAELKNSIKWLLKRRGIHVNKPFSIVGREQLRSLGLPEVTYRLKELELTEKIVEELDLRIKHVVSRDPAAGLLDTIPGVGAYTALFLSSALDDVDRFPGSKHACAYVGLVPSLHQSGNVSHSGHITRQGNKWLRRNLVECARWSVRKDPYMKAFYERVKGRKGRKRALVAVARKIVSYAFWMLKRNLTYEELAPWKTDWGGSPDLE

SEQ ID NO: 44142 - protein, 314 aa, unidentified
MSAPSYFVGIDVAKATLDVAVRPTGETWQLPNDPAALPALVARLQALRPTLVVLEATGGYEHLSVAALAAAGLPVVVANPRQVRDFGRAMGQLAKTDRIDAGLLALFAERVQPAPRPLPDAAAQALDAGLTRRRQVLEMLQAERNRLGFARAPQIRRGIQQHIRWLERQLADVDHDLAAAIQASPVWRATEDLLRSVPGIGPVVSRTLIGELPELGHLTRKQIAALVGVAPHARDSGTLRGKRMIWGGRAPVRAVLYMGALVAARHNPVIRAFFLRLRAAGKPAKLALTACMRKLWVILNAMVHAGTPWHGATA

SEQ ID NO: 44143 - protein, 409 aa, unidentified
MERLIERVCGLDVHKQTVAACVRVPASKGAREQHVRTFGTTVAELLALRDWLEAHEVTHVAMESTGVYWKPIYYVLEERFTCLLVNAAHVKQVPGRKTDVQDCVWIAQLLEHGLLRGSFVPPAPIRELRDLTRYRKVLIQDRTREANRLHKLLEDAGIKLASVATDILGVSGRAMLEALVRGTTDPEVLAELARGKLRAKLPALRLALRGRFRPHHAFLVSQLLAHLDYVDETITTLSERIEEVIGPFADELARLDTIHGVARRTAEVLIAELGVDMSQFPSDRHLASWAGLCPGNNESAGKHKSGKTRRGNRWLRAALTEAALAAIRTSNSAFTARYRRIMRHRGHKKAVLAVAHAMLVTAYHLLARQTTYQELGADYFDRRHGERVTRRAVQLLERQGYRVTLERAA

SEQ ID NO: 44144 - protein, 430 aa, unidentified
MKNRTNQRLDEITTGILIVGIDVAKSEHWARFVDYRGVEVGKALMFRNNRQGFELIVIRLEEISKSKLHRHPFDQVIIGMEPTGHYWKALANYLMNAGYKVVGVNPYHTKKSKELDDNSQTKSDKKDAITIARLVKDGRFFEPYLPQEEYGELRVLTNARVSILKRNSSVKNTITAILDEYFPEIWTVFKYALKGKASRQVLRSCPFPMYILHMGEEGVLKEIQKAVKKTVGRKKVLQLLSAAETSIGVDYGLKAAKIRLNGLIDELDTIEAKLNEIEQAMKEMIYETSYAEQLLGIKGIGVVTAASFLGEVGDPLRFQNARQIANYAGYNLVEDSSGKSKSGTCISKRGRKQLRSVLYQMAFTMVGSNAEMNSFYRYLVTRNNNPLKKKQALVVISKKIISVIYSLLKKNDVYKPELVLGSVRKEMMAA

SEQ ID NO: 44145 - protein, 348 aa, unidentified
MTLVGCDLHSRKQQVAALDTATGEVLEQELVHEGDAVERFYRALRPPVTIGIEATGYTQWFHALMHRLGHTVLVGEAAKIRAMVVRKTKTDRRDARHLLDLLRHDRLPTVWIPDPATRDLRALITHRVRLVRMRTMVKNGLQAIALNQRLTLRSGLWTQRGLAQLQALSLPTYATRRRDDSLELLAWLTTRIDDLDDRIAASADADPRARLLLTHPGVGPLTALTTVLVLGPIARFPDSKHVVSYIGLAPAINASADKHHLGKITKQGSALLRWVLSQAAPLAARADDDLRRRYFAILHRRGRPKAKVALARKLLVRLYVMLRDRVDYDEFCRRGRARHQSRRATTVM

SEQ ID NO: 44146 - protein, 459 aa, unidentified
MRKKVQKHKRRKQKISFDQAWPLINPNAAGVDLGSREHWVAVPEGRQTQSVRRFDTFTSDLEELAGWLKQCAVTSVAMEATGVYWIPLFQLLERRGFEVLLVNARQIKNVSGRKTDVLDCQWIQRLHTYGLLGASFRPADPYCVVRSYLRYREELVGARSTQTQHMQKALQQMNVQLTQVLSDVSGQSGLAIIQAILQGERHPLKLAGMVDRRVKSTQHQIAKALIGDYRAEHLFQLKTAFELYHTYEAKISDCDDQLVRELGNLPDRVDLKIKPLPAKSHPKAIDENLRTGLYLKLGVDLTAIEGIGALVALTTLSEVGPDLSRFKTEKHFTSWLGLCPDNRISGGKVLSCRTRRVVNRLSDALRLAVTTLERSQTALGAYYRRMKAKLGGAEGVTATAHKLARILYRMLTHGEQYVRQGMEEYEKKHQARKLKALQKAAESIGLQLVEKQNLAQAVS

SEQ ID NO: 44147 - protein, 412 aa, unidentified
MEVMYPRCAGLDVHKETVVACVRIVEGGEVSRLVRTFATTTASLIELGEWLEANSCTQVGMEATGVYWKPVWQVLSDGSFTLVLANAAQVKNVPGRKTDVNDATWLAELLAHGLVRASFVPEAPIQELRGLLRTRKQLVREKASHVQRLQKTLEEANIKLESVLSDVMGRSGRAMIEALIEGESDPAKLAALAHCKVRASTASLREALRGRVKRHHRFLLRLHLQQIDALDAAVADIDRELEASLACFRDAVERLITIPGVSALSAQVIVSEIGTDMSRFATDAHLRGWAGLCPRNDESAGKRRSTRLRRGAPWLKAMLVQCAWASTRKKGSYLQAQFHRLRARRGPKKAICAVAASILTAVYHMLKDGTFYQDLGAAHFQRSRPDAQARRLVKRLADLGFSAELKPLAATA

SEQ ID NO: 44148 - protein, 349 aa, unidentified
MKKLSKRTTPVGETVGIDLGDQYSRYAIVDQDGEVVEEGRFRNQASSIAKHFAGPRRRIALEAGAQSAWISRELAALGQEVIVANARQLKWITASDTKNDPNDARKLALLARADARLLQPVEHRTAAQQAELGVIRARDAMVRARTLLINCARGIAKGFGLRLPASITSTFGARALAGLSEALRPALGALLEQIDALSQSVAGYDREVDRVASAHPETERLSSIPGVGTLTAVTFSLTLGRPERFAHSRDVAGFLGLRPKQRQSGARDPELGISKSGDPYLRKLLVQCAHHILGPFGRDSALRQWGLTKGEGGKRATLRAIVAVARKLSVLLHRLWVSGEFFKPFPKMK

SEQ ID NO: 44149 - protein, 344 aa, unidentified
MDEVSTIGLDIAKSVFQVHGVDAAGAVVIRKRVSRAKVLEYFGELPPCLVGIEACPSAHHWGRELQGLGHTVRLIPPSYVKAYLKRGKNDANDAAAICEAVTRPSMRFVPIKTKEQQAALMLHRTRQLLVRQRTMLSNALRGHLAELGIVSAKGRNGTAELLRIIADGADSRVSPAVCGILKVLARQYGVIGTEIASVDKSIMALHRGCEASRRLAEIPGIGPIGATALVAEIGDWKAFSSGRSVAAWIGLVPKQHTTGGKDRLGSITKQGNRYLRWLLVVGAMAVIRYARRHGTQKRPWLGRLIERRPTKVAAVALANKIARMAWAIMVRDERYKEPKLLLAA

SEQ ID NO: 44150 - protein, 324 aa, unidentified
MNFHYIGIDTAKEKLDVDVLRPDGRHRTKKFANTTKGHDELVSWLKGHKIDHAHICIEATGTYMEPVAECLYDAGYIVSVINPALGKAFAQSEGLRNKTDTVDARMLAEFCRQKRPAAWEAPHPLERALRALVVRHQALTDMHTQELNRTETAREVQRPSIDAHLLWLEAELKRLEKQIKDLTDDDPDMKHRRKLLESIPGIGEKTSAVLLAYIGLKDRFAHARQFAAFAGLTPRRYESGSSVRGASRMSKAGHVSLRRALYMPAMVATSKTEWGRAFRDRLAANGKKGKVILGAMMRKLAQVAYGVLKSGVPFDASRHNPVAA

SEQ ID NO: 44151 - protein, 445 aa, unidentified
MSESLISAASEPEWAAFAAIDWADQKNFWRLVPAGSQRYEQGELENTPEAVEAWAAALQQRFGGRAVAVCLEQSRGPLVYMLTKYPHLVLFPVHPTTAARYRETFCPSGAKDDPSDTASLLDLLIRHRERLRPLQPDTVETRLLHFLVEERRRTVDEKTRQSNRLTDCLKMYFPQILQWFDDVTTPLVGDLLERWPGLEQLQRAHPGTLRRFFHEHNCRSQELLEERIAAISQAIPATRDQAVLEAGMLMSRGLVTLLAALRGNIAAFDKRIAELVRAHPDGALFASLPGAGPVLVPRLIAAFGTRRDRYQNADEMERYSGIAPVKKASGKTELVHFRYACPKFVRQTFHEFASHSIGHSEWARAYYEHLRNDEKKDHHPAVRALAFKWIRIIFRCWKDGKPYDEQVYQKSLRRRGSLLGAAFASATGVGWKTVAGFQKLSENNA

SEQ ID NO: 44152 - protein, 371 aa, unidentified
MDESSKTLYVGLDVHKDSIAVAYAPEDRGAEVVSLGSIGTRQCDVDKLIRKLQSKGATLVFVYEAGPCGYWLYRYLTRKGFGCHVVAPSLIPRKAGDRVKTDRRDAVMLARLMRSGDLSSIYVPGIEDEAIRDLSRGREDAMRDLKATKYRLKAFLLRQDIRYEGRATWNAAHLRWLSEVVCPTRAQQIVFQEYVRAVTEQHERLQRLENELHEEVKGWRLYPVVTAIQALRGVELTGAIILMAELGDLTRFDTPRQLMSYLGLTPSEYSSGERRRQGGITKAGNTHARRALVEGAWAYRYPAKVSRHLQLRLEKLPAEVQAIGWKAQVRLCKRYRQLIARGKHANQVVVAIAREMAAFAWAIARTVPLAP

SEQ ID NO: 44153 - protein, 408 aa, unidentified
MKTLHKRCAGVDVHKTEVVVCLRLVTHGKVEREVRRFPTTTHGLLELAEWLESARCTHVAMEATGVYWKPVWHILDGGFALILANAAHVKTVPGRKSDVNDASWLADLLAHGLIRPSFVPPAAIQELRDLTRTRKQLTRQIAQHSQRIQAVLEEANVKLCSVITDILGASGRRMLKAMIAGEIHAHKLAALGSERLGCAPETLIDALTGHMREHHRFLLAQHLQTIEQLEKTIAAFDTRIEEKLMPFRDTVERLKEVPGLGSTATEVILAEIGLDMSLFPSAGHLLSWAGFVPRLDESAGKSRSTRIRKGAPWLKPVLVQAAWGATRKKNSYFQAQFLRLKARHGAKKAAIAVAASILTTVYHMLRDGTCYQDLGPEYFTRRNPAKAAARLANRIRNLGYHVEIRPAA

SEQ ID NO: 44154 - protein, 337 aa, unidentified
MYYTGIDLHRKTSFLTTVDASGQIVKKANLANQEPRILEYFFTLDDDTQVVIESTANWYWLYDLLIEHQIPVVISNPVKTKAIASARIKNDKLDSHMLAQLLRADLVATVYVSSQQTRQLKELLRHRSKLVRDTVRMKNRIHNIMAKNNLTVPTSDLFGKQGLAFLSQAPLPMYQRHQVDTYLKLYHQLKEHTEALTQQVKQRAKDEPMAQLLMTIPGVGAITAMFMVAEIEDISRFKSYRHLSSYAGLVPRLDASADKQRIGRITKQGSPYLRTALIEAAQAAARTKSRLNVFFRRRIVRSGYQKAIVATAHKIVQYAFYILRDQRAYRESIDALA

SEQ ID NO: 44155 - protein, 364 aa, unidentified
MYDSTTTVAVGLDVHARSIRLAAVRADELLEERTLPYDEEAVERAVRRWPGVRCCYEAGPTGFGLQRFLVERGIDCQVVAPGLVPQRPGDRVKTDSRDARKLARLLAGGLLEPIHVPTPELEAARDLVRAREDARLDRMRDRHRLSKFCLRHGRRLPTSSWTVARRKWLAEQRFEFAARQQTFDTYVHAVDLVDARIQQLERAIRETAEQEPWRALVARLRCLRGIDTLTALAIVTEIGDFARFKTAEELMAFVGLVPSERSSGEQRRQGSITKVGNAHVRRLLVESAWHARRRPTVGYELARRQRGQDAVVIERAWRCQQRLHSRWQRMAGRGKPQQKIVVACARELAGFVWAIATEQPLRTS

SEQ ID NO: 44156 - protein, 359 aa, unidentified
MKTIVSNKQNWFNKINLTKDDEVYVGIDVHKKSYAVAVWLNNAPAIDFVMPADNQKVLTMLDKLRIALKQVVYEAGPTGYSLARLLQDAKLPIRVIAPSKTPRQSARESKTDKLDCRKLAQYAAKGLLRPIAIPTKQQEADRQLFRLREQLVEKQRRLKLQIKSFLLQHGIPDPAGLKSWSVLAVEKLRTIALPDKLRYCLDIFLDELAFLKTQIKKTEQHLKETFSAPQYAKKIELLRTHPGVGPVVAGQFCTEIFNPKRFKNATEIGKYVGLSPMVTQSGQSRKDGPVLKTGRPQLRSNLIEASWVWIRNDPHAYKTYIRLLHNTGEKNKAIVAMARRLAIHLWKMLSDNKPFIQAA

SEQ ID NO: 44157 - protein, 355 aa, unidentified
MNDAKYIGLDVHQATISVVVLDSTGHLVMESIIETKAASILQLLHGLSGSLQVTFEEGTCAAWLHDLLQPHVRKVVVCDPRKNALLKAGNKNDRIDARKLADLLRTGLLSPVYHGENGVRTLKELARSYLTLTRDTTRVMNRLKALYRSWAIPCAGQRVYAPRDRSEWLAKITEAGVRRRAEIYYQQLDALRSLREHVRRDLLAEGRKHSAMKLLRQIPSIGPIRAVLLIALMQTPHRFRTKRQLWAYCGLALKTSTSGEYRIVEGQLKRSRKFLAIRGLNANHNHDLKNIFKGAATRAAAVPGPFQEFHAALVARGMKPTMAHLTLARKIAAITLIVWKKGVGFDAEHLKQQAA
